United States Patent Application Publication US 2005/0228172 A9 - sequence listing, part 48

SEQ ID NO: 191129 - DNA, 530 bp, Homo sapiens
gactggctatcagtgaataggattgagagacatcagctcctgcgcactcttcctctgttgtcctgtgattgaggggattgtttcrtgttttgctgagagtaattctttctttgaacatatctttacctccccaaatcaaacaagttatacatatgataacacttgtatttaaacagagcaatgttataatattccagttaaaaatcagcttagtacagttcccatgacctatctcttaggtcccacgtctattaggaaacactgacttttaaaatttaaaattttagaatttttaaataaactttattttccaaaataagggatctcatgagtttttcacgaaagtcaatgggggaaactcttgagtaggtctttttcagtctcttggagttttctagacaaacaggatatgttctcaatacttctattcaacagtatttcattatggtagttttcagcaactttagtgggtatgatttatgaatttgagtggtgcttgagaaatatcatctttagatataggggtgtgg

SEQ ID NO: 191130 - DNA, 487 bp, Homo sapiens
cctcctacatagaccttccactcccttttgggtccccacattctggagcgccatggctcttttgcacatcttacccagcacggacacttactgcgctggctcctcctaaagattttagaactgaatggtgtgggaggggaagtgaagaggtacaggaagaggaagtggtcacaatatgtatcatatcaagaataaagaaggacacacaaaaataaagaaggagaaataaagaaagagmacgtaatttttattttaaaaggatgcacagaagaaagtgttcagagagataaataaaattttaatattgattatctctgagtggtggatggatgatgtgtggatctggttttcttcttcacacttttatgtaatttctgctaatatattactttcaagttataatgaaacagcagtaaatgtatttttatttgggccaaatcggttaggaaacacactaaccaataaaagataaaatcaaaggaaaagc

SEQ ID NO: 191131 - DNA, 487 bp, Homo sapiens
cctcctacatagaccttccactcccttttgggtccccacattctggagcgccatggctcttttgcacatcttacccagcacggacacttactgcgctggctcctcctaaagattttagaactgaatggtgtgggaggggaagtgaagaggtacaggaagaggaagtggtcacaatatgtatcatatcaagaataaagaaggacacacaaaaataaagaaggagaaataaagaaagagaamgtaatttttattttaaaaggatgcacagaagaaagtgttcagagagataaataaaattttaatattgattatctctgagtggtggatggatgatgtgtggatctggttttcttcttcacacttttatgtaatttctgctaatatattactttcaagttataatgaaacagcagtaaatgtatttttatttgggccaaatcggttaggaaacacactaaccaataaaagataaaatcaaaggaaaagc

SEQ ID NO: 191132 - DNA, 600 bp, Homo sapiens
ttttgagttctcactccataattataaataattttttgagtcacatgaaatcaaagaaaacattttctaaatcttgttacagtaacagtcacattttgtttagaatactcttttagtgatatttttatacaattgataacctgcttaattttaactgctgtagtattatgctatttattttgataatattgtaatgttggtggagatataaacaagtcatggaatctgaaaatatctggtttgtgtactttgttttcagcccttgtatagattaaaccaatcttttttatttttttgaaaaaatctgcagacattgccatgtacttgagttcaagatcctgtacatagacctgttttttaaaaatttaaaaacaaaatatgtgtaggaatttgtttagcatgtattgtatttcattatcaattttagagatatttttacatttgggcaaaaaattagcagtgtaataataataaggcaagggtaaatatttatatacaaatrtaatggttcattatttataaatccaatggcattacttaaaaaccagatgtacataatatttcatagttgtgcatattttttgattaatccctgcaaat

SEQ ID NO: 191133 - DNA, 363 bp, Homo sapiens
catcttcctggatctggccacactgctgctgaatcaatgtggggaactgtggacctgttggtgcaatgaatttgagaagcttctgtgctgcagagctccaaggctggtcctggtagactggtgctaccccaaggatgtcccatcttgaatgcacgtatattctggagcaagacttctaaggaagctacagaaaacagtgagcctgagagaatcacagrgtcaatgaacaaatgtttaaacagtcacttaatggctactaaactgatagaaactaacaaccagttgtctacagtgtttcctaatttgggctgatcagattcatctgtgaaacttaaaaaatacaaaaatattaaaggaaggaat

SEQ ID NO: 191134 - DNA, 564 bp, Homo sapiens
agcaccccacattaaggacattagccattttctgatacatgaaatgcaaacatcgtctccagttcttgtttgatacattggctttgtgtgtatcttttatttctcttctccaaagaagttttacagtttaatgcagtaaattcatcactatgcatttgtggcctctggattttatgatatccttaggttatgaaaatattcccccattttcttctagtgtttcaatggcatcatttttttttacatttaagttattgatctttatggaatatattttagggtaaagtgtgagcttatttttatctaacaaagcaaacttttacatttatttttacttatttttcattttaaaataatttttaattgactatttatttatttatttatttatttattttagagataggttctctctctgctgcccmgggtggagtacaatggtgtgatcatagctcgctgcagcctcaaactcctgtgcttagatgatcctcctgcctcagcttccttagtagctgggagtgtaggtgcataccaacgaattcaactaatttttttattttttgg

SEQ ID NO: 191135 - DNA, 630 bp, Homo sapiens
gatttttttcattccaaataagtattaggttcgtagctaattttgtattcttttacttatagaaagcctcaggattataagcttcaaaccctacaaatcctggatccacccttgattctcagagttaaatacaaagcctttaaaattggcctgtcaagcccccatgatgacggcttgctactctctgacccatctccaacatcccacccttactcactccatgcaagccactgtagccacttgctgatcctagatcatacccagtaccttcctgccacaggacttttgcactggctgtttcctctgtataatacgctttccccagatatcaccatgacttttctctaactttcttcaggtctctgctaacatattaccataacagagcagcattccctgattacctataaaaaataacactgtcatccagctcctgccactttctatcaccttacattgtcttatgttccttaacaattaacatcatgtaatactttagttatttattaccaactttcccaagtagaatgtaagctttgaaaggaaggagactcatgttcgctgctgtgtccccatccccagggcctagaacagttcctggctcatagytagaactttaaattcgttact

SEQ ID NO: 191136 - DNA, 557 bp, Homo sapiens
aattttttacttaattgctaaatctagtgggcccttttagtttccttttctgttaagatagaggcatgcgttgccttttttattaaaattttcatattgccaggcttgattcattatttgcatgtgtatctctttcggtagaatgggtgtcccaggagggctgagatgttatttaatttgaaaccttaagatgaacacaatgcctggcctatgaaggttcttaataaatgtttcttaaacaggtttttcccaattggactgcaatgatttttagaaatgcgcaagtaccagggtatttatacaaacttgtattcttgttggtttgtttaaatcatgtggcctatctttccacatggtttgggtttgaggggctcgtttcctgtttgttytaaaaggtttcttgctttgaaaccattttgctctgaaacacccctgcgagtttagtccgctctctcggaggaggtctggggcctgcagcgggcctcccagtcaggtctggtgatgaagcacgacatcgcattgttggcttagcgcccgggtggttgcctgtttgtggg

SEQ ID NO: 191137 - DNA, 557 bp, Homo sapiens
aattttttacttaattgctaaatctagtgggcccttttagtttccttttctgttaagatagaggcatgcgttgccttttttattaaaattttcatattgccaggcttgattcattatttgcatgtgtatctctttcggtagaatgggtgtcccaggagggctgagatgttatttaatttgaaaccttaagatgaacacaatgcctggcctatgaaggttcttaataaatgtttcttaaacaggtttttcccaattggactgcaatgatttttagaaatgcgcaagtaccagggtatttatacaaacttgtattcttgttggtttgtttaaatcatgtggcctatctttccacatggtttgggtttgaggggctcgtttcctgtttgttttaaaaggtttcttgctttgaaaccattttgctctgaaacacccctgcgagtttagtccgctctctcggaggaggtctggggcctgcagcgggcctcccagtcaggtctggtgatgaagcacgacatygcattgttggcttagcgcccgggtggttgcctgtttgtggg

SEQ ID NO: 191138 - DNA, 612 bp, Homo sapiens
aacaaacgtcattggccacagggacctgytgcaggagctgatgttaactcattggtgaaaacagccattgctaggcaactgttcttgtgagggtggctgatctgaaaagttgcagtcttgaggaactttttgcaatgagccagatgagcagagtgtgtaggaacttcttgggcagaaacaactgcttcactcgtcttatttatttatttatttatttttgagactgggtcttgctctgttgcccaggctggagtgcaatgggcaattataattcttgggctcaggcaatcctcctgcctcagcctcccaactagcatgaactacagacatgcgtcacaacaccaggctaatttttaaattttttttgtagagatggactctccttacgttgcccagtctggtgcctcacttatctttgtatcctcgctgctcaggtctatgtcatagaactagtgatcaataatgagccaatattaggcagtactgtttagtctgttgattcttaaagtgtgatccctggatcagcagcatcagcatcacctggttgaacttgttagcgctataaattatgtcccatccagcttgactgaatcagaaactctggaggggaga

SEQ ID NO: 191139 - DNA, 612 bp, Homo sapiens
aacaaacgtcattggccacagggacctgctgcaggagctgatgttaactcattggtgaaaacagccattgctaggcaactgttcttgtgagggtggctgatctgaaaagttgcagtcttgaggaactttttgcaatgagccagatgagcagagtgtgtaggaacttcttgggcagaaacaactgcttcactcrtcttatttatttatttatttatttttgagactgggtcttgctctgttgcccaggctggagtgcaatgggcaattataattcttgggctcaggcaatcctcctgcctcagcctcccaactagcatgaactacagacatgcgtcacaacaccaggctaatttttaaattttttttgtagagatggactctccttacgttgcccagtctggtgcctcacttatctttgtatcctcgctgctcaggtctatgtcatagaactagtgatcaataatgagccaatattaggcagtactgtttagtctgttgattcttaaagtgtgatccctggatcagcagcatcagcatcacctggttgaacttgttagcgctataaattatgtcccatccagcttgactgaatcagaaactctggaggggaga

SEQ ID NO: 191140 - DNA, 482 bp, Homo sapiens
gtaaatatcttcaaagtcctaaggggaaaatgactgacaaccttcaaatctgatcgctaggtaaatggttattcaagggtgagggtaaactaaagacattttctggcaggcattccacccacaawccctttttcagagaacaaggacaccataaagacaagtatacccagagggacaggagagatgtaaaaaacacggtgagcacagaagttaaaagatgttggtaaatttaaaggaacaattcgactattaaaaataatagcatcttgtgtttaaaaataagaaataaaagctagataggaacaactttatggaggtgggaaatgttcaagtgttccagggtcattgtcttgtctgttaagaggggggataatattaagtgatttagactctgttagaaaaacatatagctaagtacatatgttcagggaaaccactagaagaacaagaatataatcgatagcttctacaccataaaaaaa

SEQ ID NO: 191141 - DNA, 482 bp, Homo sapiens
gtaaatatcttcaaagtcctaaggggaaaatgactgacaaccttcaaatctgatcgctaggtaaatggttattcaagggtgagggtaaactaaagacattttctggcaggcattccacccacaatccctttttcagagarcaaggacaccataaagacaagtatacccagagggacaggagagatgtaaaaaacacggtgagcacagaagttaaaagatgttggtaaatttaaaggaacaattcgactattaaaaataatagcatcttgtgtttaaaaataagaaataaaagctagataggaacaactttatggaggtgggaaatgttcaagtgttccagggtcattgtcttgtctgttaagaggggggataatattaagtgatttagactctgttagaaaaacatatagctaagtacatatgttcagggaaaccactagaagaacaagaatataatcgatagcttctacaccataaaaaaa

SEQ ID NO: 191142 - DNA, 570 bp, Homo sapiens
attgctgtaaccccagcatataaaactgtgccaggcaagaaaaaatgaaataccaaggaatacatctaaccaagaagatgaatttctataccaggagaactacaaaatgctgatgaaagaaatgagaggtgatacaaataagtggagaaacattccacgctcatggattggaggaatgaatgccattaaaatggccgtactacccaaagaaatttatagattaaacactaatcctatcaaattcccaatgtcatttttcacagaagttgaaaaaactattcaaaaattcatatggaaacaggctgggcgcagtggctcacacctataatcccagcccattgggaggttgaggtgggtggatcacttgaggtcaggagtttgagacaagcctggccaacatggggaaaccctgtctctactaaaaatacaaaaattagccaggtctcrtggagggtgcctgtaatcccagctacttgggaggctgaggcaggagaattgcttgaacccgggaggcagaggttgcaatgagctgagatggcaccactgcactccagcctgggcaacagagtg

SEQ ID NO: 191143 - DNA, 570 bp, Homo sapiens
attgctgtaaccccagcatataaaactgtgccaggcaagaaaaaatgaaataccaaggaatacatctaaccaagaagatgaatttctataccaggagaactacaaaatgctgatgaaagaaatgagaggtgatacaaataagtggagaaacattccacgctcatggattggaggaatgaatgccattaaaatggccgtactacccaaagaaatttatagattaaacactaatcctatcaaattcccaatgtcatttttcacagaagttgaaaaaactattcaaaaattcatatggaaacaggctgggcgcagtggctcacacctataatcccagcccattgggaggttgaggtgggtggatcacttgaggtcaggagtttgagacaagcctggccaacatggggaaaccctgtctctactaaaaatacaaaaattagccaggtctcgtggagggtgcctgtaatccyagctacttgggaggctgaggcaggagaattgcttgaacccgggaggcagaggttgcaatgagctgagatggcaccactgcactccagcctgggcaacagagtg

SEQ ID NO: 191144 - DNA, 583 bp, Homo sapiens
gtgggaacaaacctgggatagtgacttgcagagacccttaatccttgtgtccattcaaaatgaaagaaaacagctctggggaaaggctggtgatttttcctggcaggctggaacgaggtgcgcatgcacaggaagcgggctacctgaactaacttagcctatcctctaacaaaaagtcgtaattgctatacagattttggattcaaacaagctacttaagccaagctatttgctccagaacttcaaacacttttgtaatccctcatgttaagtaggcatgtgttcccacaaatatttttgtgagttgtgttgataactgttcataacttcacagcccataagtttcaccaggcttttgggctccactatattgatatacctgtttcttcaaaacttgaatatccaaggcctgcatgcaccaatccaacgtagcctcagcattcaataaatagaatcttttgggcaattaggttctcctgtgactcatacttccttttcttcctgattttaaagtgtaagtcaatagttataacattttcagcctgcaatayattttaattaggcttatttcataaagaagtaa

SEQ ID NO: 191145 - DNA, 658 bp, Homo sapiens
catcttggcatttctgtgaaatcacagaaataattcattgaatcacagaactgaaagagatgatctaatcacttttatttttaagatgatgagaatgccaccaggggagtttcactgacctgtccatgctcgcacagatctggaaacacagagccagaactagagtccggatctccttgtcctactctttcgtctttctcacatgggcttgtaaaagcaaatcgttctgtagatacactcttttcgcctcagttccctggctaggtttcctttaaagcttgcttcttcttcgcctggtgtgacgtataacgggcatacagatgagctgaggctgattataaagactcatctgtagtaactgttaaaaatggagattcccaggcctttccctgggagattctggaataaggctaaggaattgtttaaccagtttcctgcatgtgttttatgataaagccagttgagggaataatgtagtagagggacgctggaaaaaaaaaaaaaaaaaaaagtatgtttgacaggcagsgtgtcccaataagaatagaacaagggcatggagaggaccaggaattttgccttctagctgctttttcagtgggttaaccactagaccacacttcctctctaggagaggcaagggattaaaatcaaaggt

SEQ ID NO: 191146 - DNA, 395 bp, Homo sapiens
gaattctaatctccagagttccaaagcactaagcacaaaatcaaacaagacatagacctggctgatctctgcgttgaataaatatttctccaaaaggcactgtgcaagtcagatggccttttttctacatagttatcatgacagyagatgttaaaacctccgaagaattagaacgtcagagctggaaagggccttagagtttggcatagggcaaggaaagccccaaagcagtggagaagggagtaaagttactcattgctagttagtggtggagcctgagtctcctgaaccttctcagtctagcagaccaaaaaagagtctttttattgtttatatgtatatatttgttttttcccccaagaaagagcactaaaggatattttataagttctcat

SEQ ID NO: 191147 - DNA, 580 bp, Homo sapiens
gctcccttttttcttgctaacagaacttaagctttgtccaggatgacaatgtgccaagctataagggatgaatcatgactggtctaagctactcatgtcatgtctcttgtattccctttgctrgaaacacacactcccagacccctctgcagctacaggtagtcatgtgaccttgctctggccagcagacataagggggaactcagttcagaagaaagatcccacctacttctgactcttccttcctgttaagaatgcagctgtatgagtagccttgtagttatctgtgaccataaaacaaccagcattgaaatgggaagggccctcattgaagcagaatggagagaatccggggccttgacgccactgatgagctaaataaccctgttaacattgacttcttaatcttcttttgtgttttaagccactacagcttggattcctgtgcttgcagtctattggatcctaaaaatcctgataaactgtcctattgatttatttctgggcaattttaggaaaggctttttattcatacaatgccttgacattgatatttcattactttgcagtaaatactgaa

SEQ ID NO: 191148 - DNA, 620 bp, Homo sapiens
ggaaacaagccagaatttactgaatatttgctgtgtgttagtcttttatgtttggcattttccttatctcatttactctgcaaagaaactctgaaaggtcagtaccattttccccartctagcagtgagtaaactgaggctgagaagttcaagggtacaacactaaaagtcaacagtgtagttccaaagccaatactctttctactatacacacctgattctgtaaaaatataagggaaaaatatggagtgtctggtatgaaactgtaaaattagatttcagagtattttatttatgttacaaatacttttgttggtttcctgttatttcctagattgtaaatgcatccaggaaagcacctgttttttgtgtgtgtatttgttccagaaatacacctccagaactcaccttcccaaaaagaaactctacctattaaacaataactccccgtgtctctctcctctcagcccttggcaaccaccgttctgtttgctatggtatgactactttaggtacctcatataagtgaaatcatatagtacttgtccttttgtatctggcttattttaccttgcacaatgtggtaagtgatcaaggttcatttccattgtagcgtatgt

SEQ ID NO: 191149 - DNA, 620 bp, Homo sapiens
ggaaacaagccagaatttactgaatatttgctgtgtgttagtcttttatgtttggcattttccttatctcatttactctgcaaagaaactctgaaaggtcagtaccattttccccagtctagcagtgagtaaactgaggctgagaagttcaagggtacaacactaaaagtcaacagtgtagttccaaagccaatactctttctactatacacacctgattctgtaaaaatataagggaaaaatatggagtgtctggtatgaaactgtaaaattagatttcagagtattttatttatgttacaaatacttttgttggtttcctgttatttcctagattgtaaatgcatccaggaaagcacctgttttttgtgtgtgtatttgttcmagaaatacacctccagaactcaccttcccaaaaagaaactctacctattaaacaataactccccgtgtctctctcctctcagcccttggcaaccaccgttctgtttgctatggtatgactactttaggtacctcatataagtgaaatcatatagtacttgtccttttgtatctggcttattttaccttgcacaatgtggtaagtgatcaaggttcatttccattgtagcgtatgt

SEQ ID NO: 191150 - DNA, 620 bp, Homo sapiens
ggaaacaagccagaatttactgaatatttgctgtgtgttagtcttttatgtttggcattttccttatctcatttactctgcaaagaaactctgaaaggtcagtaccattttccccagtctagcagtgagtaaactgaggctgagaagttcaagggtacaacactaaaagtcaacagtgtagttccaaagccaatactctttctactatacacacctgattctgtaaaaatataagggaaaaatatggagtgtctggtatgaaactgtaaaattagatttcagagtattttatttatgttacaaatacttttgttggtttcctgttatttcctagattgtaaatgcatccaggaaagcacctgttttttgtgtgtgtatttgttccagaaatacacctccagaactcaccttcccaaaaagaaactctacctattaaacaataactccccrtgtctctctcctctcagcccttggcaaccaccgttctgtttgctatggtatgactactttaggtacctcatataagtgaaatcatatagtacttgtccttttgtatctggcttattttaccttgcacaatgtggtaagtgatcaaggttcatttccattgtagcgtatgt

SEQ ID NO: 191151 - DNA, 603 bp, Homo sapiens
aaatctgcagtcttcagttctctgaaaagaaaaagaaagctttattccactagtgttcataggaaattattccagggtcgccacgctaattatgatcagaggtcatctagatttgagagccaatcgtatattttttaaacacttagaatcaactgagctccatgtgtgagcatccctcttaattaaactaagcatacactctctttctgtcttattgataaattactctcagggtcttaggataattacctactgcaacactaaatcaaaatmtacaaatgatatgacaattaccatatacaaggatatttgctgtttttaaagataggctttatggatgaatacattgactctatatttatattttaagcttaatatattcatttattaagcttcatttataatgagtttagtattagagatcattcagaaaactgtaagaaacacttatttgtccttttcatttttatgtaatattctaaaaatatttgtttctcatcactgtagagaactgaacaaataatattttttcattgtatccaaatgagcgtaaactctaaaggtgaaaaaatatttcccaatgaagcttattttaattcactt

SEQ ID NO: 191152 - DNA, 426 bp, Homo sapiens
gaattctttgaacaaattttaacttcttactgatgcccttgttaattaataagttaaataaaatcttttacaagcattcattttctatctgtatgacagtcatgagttcaacatstttttggaagaaatatgtcttaacactagggtacaatagctgcttagtaattctcttatacaacctttagtaaaggccacatttggcatttcacaggttttctaacaagactgactttcagtgacataatttcgcaattatccagcctaattcatgtccacaaagatttactgagcctttgttccatgcacgtgtatcagagatcagtaagatccacttgggtcccatatagttcacatgggtacaattacagctctaagcttgatgatgctatgtgttatgttatgtgtaataatagaatcccatgcaaa

SEQ ID NO: 191153 - DNA, 549 bp, Homo sapiens
ctgcagctctggcctgggatgtcccatgtagctcttgtcacctggcaactgaggctatactcatccggagggttgatggaggtgctgggacaactgggcctttcaccgtctatatatagtatcccagcgtttcctctccaggtagcatctctacgtggtttctccaagtgaactctccagcagaatatattgacttctaaatgatgtttctgggctcccaaaaggtaaagctgctagaactctttaagactttgggtagcttttgttgcatggcttcaagttcactgatctcgtcagtgtcttayggcaagaacaggtctgaagcttgggcaacccagatttccctgccatcagattaatttctcataaggtgtgattatcgggctctgtttatctgtcattaaactcattgagtgaactgttcatttcagatctggcatttttcatctctgaaagtcctgcttggttcctgcttacccatttctcttttttattatctttttctttaaattctcagcctgtcgaatagttataaatggtgttttaatt

SEQ ID NO: 191154 - DNA, 594 bp, Homo sapiens
ttcctgttgttctgtgaataaaggtgacatccttacctcttcacaaaagctcygcataatctgctcccacgtccacaccaagcactcattgtgctttctgcttcagccaccctggcttttaaaattcctcaaacacaacctgttaatcatttcacagattatttgcgtgtgcttcttcctctccttagaaagcctcattgctcttctggaatggttaaatccttctcctcctttagatagcatctttgtcatgatttcttgaggagcatctttccttaatccttttgatttggcacaatttccctatttatgtccctgtatgcaggtgatgcagtggtgcactaccaagatgaccccttaactaacagatgagttacttccatctgctgggaatattggctgctaatggctccccagctgcccctcttcaagccttgccctcagccaaacggtgctataccattcaagattataccttactcacagagacaagcccatgtccagcaataggtcagtagaggagcacgggttataaactcttgcttccttctctgaatttggaacatcttcacgagatcatcctagctctagtcc

SEQ ID NO: 191155 - DNA, 594 bp, Homo sapiens
ttcctgttgttctgtgaataaaggtgacatccttacctcttcacaaaagctctgcataatctgctcccacgtccacaccaagcactcattgtgctttctgcttcagccaccctggcttttaaaattcctcaaacacaacctgttaatcatttcacagattatttgcgtgtgcttcttcctctccttagaaagcctcattgctcttctggaatggttaaatccttctcctcctttagayagcatctttgtcatgatttcttgaggagcatctttccttaatccttttgatttggcacaatttccctatttatgtccctgtatgcaggtgatgcagtggtgcactaccaagatgaccccttaactaacagatgagttacttccatctgctgggaatattggctgctaatggctccccagctgcccctcttcaagccttgccctcagccaaacggtgctataccattcaagattataccttactcacagagacaagcccatgtccagcaataggtcagtagaggagcacgggttataaactcttgcttccttctctgaatttggaacatcttcacgagatcatcctagctctagtcc

SEQ ID NO: 191156 - DNA, 513 bp, Homo sapiens
atagtaatccaagcattgaattattatacaacctgatgtttcagagtcaggcggggattttaaattaaaaaaaaaaaagagtaaaagacatgtcatcatggaaaattctcttactttccctgaccatcacmaacatttttctaataacagctgaaataattgacctttccaagacttatcggcacttccaggtgctaatataattgcactgagaaacttacaggtttcttttcatattaaagttagcttgcaggttcatgagaactcagctcatgaagtgtccaccctcatcgctagcaagtattgatttctctgtttcaaagaacagttattaaagtgtggactctcttactataaacttcagatagtttcctttttgtgggattaaaggatagctaaattaaggcttttaaaaaaactttccatttggagaatatattcttgccttctatgtcttgttaattatgaacaaaacgcagtagaataaacacagtaaagcaaaggaaaataaac

SEQ ID NO: 191157 - DNA, 572 bp, Homo sapiens
tggtatgtttgacctggctgatgatcagtgggtcagcttcacaataaccacagtggcttccataactaacacgtggtggccagaggcatctgtgttcagctgctattatccctgttggaggtgtgccatccagagccaaagtcaggcattcccatgctagaaggaaaaaatccaactccttattgttctctctgcattgttcttacttaaaggaagcctgccccagggtttggtaaataccattcaggctatccctatgtctgaaatctctgaaaacatgcagaaggggaagaagagggaaataaaagactcgtatccatgaatggaaataccttgggggaggagcaagaaaccgtgtgtttgctaagtgtgggagaggtcactgtcccaggtagccccatgctktttcctgtcatcttgggattctcgcaagtcctaccctgaccagccagggaactgcgggacctgcctgtgagcagacctgagctgtgcaaagaagcactgttatgtgagcatgttcacaccagcgggtgtgccctttagatggaaatgacctcagagaatccctccca

SEQ ID NO: 191158 - DNA, 598 bp, Homo sapiens
aagaggtaaaactttgacacattttaatatgagtaaaaatatttccttttcagctttacacaagtgcctgaaatctcttctrttttatttgaatatttataatgtgtatatttatcatataacgagtatatttataatatatatttatcataactactgatgtgatttggatctgtgtccccacccaaatctcatattcaattgtaatccccaatgttggagctgggcctggtggagtgtgattggatcatgggggtggtttctcatgagttgtttagcaccatctgcctagtgctgttcttgtgatagtgttctcatgagatctggttgtttgaaagtgtgtagcacctcccaggcatgggaagtgctggctaccctttgccttccaccctgattaggagcttcctgaggcctccccagaagcagaagccgttgtgcttcctgtatagcctgtggaactgtgagccaattaaacctctttttttgtttgtaaattacccaatctcaggtatttctttacagcagtgcaagaatggactaatacaaccccatatcatgttatatggctcactgggaaatgactgaaatgtgggctatt

SEQ ID NO: 191159 - DNA, 489 bp, Homo sapiens
ggtgccttctctcagctcacaggacccccaagggctctagcactgaacctcctgcactgtcgttagaggtttgtctcccccactgaatttcacaaagcctggaagggtgcccccctggattttgttttaatcttcagtacctactatcacatgacttatttaccaatagccaggtgtggtggcgggcgcctatagtcccagctacttgggaggctgaggcaggaaaatggcgtgaacccaggaggcggagcttgtagttagccttgatggcgccactccagcctgtgcaacagagcgagactmcgtctcaaaaaaaaatagaaatgtcaccaaaattttgctctaactggtgtaagggttaattttgtgtgtcagcttggctaggctatggtgcactgttgtttgttcaatcactagtgtagatacggtgctgaaggtattttttagatgtaattaatatttaaatcagtaggttttgagtaaagcaga

SEQ ID NO: 191160 - DNA, 551 bp, Homo sapiens
atttttataatagctgctttaaagtcttttttagaaaatttcaatacctgtgtcatcttggcattgtctttttttaaattacctttttccacataaattccaagtttcctggtgagtgatttcgaattgtatcttcaacatttttaatgttatgttattagatactggctcttgtttatatcctatagacaatactgataattttgttttagcaggcaatccacccaattttgctcaggccacaagttttgactaactttctgtggatttgggctttgatggcaatgcctttgcagtgctatttgaatattccctatgtggtccccatcactagccaatctgggacatgggcagtggtctatcctatagtttagttctcasaatctgtgtatgtcaggttcatgcaagtgcagctcagagtggagcctaggagtttataaacaactttgttatgtagatttcgtgcattccttcctctccacattcatgccattactttatcattttctcgagatcctctttttagtcttctgaacagaaagatggaagtt

SEQ ID NO: 191161 - DNA, 636 bp, Homo sapiens
ctctttactaggtaaggtcacataygcacaggtgatgggaattaggatatagttgtctttggggaggcaggtggaattattcagcctaccatgataccttttttggcctattttgatatcctcttttataaataatgtttgcctttgtccatttaaattaatgaaaataagtttgacctatgtgtttataaaacatttacatttgttaatcatggcttccgtggaaaccagaaatttaatgtcaattttgtctatatagtaacgtaacctatgataatttggtgaaaggaaaaatccaatgacaaaatgaatcacttttaaagtctttatggaatcaaactttaaaacaatggccagcattttctctatggcttcctacttaaaatagcctgaaagggtagccagtagaattgcaggttcctctcattcatcagtgcatgcaatttcttttccccagcagaaataacataagaacttaaagagtaggaatggagtgacctggatctgttgtggtctttcttccaggagaaaaggattaatgattgtttgttgactgaattaatgaatggttaaaaatactggtgtttattttctgcttcaccacattgatttcctgtgtgtcttgctttaaatatt

SEQ ID NO: 191162 - DNA, 636 bp, Homo sapiens
ctctttactaggtaaggtcacatatgcacaggtgatgggaattaggatatagttgtctttggggaggcaggtggaattattcagcctaccatgataccttttttggcctattttgatatcctcttttataaataatgtttgcctttgtccatttaaattaatgaaaataagtttgacctatgtgtttataaaacatttacatttgttaatcatggcttccgtggaaaccagaaatttaatgtcaattttgtctatatagtaacgtaacctatgataatttggtgaaaggaaaaatccaatgacaaaatgaatcacttttaaagtctttatggaatcaaactttaaaacaatggccagcattttctctatggcttcctacttaaaatagcctgaaagggtagccagtagaattgcaggttcctctcattcatcagtgcatgcaayttcttttccccagcagaaataacataagaacttaaagagtaggaatggagtgacctggatctgttgtggtctttcttccaggagaaaaggattaatgattgtttgttgactgaattaatgaatggttaaaaatactggtgtttattttctgcttcaccacattgatttcctgtgtgtcttgctttaaatatt

SEQ ID NO: 191163 - DNA, 581 bp, Homo sapiens
tttaattggctcacagttccacaggctatacaggaagcacaacggcttctgcttctggggaggcctcaggaagctcctaatcagggtggaaggcaaagggtagccagcacttcccatgcctgggaggtgctacacactttcaaacaaccagatctcatgagaacactatcacaagaacagcactaggcagatggtgctaaacaactcatgagaaaccacccccatgatccaatcacactccaccaggcccagctccaacattggggattacaattgaatatgagatttgggtggggacacagatccaaatcacatcagtagttatgataaatatatattataaatatactcgttatatgataaatatacacattataaatattcaaataaaayagaagagatttcaggcacttgtgtaaagctgaaaaggaaatatttttactcatattaaaatgtgtcaaagttttacctcttgccacatcaagtcactaaagtaaatgtctaggaaagaatgacaaatcaaacaattctgttcatcaaataactattttttgttttaatttatactattttcagagaat

SEQ ID NO: 191164 - DNA, 610 bp, Homo sapiens
taacccacaatttgttctgatatctgattgaaaccccaaatcctggacttttgactttgataaagatgacactctagggggagaaatagagaagccattaactggaggacattaaggccatggtaacatctctgcttcatatatgcagcggcagtgcccttgtgaaggagctgggccaagaagaaataattaaaaggattaggttgagaaggaagacaaagaggctaagacatttttcagaggaactgtgagtttctttgcrtggaaaggcatacttacagccaaaatgaaatacactgttaattgacttaaaagaaataatcaaaccttgcagtttagttttaaaggaaaaaggctctataaatttggtgaaattgttttataccaaatcagttttaaataacttttaaatataatctcttcactcccataagaatattcacttactgttttatcttaatgtaaattctatgcaatctggttttatacacacacccccacacacacagagtacagtttgttttttttttaatacagtggtgagtttaaaatagtcatggttttaaaggtaagataaaatatgcaatcacaaaaaaaaatttggttgttt

SEQ ID NO: 191165 - DNA, 357 bp, Homo sapiens
atttggctaataaaacccatgttctatgaaacacctattgtatgaactyaaaaaaaaagcagttttacttttataacaagcagatttctgtaaaccacattgctcattttaaaatgattaatgaaatgaaaccataaatgtcctactatatacttgttgtttctgtgcaggtgggcaacattgtttaggtatatttttaaagtaagggttatactctactattctataccctgtgtccaaatacatcaaagaaattgagtcatgttacaatcaagaaactaataaaaataaaagatgcagtcataggtgctgagggtgactttgtagaagttattttttgaacacagatagtgtgaa

SEQ ID NO: 191166 - DNA, 357 bp, Homo sapiens
atttggctaataaaacccatgttctatgaaacacctattgtatgaacttwaaaaaaaagcagttttacttttataacaagcagatttctgtaaaccacattgctcattttaaaatgattaatgaaatgaaaccataaatgtcctactatatacttgttgtttctgtgcaggtgggcaacattgtttaggtatatttttaaagtaagggttatactctactattctataccctgtgtccaaatacatcaaagaaattgagtcatgttacaatcaagaaactaataaaaataaaagatgcagtcataggtgctgagggtgactttgtagaagttattttttgaacacagatagtgtgaa

SEQ ID NO: 191167 - DNA, 565 bp, Homo sapiens
atcttcttaaacacaaagcacatgcactgaggcttttttttataatataacaaaatccagtgcataattatgttcacttccctaggtataaacagtcataatatttatcgcataattamacaggcaagatttactcctttgggcatctaccagaacatatttaaatgttgtctttgaattgtgctgtatacacaaatgtactttgtatttaagaaaaaaatggcttatccctaatcttctcaacaaaatcaagagaataaaataacgtaatttttcatctttagcttgcatgtggagaaactgaatataacttttaatttagtgggtgcccttgggtcactaatgagtcagaaataaaataaaaaacttaatttccattctgctgatttttaatgccgttatgtccaactcccaaagacttaataataaaacatcaacaaagtcacttgtaggtaataacattcttcaatgcttctgtgtatcttcctctagggataaacaggcatatctacatgtatttagtaataattctaaattgcacaaaagaaatagccctgatatcact

SEQ ID NO: 191168 - DNA, 565 bp, Homo sapiens
atcttcttaaacacaaagcacatgcactgaggcttttttttataatataacaaaatccagtgcataattatgttcacttccctaggtataaacagtcataatatttatcgcataattaaacaggcaagatttactcctttgggcatctaccagaacatatttaaatgttgtctttgaattgtgctrtatacacaaatgtactttgtatttaagaaaaaaatggcttatccctaatcttctcaacaaaatcaagagaataaaataacgtaatttttcatctttagcttgcatgtggagaaactgaatataacttttaatttagtgggtgcccttgggtcactaatgagtcagaaataaaataaaaaacttaatttccattctgctgatttttaatgccgttatgtccaactcccaaagacttaataataaaacatcaacaaagtcacttgtaggtaataacattcttcaatgcttctgtgtatcttcctctagggataaacaggcatatctacatgtatttagtaataattctaaattgcacaaaagaaatagccctgatatcact

SEQ ID NO: 191169 - DNA, 466 bp, Homo sapiens
gatttaatttttcccaaaatgatgtatttctctgcctgatttttaaaaatacttaattatcataatctaagctccttactcagttccattgatctgttgtttttgtttcggtgccaaatgcacactgttttaattactgtgacattgtgagtttccctggtttgatttcactattcttaagctactttcagactactactgasacaatcattttttgatgtaaaatataccagcactttgtcaagttctcaagaaatgcaataggatttcatctgggattgcatccaattttccattaaccagagtctccacattaaccgacatgttatcttaatagtgtgcagttttcctcactggaaaaccactggaatattcctaatggaatatttttgcatttattaaggtatcttttatgtcctttaagaaagtttcaggatgtacttcataaacattttatacaatgtta

SEQ ID NO: 191170 - DNA, 630 bp, Homo sapiens
tgaaattcatttaacttcttttgtttttatataaatcttgaccatttagtttttaaaaatatgttgattagaagaaaagstgaaaaacatcccaacatttcagacttagattaggaaaacggtaactggaaggttaaaaatgttaaggttctgaatcatcaccatcactatgaagaggagacaaatgtttcttcataatgaggcaggagaatggagtctggagatagggaacctaaggccaattcacaatgacttcctagaactaaatcagaaggagaagtccaactttccatgcccaaataacaaaaggatcagaggctgttccctttgcaaccccacccacctttgtgcatagcaggtaaaaatggaaaatgcctctgattagtcccctctggcaaacagtcagactggttgtaggcctagtcttcatttgcatagaggtataactttgtaatttcacttcagcctctgattggtcaccttgtgcaaccaagcagacgggtcaagggtcattccttcaggtacccagagtgtaaaccaggtaatcaatgggaaacctctagagagcatttaaaccccagagaattctgtaaccagggctcttgagccgcttgctcaagcctgttccta

SEQ ID NO: 191171 - DNA, 630 bp, Homo sapiens
tgaaattcatttaacttcttttgtttttatataaatcttgaccatttagtttttaaaaatatgttgattagaagaaaaggtgaaaaacatcccaacatttcagacttagattaggaaaacggtaactggaaggttaaaaatgttaaggttctgaatcatcaccatcactatgaagaggagacaaatgtttcttcataatgaggcaggagaatggagtctggagatagggaacctaaggccaattcacamtgacttcctagaactaaatcagaaggagaagtccaactttccatgcccaaataacaaaaggatcagaggctgttccctttgcaaccccacccacctttgtgcatagcaggtaaaaatggaaaatgcctctgattagtcccctctggcaaacagtcagactggttgtaggcctagtcttcatttgcatagaggtataactttgtaatttcacttcagcctctgattggtcaccttgtgcaaccaagcagacgggtcaagggtcattccttcaggtacccagagtgtaaaccaggtaatcaatgggaaacctctagagagcatttaaaccccagagaattctgtaaccagggctcttgagccgcttgctcaagcctgttccta

SEQ ID NO: 191172 - DNA, 493 bp, Homo sapiens
tgatttgcatttctctaatgattagtgattttgagcatgttttcatatgtctgctggccatatgtatctcctcttttcagaaatgtctgtttatgtcctttggccccttttaaatgaggtcagcttttttgtttgttaygtttgtttgttttttgcttcttgaattaagttcattatattaaattgattctggatattagatttttgttggatgcatagtttgtgaatattttcccccattctgtaggttgtcttattacattgttgatagtttatttagttgtgcacaaacgagctcttaagtttaattaggtttcacttttatttcaggtgtttgttatgattgcttttgaggacttagtcataaattcttggtaaggctgatgtccagaaggtattttctagattctcctctagtacttttatagttttaggtgttacatttaaatttttaatccatcttgagttaattttttgtatatggtaaaagcta

SEQ ID NO: 191173 - DNA, 337 bp, Homo sapiens
tcatttcagtaaagcctgtgtgtgaaatgaagaacaacccgatgaattctttgtactcaggaaataaatattacatataagcttttctttccctttgggaatttcccagaattaaggagggcttctactcttcccrgtcagctaggagaaatgctggtcagtgaagcaaacgcaagacatttaattattttaacacaagttggtagcagtaaaggataagaagaaaataccgtcattagctgagaaggcagcactcttcctccagcaagaactgatcactctcataaaaatataaatgaattaatcaggtaaaaagtatgagagaactgaaaaggtg

SEQ ID NO: 191174 - DNA, 571 bp, Homo sapiens
tgtccatgtccttatcattggagcctggcttatatgagaaaagtgtgactattatcacatatgttaagatgtgattaagttaaggatcttgaggggtggaagttakcctggattatcttggcgggccctgaatgtaattacatacatccttatcagagagaggcagaagatgtcttgagacacagaggtaaggagaaggcattgtgcagaaagattggagtaatgaagcctcaaagcaaggaatgctggcagctaccagaaggtagaaagagcaaggaactgaatctgtcctatagcttttagagggatacacagtgctgcccacaccttgagtttaaacttctggtctccaaaactaccagagaataaattcctattgttgtaagccacctagttagtctgtgatagtttgttatggcaaccttacaaaactaatgcagtctagtctagtctttgtctggtaagtctaacatctggcactcctcaaggacaatttctattgactacttcttatttttttgaggcctataagtttttaatattcccacatgccttgtatttttgttgttgc

SEQ ID NO: 191175 - DNA, 571 bp, Homo sapiens
tgtccatgtccttatcattggagcctggcttatatgagaaaagtgtgactattatcacatatgttaagatgtgattaagttaaggatcttgaggggtggaagttagcctggattatcttggcgggccctgaatgtaattacatacatccttatcagagagaggcagaagatgtcttgagacacasaggtaaggagaaggcattgtgcagaaagattggagtaatgaagcctcaaagcaaggaatgctggcagctaccagaaggtagaaagagcaaggaactgaatctgtcctatagcttttagagggatacacagtgctgcccacaccttgagtttaaacttctggtctccaaaactaccagagaataaattcctattgttgtaagccacctagttagtctgtgatagtttgttatggcaaccttacaaaactaatgcagtctagtctagtctttgtctggtaagtctaacatctggcactcctcaaggacaatttctattgactacttcttatttttttgaggcctataagtttttaatattcccacatgccttgtatttttgttgttgc

SEQ ID NO: 191176 - DNA, 571 bp, Homo sapiens
tgtccatgtccttatcattggagcctggcttatatgagaaaagtgtgactattatcacatatgttaagatgtgattaagttaaggatcttgaggggtggaagttagcctggattatcttggcgggccctgaatgtaattacatacatccttatcagagagaggcagaagatgtcttgagacacagaggtaaggagaaggcattgtgcagaaagattggagtaatgaagcctcaaagcaaggaatgctggcagctaccagaaggtagaaagagcaaggaactgaatctgtcctatagcttttagagggatacacagtgctgcccacaccttgagtttaaacttctggtctccaaaactaccagagaataaattcctattgttgtaagccacctagttagtctgtgatartttgttatggcaaccttacaaaactaatgcagtctagtctagtctttgtctggtaagtctaacatctggcactcctcaaggacaatttctattgactacttcttatttttttgaggcctataagtttttaatattcccacatgccttgtatttttgttgttgc

SEQ ID NO: 191177 - DNA, 571 bp, Homo sapiens
tgtccatgtccttatcattggagcctggcttatatgagaaaagtgtgactattatcacatatgttaagatgtgattaagttaaggatcttgaggggtggaagttagcctggattatcttggcgggccctgaatgtaattacatacatccttatcagagagaggcagaagatgtcttgagacacagaggtaaggagaaggcattgtgcagaaagattggagtaatgaagcctcaaagcaaggaatgctggcagctaccagaaggtagaaagagcaaggaactgaatctgtcctatagcttttagagggatacacagtgctgcccacaccttgagtttaaacttctggtctccaaaactaccagagaataaattcctattgttgtaagccacctagttagtctgtgatagtttgttatggcaaccttacaaaactaatgcagtctagtctagtctttgtctrgtaagtctaacatctggcactcctcaaggacaatttctattgactacttcttatttttttgaggcctataagtttttaatattcccacatgccttgtatttttgttgttgc

SEQ ID NO: 191178 - DNA, 623 bp, Homo sapiens
gaattctgcctatgtgattcacaaatccttcttgctatttgaagctttgcaattctgacttccaggccctctagggaacttttagtgcagggatgcattataacttaggagatcatgatcttaccaatcctggaaaacatagaagcaattctgctgaaggagagccattactggccgatgcagtagaattattatttccattttagacctgagaaatatctgcctgctgttagccaaatgtggttctcccatcaggacccagtaaagaacttggccattaggactactcagcattaatcatttgagggaatagctttagccttatagtgactagtgtgagtgaatcaatatgtttattcctgctaatatgagccaagctttcttctgtaaaagaatgaacttacaacatcataagatttatggttttacacaatactaataaaatgacatgaatattttttgcacrtatgaagcatcttctattgtgaagcttttttagtttatgccacacacaaaaaaaggattttggtaagtgctacaaataatgttaaaaaaacaagatggaactttttttttcagaaccagtagcatttcctacatgtaaatctatggtttccaatttc

SEQ ID NO: 191179 - DNA, 626 bp, Homo sapiens
tgcatatggtgtttgtggggtgaagtctgcaaagcttggcaagagtaaacaattttctctgttccaggtgtcatccttttagcagttaactagctctggaatataaaaagcattaggaatatgcaataaataaattactctgattcggtgtgcctattacctgtacccagtacatgtacaaaggaaatattaaactctattgagacacaacctgaacaaaggggaatgcctccaaaaaaaatactratttttccaaaatggcacacaaatagataggtctatttacagttgcaatgaagtttccagattacagaggcaaatggaaactcagagagacttcagacaacacaatcaactgaaggctggtgcattttaggtcactattctacccactgggggatctatacaaggaagcccatccctgtaaagtttattttgtaccagtgggagacactcaagaatgtaggctatcttaaaatgacggacagtttaaaaaaatgataggtttaagaaaaactgaaactttgttttgtgtataggtagatttaggatccttgaaatatgcttagacatgggggatgtcaaaggaatataaaacctgtcccttgttttacaagagcctacag

SEQ ID NO: 191180 - DNA, 510 bp, Homo sapiens
tggtgtgtaatgggaaagtttgaggtgacagagactgattttgcaaaggctcataactgacctgaactggaattgctttgcttttaagccaaatgttactcagtgttccagatactttgccatttaacattttatgtgtcagtaacatatgactacttgcttttaaactctcagcatagatatcggaagatagtgattcttctaacctgtgccttttactgtatttttgtttcaaagaactgaagagttttttttattgttttcatcgatctgaaatctttagagaatccttcaggcagaggtaccaagattgatttacgtaggattaaggttcttttagtgcctcaatgacttaaagcagtctctgaacacttrttttattgcagttacttattcggcattaggatcctcaatattcaggttgtttgtattgatccttagagtcaggggaaacatatctatgttctggaaagtcttaaactgaaatgaaaatgaaaaaagccacgcatc

SEQ ID NO: 191181 - DNA, 575 bp, Homo sapiens
ttaaatcaatagtcatgcagcatgaattcataggaatggcttagagactttaagtcttaaaattaaaaaggcattgacaatttgcatgaggcaccaaatccacaagaagaatgttcttgaaatatatagtctttgcaacaaataaatgtatagctattgcttaaaagagtgggaggaagccatcttgaaaagtctctggtaaccaacgggtgacaaataaaaattaataatgttgtactcatcattgttcacctaagatgtataaatactgtgactctatttcctacatagtctccatcatataaattactttcgcaagtgtaactgattaccccagctctactttccacagaattatttaatccagaattcccctacacctgggtttttaggaacataatccctcatgattattgagaaattattgtcattttcatggtgtggcacccctactgtggtcactatatggcacagagaatacaaagataaatrtcatagcctctgtcctctgggacctcacaaagtagccaatgtgcagcaactgttagctgatgttcagtacagcctgttggaaa

SEQ ID NO: 191182 - DNA, 635 bp, Homo sapiens
ctgttctaacttgccttttgttcgttgtcactagagttttacagagttttacactgggttgtatgaatgctatgtcttccatatttggtttctggtttggagtgctctctcgtgacagttttactcattttgaaagtttcagctcaaacattattggttcagtgaataaatggttaccactactattgtctacttgaccttggtatatgtgtgtgtgttatacacacacgtgcacacatgaaggtacacacacatccattatacattcatgcacacatacacattcacaggccagccgtttctctgattttcccacaagttttcaaaaagatcttgtgtctctgtgttagagtgtcatgcatatacacacatgtgcacacatgtaggtacatgcacrcacaaatattatacacccatgcacacatacacatgcacccatacatacacatataaacacacatatatacacacatagataatacatgtaaaaatattttacagaggagaaaactgattacatataatatataatcatatatgcataatgagtatcatatataatcagttttctcctctgtaaagagaaaatacagaaaagatacccgttctaccatcctcatagggttgtcatgagc

SEQ ID NO: 191183 - DNA, 577 bp, Homo sapiens
tggatttaactgacaaaatgcagcaaatatttattgagcatgtactatgtctcaggcactgttcaggtccctagaaagcagagaaggaagcacaggattcctgcttccatggagtttaattctgatgggataaactagtaaaataatgttaaaggacaaatcaacaatattcagtctttttttcctcctcccaacagaagctcaaytggtttgggagcacaatgttacttaagtattcaatttcccataactccttgcagcttaaggaagtcatgtgactcaaatctgaccagcgagatacaagcagatgttttggggtggggctttcagggaaactcttctcaggggtgtaggctgatcgggttgtctgtttgaccttggactttcaccttctgaaacatgattgcaatgcccagtcaccttgcgaccatgaagacaaagtcaaatataagtacagctgtgcaaggggagcagaggagcttggttcagagcagctggaatagttctgcctccagaattcttgtaacgtgagaaaagtaaactcattaggagttaagtcacaataattagttccaat

SEQ ID NO: 191184 - DNA, 577 bp, Homo sapiens
tggatttaactgacaaaatgcagcaaatatttattgagcatgtactatgtctcaggcactgttcaggtccctagaaagcagagaaggaagcacaggattcctgcttccatggagtttaattctgatgggataaactagtaaaataatgttaaaggacaaatcaacaatattcagtctttttttcctcctcccaacagaagctcaactggtttgggagcacaatgttacttaagtattcaatttcccataactccttgcagcttaaggaagtcatgtgactcaaatctgaccagygagatacaagcagatgttttggggtggggctttcagggaaactcttctcaggggtgtaggctgatcgggttgtctgtttgaccttggactttcaccttctgaaacatgattgcaatgcccagtcaccttgcgaccatgaagacaaagtcaaatataagtacagctgtgcaaggggagcagaggagcttggttcagagcagctggaatagttctgcctccagaattcttgtaacgtgagaaaagtaaactcattaggagttaagtcacaataattagttccaat

SEQ ID NO: 191185 - DNA, 534 bp, Homo sapiens
acattaaataaagcccaatggtggacgggggagtgttcctaaagagtgggtgtttcctggacccatttactcaaggagaaggacagatggataagcgtttacaaaacaaacagcctacaggaagtctggaaactgtttcaaaaacagtctataacagcaaccaaaaaaaaaaaatgtgtagatggtgatgtaatctctctggtaaaagaggaaaagcaaacggatattgtctgcgtgtagagccgtggggccactagggcaggatttccattcttagagggctcctgggactgcctttgtctggcactggccagggctctcacacctcatcagggtttgcaaagacaacttctcacttccttgagacgtgcttttcatgggacacacactataatgtgtattaagttacacgtgcaaaaacaagcacttaygcatgctttaggggaaaaaagactagaaggaaatacaccaaactgtgagtggtgattatttctaggatgaatacatattacttttataatcgggaacaaaaca

SEQ ID NO: 191186 - DNA, 430 bp, Homo sapiens
  misc_feature (1)...(430): n = A,T,C or G
ggctttaaaatataatgcattatttgatgttccacccttcaagaggtgaaaactaattcctcccccttgagtgtgggccagactcagtgactcactcctaagaaataaagcatggcagaagcaatggtgtgtgacttctgtgactaggtcatgsaagtcagggtagtctccttcttgctctctctggggatcactcnctctnggagaagtcaggggccatgtcacgaggacatgcaagcgttcagagcccagtgagcacaccatcttggaagcagatcccccttctcctccttcagtggcggtagcacatccttggccaacctcagagagaccctaaaccagaacccctgacgacgctgctcccaaactcctgacccacagacataagcagtgaatgtttgttgtttaagatgctcagtttgggaggtaa

SEQ ID NO: 191187 - DNA, 598 bp, Homo sapiens
ggcttctcggccttctctccaccttcacctcctctcctcccaaagctaccagtgtaatctttgggacccgcatctgatcttgccacacaccaatggcacccctgcagatcctcttccctccctaggggtgccacgaagcttcaagacaccgcgcctttgtgcataccgttccctcacctggcacccccaccacctttgctcaggctgaggaattcctaaccacctatctacagactgttaaatgttgcctcttctgggagttcttcccaaataaccttttcctgccccacacagcaaaacgaatccccccttgcgttctagaccttccactggaacacctgctgtgcagtcctgggcttggctcacatgcactccctctacgcctctgagtcagggttatctgagcgcgtgctctgcactgtcactgtacctctgaggtctacgtgaactgccccctgtgggctgtggtgcaaaacctgtgtatgtggtggggtattatagcctttacrtgctgttgttcacagagtcctcataacaaccttataacgcagctacaattattatcccccttttgctgttaaggaaaccaagactcaga

SEQ ID NO: 191188 - DNA, 379 bp, Homo sapiens
ttgaattcatataaaaggcagctctgtggcatgtgttggtctcgctgtctctcccctttgcccactagccactcagtgctcccttccttctgattttctctgcatatggaagagcgttttgatgtagcaggcacccaacacatgaccacacagaagtaaagcacctgctttacctctcagcttgagaaggagttagcagagcagcagggacctcagtaagacagcagaaagcacttttctctttttttgagatggagtctcactgttgttgcccaggttagratgcagtgatgtgatcttggctcacggcaacctccgcctcctgagttcaagcgattctcctgcctcagcctcctgagtagctgggattaccggcgcc

SEQ ID NO: 191189 - DNA, 379 bp, Homo sapiens
ttgaattcatataaaaggcagctctgtggcatgtgttggtctcgctgtctctcccctttgcccactagccactcagtgctcccttccttctgattttctctgcatatggaagagcgttttgatgtagcaggcacccaacacatgaccacacagaagtaaagcacctgctttacctctcagcttgagaaggagttagcagagcagcagggacctcagtaagacagcagaaagcacttttctctttttttgagatggagtctcactgttgttgcccaggttagaatgcagtgatgtgatcttggctcacggcaacctccgcctcctgagttcaagygattctcctgcctcagcctcctgagtagctgggattaccggcgcc

SEQ ID NO: 191190 - DNA, 502 bp, Homo sapiens
gaatatacagttaattcaactaaagtacaactttcaagcttcaaatattttcatcatgaaacacttcatgtaaattctcaatatgtaatttgaacacaaacaaaaaaagtgaacaataacctgattcagtgactgacatttccaatatgatgtaaattggacgtcacatgagcttagagatgtagtgggaccacttcaacacattttaaaaattgggttctttgaacatcacaagcatgttttcctttggtctagtttttcaaagcccagatatgtagaaagctaatggcctataagtaaattagagcaatggacatcttttacgtctattacccaggtacacttcagcctcatagtatcataaagatatgcacactacttaagttctgacttttaaacttcatatttatccttgmcaaatgtgtttcatctatttatggagctcaaagtaaaaaggcactgtagaggcaaatcagtctgtttaaaacacatgctgctggaa

SEQ ID NO: 191191 - DNA, 547 bp, Homo sapiens
tcaaaacatcaatcttctattcctctttcacatccaaacactgaccgtaaggtcattttgttaccttagcttggaaaaaacatttcatgtttctatttctttaccatattaaaaaaatagtactctgaatataaaacaacttctgcttatcttatctcactggtcagaaaatgctgcatttcttttgaagagagtagactcaatctatacaaagttaacagtcagtccaatcatcatgcatttgatagcctaaraaatttcaaataaaattatgtagctaaaattcactgttaaacgtgttgaaggacatagttttaacatgaagcaaatgggaaatctttaaaattaattattatagggttttaaaaaaaatgtagcctgaagcagaaagaaaatctgacccagttttccatgtctcaaaattccaattgcaaggcatcacattgcttcagttggagccagaaagggtacatttgcattagttctttgttcagaacgttctgttctgcaccaagaactgaaacaaataaatattgtatatacctcc

SEQ ID NO: 191192 - DNA, 549 bp, Homo sapiens
tgttatttataaagtgtcttccatataaatgcaatcccagtagaacagaacagtttagacattccctgccccacaaggatgctataatgaaatctgacttggtccagccaggatattagaagtgcatagagagatagaatgtgcagcattagaatattaatatgacttctgtatgaagattggaaattctacaaagttatgaasaaggtcaaaataacacttagatgatttactgccatagaaaagcatactctcctatgagtgatttactgaatgttatataaaagtggagtgtggacaagctacattcagatgcaagcttgcagctgtcagtgtctacatttgctcaatctggctagaggatgatttgaaggttgatttaattgtagcttctgaatcatgcacttctctatgttttaaattgtttaacgtaaatataaaaatgttaaagtaattttaagactgtaaatatttagtatcaaatctgcaaaatctcattctcctctggaaaagtgactgaaaatgaaaagactaagaaaaaaacactat

SEQ ID NO: 191193 - DNA, 363 bp, Homo sapiens
acctcacttccttgctgtatctcaaatgttttcataaaattttgcttataggtttcctatttgaaattaagattcaagaatttaaaagagaaaatggcattagatacaatttgtaaaagggatagaagtttacatctttttttgcagacaagttattttaccatcttgctatatattatagatmtcaataaatttgcaatgcaaaaattaatttatgactcaaagtcaatatattttaaattacagtttttttctcactgtctgttagagatcaaaggaagattacaaaaagagagtgtggtgattaaaaaaataatcatacctaatcacagcatcttgcatattaacactaatcaaacatct

SEQ ID NO: 191194 - DNA, 572 bp, Homo sapiens
ctgagttccctgtagcaaaatgtttcatatacactagtggtggttaaagacctagagacaaaaggatattcttcatgacccaggagtgggagaacaaagaagccagagtctgagatttttaaattcagtttaatgcatatccttcttctgctgttgccatactgtattctttgcctgtaataaagctgtccaatgwatataaactgtttgacgcctttcagcaaatgaatacttaaagtaactaatgtgtaattaactcacatagtaagtacttaaaatgggatgaataaacaaatgaacacaattttacaaaatgatattaggcttcaaaagaagagacaagtctacctccagctagtaaattagaaacgagttcatgaatccagggaaatttaagatgggcttaaaagaactacgatctggacaaacactgttggtcacagaagggatcccacagcagaaagaatgttcagtagatactgtgctgctcacccttcctgagggcagctcacattttaatgactggttcctgccagtattcaaaggcctggcctccttttctcaatacagaa

SEQ ID NO: 191195 - DNA, 501 bp, Homo sapiens
gcagttgagagatgactagaaatgtattggtagctgagctgggaacagttttcaacatgctttatttctaaacattccatcttttctgcactagtatgtccagtaaggtcaatgactatagaaaatgctcaagtatagacagaggattcacagatatctgaaagtcacgcttcttgaagattatcagtttaaaatctgtgaatcactgctacttttttttttttttccattatgagcagtctttttcccaaaggaatcctgcytgatgagtaggagtacattgtttgaaagaactacagaagtacttcttaggtgtttttcccctttagcaaaatgttgggaagatggaggagtattcagcatgaggtatgctgtcattatatttattctgggcctttcagcactgtaatttatttctgtgccaaaacaatatgaattgttaaaaaatgtgcttctccaaaatatgaaacagttggactggatccctattgaattatgcac

SEQ ID NO: 191196 - DNA, 486 bp, Homo sapiens
tattttaaattatttggatgatattaaaaatacctaatrcataaatatgcttacaataaccagaaatattcataagacaattctaccattcatacaaaaaactttgaattatttcacgaaataaaattgagcaaatctgccactttattgctttcctgtcaaagctggctgtatgtaagagctggtagagacagtgaatttgcacgttcaggaaagcgatttgaaggaattaatctttacaagcatttctaatctgtgaatttaaactatttctctatttttggaaagatgggtcacagattttgtagatatattcattttacttagacaaatgagtgcttgtcaatagggtagtgtttgtgtgtgtgtatatatacacataaaatataccacctatacattgtgttagaatttcaatttgaaacaccatgtatataatctttaagaatgtaactctcttaaacttcagtcccttttatagcagac

SEQ ID NO: 191197 - DNA, 427 bp, Homo sapiens
ctgtttagcttttagaagacataaccacatctgtccacagttactaattcaaatatgaagccaaatctctggttcaatatagttttacattcatcttcaaactctaagtgaactaggcgttttaattatttcagtgtgtggtgatttttctactagcaaattggccaccaatttcattttctatgtgatcttaaatcccatataaacatgatttttattgttgctttgtgctgtttttgttgttgtgttttagttcctccattctaaaataacyctttcaaaggaaacagttggccaacaacaaattatgaatctttgggcaagataatttaacttctttgttcctccatttctacatctggaaagtgacggtgagaacctcacgaggctgttgcgatatcaaataaattaatatgccatgatgtct

SEQ ID NO: 191198 - DNA, 549 bp, Homo sapiens
ttttgtcttacctaccagaaaggattgctgtaaagattacattagacaataaatgtaaaaatgctttgtaaaccattatataaaaaagaagacacagttttcattattatcaagaaaaacatgtagtttttaaaatctaactcttataaggaggttgttaggcatagaactttgggatctcatggtgtgtttaactcccgaatttcactcactayggtatctaaaataaaagccttaaattctgggtctcagggaatctggagatcctctgcttcctaaatagaatttcaagctccttctatctttagatttgccttccccattcttccaactccatgtgctgccaattcctggggcatttggggttctatagtgcaaattgaattggtttttgaccttctttactgctaacctaggaatcaactttcttagctaaggatttgcttcttgtctttctgcagtctagcttctaaaatagtgccattttctctgtccctcctgccccctttgttttgttattgtgagattttttcctctttcagaaattat

SEQ ID NO: 191199 - DNA, 581 bp, Homo sapiens
tctcatggtgtgtttaactcccgaatttcactcactacggtatctaaaataaaagccttaaattctgggtctcagggaatctggagatcctctgcttcctaaatagaatttcaagctccttctatctttagatttgccttccccattcttccaactccatgtgctgccaattcctggggcatttggggttctatagtgcaaattgaattggtttttgaccttctttactgctaacctargaatcaactttcttagctaaggatttgcttcttgtctttctgcagtctagcttctaaaatagtgccattttctctgtccctcctgccccctttgttttgttattgtgagattttttcctctttcagaaattatttgcagtcattttaaggggcactgggcagtggggggaaagctaacccaagatttttgctttgaagttgttcttttaaaatgtgaatgctttctccttaaaatcattagttgcaaacttggttcacactcttgttttatgatgttttaaaatgtgatgcatatattttgccctcagctaaaaaaaataggaatcatcccacccactccaa

SEQ ID NO: 191200 - DNA, 496 bp, Homo sapiens
  misc_feature (1)...(496): n = A,T,C or G
tttacaacagatgcaaaaaaaaaatacttagatacatacctaacccaggaggtgaaagacatctacaagaaaaactacaaaacactgctgaaagaaatcatagatgacaaaaacaaatggaaacacawcccatgctcatggatgggtagaatcaatattgaaaaatgaccatactttcaaaagcaatctacaaatccaatgcaaccccatcaaaataccaccatcattcttcaaagaattagaccaaacacaattttaaaattcatatggacccaaaaaagaatctgcatagcaccagcaagactaagcaagcacgaaccaatctggcatcatcacactacctgattcaanctacactataaggccatagtcacccaaacagcatggtactggtataaaaataggctcacagatcaatgagagcagaatagagaaaccagaaataaatccaaatacttacagcctaccagtctttgacaatgcaaacaaaaacaca

SEQ ID NO: 191201 - DNA, 551 bp, Homo sapiens
tgtgtggtacttccacttttgcgctctctctctctctctcctgttgccatgagaagatatgctttgtttccccttcgccttgtgccatgactgtaagtttcctgaggcctcccagtcatgctacctgtaaagcctgttgaactgtgaatgaattaatcctgttttcttcataaattacccagtctcaggtagttctttatagcatcctgagaatggactaatacattgatgactaatattccattgtatgaatgtaccacagttcaattatttgtttacctattaaaggacatcttaaatgcttccactttttaacattcaaatgcagggtttttttktgtggacatgtttccaattaatttaggtaaatatctgggagcatgattgcttaatcatacagtaaatctatcttttgcttttaaaaaactttgactctgtcttccaacatggctgtaccattttatattacctccagcaatgaaagaaaattcctgttatctcattcttgccagcatttggtggtgtttttgttaatttttaagagcttttta

SEQ ID NO: 191202 - DNA, 576 bp, Homo sapiens
gtgcaatggtgaacagaatgctcatttatgaactgtaagctgggagaaaaggtggaatatcggaggtatatggaggttagagttatggaaattataaaagaatgaaaactaacttgcaattctggagcttttcaggtgactgacataaatgggagcaaaggacataatgagattaattcttatggattgaaggcagtcagtattggtgagacggtgagtgtcaatattggggtaagtatgtctggactacttggcaaccccttgccatggagggaaattggaaaagtagtaactcattcaagcacctgtggcccttttattgaccactattgataggtttgaggtgattggagaaagctgagtctttctctatgcacaattcacccactcaaactcctccctcaatgcagcaatgtargcccagagggacgtgatggtggacttagtaccatgggctcactcttactccctcatgggggagatggtattttactctgaaagcataggtttctcctttgacacttgttggtgggggaaagcagatcagagaaagtgggtgttggagcatttttggat

SEQ ID NO: 191203 - DNA, 576 bp, Homo sapiens
gtgcaatggtgaacagaatgctcatttatgaactgtaagctgggagaaaaggtggaatatcggaggtatatggaggttagagttatggaaattataaaagaatgaaaactaacttgcaattctggagcttttcaggtgactgacataaatgggagcaaaggacataatgagattaattcttatggattgaaggcagtcagtattggtgagacggtgagtgtcaatattggggtaagtatgtctggactacttggcaaccccttgccatggagggaaattggaaaagtagtaactcattcaagcacctgtggcccttttattgaccactattgataggtttgaggtgattggagaaagctgagtctttctctatgcacaattcacccactcaaactcctccctcaatgcagcaatgtaggcccagagggacgtgatggtggacttagtaccatgggctcactcttactccctcatgggggagatggtattttactctgaaagcataggtttctcctttgacacttsttggtgggggaaagcagatcagagaaagtgggtgttggagcatttttggat

SEQ ID NO: 191204 - DNA, 591 bp, Homo sapiens
atgccaacctcacagttgaaaatccacatctaatttttgactcaccacaacttatgtactaattgcctgctgttgaaaggaatccttaccagtaccattaacatttgattagcatgcattttgtatgttgtatgtattatgtactgtattcattcaacaaaattagagaaaagaaaatgttattaagaaaatcataatgaagagaaaatatatttactattcattaagtggaagtggatcatcataaagatctttattcctgtttcttcacattgagtaggctgtcttgctgtctcargagtggcagaggtagaagaagtgaaggaggcggaggagggcttaggagaagcaggcacacttggtgttacttttattgaagaaatccacgtataagtggacctgtgaagttgaaatctgtgttgtgcaagggtcagctatacacacacagacacacacacacacacacacacatatacagacagagagagagaaagtagtcctgcaaactagagacccggaaaagaactgatgctgtaattcaagtccagaggtagtgggctggcaggatttctttgggaaaggttaatcttt

SEQ ID NO: 191205 - DNA, 591 bp, Homo sapiens
atgccaacctcacagttgaaaatccacatctaatttttgactcaccacaacttatgtactaattgcctgctgttgaaaggaatccttaccagtaccattaacatttgattagcatgcattttgtatgttgtatgtattatgtactgtattcattcaacaaaattagagaaaagaaaatgttattaagaaaatcataatgaagagaaaatatatttactattcattaagtggaagtggatcatcataaagatctttattcctgtttcttcacattgagtaggctgtcttgctgtctcaggagtggcagaggtagaagaagtgaaggaggcggaggagggcttargagaagcaggcacacttggtgttacttttattgaagaaatccacgtataagtggacctgtgaagttgaaatctgtgttgtgcaagggtcagctatacacacacagacacacacacacacacacacacatatacagacagagagagagaaagtagtcctgcaaactagagacccggaaaagaactgatgctgtaattcaagtccagaggtagtgggctggcaggatttctttgggaaaggttaatcttt

SEQ ID NO: 191206 - DNA, 591 bp, Homo sapiens
atgccaacctcacagttgaaaatccacatctaatttttgactcaccacaacttatgtactaattgcctgctgttgaaaggaatccttaccagtaccattaacatttgattagcatgcattttgtatgttgtatgtattatgtactgtattcattcaacaaaattagagaaaagaaaatgttattaagaaaatcataatgaagagaaaatatatttactattcattaagtggaagtggatcatcataaagatctttattcctgtttcttcacattgagtaggctgtcttgctgtctcaggagtggcagaggtagaagaagtgaaggaggcggaggagggcttaggagaagcaggcacacttggtgttacttttattgaagaaatccacgtataagtggacctgtgaagttgaaayctgtgttgtgcaagggtcagctatacacacacagacacacacacacacacacacacatatacagacagagagagagaaagtagtcctgcaaactagagacccggaaaagaactgatgctgtaattcaagtccagaggtagtgggctggcaggatttctttgggaaaggttaatcttt

SEQ ID NO: 191207 - DNA, 513 bp, Homo sapiens
ttgaccttgcagcgcccagctcctctgtagggagggggatgacctgagacactgaagcaccctctgcacaagtcgtgaatgttgatcttttctcttctaggaagctttgacaggtccatacctgaaaacaatatcatgcgcacaatcattgagtttctgtctttcttgcatctcaaaggtatgtgaaatatcaycaacttaacattcatctcttagtacactggaaacgtaaaaggcccatcgagaagagaacccatagaatccccctgggaagtagccgattacttatctacgtacaaagtcctgtttggctgtgtgtcgggataacagagaatgtaacactagagctagctccagagggctgggattgcggcaggggcattctaccgtcgtggagggccatcgggccagcgctggtcccaggaagagagtgggcctcagggtgcagctcattctactggaaccatatctattcacacggtgacaactgctgtaccttttagggcagaggta

SEQ ID NO: 191208 - DNA, 559 bp, Homo sapiens
ttctttctttctattttctcccacttattacagcattatcaatctatgtgttctcatttcttctattcataagtcataaatgaccttgataaagcttgggtgattttcccaaggtaaaatttggggcaggggttatgagtagaaatttcactccacattgtatattgtttggacactttgctggccatattcattgtcctatttttattattaccaaaacactagaaggtactataataatgaagttacgcagatgtgaaaaacatgacttagttgtagtaaattaacttgtcctggagagatatatggatragtcagtatccaaactgtaccatacaaccttttagttttctggaaccagggagaaagtgggaagagaaatagaagaaattacatatgacatgatagatagttcctcttcaacaaagtttgctgtgctacaatctaccaaagctgataatttaatgggccgctcaatgttgcctagagcacagtaagtgtgacattttcttaatttatcattggtatatatgctggtaaattttgtttacatagtgat

SEQ ID NO: 191209 - DNA, 559 bp, Homo sapiens
ttctttctttctattttctcccacttattacagcattatcaatctatgtgttctcatttcttctattcataagtcataaatgaccttgataaagcttgggtgattttcccaaggtaaaatttggggcaggggttatgagtagaaatttcactccacattgtatattgtttggacactttgctggccatattcattgtcctatttttattattaccaaaacactagaaggtactataataatgaagttacgcagatgtgaaaaacatgacttagttgtagtaaattaacttgtcctggagagatatatggataagtcagtatccaaactgtaccatacaamcttttagttttctggaaccagggagaaagtgggaagagaaatagaagaaattacatatgacatgatagatagttcctcttcaacaaagtttgctgtgctacaatctaccaaagctgataatttaatgggccgctcaatgttgcctagagcacagtaagtgtgacattttcttaatttatcattggtatatatgctggtaaattttgtttacatagtgat

SEQ ID NO: 191210 - DNA, 532 bp, Homo sapiens
tttgttgattgttttctttgttgtacaaattttttaacttgatgtgatcacatttgtaaatttttgctttggttgcctgtgaggtattgcttaagaaatttttgcccagatcaatgtgctggaaagtttccccaacattttcttgtagtagttttatagtctgaggtcttagagttaagtctttaatccattttgattttttttgtgtgtgtgtgtgtgtgtatggcaagagataggggtctagcttcattctgttgcatatagatatccagttttcttggcaccatttattgaagagactgtttttcccaaagtatgttcttggtatcttggtcaaaaacaaagtcactgtaggtgtatggatttgtttttaggttctctrttccattccattgggctatgtgtctgtttttatgccaggaccatgctgttttggttactatagctccgcagtataatttgaagtcaggtaatgtgattctttcagttttgttgttttgactcaggatagctttgggtattctgagtcttt

SEQ ID NO: 191211 - DNA, 645 bp, Homo sapiens
atattaacttactttgatcatgctgctgatggtattatgatctttatatctttcatagccacctgtaaaaamcaatcagcatgaaaatgccttgccatttctattgtagggtggagtgggaataatctggggtaagaattgaagcatgacggagtagcaagtctcactgaaatagattctgtattcccaaatatgagaccctagccccagatataaaaggcagtttctaggtaagggaagagggaaattacgtcttgatttatacagacaggggaaaaaaaaaatgaaaaggggcagaaacaggtccaagaattgtgtggtgggggggagatgaggcttgaatacttaaatattgataagaagccagacgtgacagggaacatctccaccagcacttcacagagcacttcacagaatcagtccttcagtaactgtagccagtttttttgttttttgtggagtttttgttttttgtggaggaaacaaaccacaaaagatttagcttcctagtagagtgtactctcctaggtaatgaggaaaaacttttctaacttcctcacatatccttcaacttcttacatttatatgaaatccctttaatgaaaaaatagcttacatttatttagcactatggactcattctta

SEQ ID NO: 191212 - DNA, 595 bp, Homo sapiens
tacgttgtgcgttccttgtgagaatctaactagtgcctgatgatctgtggtggacagtttcaccccaaaaccacctcctgcatctcagctgcacttctgggtctgtggaaaaactgtcttccacaaaacaggaccctcgtgccaaaaaggttggggaccgctgataaagatgactaattttctgctttattatctatgtgaattaaaatttaaacgtaaccttcaaacataaaagaattaggatgtataatatctaaaccaataacaagaataaagggcaatggggtatggttcagtaaaaacaaaaacaaaaccacaaggaaaagaatagtaattggaagtcataatattaaatgattctaaaaactgagtatgtcagtaatcaataaatatgcatggastaaggctacacattgaaaaacaaatagtctcaaatgggatataaagtaatcaattctaaaatatttgtaaatgtagtaactcaaaatatataatggctcaaaaactttaaaaataatggataagacaagatacactgggcaaatacaaacgaaggttagctgctgtgcttatacaaatacatctttaaagacat

SEQ ID NO: 191213 - DNA, 570 bp, Homo sapiens
aaaattttttctaaccttaaagtaactgaattattacctattaaagataggaatcatgataaaaaaaataaatgaatgctttctgcaatccaaaactgaaaaattaagtaagttatttaaaagaaacctcttctaaaaaaacttttattttcaatcaaatagctcagtgagcttctcaaaaaatatgtatcatctctatctgtgattttggttgcatttttgcctttgtatgcatgaaattctatttacttacattaagttaagcttcttgaatttgtctctttactaccatttttggctgaaaataatacacagacttcatttattcttggatgattataataatgataagcagatagcaattaaaaatgaaagaaaacattctcaattattattactaatgcactgaatttacattacattacaaataacatttttacaagatttacttgacctttaaggttttgtgcattctagttattayctttaaaataaccaagaatatctgaaattttggcaatgctatatggtacaatatgaaactgttggcaaaactgcctacatatagtt

SEQ ID NO: 191214 - DNA, 496 bp, Homo sapiens
ggattgctaaggttgctattacaaaatagcacagactggagggcttcaagaacagaaatctatttgcccacagttctggaggctaggactccacgatgcaggtgtcagcaggtttgttttctctgaggttgctctccttagcttacaaatggccaccttttgttggtattcacatsgcctttcctctgtgtgggtgcatcccttgctgtctccttttcttaaaagaacactagtcctactggattagggtcccacattaatgacttggtttaactttattaataattacctctttaaagaccctatctccaaatacactcacattgtaagtgactaaggattaggacttcaacacataaatttgaaggagactcaattcagcccataatacccatctttaaagtggcaaaagaaaatacacttcaacatagaattctatatctaatagataatattcggcaaaaccacatgtaggaaaagacattttcagacaaaa

SEQ ID NO: 191215 - DNA, 496 bp, Homo sapiens
ggattgctaaggttgctattacaaaatagcacagactggagggcttcaagaacagaaatctatttgcccacagttctggaggctaggactccacgatgcaggtgtcagcaggtttgttttctctgaggttgctctccttagcttacaaatggccaccttttgttggtattcacatcgcctttcctctgtgtggrtgcatcccttgctgtctccttttcttaaaagaacactagtcctactggattagggtcccacattaatgacttggtttaactttattaataattacctctttaaagaccctatctccaaatacactcacattgtaagtgactaaggattaggacttcaacacataaatttgaaggagactcaattcagcccataatacccatctttaaagtggcaaaagaaaatacacttcaacatagaattctatatctaatagataatattcggcaaaaccacatgtaggaaaagacattttcagacaaaa

SEQ ID NO: 191216 - DNA, 496 bp, Homo sapiens
ggattgctaaggttgctattacaaaatagcacagactggagggcttcaagaacagaaatctatttgcccacagttctggaggctaggactccacgatgcaggtgtcagcaggtttgttttctctgaggttgctctccttagcttacaaatggccaccttttgttggtattcacatcgcctttcctctgtgtgggtgcatcccttgctgtctccttttcttaaaagaacactagtcctactggattagggtcccacattaatgacttggtttaactttattaataattacctctttaaagaccctatctccaaatacactcacattgtaagtgactaaggattaggacttcaacacataaatttgaaggagactcaattcagcccataatacccatctttaaagtggcaaaagaaaatacacttcaacatagaattctatatctaatagawaatattcggcaaaaccacatgtaggaaaagacattttcagacaaaa

SEQ ID NO: 191217 - DNA, 634 bp, Homo sapiens
acaaagagaagctggtaccacttctactgaaactattccaaaaaaatcatgaagcagggattttttttgcttaactcattctatgaagccagcagcactctgataccaaaacttggcaaaggtacaatgaaaaaagaaaactacagaccaatataccttatgaacatagataaaaaaaatcctcaacaaaatgccagcaaactaaatccaacagcacatcaaaaagttaattaccatcaycaagaggcttcattcctggaatacaaggttagttcaacatatacaactcaataaatcggactcatcacataaacagtattaaaaacaaaaacatgataatctcagtacatgcagaaaaagctttcagtaaagtccaacatccttatatgatgacaaccctcaataaactagctgtcaaagaatcatacatcaaaataataagagccgtctatgacagacacacagccaacatcatagtgaatgggcaaaagctggaagcatttccctgagaattggcacaagacaagaatgcccattctcaccactcgtattcaacataccactggaaatattagccacaacaatcaggcaagataaagtaataacagtcatccagatatgaaaagaagtagtc

SEQ ID NO: 191218 - DNA, 551 bp, Homo sapiens
tgccttttgtatcatcatatatccccaatgtgtgtccatcaggtgagacaatcactaaagcctttttgaatatactttgcatttaacagcggctacagataaaggagaagaaaaaaaggaccatattgttcatttgtttgtttacaagaaaaatcttattacttgttctcttaccaaaaatgttttctttttgaaaaagtgaggaattcccgagaggcagttattaattctttccaaagaatggaygcatatacaataaagtaaatttattatgaaaataaatgcggggtgggggaaagggagggaatctgaatttatggaagagcaaacaggaatccaaagaagcatcacacagaaaataaggccaatttcaaaaattaaggaaaaaaagatcaagaaaagaaaagcttatgtgggcttgacataagaacctacagagtaccaataaattagatattagcaattattgacctataattaacttggaagtggcatgaaagagttttacatataagttgccaaatgtgatgagctttttttaaacgttggct

SEQ ID NO: 191219 - DNA, 584 bp, Homo sapiens
tctggttgtttaaaagtgtgtaacacctctcccctcactctctcttgctcctgctctagccatgtaagacatggttgcttctccttcaccttctaccatgactgtaagttttccaaggcttccccagaagcagcagccactatgcttcctgtacagcctgcagaaccatgagccaattaaacctcttttcttataatttacccagtctcaggcattcctttacagcaatgtgagaacagactaacactagctgaggctttgatataaacccaatattgtctcccaatgagctagataaggcaaagtatgcrtcacaaaagcttatgtgaacctatctgaagatttacccaaagtacacttgattctttttctttatgacccatacttcaagtttgttgttttgggcagggaggagggacaacagcaaagaaagttaaaactaaaggaagcatattaagagaaaaatgaaggaaggtaaaatggtttcttcataaggctgataatatatctagttttatccactcaactttgactttttgaataaatagagaatgatatcccacagaaggaagctatcatgagag

SEQ ID NO: 191220 - DNA, 574 bp, Homo sapiens
caaaaaacataataaaagccatatataatagacccacagttagtatcttactgaataggacaagactgaaagcttttctctaagatcttgaacatgacaatgatgcccactttcaccattgttattcagcgtagtactggaagccttggtacgagcaatcagttgagaaagaaraaaagggaatccaaatgggaaaggaagaagtcaaattatccttgtttgaagatgatatgatattatatttgcaaaaacctaaagattctaccaaaaaaactatcaaaactgataaacatattaggaaagttacaggatacaaaatcaccattcaaaactcagtaacatttctatatgtccacactgaacaatctaaaaaagaaattaaaaatgtagtctcatttacagtagccacaaataaatacctatgagttaacttaagcaaagaagtgaaagatctctataatgaagcacataaaacaccgatgaaataaattgaagattcataaaattggaaagataccccacgttcatggattagaaggattaacattgttaaaatgtccatgctacccaaagc

SEQ ID NO: 191221 - DNA, 499 bp, Homo sapiens
ttttaaactcctacctaataggacattttctgatgagaaagaacatctattacaaaagagaggagagcagttgaatcagaaatacgtgatataaatgccaaagctgttgtgattttaatttgtcttgatttttagcaagtgttacattgcaagtgtgttgcaattggctgacatttttcagacatttaaaaattccrgaatatctaagatattttaggcagttctaataaaaatgaaaacccgacaataagcataactgataaaacctcttcacaattttggccctgctttacaatttaatgcactgacttgttctcagtcctgcagtgcttagtatctcctgtatacccttcgtatgttcaattgcagtgctagaatatattatgaagactaaagcccaaatgtaatctatattaggaactattcataaccaagagtccatatctgcataaattaaacttgagaacaatgccatacatattttatacataagctgtct

SEQ ID NO: 191222 - DNA, 660 bp, Homo sapiens
aaaaatgtctctgtagtcaaagaagagataccagataagtaaaataaggtctctgcaaaatctcagttaagacaaatttcgctctaatgagtaaagtgtcattttttgcccctctctagaaatgtaactacttttaatctctccttggctccactgtgatatttaaagatgactttcccttctttgagaatgacttcaagtgatgtgtttatgtcttttgctgtctggaatgtgccttttccatcttatgccagatggtgagactctatctgtttcaagtttctcttcattgctacctcccccgtaaagactttcttaatatccttgaattggatatgatttctaattcttctgaagtaccagagaactgtgtttgcacatttgttggaactcttgaaatactcaaatgtacacctctttttctatcttagactctacttcaatgcaagtgcaatcttgtacatttggcaaaataatttayaactattaagagcccacagaaaggctagtaaatgagttgacttgaatataattcaacatctgtcaactcgggtgtagtaaaaagaggaagagtgttttatatttgtgacatttatgcatatgactatgatctttattaagctttaatctttttttacaaagactcaattttgatattta

SEQ ID NO: 191223 - DNA, 660 bp, Homo sapiens
aaaaatgtctctgtagtcaaagaagagataccagataagtaaaataaggtctctgcaaaatctcagttaagacaaatttcgctctaatgagtaaagtgtcattttttgcccctctctagaaatgtaactacttttaatctctccttggctccactgtgatatttaaagatgactttcccttctttgagaatgacttcaagtgatgtgtttatgtcttttgctgtctggaatgtgccttttccatcttatgccagatggtgagactctatctgtttcaagtttctcttcattgctacctcccccgtaaagactttcttaatatccttgaattggatatgatttctaattcttctgaagtaccagagaactgtgtttgcacatttgttggaactcttgaaatactcaaatgtacacctctttttctatcttagactctacttcaatgcaagtgcaatcttgtacatttggcaaaataatttacaactattaagagcccacagaaaggctagtaaatgagttgacttgaatataattcaacatctgtcaacwcgggtgtagtaaaaagaggaagagtgttttatatttgtgacatttatgcatatgactatgatctttattaagctttaatctttttttacaaagactcaattttgatattta

SEQ ID NO: 191224 - DNA, 575 bp, Homo sapiens
ctgaaaagatatttctaaatagaagacacaaaaatggtcaaaaatatatgaaaacatatttaacaacattaatcatcaggcaagtgcagatcaaaatggcaatctcattccagttagtatgactgttatcaaaaagagaaacaaaaacaaatgcttgtgagaatgaggaaaaccatttctagtacaattaatatggagaataatatgaargttcctcaaaaatctacaaatagaactaccatatgatccagaatctcaattctgggaatctatccaaaggaaagaaaatcattatgtcaaagaaacatctgtgtctccaagtttattgcagtagtagtacagtcacagtagccaaaacatggaatcaaactatatgtccaacaatagctgaataaataaagaaactgtggtatatatacacagtgaaataccattcagctataaaaaagaatgaaatcttgtcatttgcaccaacatggatggagctatgggatgttatgttaaatgaaataagccaggaacagaaagttaaatgtcacaggtttccactcatatgtgtaagttcaaaaacagtt

SEQ ID NO: 191225 - DNA, 575 bp, Homo sapiens
ctgaaaagatatttctaaatagaagacacaaaaatggtcaaaaatatatgaaaacatatttaacaacattaatcatcaggcaagtgcagatcaaaatggcaatctcattccagttagtatgactgttatcaaaaagagaaacaaaaacaaatgcttgtgagaatgaggaaaaccatttctagtacaattaatatggagaataatatgaaagttcctcaaaaatctacaaatagaactaccatatgatccagaatctcaattctgggaatctatccaaaggaaagaaaatcattatgtcaaagaaacatctgtgtctccaagtttattgcagtagtagtacagtcacagtagccaaaacatggaatcaaactatatgtccaacaatagctgaataaataaagaaactgtggtatatatacacartgaaataccattcagctataaaaaagaatgaaatcttgtcatttgcaccaacatggatggagctatgggatgttatgttaaatgaaataagccaggaacagaaagttaaatgtcacaggtttccactcatatgtgtaagttcaaaaacagtt

SEQ ID NO: 191226 - DNA, 597 bp, Homo sapiens
acaaaccaggggtcccagaggtacggagaaaagcttttgcttaggttaggaatgggcaatgagtccgaacagtgtctctgcaaagccacataggaatgaggatctagatgaaggtgtttgacctcctgtagtgactgagataaataggaacgtaaggcccaatgtgattagtgttgctggactctttgtcaaaagtaggttgtcactttcttgggattggtctgtagccaatttgttgacaccagatgaaaattactggggtaaaggggacaagaaagataggttggagagcttaccaggaacactagtagctctgaggaactctttaaaagctgatctgttaaatgttggggcttgtgaaaaaagcattactatatacatggagcccaagcaacctccttcaatctttctgggagcatgtktgtggaggaaaatttgaaggagaatcttatcaggatcacttagagtctgtgttgtagatgttgttaagcgcttacagttaggagaaatctgagaaggagagagcatatatttctctatagagtctgagtacttgactgtcactgataccgatagagatacgtcaccttgttggaa

SEQ ID NO: 191227 - DNA, 467 bp, Homo sapiens
tgcagatcttgagagccatgacacagagctcagtttaaagtttggcttttcatggaatagtatacagccatgaaaaatgaaatcatgtcctttgcaacaacaatatggatacagctggaggccattatccaaagtgaattagtgcaagaacagaaaaccagatgccacatgttcttacttataagtgggaactaagcattgggtgttcatggacatacagatggcaaaatagacactggagactactagagtggggaaggagtgatggggcaagagttgaaaaaactattgagtactatcctcactacatttgtgatgggatcattcatgcctcaaaactcagtatcacacawtatacccatgtaacaaatctgcatgtgtacccctgcatctaaaataaaagttaaaattataaaaataaatataaaataaagtttggcttcttattccaaaagcaataagaagca

SEQ ID NO: 191228 - DNA, 434 bp, Homo sapiens
acaaatgtggtagtttccccacaaataaatcttcatcaatgaagcttctaaagaatttaagaacaacaggaaaaagcagtgaaaatttctgatatgaaaaaagggatggagagcaaaaaaaaaaaaaaaagtaaacaagtaaaatgtgtataaaattaaactaatttctaatgtgtagaattgaaaaagaagtatatagaattaacttatgtargaaggatatcattgagaattaaaggtttctaaggtccttgattattcaggcagggaggaggaatttgaagatattgattaatcatataatttcttaagttgttaagtatatatggtaaaatttcacttcaagagtaaccattaccagaaaaagtatctaacttccaaactaacagaaagagaaaagtggagtaacaataaacatgaccagttagaagaaa

SEQ ID NO: 191229 - DNA, 552 bp, Homo sapiens
acctttataaactgacaattcaatatcaaaattatttttctctaccagttgcctgaaaaaacaacaatcataatttatttgaaggtataacctaccttgatcgccagcatttaaaaatattagacagttccctatatacaaatatatgatactactgccatcttctggtacaacacaatttccaaattctgtatagtatttctataaatgagaatccaccaaatatgaaataactagtttatattactgaaagcagaattgataaccagctaaatggctaaaatgcagttcaaatagaattctagcaataattaatttttatcagtgtgtgagataagttctctcaataatacttaacacttmatgagtgcttcactatatttgaggcatagaattaagtgctttctaagcaaaataaaaattactttaataactatatgaggtagagttattattctcattttacagatgcagaaactgaggacagaagaggtccagtagttttcccaaggttacatagctagtaaacggcagaggatctgaatttaggag

SEQ ID NO: 191230 - DNA, 552 bp, Homo sapiens
acctttataaactgacaattcaatatcaaaattatttttctctaccagttgcctgaaaaaacaacaatcataatttatttgaaggtataacctaccttgatcgccagcatttaaaaatattagacagttccctatatacaaatatatgatactactgccatcttctggtacaacacaatttccaaattctgtatagtatttctataaatgagaatccaccaaatatgaaataactagtttatattactgaaagcagaattgataaccagctaaatggctaaaatgcagttcaaatagaattctagcaataattaatttttatcagtgtgtgagataagttctctcaataatacttaacacttcmtgagtgcttcactatatttgaggcatagaattaagtgctttctaagcaaaataaaaattactttaataactatatgaggtagagttattattctcattttacagatgcagaaactgaggacagaagaggtccagtagttttcccaaggttacatagctagtaaacggcagaggatctgaatttaggag

SEQ ID NO: 191231 - DNA, 609 bp, Homo sapiens
agaatcctaacagggattaagaacttgacaaaccaattccaaaattaatatggaagaacaagacctaagaataggcaagaccattctaaaaaagaataaagccaaggaaatgaagttaacagatataaagatagtgacagtagtaaagacattgtggtattggtgaaggaataagcatctttctcttcagtatcaaaatcttcctatctatttacaaatcaataaagaaatttcccctatgcttcataaaccccattcatggtcttgytagacttgcaaattggtcctacatatgatctaaacataagagcatcaaggtagtggccaaacttctccttttaccttgtcactgttctcctcagaacacatttcaacttcctaactattctaagtgtttctctattcaagatattatacacttctccacaaggaacatcatgtagagtggcagatcagctgccaatatgtgaataaaatgacagattgttcagaatacataagtatacttattcaaacactattatttatatttttaggaagtattttagaaaaaactgttgagaagtgataggagacaagagaagaacattcaaaggcatgagttaaaat

SEQ ID NO: 191232 - DNA, 506 bp, Homo sapiens
tataacaagtcctggcaggcccctacaggtgaggttcagagtgtgacccatgaggaggtgcactacacttgaagtgcytgagttttctaatttttataaacagaaatctggagaacaggcatgggaatggatattaagggtgtgggataatggttgaaggaacatagagttagatcaggctaaatttattgacttgggcccactaagtagggactctgcatttaatgttgcacctcgaggagggggagttctaatcgtttatttgcttgattagctgaaatatggattaaaagatggcccactgtgagaggtggaaatgcctgatctcccttggtttaatgtagagaaagggacccaaaggattagggagattgggatagtggagtggattagtcactttagacctattcatcccagcagagaggatccagaagatatatccttgaccaatgccttgcgaaatagatttctgagggcagcaactgcatttttgaagagccctgtta

SEQ ID NO: 191233 - DNA, 506 bp, Homo sapiens
tataacaagtcctggcaggcccctacaggtgaggttcagagtgtgacccatgaggaggtgcactacacttgaagtgcttgagttttctaatttttataaacagaaatctggagaacaggcatgggaatggatattaagggtgtgggataatggttgaaggaacatagagttagatcaggctaaatttattgacttgggcccactaagtagggactctgcatttaatgttgcasctcgaggagggggagttctaatcgtttatttgcttgattagctgaaatatggattaaaagatggcccactgtgagaggtggaaatgcctgatctcccttggtttaatgtagagaaagggacccaaaggattagggagattgggatagtggagtggattagtcactttagacctattcatcccagcagagaggatccagaagatatatccttgaccaatgccttgcgaaatagatttctgagggcagcaactgcatttttgaagagccctgtta

SEQ ID NO: 191234 - DNA, 495 bp, Homo sapiens
cctggcaggcccctacaggtgaggttcagagtgtgacccatgaggaggtgcactacacttgaagtgcttgagttttctaatttttataaacagaaatctggagaacaggcatgggaatggatattaagggtgtgggataatggttgaaggaacatagagttagatcaggctaaatttattgacttgggcccactaagtagggactctgcatttaatgttgcacctcgaggagggggagttcyaatcgtttatttgcttgattagctgaaatatggattaaaagatggcccactgtgagaggtggaaatgcctgatctcccttggtttaatgtagagaaagggacccaaaggattagggagattgggatagtggagtggattagtcactttagacctattcatcccagcagagaggatccagaagatatatccttgaccaatgccttgcgaaatagatttctgagggcagcaactgcatttttgaagagccctgtt

SEQ ID NO: 191235 - DNA, 607 bp, Homo sapiens
gcttagtgttattagcacaattagttttctttgtcatcagaataacatgggtgcttggctcaattctttacattatttttataataaaaaaccagtctgacaggttttcatgtaaaatatgttctggatcttttgctaaagtagtgtgttggcaatgtggctgtgtatctggagtttgattccaagggcttttgattttcagggcagtttaawgtataagataggaatttgggggttagaaatgaaccatcagacagacactcctacatttccataactaggaacaaaacatcaatatttaaatgtgacaaagcacatttttgaagacatgtgccagagtggaggcacacccaaggtgagttttctagcagaaagagctaaccgcctaaacacttcaattgcaactgggcaagaacttgcagaaacccttctgctactcatatcagcatgaacaaaggactcaggcctgactattccacaaagctgggctaattataaattctgtgcagaagttcctccaggccagcctttggaattaacttgaagtggagaatgagatgatgctccagatagtttggggaactttttggaggaattgcctgcatga

SEQ ID NO: 191236 - DNA, 607 bp, Homo sapiens
gcttagtgttattagcacaattagttttctttgtcatcagaataacatgggtgcttggctcaattctttacattatttttataataaaaaaccagtctgacaggttttcatgtaaaatatgttctggatcttttgctaaagtagtgtgttggcaatgtggctgtgtatctggagtttgattccaagggcttttgattttcagggcagtttaatgtataagataggaatttgggggttagaaatgaaccatcagacagacactcctacatttccataactaggaacaaaacatcartatttaaatgtgacaaagcacatttttgaagacatgtgccagagtggaggcacacccaaggtgagttttctagcagaaagagctaaccgcctaaacacttcaattgcaactgggcaagaacttgcagaaacccttctgctactcatatcagcatgaacaaaggactcaggcctgactattccacaaagctgggctaattataaattctgtgcagaagttcctccaggccagcctttggaattaacttgaagtggagaatgagatgatgctccagatagtttggggaactttttggaggaattgcctgcatga

SEQ ID NO: 191237 - DNA, 408 bp, Homo sapiens
gcttaagatggtcacaatttttgctttaagatatgaggttaccaaagccattcctcagaaatgttcttgctaacactttgacccccatgggctgcatctttctgcctacccatagttggcctatctctatatgctgtactgcttcaggggagcttctagaacttaacttttcmtgtctataaatctatggcctctgccagatccctcgtgctgaactacataaacactgtccaactaatatatcctgaatccctactatttggcaggtacttttataggcataggagataaaacagtgaacaaaaattgtcccaattcttaccagatccccatgctgagctagactgttctcatccctatcaaccagcctaattctacatactcatttaatagtatctgttgagcttt

SEQ ID NO: 191238 - DNA, 378 bp, Homo sapiens
acatagtcaatgagcagaaacattttgaaaggaaacattttttccgagcagcaggtctcaacagtgggcttgaaatattcaataaaccctgctgtaaacaaatgtactgtcatccatgcttggttgttgcattgatagagcacagtcagaacagatttagcagaatccttaagrgtcctgatatttttggaatggtaaatgagcaatggctttatcttataaaatcaccagctgcattagcacctaaaaagagtcagcctgtcctttgaagctctttgaagctaggcattgacttctctctagctgtgaaaatcctagatagcaccttcctccaactgaaggctattttgtccacattgaaaatatgttgtttagtgt

SEQ ID NO: 191239 - DNA, 633 bp, Homo sapiens
ctttcctccccttttctaccaacttgaaagaatagatcactactttccatttgtttaaataaatatattgtcaaatgccgttattaagtcaggcattcttctttatatttaatagtattatatatatttaatcttcacatcagtctgatgagaggtaggcatattttcccccaacattktattatgaaactcacatactctccacctagatttggccgttaacattttattatatttattttattacatatctgtcatcttttcatctctctattcctcatcaattcaacttaatttttgatgcatctgaacatatagatatcactacagctccctaaatgcttcagcatttatattatataatatttatattaactagagttcaatatttatgtataattttttgatgtaagtctacattcattggtagcatacatcttaaaagtacattttctgaattttgataaatgcatacacctgtgtaacccaaatacctatcaaaatataacccattacttagtactggtaggtgcttctttttcttctcattttttagatggggaaactgaagaacagagaggtgaaattatctgcccaaggttacgctgctaataagtggcaaagctggaattc

SEQ ID NO: 191240 - DNA, 621 bp, Homo sapiens
gtgaatgagtccttgggtgctctgagtctgttcttaggcttttcggctgacctgcttatttgcaaaatattcatctcttgattttccccctccattcaagttgcatggatcttgtcaagtgtatcaatgcatcagagcgctgggaaaagggagagactgattcagatcaaaggtacttaaacctkaagccagaaactttaagaaaaaaggagtcttaaatggaaatatatactttgcaattcacttcctttcccctctctatttctatttttgtcttatatctcttctagcaaaaggatgagcttcatgtctatcattttggcagtttccaatgtcctagtatgcaaatccccgggtatacaaaagtgagaagcgtaaaatctgggagattgtagtataggccacaatgctagatattttcttagagatgtcaagctagtttattaaattatcccctgactgtcgtgtacccacctttaaccctctaccttgctttgctaggtaattgcagacagagagtttgggaaggtttaaccatgtacattttaattaattcctgaaatcatcagtacattttttatacctgtgcaaatgtcttaattgatatcaagagtcagcaaa

SEQ ID NO: 191241 - DNA, 621 bp, Homo sapiens
gtgaatgagtccttgggtgctctgagtctgttcttaggcttttcggctgacctgcttatttgcaaaatattcatctcttgattttccccctccattcaagttgcatggatcttgtcaagtgtatcaatgcatcagagcgctgggaaaagggagagactgattcagatcaaaggtacttaaacctgaagccagaaactttaagaaaaaaggagtcttaaatggaaatatatactttgcaattcacttcctttcccctctctatttctatttttgtcttatatctcttctagcaaaaggatgagcttcatgtctatcattttggcagtttccaatgtcctagtatgcaaatccccgggtayacaaaagtgagaagcgtaaaatctgggagattgtagtataggccacaatgctagatattttcttagagatgtcaagctagtttattaaattatcccctgactgtcgtgtacccacctttaaccctctaccttgctttgctaggtaattgcagacagagagtttgggaaggtttaaccatgtacattttaattaattcctgaaatcatcagtacattttttatacctgtgcaaatgtcttaattgatatcaagagtcagcaaa

SEQ ID NO: 191242 - DNA, 576 bp, Homo sapiens
gggcacatatacaccatggaatactatgyggccataaaaaacaatgagttcacgtcctttgcagggacatggatgaagctggaaaccatcatcctcagcaaactaacacaggaacagaaaaccaaacactgcacgttctcactcataagtgggagctgaacaatgagaacacatggacacagggaggggaacatcacacactggggcctgtcgggggatgagaggaaaggggagggagagcattaggataaatatgtaatgcatgtggcttttaaaacctggaggacagcttgataggtgcagcaaaccaccatggcacatgtgtacatatgtaacacacctgcccgttcagcacatgtatcccaaaactttaagtaaaattaaaaaaaaaaaaaagaatgctagcacgctgtcaataaagattctgcattgtgtttcatgcatggatagtaggccacaaaattcgagaataaacaaatcaaatggcatcttcacatattttttccctgataaaaaatgttcgagttgtattatccatcctgtttaagtagcaaagtatacagtttaaatatttaa

SEQ ID NO: 191243 - DNA, 642 bp, Homo sapiens
gacatataatatatgaatactatatgaatcaaatgacatataatatatgaataccaagacaaaaaaatccagtaacaataccaaagagtagtraattacaggaaagatattttccttatgatagaaatgatgttgagaaaaaaatccaagcctgagaaatatgtataaaacctgtatggatcatcttaccattgtgcgtaacaggaggtaaaggatcacatgtccagcgagaagcttcactagtgcacttaggtttttaatgtttcattttaaactaaaaagccttaatatgctcttagcatttacttgtatttgctattataggtctaggataacatgaaatatctaagacagaacaacataatagtttcctgtaattcatatcaagaatcatacttgcacaaataaaactcattctttattacctttcagatgaacgtctctttcaattttaaagcatcctttctagctaaaagggctcattcaatatttaaacagcatccaagacacatgcacacgtatgtttattgcggcactattcacaatagcaaagacttggaaccaactcaaatgtccaacaatgatagactggattaagaaaatgtggcacacacacaccatggaatactatgcagccataaa

SEQ ID NO: 191244 - DNA, 599 bp, Homo sapiens
ggtgagtcagtatctctattttttgcagttccttcatcagtgcttttcaaaatggagtttctgtktatgtgacttactatcatagctccaaggtgttacctacaaatgtgtaagtgtataaaatataaatattcatttactttcactggactgaaaaaaacttttgtgactctttcttttatggatgacatactgtattagtttcctgggggacagtaacaaaaagccgtaaaatgggtagcctaaggcaacagaaatatattctctcttgttcctggagtctgaaatcaaggtgttgacagggtcaaggctctaggggaaaaaatgtttcttggctctttctagcttcttgtggttgcctgcaatccatgatgtcttttgccttgtagatgcctcattccaatttctgtctgtcattccctctgtcagtgggtagaacacccgtttctgtgtctgtgtttctacttctcatcttacaaggatacagctatattggagttagggtccaccctaccgcagtatgacctcatcttaacttgagtacatatgcaaaaaccctgtttccaaataagatcacattcacaggtgccagcagttgg

SEQ ID NO: 191245 - DNA, 432 bp, Homo sapiens
actagatttgtttgacctgcttttataattcatctaggtgaaatgatacagtatttacttttttgaatctgttgtcttktctttacatttttgaggttcatcgatattgttgcatgttccagtaactcacttcttttgtattgctgagtagtatttgattgtatgaggacagcagtttgttcatttatcctgcctttgtgttcatgtgtgctcagtgttttactcctgcttataggtgagaacatgcagtatttggttttctgttcctgcattaattcactcaggataatggcctccagctgcatccatgttgctgcaaaggacatgatttcattttttttaaacagctgtgtagtattccatggtattttaacaatattgtctcttcaaacacatgactatttatttaggtctctttttgtttcagaattc

SEQ ID NO: 191246 - DNA, 396 bp, Homo sapiens
tgctcagtctatggctttacaatattaggtagagcagtgaaaaatatcagtatattttttataggattactttatgtaaaatacgtgctaccatcatatatgtgcattgtgtgtgtgtgtgtgtgtgtgtgtgtgtgtgaamtgattacattaaaaattaaaaagtcaaagtggccccaagttaggttacatataaactgatatgtatcatacatacaattccacataaaattttctaaatacagcacaaattaaagtgccttctagcactttattgcaaaaataccaattgaggatggcatattttagataaaatatatgtggccaatatttacacaactttcaattgataggctcccccaacaaatctctgctcagtacttgccagagaatata

SEQ ID NO: 191247 - DNA, 382 bp, Homo sapiens
aacagtgaaaaatgagtttggttatagcagaaccatctggaaacacaccagcttctgctaccttcatgctcattgttaaaaaaagattaaccagtgtgaacattctgatctgttaattyctgggactgttttctttccaatggactgtttgtttgttggtagaataacccccaaaagctcaaagctaaaatgcatcatagtcctagtcggcagttccataagaatggactggcggcatggttgagctgatatggaaaagctgcaccttcctgcagaagatcaactgacctgctatcccaccccaaatttcagcctgaggtatatttcagtgaaggcaggtagctgtgcttctcagagcagagaagcagttttaagagcacca

SEQ ID NO: 191248 - DNA, 520 bp, Homo sapiens
ggaattcttgctcaggtaagcatggcagccatctgttttgttgatggatatggttggcactttacccattacctgaactttgacatccctactgttgattatctccacaatgcccaccatgtcatcaaataccagaccaagcttcttacagttatctactgtaatggagttcattttgcccttgatttgcaatgtcatgttgacacacttgtatatgtaagccatttgtttcagctctgcrtcctcaatcaccaggttggaaacattttcctgattttccactctccacttcttaccctccagttcaagtacagctggctccttctttgtggctggtttgggggatgggctggtttggggtttaggtgcagagaatggcttggggccactgcatactggaccactctgagccttcagggcagggttcttgtgagtcttcatgtcatcagatacatgattcagggcatgtgtgatgctctccccctgattaatctgcgcaaacagggctgagcaggaagcg

SEQ ID NO: 191249 - DNA, 531 bp, Homo sapiens
ttcatgatcgtgaatcatgataggagtgcaatactatgaatttagtggctgatggagcaatgagaaaggtcctatatatctaaagattagatgtcacagagggtccctgatgttctgaatgtacaaaattcagtgttggcaatataacctatgtatctaagacacacattctcaaaatgaaacatgctgaaagctagccagagctttctgataggaaatgatgggtcaacaaaaaatagtctctagaagcttatatgaaaaaatcgtaaggaatataaataaaaatattgattatcagatatttatgagcaacaagtgtttcattgtacaccatcatacattcatattatttctcctctttaaaacatttccatggaacaaaaaaatagagcattgcatatcaattttctactgaataaaaaaagaatagtatgcttgatcttkctaaaagcttgtactttctgaatgttaaaatactttattttgaaagtggcatgaaacacagtaagatcgacgtaggtgatcccaagg

SEQ ID NO: 191250 - DNA, 650 bp, Homo sapiens
acagtgttcagataagaatatgccttaaataagcgaaacaaatggttattactttttaaattcttggatttcagtgaagacatatgatagagtacagatctatttctagcaaaagtgctgctcccccaaacatgtgttcacagcaatccattttataattgctcattttatatcaatttctgagaggagtctgttgctttgtttattcaaagtgaagaagaccggacaaaaggcaaaatttttgttttcgcatgcatgttttgtcattgtttagacaaaatcataatctcagtgtatttttttcttgggctgctttgtttctactagaaatttgtaggcaaaacaaaaattttccagcaagtctctactttctgctcctgcctaaaagccaatgaggccctaagggtttagcatctcagcacaccagtgttctttgtgatttttttagatactgtattctgygattaatcagatctttgcactaatctatgttatacatggaacacagcacacagcaggacggacggtgtatatattgtatctattctaaaggatcaagactaaacaatgaagattatgagtactaaaggcatgcttttatcacctcatagatgaaatggataaacttaaatatttagaatattgaaatg

SEQ ID NO: 191251 - DNA, 567 bp, Homo sapiens
ccagtgttctttgtgatttttttagatactgtattctgtgattaatcagatctttgcactaatctatgttatacatggaacacagcacacagcaggacggacggtgtatatattgtatctattctaaaggatcaagactaaacaatgaagattatgagtactaaaggcatgcttttatcacctcatagatgaaatggataaacttaaatatttagaatattgaaatggatttcttagtggtaggaaaatgtgtgtgaatgtgtttatgtgtacttgacaatttcacagatctaatctgcattttaagttcaggttctcagttgtcttctaacctgagaccactgatattagattcctatttttaatctttctttgccttatttttgcatcaaaatactttttagtttattatttgcctaatataagtttgaacacccgattatgtagaagaagagaaatgtttctgcttattggygaatgacacttcagatttatgccctaaaagaatgtcagctctaagatatatgagaatatacatgtctttaatggtataaacatattgttgaa

SEQ ID NO: 191252 - DNA, 637 bp, Homo sapiens
tgcttcttatcaattgaatttctgtcctcaccaggtcttcatgacatcatggttgttatgagcctagagaatgatgggtgctgaaggattacataaaaataagacgaaaagacctcttatttttctctccctaagctctgtaaatcattagggaacaaggcagcatgtctttgatctctgtaagtaaaaagtaaccagaatctcctgtgtttctcatgtagggaatatatcaaggggccagaagtacatcgaaggctccagtgcaactttttcacttcacggggtccccatattgacagttctgaggcaatgggacttcaacaaaaatgggacctttgcaagcatccaaagccttgagactaaatgaagggtaasagaaattatgtgagagaaatgtatgcctctcagaaatgtctgaaaggctctgaagaaggctagatatcacagtgactttgcatatgtatgtgttaatgggaccctacttttaacctcagattgatattgcatggtgacatagctcattagcaatcatcattcttctcactttatatcataagtactaaatattttaataatgacttcataatctctatcaagttggggaggcaaaatgtgagcctactcagtagtttgtcat

SEQ ID NO: 191253 - DNA, 637 bp, Homo sapiens
tgcttcttatcaattgaatttctgtcctcaccaggtcttcatgacatcatggttgttatgagcctagagaatgatgggtgctgaaggattacataaaaataagacgaaaagacctcttatttttctctccctaagctctgtaaatcattagggaacaaggcagcatgtctttgatctctgtaagtaaaaagtaaccagaatctcctgtgtttctcatgtagggaatatatcaaggggccagaagtacatcgaaggctccagtgcaactttttcacttcacggggtccccatattgacagttctgaggcaatgggacttcaacaaaaatgggacctttgcaagcatccaaagccttgagactaaatgaagggtaacagaaattatgtgagagaaatgtatgcctctcagaaatgtctgaaaggctctgaagaaggctagatatcacagtgactttgcatatgtatgtgttaatgggaccctacttttaacctcagattgatattgcatggtgacatagctcattagcaatcatcattcttctcactttatatcataagtactaaatattttaataatgacttcataatctctatcaagttggrgaggcaaaatgtgagcctactcagtagtttgtcat

SEQ ID NO: 191254 - DNA, 308 bp, Homo sapiens
gcaaaaccaaactattacattaagaaagataattaggtgaaaaaaaaatcaagttattttaaattttatagttgattcttgtctaatcactttgaaacagaaaataattttctgcaaggatgtgttctctaccacataccaaaatgatcttcaaactgttgaagtattaggttgatgcaaaagtaactgtgttttttgccattactttcaatggcaaaaaccacaataacttttgcaccaacctttaataaaatgagaacaagtsctgaacagtctcctgaggagataaagccagttaagctatgaaa

SEQ ID NO: 191255 - DNA, 308 bp, Homo sapiens
gcaaaaccaaactattacattaagaaagataattaggtgaaaaaaaaatcaagttattttaaattttatagttgattcttgtctaatcactttgaaacagaaaataattttctgcaaggatgtgttctctaccacataccaaaatgatcttcaaactgttgaagtattaggttgatgcaaaagtaactgtgttttttgccattactttcaatggcaaaaaccacaataacttttgcaccaacctttaataaaatgagaacaagtcctgaacagtctsctgaggagataaagccagttaagctatgaaa

SEQ ID NO: 191256 - DNA, 557 bp, Homo sapiens
gttactataatattaaatttactaaggaattcacattgcatgtatcacaccacgaagattcccttaggttttccataatatcagtacataagccagcactaaagaataaagcaataaaaatataaactatatctaatggaatgtctwttataagagattacttagaagaaattatggttaaaagagtgttcccctacttgatctacaagaagagccacttgattgtcaactgataacatagttaagtaactggcatcaatttctttctgttactattaggtttacgtgtgtttaattataacatgaaaaaaatacatgatgggtttttttgtacaaatacaataaaattgtatatttcccttttgttactttatacattaagaataatgtttccacaaccaggactatacataagtgtttatatttcctatttgcattaaagaatctttatgtgcagagtctaagaatattagtgtctcattctgtacagaagctaaaaattttaaaacttcctgactttcagacttgcctctcccaacagactattgctatcaagg

SEQ ID NO: 191257 - DNA, 621 bp, Homo sapiens
ccaaagcaaaaaactagaaagtaatttagtctctttgagaaatttttctaaagcataagtcatattgttttggggraagataagagtagagttaggtaaaatatcataaagtcagaattgctagtgttcaaattattgattcatgtgcaaacatttttatctagtgtagcacatgctctgatccttctaagtcatatttgaatcatttatcttctatgcccttcataggtacttggattctgttacttttcatattgcattgcactgtttcgtaatatctgtatttttactttaatcctgagaagaagactgtgtcttatatttctatctccttcatgtggaagaatgcaaagtacttatcatatttgttgaatgcttttctatcttcctaaaatcttaattcttcctattcttggtcttaaaatagttatctactttcttaatgagcctactttattgttccaagctagtaacaccaactgataactttgaactgaaacaaataattcacttaggtctaaattggtttcccagtcccagtggattcagcaaaaacactgaggcttagaaatgtacaccagtggccaagcatcttcacacaatgtcatttgtaccagggtt

SEQ ID NO: 191258 - DNA, 594 bp, Homo sapiens
ttaagaaagtaagacctatgtcttttaaaattcaatgtttcttaatgtttctgtgttaaagaatgtttttcctctctggaccatagcagatgacaatatttggaaaatacagtaaaaatactatgaaaatatcaggttgttataaaaattcctaatgctgccccttggtttgtgtactgattagtcacaggtaacagagagctctcagaccaaaagctctctacaaatcaaatgttcactagaactgttttaaattatgctgtaagtcatttttctatattttagaaattttttaaagctgcaacttttttttatttttcttccttttggagtaaaactttaaaagcatacaataatattactttaaaagtaaaacaataaaagctaatttgaaaacaatattagattgaaattcagagtaggaggaaaagggttccctaaaataaaattgtaatttgggaaaagtaagatgtttctcttctgagttaatgccatgwtaataaaagtctaacttctggcaataacttgaaattacattcatttatttcattcattattttttgcttttactaaaatgaatttagtaggaagtta

SEQ ID NO: 191259 - DNA, 531 bp, Homo sapiens
ttaatagcaaggtgtggccagagtagaggaagggaggccagtgtgggctcctctatttgcaacatggtatcccaaatctcagctcttcatccactgagaatggcaatgcattgatcccagaagaaaacagttctgatatacttacttcttaagcatttttgtatccagaacatttaaattatgagaaacagatttaacatgtatttagcatattagagcaataataactgaaaattttttagcaaatgtatctacagctcatcagaaatagtttgtaytggctctttcagcatgaaacttccccacttgaaggaccttctgcagacaaaacacaaaaattgctgccaaaacataaattttttaatttcatatattgttaatctagctctactaagctaaatttccaataaaagccttccacttaaattataatgccacacttaagtcactgtgtgaaaaccaaaacaatggatccaaaatattattttacacaggcttttccaagacgctgactgtactcttctagaactt

SEQ ID NO: 191260 - DNA, 569 bp, Homo sapiens
ggaagggaggccagtgtgggctcctctatttgcaacatggtatcccaaatctcagctcttcatccactgagaatggcaatgcattgatcccagaagaaaacagttctgatatacttacttcttaagcatttttgtatccagaacatttaaattatgagaaacagatttaacatgtatttagcatattagagcaataataactgaaaattttttagcaaatgtatctacagctcatcagaaatagtttgtactggctctttcagcatgaaacttccccacttgaaggaccttctgcagacaaaacacaaaaattgctgccaaaacataaattttttaatttcatrtattgttaatctagctctactaagctaaatttccaataaaagccttccacttaaattataatgccacacttaagtcactgtgtgaaaaccaaaacaatggatccaaaatattattttacacaggcttttccaagacgctgactgtactcttctagaacttcacagcttgcatggcacagagcaattttaaaatcaatttgattcacactttattcttgggaagac

SEQ ID NO: 191261 - DNA, 585 bp, Homo sapiens
tttgctgtggcagtcctaagaaactaatacaagcatctgctatgaacaagacaccaggaatattgctcaggtaatagtggagaaaaggacaaagactctgccttaagtatgctaataggttattcagtgcaayaagagtaatataaacaaaactataaacaggtattgtttgttgggagagttttaagtgatttgatattactgtagaaataaaaagtgtagaaataaaaataaaaaataaaaaactgagtagaaagttgagtagtagacagattatttttaaaaagagtttgggattaaccttgttgatatgagttatggattatggtttaaagtagaaaatgatatgtttatacttttaacaggtcactctgatatcagcaatgtaatttatttgttctgggtaataccagaatagaccagttaggaaggaagagtaagaggcgaagcaagagagaaaaggaggatctgaatggaggcagtaaaaccaacaatgactttcaagccaaatgagtttgaacgtcaaccactgtagaaggggctatatgaaaccaatgttttaaaaaagaatattgcttaaggcag

SEQ ID NO: 191262 - DNA, 562 bp, Homo sapiens
ttcaggtgtcatagaagaaaaagagatttccacaaagggagtaattttaagtcctgatttagctgggcatttgcaattcaccatgacttaagatttgtttttgacaaactcatgatttcccaatctattgtgttagaaaaccattaaaataagcataataaatatgtctcttcttggcattctctaacattaaatctaagcagtttcccttgctttttccccacaatttaatctaacaggyggatttatgtgctgcgagtaattaggcgactttggaagaggtaagatggtaagatgagaactttggtggaagcatgccacggctagactaaagcaacttaagccaggattcatagcatttgccctccaggtgctcagaagtagtgaacttaagcaggtccatcagtacaccagggcctacgtttaggcttgttcctgtacaacaacatattaatgatgttaataataatgatagcaattaaaggttactgagtccttatgatgcacacggctacatgctgtaagctcaattcattagcttatttgattcacccaacaaccg

SEQ ID NO: 191263 - DNA, 554 bp, Homo sapiens
gatctggagtctcatttatctcatgagagacacaaattaattagctgtttccctgaagtactacggggaggccagtgggctaatgaaatgataaaccaagcacctagcacagtctctaacaaataggttgttccaaaacatgttgaataaaaaataaatgaatgagagtagcagagattgctacctgtccattaaggtccactttctcccgttttccagggcactaagctggactatattccccagtcccctgtgcatggccaaaaaaygcaatgggactgacttctaaccagtgtgagtggaaataaggtatagcacagccaggactgtcctctcacaagctgctatgggttctttcccccatcctgaggaatggaatggtgatgtccagaatttgggaaggcccatactgaaacagcagtgcctgcatccccgaataactgtggatcagaggactctctccttcccccgcacatgaaaccacccaggatttttatgaacttgagaaataaattctattttgttgagccaatgtatgttgggcccatttgtcg

SEQ ID NO: 191264 - DNA, 554 bp, Homo sapiens
gatctggagtctcatttatctcatgagagacacaaattaattagctgtttccctgaagtactacggggaggccagtgggctaatgaaatgataaaccaagcacctagcacagtctctaacaaataggttgttccaaaacatgttgaataaaaaataaatgaatgagagtagcagagattgctacctgtccattaaggtccactttctcccgttttccagggcactaagctggactatattccccagtcccctgtgcatggccaaaaaacgcaatgggactgacttctaaccagtgtgagtggaaataaggtatagcacagccaggactgtcctctcacaagctgctatgggttctttcccccatcctgaggaatggaatggtgatgtccagaatttgggaaggcccataytgaaacagcagtgcctgcatccccgaataactgtggatcagaggactctctccttcccccgcacatgaaaccacccaggatttttatgaacttgagaaataaattctattttgttgagccaatgtatgttgggcccatttgtcg

SEQ ID NO: 191265 - DNA, 511 bp, Homo sapiens
gtctccaaaaaaaaaaaaaaaaaaaaaagattgtatttccttatagcctttggagtcatccattggcttcttttgctagtggaatatgggaaaaatgacgtgtgtcaattccgggaggaagctttctgagccagtttatgattccacaggttttctttattttgccttcrcattcccagatggtgcctccatcaagacagagctcccctgttaactttcattgagaatgttgcatgagagagaaataaacttttcttgttttaatccatgacacttggggctgtttgctaatgcagcacgaactagccatcctgatgatacaaaagttaagtagcagaatagacactgatgaacaacaaatttaaaaactgaaggactccagaggaattttcttataatgcaaaatgaagacataaagaaaaaagtgaaaggctggctagctaggagttatggataggagaaataaatggtccaaatatgtttaagaatgcagaaaagagacaacaaaagt

SEQ ID NO: 191266 - DNA, 511 bp, Homo sapiens
gtctccaaaaaaaaaaaaaaaaaaaaaagattgtatttccttatagcctttggagtcatccattggcttcttttgctagtggaatatgggaaaaatgacgtgtgtcaattccgggaggaagctttctgagccagtttatgattccacaggttttctttattttgccttcgcattcccagatggtgcctccatcaagacagagctcccctgttaactttcattgagaatgttgcatgagagagaaataaacttttcttgttttaatccatgacacttggggctgtttgctaatgcagcaygaactagccatcctgatgatacaaaagttaagtagcagaatagacactgatgaacaacaaatttaaaaactgaaggactccagaggaattttcttataatgcaaaatgaagacataaagaaaaaagtgaaaggctggctagctaggagttatggataggagaaataaatggtccaaatatgtttaagaatgcagaaaagagacaacaaaagt

SEQ ID NO: 191267 - DNA, 618 bp, Homo sapiens
ccaggtgaataaatagacgactctccctctgcccagaaagattgggtccaatctttgaacaaatcagctgctgtcaacataaatgtactcgcaattttacaacaaaggaaccagaaatccatgaatgactgcagagcttctcagctaatagcaaatagttagatgcagcagctggcaaggcctaggtcaaaaaggatgattttaccctagggaacaaacagtcctgatctagaccctttccaaatacctcaaaaccaaaaggtgtgtcggttatttattaagaacaaaaacaacccttcccaagtgacaggtaagagcatgaaaataattctaaygaacatgttcaaaaacccagatgcggcatctctaaagctttcaattctcacagacatagcatataacattaggagggaccaaagagtggtctctttactttgcctgttagagtcagacctggatttgtctaacaacaaatgtgtatgtgatcaccattgattacaagtctcctataattgcgcttagtcactctgtacattatgcctttaaataatcagtggataaaatataggttctaaagtcatatttgagtctaagctttaccacgcatttgctgcatga

SEQ ID NO: 191268 - DNA, 618 bp, Homo sapiens
ccaggtgaataaatagacgactctccctctgcccagaaagattgggtccaatctttgaacaaatcagctgctgtcaacataaatgtactcgcaattttacaacaaaggaaccagaaatccatgaatgactgcagagcttctcagctaatagcaaatagttagatgcagcagctggcaaggcctaggtcaaaaaggatgattttaccctagggaacaaacagtcctgatctagaccctttccaaatacctcaaaaccaaaaggtgtgtcggttatttattaagaacaaaaacaacccttcccaagtgacaggtaagagcatgaaaataattctaatgaacatgttcaaaaacccagatgcggcatctctaaagctttcaattctcacagacatagcatataacattaggagggaccaaagagtggtctctttactttgcctgttagagtcagacctggatttgtctaacaacaaatgtgtatgtgatcaccattgattacaagtctcctataattgcgcttagtcactctgtacattatgcctttaaataatcagtggayaaaatataggttctaaagtcatatttgagtctaagctttaccacgcatttgctgcatga

SEQ ID NO: 191269 - DNA, 488 bp, Homo sapiens
atgacccagcaattccactcctaggacatctaagcaaaataaaagcatattccacacaaaaccttgtacacaatattcaaagcaacattatttataattacaaaaaataaaaacaaccccaaagtccatcaaatgatgaatgaataaacaaaatgttgtatatccatagaatcaaatataactcagccataaaaataagtgaagtactgatacatgctataacatggattaattttaaaacgtcatgctaactgaaagaagtcagacacaaaactctacatataatgttactctatttgtgttacacttcttgaacaggcaaatctatayaggcagattgtacattggtggttgttaggagttgatggacaggtaaatatggagtggctgctaatgggtcctgggtttcctttggttttgaaaatattatggaatttaataatgataatggctgcacaatctgggaatatactacaaaccactgactt

SEQ ID NO: 191270 - DNA, 539 bp, Homo sapiens
aacatttgttgttttgaactttgcaagactttttctttggtgccagttttctgctcctgttcccagaccaaactgagggtcaggctgcttactctcgcggcccaataacgagatgcagatgaattgggagagatgggagtttttatttctgtaaccagttacaggtagaaggcctggaaattaccgccagaccaactcaaaattacaaagtttttccgtagtttrtttatcttctaagctatatgtctatgtgtaagtttgcattcatctaaagacataagtgattaacttcttttaatctgtagctgaggtctgagtcttgaagacattcctctggagcctcagtaaatttacttactctaaatgggtccaggtgctggggtgattacccttatcttgtctcctattaaatcacagaggtttaaggagttccttcagacccccaataaacttgtttgtggaggcctggggtttcttcagacccccaataaaacttatttaattctgaacgggtcctgttaagaattcctttgttattt

SEQ ID NO: 191271 - DNA, 610 bp, Homo sapiens
tggtgcatagagaagaaggaaactaggatagactgcatgctagcctacccacagttctcactcccttcaatcttccttttgttatgagcaggtgaccagttatatctatgtcccatgcaggcctttaccaccatggaaatgagaatcaggcacaaccatgaacaacactgagccctgaatgctcatgttaatggagcaataagttatctatttcaaaaatcccactttgtaagatccttcaactccttaatttatatttcatcaactctgtgaaattctaccttttcacaaagaatattctatgggaagtttatagatgtacaacaacaacaaaaaagtcggaatattctggagatagggttatggctgtacaacaacgtcaatgtacttaatgccacctaactgtacacttaaaaataaagtgataaatgttgtgtkatgtatactttaccataataaaacaaaaagtgattaattcatccatccccacccagggaccaagaaaagaagtcacaaaagctgccagcatgcatcctttttccttatgaccaggcggataggcaggcttaggtaacacaggcaacatgccactggaagcacttggctccca

SEQ ID NO: 191272 - DNA, 488 bp, Homo sapiens
tacctgaaagggtgatttgtagagtaagagctcttagggggacaaagtaatgaaccctgattttgatatgtttcatatgggaaggtataaggaagttaaggttctgtttaggaatcaagattaaccgtggggcaaaaggacaaaaaatagattaaggtaataatggagaacagcatagaaatgaaattcccaatgcccaaatggccaccagtttttycacgtttccctagaagaaccaagatagttcctaaagatgtctgccaggatagaaaaggaagaggcatctagattggaaaggaagaactatctctatttgcagatgacatgactttgtatacagaaaatcctagagaatacacacacatacacatattaaagctaataaatgagctcagcaaggttgcaggatataataatatcaatatgcaaaaaatcaagtgtatttctaaactggcaatcaataatttgaaaatgaaattaaagaattc

SEQ ID NO: 191273 - DNA, 488 bp, Homo sapiens
tacctgaaagggtgatttgtagagtaagagctcttagggggacaaagtaatgaaccctgattttgatatgtttcatatgggaaggtataaggaagttaaggttctgtttaggaatcaagattaaccgtggggcaaaaggacaaaaaatagattaaggtaataatggagaacagcatagaaatgaaattcccaatgcccaaatggccaccagttttttcacgtttccctagaagaaccaagatagttcctaaagatgtctgccaggatagaaaaggaagaggcatctagattggaaaggaagaactatctctatttgcagatgacatgactttgtatacagaaaatcctagagaatacacacacatacacatattaaagctaataaatgagctcagcaaggttgcaggatataataatatcaatatgcaaaaaatcaagtgtatttctaaactggcratcaataatttgaaaatgaaattaaagaattc

SEQ ID NO: 191274 - DNA, 439 bp, Homo sapiens
cccaaagcatggaaaaaaaaagttggaaagaaaggaaaactgacaattgtctagtgtggaaaaaaaagaagggaaaraaagtggcatgttttttggacattatttcattggatctaaattataagccaatggtaataataagaaagcccataattcaagccttgagattgtagtgccggccctgatttatgggaaaaaagtgtactcaattttgctgcataatgttaagcaggccaaaaaaaaaaaaaaaaaaaaaaaaaagcagaaaaaaaagagtcattctccaagaagtgtgacttttattactgctaacttgttttatttcatacttaattgaaaataaaaggtctaaaaagtactcaggttgaacccaaagtcctctgctataggtaacatcttcaggaactttattaagtgaagggatggggtggcagtggta

SEQ ID NO: 191275 - DNA, 439 bp, Homo sapiens
cccaaagcatggaaaaaaaaagttggaaagaaaggaaaactgacaattgtctagtgtggaaaaaaaagaagggaaaaaaagtggcatgttttttggacattatttcattggatctaaattataagccaatggtaataataagaaagcccataattcaagccttgagattgtagtgccggccctgatttatgggaaaaaagtgtactcaattttgctgcataatgttaagcaggcmaaaaaaaaaaaaaaaaaaaaaaaaaagcagaaaaaaaagagtcattctccaagaagtgtgacttttattactgctaacttgttttatttcatacttaattgaaaataaaaggtctaaaaagtactcaggttgaacccaaagtcctctgctataggtaacatcttcaggaactttattaagtgaagggatggggtggcagtggta

SEQ ID NO: 191276 - DNA, 411 bp, Homo sapiens
gtttatatatatttctgccattgtttatatatatttctgccatggtgtatattctacaactgagtgaaatttgatttttacttctttcttcattttaagtcaaatttactaaggtacaacttatattgaaaaaatactgctgatgttcagtttcagctccaacatgtaaagagcctggaagctgacacatgggttcttacaaaacatttcatttggracaacaaaacgcttaatgaaatcaatggcttttcttatattcatcaggtaacacattgcacggcaaattgccaccatggactctgacaagacacgtgaatctagagaatcacagccaaattctgattttctggagtagaagctgtgggagccataaactgatataaacacttaaatggtaattttgatgaattc

SEQ ID NO: 191277 - DNA, 428 bp, Homo sapiens
gaattcctattcataaatgattttatatgcattgcttgtttatatatatttctgccattgtttatatatatttctgccatggtgtatattctacaactgagtgaaatttgatttttacttctttcttcattttaagtcaaatttactaaggtacaacttatattgaaaaaatactgctgatgttcagtttcagctccaacatgtaaagagcctggaagctgacacatgggttcttacaaaacatttcatttgggacaacaaracgcttaatgaaatcaatggcttttcttatattcatcaggtaacacattgcacggcaaattgccaccatggactctgacaagacacgtgaatctagagaatcacagccaaattctgattttctggagtagaagctgtgggagccataaactgatataaacacttaa

SEQ ID NO: 191278 - DNA, 411 bp, Homo sapiens
gtttatatatatttctgccattgtttatatatatttctgccatggtgtatattctacaactgagtgaaatttgatttttacttctttcttcattttaagtcaaatttactaaggtacaacttatattgaaaaaatactgctgatgttcagtttcagctccaacatgtaaagagcctggaagctgacacatgggttcttacaaaacatttcatttgggacaacaaaacgctyaatgaaatcaatggcttttcttatattcatcaggtaacacattgcacggcaaattgccaccatggactctgacaagacacgtgaatctagagaatcacagccaaattctgattttctggagtagaagctgtgggagccataaactgatataaacacttaaatggtaattttgatgaattc

SEQ ID NO: 191279 - DNA, 411 bp, Homo sapiens
gtttatatatatttctgccattgtttatatatatttctgccatggtgtatattctacaactgagtgaaatttgatttttacttctttcttcattttaagtcaaatttactaaggtacaacttatattgaaaaaatactgctgatgttcagtttcagctccaacatgtaaagagcctggaagctgacacatgggttcttacaaaacatttcatttgggacaacaaaacgcttaatgaaatcaatggcttttcttatattcatcaggtaacacattgcacggcaaattgccaccatggactctgrcaagacacgtgaatctagagaatcacagccaaattctgattttctggagtagaagctgtgggagccataaactgatataaacacttaaatggtaattttgatgaattc

SEQ ID NO: 191280 - DNA, 411 bp, Homo sapiens
gtttatatatatttctgccattgtttatatatatttctgccatggtgtatattctacaactgagtgaaatttgatttttacttctttcttcattttaagtcaaatttactaaggtacaacttatattgaaaaaatactgctgatgttcagtttcagctccaacatgtaaagagcctggaagctgacacatgggttcttacaaaacatttcatttgggacaacaaaacgcttaatgaaatcaatggcttttcttatattcatcaggtaacacattgcacggcaaattgccaccatggactctgacaagacacgtgaatctagagaatcacagccaaattctgattttctggagtagaagctgtgggmgccataaactgatataaacacttaaatggtaattttgatgaattc

SEQ ID NO: 191281 - DNA, 556 bp, Homo sapiens
taaagtatatctttttaattaactgcaagtaattgaaactcaaaactgaatgttggcttctttaaaccacttgatccaatttcttccatgcatttactcatatcagagagtgtgagtctcatagttattatggtaattaaactacatttaatttgacaataacaatacaacgatartagatcatagatatataaaatgtttgaccatcttactctaaatttgtaaaactaagtaaagaaggaaggccagtaatgatagttaatatttttgagtgcttattattatgcatgttttaagtgctttaaaatattaacacatttaaccctcaaaacaacccgatgaagtggtatcattttaatttgtttaatcatataaaagaaagaatagagattttatgtaatttatgccaagatgaacagatactaagcattgaaacaggaattgtattccagctccaaaaccgtaattgcttattatctggttgcactgtctataggcaatgtttcagacacaaaatatacttgtgagaaaatatggacatttaatgtactaagct

SEQ ID NO: 191282 - DNA, 556 bp, Homo sapiens
taaagtatatctttttaattaactgcaagtaattgaaactcaaaactgaatgttggcttctttaaaccacttgatccaatttcttccatgcatttactcatatcagagagtgtgagtctcatagttattatggtaattaaactacatttaatttgacaataacaatacaacgatagtagatcatagatatataaaatgtttgaccatcttactctaaatttgtaaaactaagtaaagaaggaaggccagtaatgatagttaatatttttgagtgcttattattatgcatgttttaagtgctttaaaatattaacacatttaaccctcaaaacaacccgatgaagtggtatcaktttaatttgtttaatcatataaaagaaagaatagagattttatgtaatttatgccaagatgaacagatactaagcattgaaacaggaattgtattccagctccaaaaccgtaattgcttattatctggttgcactgtctataggcaatgtttcagacacaaaatatacttgtgagaaaatatggacatttaatgtactaagct

SEQ ID NO: 191283 - DNA, 523 bp, Homo sapiens
catcataaactctctttgaaactgtagctccttccatttaatatcctgtttcttttttacccttcagagtcaagctttatgaaaaagtaattctatattctgtttctatctgctcgtgttctatttattcctcaaacttggatctggatgtggcttctttcctcaccactcgacttgaatttctgctagataattttatgaataagcttcttgttgtcaaatcaaatcaatactttgygatctccctcttacttaccctttcctagtttccattacatcacattctcttgtttttttatatacatctctgttttcttcaacatttcttttacttgctatttgtccatattctgatttaaacattgaagttattcaaggcttttatctaggtctccttttcctctcaacatggaatctcagccagagatttaaatattctctacataacaaggcaaacatctcatgccataaatatttttatcagcttcagacatatatatttaagtgactcaaaaatctctac

SEQ ID NO: 191284 - DNA, 448 bp, Homo sapiens
tttttaaatattctgaaatctcwtcatactactctctagctgagtatcagttctgtctttgttctagattatttatccacaatataatcaaatcactctgtattacaacctgttttcatcataagcctcatatcatatgtgttttgtttaaaatattatttattagatggattttattatatatgatagattttatcatactcaagtaattcatactaaagcatttgagtgtgtttcaatttgtaaataatattagaaataagtggagcaaccagctagaaacttaaatatatacatacatatattcatatacatttctgataaatgtgtaaaaatttaagaaactttatagtaaggaaacaactggatcaagaagttttgagtcattttaaaaatgcaattaaaatggcttctagaaatactgcatatttttatatatctaaatgat

SEQ ID NO: 191285 - DNA, 448 bp, Homo sapiens
tttttaaatattctgaaatctcttcatactactctctagctgagtatcagttctgtctttgttctagattatttatccacaatataatcaaatcactctgtattacaacctgttttcatcataagcctcatatcatatgtgttttgtttaaaatattatttattagatggattttattatatatgatagatttwatcatactcaagtaattcatactaaagcatttgagtgtgtttcaatttgtaaataatattagaaataagtggagcaaccagctagaaacttaaatatatacatacatatattcatatacatttctgataaatgtgtaaaaatttaagaaactttatagtaaggaaacaactggatcaagaagttttgagtcattttaaaaatgcaattaaaatggcttctagaaatactgcatatttttatatatctaaatgat

SEQ ID NO: 191286 - DNA, 612 bp, Homo sapiens
ctaggtaattttcccaaaaacatagagctagtggttcatgtgtttatgatttgaattcaggaacgtatgaattgaaaaagccatgccttccacacaaggcctcaacatacagcaacatctgagaggtacaaattccccttgaccttcatataaaggaattataacaataggaatttctttcaactagaatggcttgagcccaagttttgcaaggtttgcagtagcaatgaaagttgatgagctaggagttaatacaatggatttgaaatgatgcaagtctgagagtagctgaaggaagaggtttacataatctcattcaacaaaaaaatagttattcacaataaaataatcttaaatgctagcatgagtcaataaaagaaaggagaggatacaatgatttcctgtccaataatgtgtttcckatcagacagaacacatgaagttactccactggcaatccaaattaagttctattgatagtatttttctcatttgataaatatttacaactagatacaggtaaataagctttaatgttagcttcctaaatcttaataaatattaagatataaatgaaacatcacgtaagtcacaacccttccagaatgatct

SEQ ID NO: 191287 - DNA, 612 bp, Homo sapiens
ctaggtaattttcccaaaaacatagagctagtggttcatgtgtttatgatttgaattcaggaacgtatgaattgaaaaagccatgccttccacacaaggcctcaacatacagcaacatctgagaggtacaaattccccttgaccttcatataaaggaattataacaataggaatttctttcaactagaatggcttgagcccaagttttgcaaggtttgcagtagcaatgaaagttgatgagctaggagttaatacaatggatttgaaatgatgcaagtctgagagtagctgaaggaagaggtttacataatctcattcaacaaaaaaatagttattcacaataaaataatcttaaatgctagcatgagtcaataaaagaaaggagaggatacaatgatttcctgtccaataatgtgtttccgatcagacagaacacatgaagttactccactggcaatccaaattaagttctattgatagtatttttctcatttgataaatatttacaactagatacaggtaaataagctttaatgtyagcttcctaaatcttaataaatattaagatataaatgaaacatcacgtaagtcacaacccttccagaatgatct

SEQ ID NO: 191288 - DNA, 457 bp, Homo sapiens
cctttgtggactatgaaaggttaaagacttttcttgcaatactctggacaatagcacatgcaggaaaaacagatctgctctgtctccttatggctcttcgtaaagtaatttgccagcatagtaatgcattgcatcacgttccaattgtattactgcctgcttagttttacttcttatttcaccttcatgaccttgggcttttattttccactccaaaaaaaaaaaaaaaaaattgctggcaagcaatccttgcctcakgctctgctttctaaagaaggtaggattagacaatgtctaagtctttaatcactgggacttcaacccaactaatggaatcaaaatattacctagggttttgtcatcattatagttttggaattacaaaaaaatgttattttataattaacacctttgtgtgtgtgtgtgtgcatgcatgtgtgtgaatgtgtgtaggaag

SEQ ID NO: 191289 - DNA, 457 bp, Homo sapiens
cctttgtggactatgaaaggttaaagacttttcttgcaatactctggacaatagcacatgcaggaaaaacagatctgctctgtctccttatggctcttcgtaaagtaatttgccagcatagtaatgcattgcatcacgttccaattgtattactgcctgcttagttttacttcttatttcaccttcatgaccttgggcttttattttccactccaaaaaaaaaaaaaaaaaattgctggcaagcaatccttgcctcatgctctgctttctaaagaakgtaggattagacaatgtctaagtctttaatcactgggacttcaacccaactaatggaatcaaaatattacctagggttttgtcatcattatagttttggaattacaaaaaaatgttattttataattaacacctttgtgtgtgtgtgtgtgcatgcatgtgtgtgaatgtgtgtaggaag

SEQ ID NO: 191290 - DNA, 463 bp, Homo sapiens
tgcctctctaatcacctgggaaggtgggtggtagttaaaactgtamtaaaattgtttctgtcaactaaattggaaaaatttgacagtgggattcccagtgtcttatgctctcagctgttgatcttagttaacaatttaatcactgaattatttaatatttccgtgactaaatttataaccatatactcttacagtaacttttcagtattgatcttgtaaatttaaatcttattacagctactttataattgtacttaaatagctatagtttttcctaccaaatgcatgggataattgcattttatataagacccgaattttctttctgattctgttggatataatcgtatcagtcagggtccaaataggaaagataagtcacattcaaattaggtaaattaagacagcttaataaaaagattatgtacaaacctgtgtgcagagtttaagcaaacaaagaaat

SEQ ID NO: 191291 - DNA, 463 bp, Homo sapiens
tgcctctctaatcacctgggaaggtgggtggtagttaaaactgtaataaaattgtttctgtcaactaaattggaaaaatttgacagtgggattcccagtgtcttatgctctcagctgttgatcttagttaacaatttaatcacygaattatttaatatttccgtgactaaatttataaccatatactcttacagtaacttttcagtattgatcttgtaaatttaaatcttattacagctactttataattgtacttaaatagctatagtttttcctaccaaatgcatgggataattgcattttatataagacccgaattttctttctgattctgttggatataatcgtatcagtcagggtccaaataggaaagataagtcacattcaaattaggtaaattaagacagcttaataaaaagattatgtacaaacctgtgtgcagagtttaagcaaacaaagaaat

SEQ ID NO: 191292 - DNA, 463 bp, Homo sapiens
tgcctctctaatcacctgggaaggtgggtggtagttaaaactgtaataaaattgtttctgtcaactaaattggaaaaatttgacagtgggattcccagtgtcttatgctctcagctgttgatcttagttaacaatttaatcactgaattatttaatatttccgtgactaaatttataaccatatactcttacagtaacttttcagtattgatcttgtaaatttaaatcttattacagctactttataattgtacttaaatagctatagtttttcctaccaaatgcatgggataattgcattttatataagacccgaattttctttctgattctgttggatataatcgtatcagtcagggtccaaataggaaagataagtcacattcaaattaggtaaattaagacagcttaataaaaagattatgtacaaacytgtgtgcagagtttaagcaaacaaagaaat

SEQ ID NO: 191293 - DNA, 446 bp, Homo sapiens
aatctactcagcctgtgctctataaatagaataataaagcttggacgacaacacatctgtttatagcatgctttactgaataatttaagcccagttttgagacctagtgctcagtaaaaaagatgcatttcgatgtattattgcacattgacaatgcacctagtcactcaagattgtgctgatagagacgtacaaggagattaatactgttttcatgcctgctagtgaaatgtccattatatattccatggatcaagaactaattttgactttcaagtcttatttcttaagaaatrtgttttgtaagcctatagttgccatagatagtgatgtatctgattgatctggaaaagttaattgaaaatctttggggaaaggatttaccattttggatgtcattaagaacatgtgtgatccatgggcagagaggttaataatagtttgga

SEQ ID NO: 191294 - DNA, 591 bp, Homo sapiens
ctcccacacaataagagtgggagactttaatacctcactcacaatattaatattagacagatcattgaaatagaaaattaacaaagatattggggacttgaactcagctacagatcagattgacctgatagatacctacagcactctccactaattttgcattatttttaagtatttgtattttttctacacttattttttaaagtctctaatccatcattcttaataactttaaatattcaattattataattactttaagattggtctcttatttatgtggtaatatcttgatatgctaatgttctactttattatataagttgactccatgttrgatattatatggtttcctttatttgtgtgttcattatttatttttaccagatgatctttttattttctttctgcctactcatggctccttcccactccagtaacgtcccacgtgctctgggcttgggtagtgtctatatagcatggttatgtgttttctttccccaggttctctacatatttcacatattctgtgagattattttatgtttagttattaatttttgattctggtacgtcatagttcaaggttaa

SEQ ID NO: 191295 - DNA, 591 bp, Homo sapiens
ctcccacacaataagagtgggagactttaatacctcactcacaatattaatattagacagatcattgaaatagaaaattaacaaagatattggggacttgaactcagctacagatcagattgacctgatagatacctacagcactctccactaattttgcattatttttaagtatttgtattttttctacacttattttttaaagtctctaatccatcattcttaataactttaaatattcaattattataattactttaagattggtctcttatttatgtggtaatatcttgatatgctaatgttctactttattatataagttgactccatgttagatattatatggtttcctttatttgtgtgttcattatttatttttaccagatgatctttttattttctttctgcctactcatggctccttcccactccagtaacgtcccacgtgctctgggcttgggtagtgtctatatagcatrgttatgtgttttctttccccaggttctctacatatttcacatattctgtgagattattttatgtttagttattaatttttgattctggtacgtcatagttcaaggttaa

SEQ ID NO: 191296 - DNA, 574 bp, Homo sapiens
gaagattactctccttcttccctgcctctcctgtcccccacaccaaggctgtgctatgtgagagggagtcagaggggagctctgccatctgctcctgatatctgtggaacagccccaggcaggctactctcagacctccagggcagcagtatgcctttactaaattagaggtggcagyaaatatgggatgagttagtttgaaagtggtcacaacctcaccctgaaagtactaaaagctataggtacatgttgtttagccaggaagagtgttcccagaaattgcagagctaagtcaaacagccatacacccagcaactttagcacactactgatggaggtgtgttcccaatatggtatgtgtctatctgatctgctagaaagagagctagctggtggtttgatcaaaatagtaaaagtggggaatcattctaaaaaaatacatacataacccctttaacttaaaacacatatttgccaatcttttgaacttgggccaaggccctttcctgagtctctgcggttccttctgcaaaatccacatatgcaatgcgtcaaagctgatttccaggtcggg

SEQ ID NO: 191297 - DNA, 480 bp, Homo sapiens
aagttctcatgagcatcttccatttctgctcttctccatgcaatgccatttgctgaaaaagacagaagttgtctaaggcacgtccatttggggcattaaatctgactgaggtggccagccatggcctgacccccaaggcaaacctttgaccaaagactggcttcttccaatgcatttcctcaaaatgcacatcatmcttctcaggggactgtctctaagataatatgcttatgtgattatagacctccccaaagctagaaactatgacccagaataaaccatagttttcaggatttgctgaatgaataaaaagaatcataagatcatggactgctcaaactggaaaggtctctagagatcctttccctcagtccccttacactgcagatgagaaacaggtcagaagggatgcatggcactcccaagtgtacaaggacatggcaaaaaagaaactgttgtagaatcttggtttcctgaatg

SEQ ID NO: 191298 - DNA, 644 bp, Homo sapiens
aaatattggcacatttgacatgatttgggatagaggagcattagttgccattaatccaggtgatcgcaaatgctatgcggatataatgttatccctcctgggaaagaagtttcaatatctcctgtgtgtctttcttacgatccaactaaacatccaggtccaccattttatgttccacatgctgaaattgaaagrttgtttggtaaaatatgcaatatacattgtcttgagaaggttgatgcttttgaagaatgacataaaaattgggggattgactatctttctgaaaagttatatctacttacagaaaagtaaatgagacatagataaaatcacattgacatgtttttgaggaattgaaaattatgctaaagcctgaaaatgtaatggatgaattttttaaattgtttataaatcacatgatagatctatactaaaaatggctttttagtaaagctgtttactttttctaaaaaagttttaggagaaaaagatgtaactaaacttttcaagtagctcctttggagaggagattatgatgtgaaagattatgcctgtgtgtcttacagattgcaagatattttatcaatcagtgtgtgttacctgtacaattaaaaaaatattttaaaatgcaatgcatatta

SEQ ID NO: 191299 - DNA, 519 bp, Homo sapiens
ctcaagagggaaggaagctggatacttgagtcactatgtagaaaagagctgcccagtggtcagtaaatcaaaattgcactgttacttaagcaaaaataaacttccgttgtgcttgacattttgaagtaggttcaaaaatctaaaatatgtggcactggcttaggagtctggtgatgagcagcagagaaagacactggaggcaggaaagaaggagatccatgtcaagcagttgcaaaatctatgatagacctgtcacattctctaacatggaagccaacaaagtacttacagaatgtccagctgtaaggaaagaatctgaacaagagccagaaagatgggtttcatatatataastaataagagatatgagctctggcattcaagagtaggaatgaaagggaagagaacacgcccagaagttagagagtttacctcattcgaaaagtaaattgctcctgagccagaacaagcaggagatgaggcttctgccatcctgctccagcctgttgtttgagatgt

SEQ ID NO: 191300 - DNA, 412 bp, Homo sapiens
aaggtatcttatcaccatcctacccagacttccaatggatgaatgtagacctgtgttatttcagcctatttgtgaaaccccaaggttagcaaggcaggaagaaggccatgggtttgcagaagtctaagacagacttcccactacagcccaagagrgcagggaaagcagaaatggggacagcctcccataaagagatgatttttctttccatcatctcccattttagtgcatttcagaagcccccctttcccaatctcagcctctttcatcctgttgccctataactgggatacatttattcaccctgaagtattaagggctattgtcctaccttccctgctcccccaggggatatgcaaggaaagtgtaatgtttcacagaaatgagttgaggaaggtgaaaatttcaggcc

SEQ ID NO: 191301 - DNA, 487 bp, Homo sapiens
actcaaattttggagaatctgtaggtggaccacggtttgaaaaatattgctgtagaccagggggtaaggtggggagggatgttgagagattttgagcagatctgcatgttggaatgactgctcttttcgcagcgtgggtggctagaggcatgaatccaggtgagcaatgacaagggtaaggacctgggcaatggagaggggataggartgggggcagcctgagaattgttgaggaggacctcaacaattaaattgttttgaattgttgataggacctagggactgagggaacgtgagggctgaggaggagggaggattgtgaaagactgccaggtgtttgccttgaatgcttagcagataatgatagcatcatgagggggaattccagaagaggagtgggttctgtgggggctaatggctttagccttggacattctgaacttagatgtccatggggtaactaggagaagcctcccggtaaactgta

SEQ ID NO: 191302 - DNA, 508 bp, Homo sapiens
cacatgtcccactcaagggagagacgttgggagtgagaataagagacctatgcccagtaaaggaatcccataccaatcttccctctataatatgaatggatggcccagaagcaccaggccaacaagaaggatcaccagtatggataaggaaaagaaagcaaaaacactggttccctgagaaaatcaagatgattcagaaagcttttaactttttcaatttaaaaaaggatcggggaatttgagagaacactgtatttatttaacaggaacagagtgctataaaaaaggaagaactttttaaaaaaataaagaaagaaaagatgtcttayaaagataaataatgtcatttgtgtttttttaaaaagtagaaagccagccacaaaataaatcgcattaaagaaatttctcagaatgtagattctccccctcctcaaaagaaacacagagatagaaaatattaacaaaataataagagacttagaggactaatccaggaggtccaatattt

SEQ ID NO: 191303 - DNA, 286 bp, Homo sapiens
gggccccagggtctttcctgttcagacagctgagggcctaaaaaggcatcaggtttaaagctgccatatgggctgggcccccacagccttaatgggataaacacccacaaataacaccaatgaaaagcaaagaggctagctttgataagcttcctagaagcctaagccctgagcagaattttcaggaagaggggagaagtagaggttaaagggtgtaatygctctgagatatgagagggcagaaatgacccactgtgaccatccaattattccttataccatgtct

SEQ ID NO: 191304 - DNA, 475 bp, Homo sapiens
tattatgaagaattgatgtataccatggaggctgagaagtcccagaaactattgtctgcaaccttgagactcaggaaagctggtgatgtaattcagtccaagtccacacactagagagccatggcagccaatggtataaatcccagtctgaggataagggaagatgagatgagacastcaagcaatgaggtagaaaaaaaggagtgaatttctccctttcctctgccgtttgttctattcaggcccccagcggactggatgatgcccacccatattggggaagatcatctattttattgagtctaccaattcaaatgctaatcttatctggaaacatcctcacagacacacctagaaataatgtttaatctgggcaccctgtggcccagtcaacttgacatacaaagttaaccatcacaacatgggacacttctcaaagatacctccctgtcattggcttaattttagatgagtg

SEQ ID NO: 191305 - DNA, 475 bp, Homo sapiens
tattatgaagaattgatgtataccatggaggctgagaagtcccagaaactattgtctgcaaccttgagactcaggaaagctggtgatgtaattcagtccaagtccacacactagagagccatggcagccaatggtataaatcccagtctgaggataagggaagatgagatgagacactcaagcaatgaggtagaaaaaaaggagtgaatttctccctttcctctgccgtttgttctattcaggcmcccagcggactggatgatgcccacccatattggggaagatcatctattttattgagtctaccaattcaaatgctaatcttatctggaaacatcctcacagacacacctagaaataatgtttaatctgggcaccctgtggcccagtcaacttgacatacaaagttaaccatcacaacatgggacacttctcaaagatacctccctgtcattggcttaattttagatgagtg

SEQ ID NO: 191306 - DNA, 475 bp, Homo sapiens
tattatgaagaattgatgtataccatggaggctgagaagtcccagaaactattgtctgcaaccttgagactcaggaaagctggtgatgtaattcagtccaagtccacacactagagagccatggcagccaatggtataaatcccagtctgaggataagggaagatgagatgagacactcaagcaatgaggtagaaaaaaaggagtgaatttctccctttcctctgccgtttgttctattcaggcccccagcggactggatgatgcccacccatattggggaagatcatctattttattgagtctaccaattcaaatgctaatcttatctggaaacatcctcacagacacacctagaaataatgtttaatctgggcaccctgtggcccagtcaacttgacatacaaarttaaccatcacaacatgggacacttctcaaagatacctccctgtcattggcttaattttagatgagtg

SEQ ID NO: 191307 - DNA, 368 bp, Homo sapiens
gcattccttccttctgggtgtggggcaggaccctctctggaataggggccttgtgacctacagtcaaacaaggtggggcagatgatttayggccagcttttgtacagaaaagctgtacaaaattagagggaaaattagagtagtatttttagttttttatggctggctttagtgaaaaggggcttgggtttctgtggctcatgatggggaggacagagtctagtttctatggctagccttgtggggagaataagtctgtgagacaggagggcagagaaaaacgtttgcctctgaggcttctgccgaagccttcatttggggatatcgtttgctaagccccaacagcagtatactttcattctcttcag

SEQ ID NO: 191308 - DNA, 668 bp, Homo sapiens
actggccaaacttaacctggaagcctgaaatagttacatgtgatatgaacaagagcaggggaagagaggaaaatcagtatgaaagttgattggaacaaatggcactgcattgtagttttcagttgcatgtctctgatttagagtgaacatttttccatctgtttgtcgttttgtttccttgcctatgaattgttatctatttgtttttatccatatttttcctattggttgtctgtttttaatttgttttagagactcattatatartctagatattaatctttgtcagttatatgtagtgttaacattactcgtaatctggctaatttccccttttgtttagcctcttttgtgatatagaagtttgaaatctaatatacagatttggtcttttaagcttaatgcttgtgttttagtcaagaaaatccttccatattctaaatcatattcctttatattgccttgtaaaaattctagtttaactcttgatatttatgtctttaatgcactggggtttattttgcgtataatgtgatatagatatctttaaaaaatttcatcccaaaaggtaacctcttattccagaccatttttaatactctattttttaaattgctacccttgtcatatattcagtgtccaggtgtgttggctccttctcatgtgaa

SEQ ID NO: 191309 - DNA, 668 bp, Homo sapiens
actggccaaacttaacctggaagcctgaaatagttacatgtgatatgaacaagagcaggggaagagaggaaaatcagtatgaaagttgattggaacaaatggcactgcattgtagttttcagttgcatgtctctgatttagagtgaacatttttccatctgtttgtcgttttgtttccttgcctatgaattgttatctatttgtttttatccatatttttcctattggttgtctgtttttaatttgttttagagactcattatataatctagatattaatctttgtcagttatatgtagtgttaacattactcgtaatctggctaatttccccttttgtttagcctcttttgtgatatagaagtttgaaatctaatatacagatttggtcttttaagcttaatgcttgtgttttagtcaagaaaatccttccatattctaaatcatattcctttatattgccttgtaaaaattctagtttaactcttgatatttatgtctttaatgcactggggtttattttgcrtataatgtgatatagatatctttaaaaaatttcatcccaaaaggtaacctcttattccagaccatttttaatactctattttttaaattgctacccttgtcatatattcagtgtccaggtgtgttggctccttctcatgtgaa

SEQ ID NO: 191310 - DNA, 591 bp, Homo sapiens
ccacacatgcaggagcatggcagacggattcaagctgtgaccctccagagaccacagtgatggctgggtcctccatgcccccttggatctcaaaccaccgggcaggtgactgtcagccttcctgcacctttaccacccccgtagttacgggtctgtgggcagcttctcccgagcagttctccgagtggccagcagatggcggaatttctcttgtgttccagacagaggctttcaattggcgtagcatttccactgctgagaaccagggagaattaagtactggtaacattttgaaaataaaatgtagcaggcaaaataccttggagaccacaaattgggagagycttttaatttttttaatttttcagaaaaaagatgaaatatacattagaatttacaaaacacttttatattcatcatctcaccgtaaaaagggaaaagatgaaaatcagttttaacccccttttggaaaacaggtaggctgcagctgagtcttccatctgcatgattgttagactgtaaattggatcactcggtgctagtatgtgacaatattattattgctgtaatgatattgataatgagaatatc

SEQ ID NO: 191311 - DNA, 626 bp, Homo sapiens
taggttacataaaaatggtacctcaaaggtaaatttcctgaatgtgataaatgcactgtggtaacgtaagagaacatctttattcttaggaggcataccctgaaatattaagaggttaagggacataaaatatgcaacctactctcagtagttcataaaaaatactaataaatatctacaagataaattctttaaaattcattaatctgggtgaagaatacattatttttgtatttatttgtcacatttttctgtaagtttgaaaatatctcaaatattatccaagggggtagttrtttagagatgaatttcatctctgtgatgtaaaacatgcaaaaatatatcccaaaaccaagacctgcagaaactgagttggatatttgccctggtctccttagcccaggggtcccagtgctccatgaggccactacccggagctagatgaaaagccaggcctcctgaactggtccttgatgggggatcttagccttttctccctttagaggagttgatggccagatgtggggaattctggctgaaagtagaggcataaatgcaaagatagcacaacactattttggtgaaagttgggaagtctttttgcttcacctaacaaggtctgcatg

SEQ ID NO: 191312 - DNA, 571 bp, Homo sapiens
aagcttatgcttgagcaaggggaaactgcctagtaaaagaattacagatagtgatacatgctaatgagagtaactaagggggtgggggggtgccacaggctatttccttagtggaagcagggaaggcttctctgaggaggggacatttacatggccctctatgatgagaaggagccatgagatgttgtgaggtgatttcaatgctttggacgataagcatcagaaaactctagattcaaataatttaaatgataataacatttactgtttcacattacaagaagtcccaaggtaggaaggttctagggttgtctaactcrggtcccatccacagcacgaggacgcagtttcttccatctttctgcctgcccgtctgcagggcaccctgcagcctgtagccgggcctcagcctggcttccctcatggctgtcaatagttgccaacatcccatctgaaacaacatccagaggaagaagggagaatttccagaagtgtccagcacattgactctcgcatctcactggtcagaaccgggccaaacacccacctttaaaatcacaagcaagagaat

SEQ ID NO: 191313 - DNA, 227 bp, Homo sapiens
agaagttggttaataaaacaaaaaatttcctagaacttctgtacacttagttaatttcaataaatatttcagtgcctactaaactgtgctagtcaccaaaaatgtatacaccttaccatgtagagtttagagaaacacagaaatagacgataaaggtataatgaagtacggcagcagtgtctcasgtaaaatacaacaatagcaaggaatcactgaaagaggaacaa

SEQ ID NO: 191314 - DNA, 581 bp, Homo sapiens
tgtctatgagcctgtccgtatgccagtaccacactgttttgacaactgtagctttgtaatttttgaaatcagaaagtgtgagtcctcaaacttttttcttctttttcaacattgttttggctatgaattttgcatcacttcaatttgcatcacataaattttagtatcactttaatttctgcaaaaaawttggcattttgataggacttgcattgagtctgtagatattttgggtaatattgtcatcttaaaattattaatccttccactccatcaacacaatatgtttttgcacttatttatctcttttaaatttcagcaatgttttgtagttttcacttcaatctaaccttgacacagcagctagaggaagcttttaaaattatcaatgaaattgtgtttctctgcctaaaacatttcagtggcttcccaatgaccttgaatatacagcaatacccatatggtcttccacaacccagactttgcctacttctccattatctcatatgacagccacccctcattctccactctctagccactgtgttctgtgatcagtttctagaacatgccaagctttt

SEQ ID NO: 191315 - DNA, 569 bp, Homo sapiens
tttctttctcttcctcagcatccctttttaagtcaatttccccckgtcatgcacttcagtaacaacctattaggcacattagtaaaagtgcaaatcctgggcccacaagtcagtctcctgacatacccagcttcttgctctgttttctcccctcgttttgaaataaaagaatgaaagggcaaccttctcatggaaagggtataaatctgtctcttttatgaaactccatttagttcatcatctccattcatgcccacggccatgtcctcagttttcttctcacagggatccacttctgcccagatttccttaaaaccctgggttgtgttcatccttactctccgtcccactcaatatctactcctggagcccctggggctgcctggtgctcatctgtcaatcgatgcccccagccgaggaataaggagacccacgtcctcaggaggagggagggtcacgtgagataacgagcaccatctgggtccatggagaggacacatggaaaacgctcagtgagtgtcgggggatgcgtagtccctgacacgtgccctgataactttgagtattta

SEQ ID NO: 191316 - DNA, 569 bp, Homo sapiens
tttctttctcttcctcagcatccctttttaagtcaatttcccccggtcatgcacttcagtaacaacctattaggcacattagtaaaagtgcaaatcctgggcccacaagtcagtctcctgacatacccagcttcttgctctgttttctcccctcgttttgaaataaaagaatgaaagggcaaccttctcatggaaagggtataaatctgtctcttttatgaaactccatttagttcatcatctccattcatgcccacggccatgtcctcagttttcttctcacagggatccacttctgcccagatttccttaaaaccctgggttgtgttcatccttactctccgtcccactcaatatctactcctggagcccctggggctgcctggtgctcatctgtcaatcgatgmccccagccgaggaataaggagacccacgtcctcaggaggagggagggtcacgtgagataacgagcaccatctgggtccatggagaggacacatggaaaacgctcagtgagtgtcgggggatgcgtagtccctgacacgtgccctgataactttgagtattta

SEQ ID NO: 191317 - DNA, 569 bp, Homo sapiens
tttctttctcttcctcagcatccctttttaagtcaatttcccccggtcatgcacttcagtaacaacctattaggcacattagtaaaagtgcaaatcctgggcccacaagtcagtctcctgacatacccagcttcttgctctgttttctcccctcgttttgaaataaaagaatgaaagggcaaccttctcatggaaagggtataaatctgtctcttttatgaaactccatttagttcatcatctccattcatgcccacggccatgtcctcagttttcttctcacagggatccacttctgcccagatttccttaaaaccctgggttgtgttcatccttactctccgtcccactcaatatctactcctggagcccctggggctgcctggtgctcatctgtcaatcgatgcccccagccgaggaataaggagacccacgtcctcaggaggagggagggtcacgtgagataacgagcaccatctgggtccatggagargacacatggaaaacgctcagtgagtgtcgggggatgcgtagtccctgacacgtgccctgataactttgagtattta

SEQ ID NO: 191318 - DNA, 587 bp, Homo sapiens
tggaaactcacagcattgtctctgcagtgttcccggcaaaacgtttaggctgaatttaatcatgaagacattttcagacaacttcagaatgtagatcattgagccagacagctgacctgtcctctataaacaagtccatgtcaccaccatccatgacaacaacaaaaagatgaggaaatatttggggttcaaaataactaaagaaatgcagctacattatctttttactttttttgaacccaaaatatctcttctcctttttgttgtgtgatttgtggtgataaggactatgtgaaggagacaggtcagttgtcctgctcagtgttctacattctgcagttgtctggtgattacctcctatgaaactcaggctaagcgttttctgcaagaacatggcrttgttcatattctgcaccggcagagtcctgggtgacatgctgtctcctgccagcggctcctgactcctgttctctacaggatggaattgagaggagcagggctaaggcctcccaatgctgtttgtccatctagctgtggtcttcctaagtactgacaccaattggaggctgaaggactgtggcttctct

SEQ ID NO: 191319 - DNA, 587 bp, Homo sapiens
tggaaactcacagcattgtctctgcagtgttcccggcaaaacgtttaggctgaatttaatcatgaagacattttcagacaacttcagaatgtagatcattgagccagacagctgacctgtcctctataaacaagtccatgtcaccaccatccatgacaacaacaaaaagatgaggaaatatttggggttcaaaataactaaagaaatgcagctacattatctttttactttttttgaacccaaaatatctcttctcctttttgttgtgtgatttgtggtgataaggactatgtgaaggagacaggtcagttgtcctgctcagtgttctacattctgcagttgtctggtgattacctcctatgaaactcaggctaagcgttttctgcaagaacatggcattgttcatattctgcaccggcagagtcctgggtgacatgctgtctcctgccagcggctcctgactcctgttctctacaggatggaatygagaggagcagggctaaggcctcccaatgctgtttgtccatctagctgtggtcttcctaagtactgacaccaattggaggctgaaggactgtggcttctct

SEQ ID NO: 191320 - DNA, 584 bp, Homo sapiens
tttcagtctgtgttccttccagctcattgtgccctgtctcagtattgccgaccttcccagattctctagtccccctttccctcacaggtggggaactcagtgtatggtaaaatgttcctgcccctaaggaaacagggctctggggaagtcctggatggtgggtgatttatttcgggtggtcatcattcgctttctctaccccaccccttgcctgccttttcagataggcgtgtttgaccaggtcccccttctcaatatcctctatcaatctcacttctcccagttttcattgaaatgtcaatggtgtccccctagtctcttaaatcattcaatttctacttcctctgtccttttctccttttgatacaccgtttagtacaccatctccactcacctccatggccataccttcaattttattcaaatcaggaaccacttctgttcagtttctctaaagctgagcttkcaaactctcctgccagctatttctgggtcatgttaatctttgtttttctgtggttcttgtagattctcatttatctgacagtaaccttatttgtcaaatgaaggtgacaataacatga

SEQ ID NO: 191321 - DNA, 410 bp, Homo sapiens
gtgacccttggcctgctttggccttccaggagaagacttggggtccacttgcaagatcacaggtcctcagtgagcatcctgctagtttctgtccccatcaccctcccaccccgtcagctcctgcccctgtatcttggttcactctcacattgtcatcatctctcctttttactccaatttttcttctttgaggccaagttcagagactggagaaatgcaattcagctgactcttgaagtcattagacattcgggagtctgcctctgaatgagcttctagtagagggatcttgaggccagttatgtgttctactcttcatgaaaaagtaaaagcaatttgcaacctaataaactgatttcactgcacattcccgggttaagaacagcratttgattttgctatatctttaa

SEQ ID NO: 191322 - DNA, 470 bp, Homo sapiens
gtacagggctgtgaatgagcagtgtaccctccggcaactaagctgaacttgtaaatgaaatgcacccctttaactgcccccaagatatgcactatgtacatatcaaggactgccaatccattcatacatccattaatggtaacgtactatgaacagaaccttgtctgaggctgttctcaccatccttggctacaagtagcactacctcttgcagaggatctccatgcagatttaatgggtaacacatacagtggatcaatagatgtgaatttcttttcatcctatggctgttgtaatcctgggagaaacattwtgcctctttgctcccaggataaaatgagagaaaaccaataaaaatgtttctttttaaatgattagccaactactggtcagaactggtatgcagatcaaaacctgatgtggattacttattttactaaaatattttcttaaatcagacacaactggaa

SEQ ID NO: 191323 - DNA, 498 bp, Homo sapiens
agttggcaagctgatggggttgctgttggattcggccttagccccctgagatgcactggttgatgatggtttagaagacaacacagcagaatgactcgaatgatggatggaatctataaaatccatgaatgaaagaaaacgtatgatgttctacagagaactggaatcctggccttatgtttacccaggggtaccagggctagagtcttgctttcagggaaagaaccaagcacaagcactgttagcagtgttcattttcttgcttgcagacagctcctatagtgaggcaaaccaccttagggatgacagcggtgctctgagctctgaaacatgaaaatggcaactccaaaaatatcaggcaagactagcagcatctgtggacacccamatatacttagggaacactgctcaggaataagtagcaagatcattgtaggagagatgaaggaggttttccatcttaaagaagatctatctgacagagtcaccaaggaagaa

SEQ ID NO: 191324 - DNA, 404 bp, Homo sapiens
cccacggcctgtcctctactcttccagaaccctgttgttctgacagcagggagggcaaatccatgcrgcatctcccgccatgacctccagcctgcagaggagaggtgccacaggacctttacacgcacaccgctgttcccctcacccatgcatttcttaatgccttggtgaggagaatgcctctgggtcttccttgatgggagctaaaggaacaaaggtaaataatgctatgggacccactgagaattggggctgtggaagagtggccactgaagtaatagacagatgcagctattgccagatactcagtgccagagcagggagggagagggaagaaatacggacctcaccttcctctcacttccaggctccatcgggtgcccccattgctaaacctaactaca

SEQ ID NO: 191325 - DNA, 402 bp, Homo sapiens
cacggcctgtcctctactcttccagaaccctgttgttctgacagcagggagggcaaatccatgcggcatctcccgccatgacctccagcctgyagaggagaggtgccacaggacctttacacgcacaccgctgttcccctcacccatgcatttcttaatgccttggtgaggagaatgcctctgggtcttccttgatgggagctaaaggaacaaaggtaaataatgctatgggacccactgagaattggggctgtggaagagtggccactgaagtaatagacagatgcagctattgccagatactcagtgccagagcagggagggagagggaagaaatacggacctcaccttcctctcacttccaggctccatcgggtgcccccattgctaaacctaactaca

SEQ ID NO: 191326 - DNA, 402 bp, Homo sapiens
cacggcctgtcctctactcttccagaaccctgttgttctgacagcagggagggcaaatccatgcggcatctcccgccatgacctccagcctgcagaggagaggygccacaggacctttacacgcacaccgctgttcccctcacccatgcatttcttaatgccttggtgaggagaatgcctctgggtcttccttgatgggagctaaaggaacaaaggtaaataatgctatgggacccactgagaattggggctgtggaagagtggccactgaagtaatagacagatgcagctattgccagatactcagtgccagagcagggagggagagggaagaaatacggacctcaccttcctctcacttccaggctccatcgggtgcccccattgctaaacctaactaca

SEQ ID NO: 191327 - DNA, 404 bp, Homo sapiens
cccacggcctgtcctctactcttccagaaccctgttgttctgacagcagggagggcaaatccatgcggcatctcccgccatgacctccagcctgcagaggagaggtgccacaggacctttacacgcacrccgctgttcccctcacccatgcatttcttaatgccttggtgaggagaatgcctctgggtcttccttgatgggagctaaaggaacaaaggtaaataatgctatgggacccactgagaattggggctgtggaagagtggccactgaagtaatagacagatgcagctattgccagatactcagtgccagagcagggagggagagggaagaaatacggacctcaccttcctctcacttccaggctccatcgggtgcccccattgctaaacctaactaca

SEQ ID NO: 191328 - DNA, 402 bp, Homo sapiens
cacggcctgtcctctactcttccagaaccctgttgttctgacagcagggagggcaaatccatgcggcatctcccgccatgacctccagcctgcagaggagaggtgccacaggacctttacacgcacaccgctgttcccctcacccatgcatttcttaatgccttggtgaggagaatgcctctgggtcttccttgrtgggagctaaaggaacaaaggtaaataatgctatgggacccactgagaattggggctgtggaagagtggccactgaagtaatagacagatgcagctattgccagatactcagtgccagagcagggagggagagggaagaaatacggacctcaccttcctctcacttccaggctccatcgggtgcccccattgctaaacctaactaca

SEQ ID NO: 191329 - DNA, 404 bp, Homo sapiens
cccacggcctgtcctctactcttccagaaccctgttgttctgacagcagggagggcaaatccatgcggcatctcccgccatgacctccagcctgcagaggagaggtgccacaggacctttacacgcacaccgctgttcccctcacccatgcatttcttaatgccttggtgaggagaatgcctctgggtcttccttgatgggagctaaaggaacaaaggtaaataatgctatgggacccactgagaattggggctgtggaagagtggccactgaagtaatagacagatgcagctattrccagatactcagtgccagagcagggagggagagggaagaaatacggacctcaccttcctctcacttccaggctccatcgggtgcccccattgctaaacctaactaca

SEQ ID NO: 191330 - DNA, 514 bp, Homo sapiens
agaaaattgttcaacaagggacatcatcatttaaagtgataygaagaaaactcagctaagcatatgggctagattagagagaaaaataaaggacccatctctgccctggaaaaactactggtagcatctttcagaaagctctctgtgtttgagtacgcaccttgatccataggctcacatttgatcccaactggcggctgcttcttggcattaactttggattcccaaccagtaaatcttagcaagatctgagtttctccaggtatgatattattttgtttgaccatccttatcttcaagggctaccaagaagaaacaaatcatttatttacctccccagaggaaaaggttttaccaatgagacactttcttaccatgaccccagggcccccatgccctgttcacttgagtgccctgtgtggcctgagagaagctcatactggtcacaggattctttatatgattaacctccttcctgaatcccaactttatggtggtggtgatgacaggtatc

SEQ ID NO: 191331 - DNA, 514 bp, Homo sapiens
agaaaattgttcaacaagggacatcatcatttaaagtgatacgaagaaaactcagctaagcatatgggctagattagagagaaaaataaaggacccatctctgccctggaaaaactactggtagcatctttcagaaagctctctgtgtttgagtacgcaccttgatccataggctcacatttgatcccaactggcrgctgcttcttggcattaactttggattcccaaccagtaaatcttagcaagatctgagtttctccaggtatgatattattttgtttgaccatccttatcttcaagggctaccaagaagaaacaaatcatttatttacctccccagaggaaaaggttttaccaatgagacactttcttaccatgaccccagggcccccatgccctgttcacttgagtgccctgtgtggcctgagagaagctcatactggtcacaggattctttatatgattaacctccttcctgaatcccaactttatggtggtggtgatgacaggtatc

SEQ ID NO: 191332 - DNA, 514 bp, Homo sapiens
agaaaattgttcaacaagggacatcatcatttaaagtgatacgaagaaaactcagctaagcatatgggctagattagagagaaaaataaaggacccatctctgccctggaaaaactactggtagcatctttcagaaagctctctgtgtttgagtacgcaccttgatccataggctcacatttgatcccaactggcggctgcttcttggcattaactttggattcccaaccagtaaatcttagcaagatctgagtttctccaggtatgatattattttgtttgaccatccttatcttcaagggctaccaagaagaaacaaatmatttatttacctccccagaggaaaaggttttaccaatgagacactttcttaccatgaccccagggcccccatgccctgttcacttgagtgccctgtgtggcctgagagaagctcatactggtcacaggattctttatatgattaacctccttcctgaatcccaactttatggtggtggtgatgacaggtatc

SEQ ID NO: 191333 - DNA, 514 bp, Homo sapiens
agaaaattgttcaacaagggacatcatcatttaaagtgatacgaagaaaactcagctaagcatatgggctagattagagagaaaaataaaggacccatctctgccctggaaaaactactggtagcatctttcagaaagctctctgtgtttgagtacgcaccttgatccataggctcacatttgatcccaactggcggctgcttcttggcattaactttggattcccaaccagtaaatcttagcaagatctgagtttctccaggtatgatattattttgtttgaccatccttatcttcaagggctaccaagaagaaacaaatcatttatttacctccccagaggaaaaggttttaccaatgagacactttcttaccatgaccccagggcccccatgccctgttcacttgagtgccctgtgtggcctgagagaagctcatactggtcacaggattctttatatgattaamctccttcctgaatcccaactttatggtggtggtgatgacaggtatc

SEQ ID NO: 191334 - DNA, 553 bp, Homo sapiens
ggaattcaacatttagctttcttttctgagatcaagacatcacttagattttggtcttgtaattccttaccatcttgtatgctctttgttgcwccaaaatcttctttttcttctatcttatgcagaatttctagttgtttttatcaagaatgtgggtttgaacaactgagcatattattttattggaaaagtgcaattgctttttactaccgattcctaattatccagaggatctagaaaaaatggatttaactctttggccaattaaaacacaaatttattccaaaaatggattatctgttcttataaagctatagtatattaaaagatatttaatacataaataacagtaaacaaagtatcctctactatggtttgaaaattatttagaatcttgcaattgtcctgggtctctctaaatgctaatgatcaccaatgagtttgacaaatagagatgttacaagtgattggtttaaatctttgctgcaccttaaatgtattttaaaatgtgcccctaactctttattttacctgactgtatttcagtgcatca

SEQ ID NO: 191335 - DNA, 553 bp, Homo sapiens
ggaattcaacatttagctttcttttctgagatcaagacatcacttagattttggtcttgtaattccttaccatcttgtatgctctttgttgctccaaaatcttctttttcttctatcttatgcagaatttctagttgtttttatcaagaatgtgggtttgaacaactgagcatattattttattggaaaagtgcaattgctttttactaccgattcctaattatccagaggatctagaaaaaatggatttaactctttggccaattaaaacacaaatttattccaaaaatggattatctgttcttataaagctatagtatattaaaagatatttaatacataaataacagtaaacaaagtatcctctactatggtttgaaaattatttagaatcttgcaattgtcctgggtctctctaaatgctaatgatcaccaatgagtttgacaaatagagatgttacaagtgattggtttaaatctttgmtgcaccttaaatgtattttaaaatgtgcccctaactctttattttacctgactgtatttcagtgcatca

SEQ ID NO: 191336 - DNA, 637 bp, Homo sapiens
aaaagcctacttagcagtgcaatggtaragtaaggaggataacatttactatcctccttacttacaaagggcacctgccactgtatgggtggtgggctggtatcaactcagtcatacccctacctggaacctaggttgtaatgttagttccaccagtactcttcagatcaggcagcatgataaagggaaggaaggcattaatcagcacaagtaaacaatagctgatataggttctgcctctgctgttggtctatgttctatgttgatagtcagctcctctttttcattttttcaaatcacctatcaatgctccctttaccttctaccaacacctttccctatcagaaattttaaactagtagtatgaccaaaattttcattccaatagactgcaaatcctttacagctacagtttcccactaaccattatctttggacactagtgaattaaggagccccagtaaattgcccatgttctagatgtaatcttctttgctcccattgtatacaaacactccaacatgctttcggcactgtaaaatgccagttgaaaataggaattctgtatcttgtaacatgaaaagcccaacatgattatagaacagtctcaggttctcattgaacgaaaccaggacta

SEQ ID NO: 191337 - DNA, 637 bp, Homo sapiens
aaaagcctacttagcagtgcaatggtagagtaaggaggataacatttactatcctccttacttacaaagggcacctgccactgtatgggtggtgggctggtatcaactcagtcatacccctacctggaacctaggttgtaatgttagttccaccagtactcttcagatcaggcagcatgataaagggaaggaaggcattaatcagcacaagtaaacaatagctgatataggttctgcctctgctgttggtctatgttctatgttgatagtcagctcctctttttyattttttcaaatcacctatcaatgctccctttaccttctaccaacacctttccctatcagaaattttaaactagtagtatgaccaaaattttcattccaatagactgcaaatcctttacagctacagtttcccactaaccattatctttggacactagtgaattaaggagccccagtaaattgcccatgttctagatgtaatcttctttgctcccattgtatacaaacactccaacatgctttcggcactgtaaaatgccagttgaaaataggaattctgtatcttgtaacatgaaaagcccaacatgattatagaacagtctcaggttctcattgaacgaaaccaggacta

SEQ ID NO: 191338 - DNA, 312 bp, Homo sapiens
ctgttgtagccagggctcctagagaaggctgtcaacattgaagggcccagatcccttctaccagtttttcttgtgcttcctatgtgcttgtaactgtgaatctcctgcttttcmaacaactcttctgccttttgtatgggtatacattaaaggggaaaatcagggcctcttcacactactctggcaaaatcaacctgaactgctggattataggtcttggcctctggagctgcctgcttgagccctggcaggtctggaggcttggggctctttcattgactcagaaatatttctgcttcccacccaggactt

SEQ ID NO: 191339 - DNA, 312 bp, Homo sapiens
ctgttgtagccagggctcctagagaaggctgtcaacattgaagggcccagatcccttctaccagtttttcttgtgcttcctatgtgcttgtaactgtgaatctcctgcttttccaacaactcttctgccttttgtatgggtatacattaaaggggaaaatcagggcctcttcacactactctggcaaaatcaacctgaactgctggattataggtcttggcmtctggagctgcctgcttgagccctggcaggtctggaggcttggggctctttcattgactcagaaatatttctgcttcccacccaggactt

SEQ ID NO: 191340 - DNA, 637 bp, Homo sapiens
aaaagcctacttagcagtgcaatggtagagtaaggaggataacatttactatcctccttacttacaaagggcacctgccactgtatgggtggtgggctggtatcaactcagtcatacccctacctggaacctaggttgtaatgttagttccaccagtactcttcagatcaggcagcatgataaagggaaggaaggcattaatcagcacaagtaaacaatagctgatataggttctgcctctgctgttggtctatgttctatgttgatagtcagctcctctttttcattttttcaaatcacctatcaatgctccctttaccttctaccaacacctttccctatcagaaattttaaactagtagtatgaccaaaattttcattccaatagactgcaaatcctttacagctacagtttcccactaaccattatctttggacactagtgaattaaggagccccagtaaattgcccatgttctagatgtaatcttctttgctcccattgtatacaaacactccaacatgctttsggcactgtaaaatgccagttgaaaataggaattctgtatcttgtaacatgaaaagcccaacatgattatagaacagtctcaggttctcattgaacgaaaccaggacta

SEQ ID NO: 191341 - DNA, 582 bp, Homo sapiens
tcatttcagtcataccctgcatgtgccaagcatgctcacgtgaccagagaacagcctcaaccagtgggacacagtagcctctagtcatatatatgatgtttcagcagtgacctcctgggtgggcagaagggatatgggcagggcattgaaagtgcctactgtactcactgaattacaatgcttcttggtcactcamaatcatgtccaactagttgtatcacgagtaagatggcaagtacagatcactgtatggaactcaagaaactcagagctactcttcctacacccaaggagatgtttctaatgtcaatgaccaagatgatctcacccttcatctaccttcatcttatctgtcaccatgtcacatagactttacctccttagtagcccttctgctccttcctttctgcctcctcgctttgtcttcattcaagccttcattgtctctcagcaagactggcctcccaaactccattctctgaccctttccaatataccttattgctggagtcatcttactaaaacacaaatctgatcacggccctcccctaataaaatcccttgagattttccatagctttc

SEQ ID NO: 191342 - DNA, 426 bp, Homo sapiens
gccctagtaaaggttctcaatgagggccctgcccctgcaacaggcttctgcctggacatccaggcttttccatacatcctctgaaattgaggcggaggctccccagcctcaactcttacactctgtgcatctgcagrtttaatactacttggaagctgcctaggcttatggtctgtctaaagcagtggcccaagctttaccttggcccttttgagccatgagtggaactggagcagtccagatgcagggagcagtgtctcaaggctgtgcagggcagcagggcccacaaaaccattcagtcctcctaggcctccaggcctgtaatgggaggggctgccaagaaagtcaccaaaaagcttttgaggccttctccccattgttttgggtcttaacacttggctccttttttacttatgcaaatttctg

SEQ ID NO: 191343 - DNA, 432 bp, Homo sapiens
attcagcaccacatttccccttcacactgccctagtaaaggttctcaatgagggccctgcccctgcaacaggcttctgcctggacatccaggcttttccatacatcctctgaaattgaggcggaggctccccagcctcaactcttacactctgtgcatctgcaggtttaatactacttggaagctgcctaggcttatggtctgtctaaagcagtggcccaagctktaccttggcccttttgagccatgagtggaactggagcagtccagatgcagggagcagtgtctcaaggctgtgcagggcagcagggcccacaaaaccattcagtcctcctaggcctccaggcctgtaatgggaggggctgccaagaaagtcaccaaaaagcttttgaggccttctccccattgttttgggtcttaacacttggctcct

SEQ ID NO: 191344 - DNA, 567 bp, Homo sapiens
tttgtattattatattactgtaattccctgaactttctaggcattactgttattgtctgtctaatttgctgtcttcctgtctaggctgtaagcactttgagggcatcatctatgacagattcaaccccatattccccaagttttacaaagttcctggcagataatgggtattcaataaatgtatttttaatatctgaatgaataaattcaattgtaattatgaagtttaatgttttcctaggcatgaatctacarttaatattcccttttgtgaaagtttatcattgttccactttgacccattgtattgtagactctggatgtcggcttcatatgtttgcatctgttctttctatgttttaaaagaaaacatttttctatattttagaagaaaacatttattatttacattcccttgctttctcttatgtgttttcttactatttgttagtataccacaatataacagttaattccatttagtctaaagagtaaataataataaaaacttctgtatgtaagggggaaaaaacccactccagctagctccaataagaaggaggttta

SEQ ID NO: 191345 - DNA, 542 bp, Homo sapiens
gcaaacactgcaaatcagaaggtagttttattttttggctgagaagcctgtttatgaacatgactaactcatatggattagacatggagggagagagggactgaaatgacctgtaagatgaccgtctgctgccactaactaaattatgaacttaggaggggattggctccaagttaatatcagttgcaaacagcagtgtgcaaggagatatctgaaatcaccattagtcttacaagctcagcagctggaaggaagatttctaggatgccatttattatagtgcaaagcagctctgaggagccacaagccctaaaagatttagggtatgmctagagaacattgagagacaagttgattaggaaagaattggtctgtgatctttaggagtctatgtctaggaaaaaattatgagaatcactagtaatggagctggtgttcactcaggcaccatggaagcaattaacattagatggtcaactggaaattaagctgggagtgttgattctagggtctggtctgccaataatttgttggctaaccta

SEQ ID NO: 191346 - DNA, 542 bp, Homo sapiens
gcaaacactgcaaatcagaaggtagttttattttttggctgagaagcctgtttatgaacatgactaactcatatggattagacatggagggagagagggactgaaatgacctgtaagatgaccgtctgctgccactaactaaattatgaacttaggaggggattggctccaagttaatatcagttgcaaacagcagtgtgcaaggagatatctgaaatcaccattagtcttacaagctcagcagctggaaggaagatttctaggatgccatttattatagtgcaaagcagctctgaggagccacaagccctaaaagatttagggtatgcctagagaacattgagagacaagttgattaggaaagaattggtctgtgatctttargagtctatgtctaggaaaaaattatgagaatcactagtaatggagctggtgttcactcaggcaccatggaagcaattaacattagatggtcaactggaaattaagctgggagtgttgattctagggtctggtctgccaataatttgttggctaaccta

SEQ ID NO: 191347 - DNA, 612 bp, Homo sapiens
cagcattctcagaggataaataaaaaagattgctactgaaagaacccaattttgtttttcaaaatatatgtgcaaatagacattgaaaaaaatatgggcatgatataatcaaaatggtataaattgtcatgtatggatagaggataataatgatttctattttgggggaggactttttaattttcttgttagcgaacttcttttgtaataataaaaaatgagtttttaaagaatccctatgaaaatcagtttcgttatctataaaaaggggataatcatgtttcacgtaagatacacgagaatttgatgacataatatatacactgatcttgccatagacccgaaaacataggagatatccaatagatggtaaatatgctgtggttgcatcaatctatgttatgtgttttmaaattaccttgctttttaaatgaaagcacagaatggaagttttacacaaatgtggcagaataatttattaagatattaattttcagttcgatcttgctactgtaggtatttttccttctcctcatcctctcacaggaagacaaaccgggcactcctttgcctcaggggctttgtgtggaattgtggaaaactacaatccct

SEQ ID NO: 191348 - DNA, 578 bp, Homo sapiens
actcaatggaaactttaattctgaggatttattcttctctaacttctgaaaatttctgaatattaatgtttttctaatatattttctttttttattgtggtccctcctatataactactattagatggctattggaccttctgattaactctttatgcttcttaatatttttaaatattttctatctttttcttcttgttttatattttgggagacctccttttcatctttcagtccctaatttaaacttgaatggttatcattctgttagttagacttatttttaatttaggatctatatttttaataaactttgtcagccatttgttcacctaatcctttctttcagatttttaaaaatctttaattgtttttgcactgattttagatttacagaaaagtcgcaaatatagtacagagtttcccctrtatgcttcactcatcttcccctaaggttaccacagtgcatttatcaaaagtaagaaataaacattggtacattactattaactcaactacaaattctgttcagatttcaccagtttttccactaataccctttttctcttcccagattc

SEQ ID NO: 191349 - DNA, 578 bp, Homo sapiens
actcaatggaaactttaattctgaggatttattcttctctaacttctgaaaatttctgaatattaatgtttttctaatatattttctttttttattgtggtccctcctatataactactattagatggctattggaccttctgattaactctttatgcttcttaatatttttaaatattttctatctttttcttcttgttttatattttgggagacctccttttcatctttcagtccctaatttaaacttgaatggttatcattctgttagttagacttatttttaatttaggatctatatttttaataaactttgtcagccatttgttcacctaatcctttctttcagatttttaaaaatctttaattgtttttgcactgattttagatttacagaaaagtcgcaaatatagtacagagtttcccctgtatgyttcactcatcttcccctaaggttaccacagtgcatttatcaaaagtaagaaataaacattggtacattactattaactcaactacaaattctgttcagatttcaccagtttttccactaataccctttttctcttcccagattc

SEQ ID NO: 191350 - DNA, 409 bp, Homo sapiens
gccgggctacctgtatttctttataagtaaaagtgttaattctctttttagtcgattcttttgtgctttgatatcacattttgggggctttacagaaataattagaagttttttttttctatgtttgagaatattttaagttatttygaaaatatttgtttttcaaaacattgttataacttactctgacacaatgtgagcttcgtgcattttggaaaactgtgagaccgagcatcttgacaaatttctcattttattgtaagtataacaattctggtctttgtttttcacttaaactttgccattttctctgtccataaaatatatttaaaaagggtgagcatatcagtgtcttaggactgtttcgatatggttatgtttatattatcacttcttccttttctcacct

SEQ ID NO: 191351 - DNA, 506 bp, Homo sapiens
ttagtgaaaatagcaattatttattggatatttattagaagaggtcagtactttatgcacattatgtctaattttcacaaaacattgtaatatgtcatagtcaattttaccgtgaagatttcctcagtgtcaaatagctggtgtcattgcgtgttcagcaatgttacatgtaagaaatagaaagcacattaggtgttttaagaagaaagaagtagaatagaatggataatgatgctcacaaaattgctgaaaaagtagaagaaatgcaagtctggacaagaacaaccaaggacccttggtttacagatcacaactgtagttataatctagaggtgaggaagctatgattggtgcttctgctactattgctgacgtgactgcctcacatgcaatcacgcacttgtgctatcatggcatagtttttacctgtggmagccacagtaagattgtctccatctcatttttactttcccaatattgattgagtaaatctcattggcaaaacc

SEQ ID NO: 191352 - DNA, 506 bp, Homo sapiens
ttagtgaaaatagcaattatttattggatatttattagaagaggtcagtactttatgcacattatgtctaattttcacaaaacattgtaatatgtcatagtcaattttaccgtgaagatttcctcagtgtcaaatagctggtgtcattgcgtgttcagcaatgttacatgtaagaaatagaaagcacattaggtgttttaagaagaaagaagtagaatagaatggataatgatgctcacaaaattgctgaaaaagtagaagaaatgcaagtctggacaagaacaaccaaggacccttggtttacagatcacaactgtagttataatctagaggtgaggaagctatgattggtgcttctgctactattgctgacgtgactgcctcacatgcaatcacgcacttgtgctatcatggcatagtttttacctgtggcagccacagtaagattgtctccatctcatttttactttcccaatattgaktgagtaaatctcattggcaaaacc

SEQ ID NO: 191353 - DNA, 459 bp, Homo sapiens
aaccagaaatcacttttaaacctttctctgtccccatatcctgtcacacaatccatcccgtctcttctgtattttaactacctctcaaatccaccaactttctcattttccactagcaccatcccgtatgaaaccattattatttctgacttcaatctccaaaagcactctgacagcaatctaacttacttcccttccatctcagtggctgcacttctttgtccacactacagccagagatctctaacagtctgatcacattgttctccttcattaactccatcaaaagtttcctgttgctcttaggaaaaagtctgcagttgttattgatgcaggttccagtttacatctgcaggtttaagacttatccatcctacctctcttcactaattccttttcaaacacacacacaaacacacaaacacayacacacacacacacacaccccactgttaatgc

SEQ ID NO: 191354 - DNA, 624 bp, Homo sapiens
aaatgatataataaaaacttctaatatatttgttttggctctgctatcaattttctgtgttttccctacacaatcatttgtgaagtctagatagctcactaagatgcatctatgtatmtatacatgtactttttttctttggggttgaagtcatggtgattcagggaaaaaaataagtctataagcaaacatacgaacaaagatttagttggctcacaaataactgagatatccttcatcttaatcagagaaatggttggtctagagtatgaagaaacaaaagaagtttgtgtgccagaggcaaaacgaagaaaatgttttagaggaaaagcaatcaattatgagaaatattgctgataaggaaaataaaaggaaattgaaattgaccctatattgtggcaagttggaggccattggtgaccctcacaagcactgtttcataaaatggtaaatagcttggctggagagcaagatagaatgagaaaagagaaattagaaacagtgaatatatcccaacctttggaagaattttattgtaaattggagcatagaagttgggctgtagctggaaaaggatgtgggattaagagatttgtttctgtagggtgaggaaaagtaatagca

SEQ ID NO: 191355 - DNA, 367 bp, Homo sapiens
tgtgttacagatgatttacagatttatgccttgcagatgggctacaggtgtgcaccttggggtggtgtatagtgcctggggtaattggagctcccagcctccatcatgttcattggctaacctcaggatattttaacaaacattcccatttttaatgtgtgtcttgaaatgtagggaagcactgcattacagagattatttcctaaataacctctgcttacagccagttccaccttcattttttctacttatatgccctacsatatttatactgaaattaaattgaaagagtattcacatacaattccatggcaaatgtattgtagcaaataaacttcagaggaataagacatgaatgtccttgcat

SEQ ID NO: 191356 - DNA, 600 bp, Homo sapiens
ataaggaaaaagggtaaatatatatgcagactctaagtatgcttacctagtcctccatgcccatgcagcaatatggagagaaagggaattcctaacatctgagggaacacctatcaaacaccaggaagccattaggagattattattggctgtacagaaacctaaagaggtggcagtcttacactgccagggtcatcagaaaggaaaggaaagggaaatagaagggaaccgccaagcaaatattgaagccaaaaaagccacaaggcgggatccttcattaggaatgtttatagaaggacccctagtatggggtaacccttctcagaaaccaagccccagtactcagcagaagaaatagaatggggaacctcatgaggacatagtttcctcccctcaggatggctagccaccaaagaaggaaaatacttttgcctgcagctaatcaatggaaattacttaaaacccttcaccaaacctttcacttaggcattgatagcgcccatcagatggccaaatcatttrctggaccaggccttttcaaaactatcaagcagatagtcagggcctgtgaagagtgccaaagaaataatcccctgccct

SEQ ID NO: 191357 - DNA, 565 bp, Homo sapiens
gtctactgtacccaaaaatatggtttcttgagagtttattaacatatctaggaaacaatagccaaataaataacattataagacaaagcataaacgagaatgtactaaagttactaaaatggttaattggtccttcatattgcttcatagaaatgggggggtagaagtcttaggcatatggcagagcagatgcagactcaataaggttggttggctggtgtctggtaggcaaaggtctttatccactgaaagaagtttgaggctttcagagttatttcactttaacctataataatatttcatgcccaaaatatctttctactggcttgatttttttacatggagaaatgatttccatcataagaaagggaagaaacagtctctgagctatttgcaatactgattatatsaaaaagggatcacgtcactgaaatctctgttgagctttatgcttttcctggtaaagttagtagaatgggtgaaatacttaaacattttcttttggctgggcacagtggctgaaacctgtaatctcagcactttgggaggctgagtaggtggaccg

SEQ ID NO: 191358 - DNA, 547 bp, Homo sapiens
attacttttgtaccaacacaataataacaaagccaaatagagcagaaggttctagatagtaacaatagtcaaggaaagagttaataaatgggaaagtaccaaaatttccattccctatagcaatgctttagctatcaaaaagctctatttggggccaagtgtggtagctcacacctgtaatcccagcactttggaaggtcaaggcaggcagatcacctgagtttgtgagtttgagacaagcctggccaacatgataaaaccatctctactaaaaacacaaaaataatctgggtgtggtggcacatgcctgtaatcccagytatttgggaggctgaggcacaagagtcacttgaacatggaaggtggaagttgcagtgagctgagatagcaccactgcactccagcctgggtgacagagcaagactctgtcttaaaaaaagaaaagaagctttgtttgtttgttagtttgtttgttggaaatagggttctttttgtgttttttgaagcaatgaatggtccataaaatgaaagaatgttgtagtaaacg

SEQ ID NO: 191359 - DNA, 541 bp, Homo sapiens
gactgtcattgtctttttgttctttctctcagctaatctctgaactcataaaaaatgtggattctgtcttttctccatcccaagaatctacctcaattcctggcacattgtgaatgctcactaatattggtggacaggaaaaatgaatgaatacatctgtatgccctgcctacctcaaagattgtaaccatcacatataataatatacaggagacatttgtaatcctgaaatactacataatgtaaaggttgatgttgacatgrgtatctcttgtgtctttattactagattgtattttttgaaaaaaatactgtattctaccaatatttgtgtcttctacattgactagctgaatcttaatagttggagatatttaataaatatgaattgattcaataaatttatgatggtttataaaagcaagatataaaaagcccatgactagctttttgttattaaaagatcactctagcaaaagggaaagatatttggaaggaggcagacacaaaaataatggggagaacagatcagaagatacag

SEQ ID NO: 191360 - DNA, 556 bp, Homo sapiens
ccggtgtttctgcagattttaggtcagttggttgtctgtcgtaagacgtcagttctgagaygggaacactaaaattatgttttgtgagattatctagcttttccttatttatgagtgggagcaacaatccttccagctttttatctccctggcagaagccagaagtcaccaatccaattttagaacagtaagatgacagggagggagtgacttgttctaccagctatcaaggcacatcaacaagctactaagatagcaacaatgacatttcgcgggctaatagacacatgaaaagaagggactagagaggacaagaggacccaaacatatccaaagctggggttggaggtaatcaccatttcaaagcacaagaggaacagaaagactgcgtagtgcacatcagcagaggaagcagggacagccagccatccatcatcctaaagcccacctgtttcataccacaaataaaatggaagggaagcactgagtcccagatccgaaaaaacaagcctgaaatacatacaagcaaataaaacattatcttcacagtcataga

SEQ ID NO: 191361 - DNA, 567 bp, Homo sapiens
ccggtgtttctgcagattttaggtcagttggttgtctgtcgtaagacgtcagttctgagatgggaacactaaaattatgttttgtgagattatctagcttttccttatttatgagtgggagcaacaatccttccagctttttatctccctggcagaagccagaagtcaccaatccaattttagaacagtaagatgacagggagggagtgacttgttctaccagctatcaaggcacatcaacaagctactaagatagcaacaatgacatttcgcgggctaatagacacatgaaaagaagggactagagaggacaagaggacccaaacatatccaaagctggggttggaggtaatcaccatttcaaagcacaagaggaacagaaagactgsgtagtgcacatcagcagaggaagcagggacagccagccatccatcatcctaaagcccacctgtttcataccacaaataaaatggaagggaagcactgagtcccagatccgaaaaaacaagcctgaaatacatacaagcaaataaaacattatcttcacagtcatagattgaagagatc

SEQ ID NO: 191362 - DNA, 556 bp, Homo sapiens
ccggtgtttctgcagattttaggtcagttggttgtctgtcgtaagacgtcagttctgagatgggaacactaaaattatgttttgtgagattatctagcttttccttatttatgagtgggagcaacaatccttccagctttttatctccctggcagaagccagaagtcaccaatccaattttagaacagtaagatgacagggagggagtgacttgttctaccagctatcaaggcacatcaacaagctactaagatagcaacaatgacatttcgcgggctaatagacacatgaaaagaagggactagagaggacaagaggacccaaacatatccaaagctggggttggaggtaatcaccatttcaaagcacaagaggaacagaaagactgcgtagtgyacatcagcagaggaagcagggacagccagccatccatcatcctaaagcccacctgtttcataccacaaataaaatggaagggaagcactgagtcccagatccgaaaaaacaagcctgaaatacatacaagcaaataaaacattatcttcacagtcataga

SEQ ID NO: 191363 - DNA, 642 bp, Homo sapiens
gagacttattcactaccacaagaacagtaagggaaaccacctccattattcaatgatctccacttggccccacccttgacatgtggggattattacaattcaaggggagacttgggttgggttacagccaaaccatatcactctcccagtgtcttcctctagcagaaatccctggggcagcacccttgtctgcttgctcaccacccattcccattgcatgtcagctcccaggaaaggaatgactgatgccagggcctggcattgagccagtgattaacaatgttccttctccatcccacctttctttaataaaaagttgttcatcaagggaaaaaaaaaaaacctgttacagaaatataagaaataaaaaaacaaacttcctatagaaaacccatgccatgatttgtggaatcactttggctctgmtggcttcagggcctccacatcagtggatagtggatgggtggataagtgaatggctggataggtagatgggtgggtggctgagtggctggctgcctggctgaatgggtgggtgaatgggtggatgggtggatggatgtttggctggttgcctgggtggatgaaaactaaggacaagtagagaaaataaatatttaagatcacccaagggaaatcaac

SEQ ID NO: 191364 - DNA, 626 bp, Homo sapiens
atctcaaaaaaaaaaaaaaataaaaattgacttgattcagttacttaaaaaacccttaagaaggcacaagttctcagccactttgcaccaagttctcagtaaaaattaaaatgtcctcaagaaaatgaaatggtctgaacatccatttttgggtgcttytaagtatgtgttctttccatttttttattttaatttttagttttcggtacatatgcaggatgagcaatatccagaatctacaaggaactcaaatttacaagaaacaaacaaataaccccattaaaaagtgggcaaaggatgtgaacagacacttctgagaagaagacatttggttttttataaacagtattaaatgtgtgtggctattttgcataagagtcaaccaggaaagaaccctaataaatgtcgttttgcagaatggattaggcattgagggcagtgccaggttcccatcctatcaacggcgtgagaaaatttcccagggtgttccacggctgggaacctgctgcgccgctttgtccctggccactcgtggcccatccctagaagccaacagcctcgctcactccggcgcacctgcaagcccggctggaggcagctttcccacaccgctgctgccgcttggc

SEQ ID NO: 191365 - DNA, 540 bp, Homo sapiens
tagctcaggctgctgttaaagatgcacatgtagtctgaggtttaaggcccatgcaaggtggcaccttgaatgtccttttgctttgtagatttccattcctcatttcaactttaggccccagaatacctcattggatcagaattgccttgacacttctttctctcacagcctccatttctgcaccaagctaggagttgtgccatgaagagctgagagctctgctgtgttgcccatccctccaaggccttgacgtggtgtgcccaacmaggaaccacatggggcaaagagacacatgagaaccaaaaccccaaagcagctgggaccaaaaagggctgcaaaccaggccagatgcctagactttggtagttccaaaagtctcttctgagaaatagaaacattacgatggtgacttgcatggtctcagatcctttgttcaggagccctagaggcacttggaaaagtaagcacaaggcggcactgagggacattctttcaatggagaccacacaggattgcaggagaagattctctctcaagaga

SEQ ID NO: 191366 - DNA, 606 bp, Homo sapiens
tctttataaataaaaccatttattgaatgataggtattgttattcttctcatcatagatgaagaaaatgaggcacacacagaggaagtattttgtcttagactatatacaggaagtaagagcagacccaggatttggacaaggttttgtctggctccaaagcctgggtacttaagtactgtaccctactgcttcttacatgaccagaaatccataggttaggtgggctgtagattcatctctctgctttaccttttctaatgttgtctttaccctaaggcttatttcctatatgattgcaagattgccagtgcacaggttaaatgtgtccttgtttatatccagatagagaggggaaggcagagaggagggcgttgtcccttagatgtggaaaataagaccttcgtgttcatctagttgtgccaactttggtaatatgcytgtctctggacaaatagctatcaccagggaaatgtcaagatcccatttggaagtatagatgggatagattcctgaataaaagcagaattttgttttgaagaaggaaaggggctgcctcagttaaattaatatattgaggcttttctgaatatcacatcagtttata

SEQ ID NO: 191367 - DNA, 564 bp, Homo sapiens
tcagttatttagagggtatttaaaatctctggacaggtaagaacgagacatgtacttttttttaaaaaaatggaatccttttattatttcatagtgaagaaggtgtttccagcattctgaatcctcagtaccactaagaaactatttcctgacatatctacaggaagcaggctttgtgaccactcagagcttactttattttttcattaatcctaaaaacttgtctaatcttttaaacttacttgatcttctaaactcatgtgtgctcttttgagtgtaggggctgtgctccattaattgtgatgttyatctcaatgctcatctcattgtctagcagcatactgggcacatagtaggtgttcagtaaagatatatagagtgattgcacagcataaattagatgctggtttctaaattaatatattgaaattacagaagttcccacagtgtacttaaacataggaacgttaaagtatttacttgtttaagttatgaaaaaataaagaaggaaaagtggagatcatatagggaaaaagatgttttcaagagactgcctttcttctc

SEQ ID NO: 191368 - DNA, 564 bp, Homo sapiens
tcagttatttagagggtatttaaaatctctggacaggtaagaacgagacatgtacttttttttaaaaaaatggaatccttttattatttcatagtgaagaaggtgtttccagcattctgaatcctcagtaccactaagaaactatttcctgacatatctacaggaagcaggctttgtgaccactcagagcttactttattttttcattaatcctaaaaacttgtctaatcttttaaacttacttgatcttctaaactcatgtgtgctcttttgagtgtaggggctgtgctccattaattgtgatgttcatctcaatgctcatctcattgtctagcagcatactgggcacatagtaggtgttcagtaaagatatatagagtgattgcacagcataaattagatgctggtttctaaattaatatattgaaattacagaagttcccacagtgtacytaaacataggaacgttaaagtatttacttgtttaagttatgaaaaaataaagaaggaaaagtggagatcatatagggaaaaagatgttttcaagagactgcctttcttctc

SEQ ID NO: 191369 - DNA, 447 bp, Homo sapiens
tgttagcagggagtatccaatctctcagggcctggagagaaccaatacagaagaaaaattggttgctctctgagagctggtacagacttttcttctgttgccttggacattagaattccagggcaygccagcttttggactccaggacttacaccagtacccgctatgtcctgtggctttcagcctcagactgagttacatcattggcttccatggtcctgaggcctttgtacttggacagagccaagctactggcatcccagggtctccagtttgcagatggcctattgtgataattctcagccaccataatcatgtgagccaattctcttagtaagtcctttctcatatatctgtatataaccttatggttctgtccctctgaagaatcctgactaacacaaatttggtatgggaaagctgagtatcattctttcatactgtatt

SEQ ID NO: 191370 - DNA, 620 bp, Homo sapiens
ctttaaatacgagtgcagcaggtgtttcaaagattacagaagtgaaaatgcaggttgaaagtccaagaaatctgtccttccaaattatgcaataatgtgtgacttctaccccttcacacatagcaccaatttgctgcgctatgtatttcagcttcatatcattccagactggaagtataaattatgaaaagacttttagaaagttctaattcattttacgcatttttttgcaaatttgactccatgaaagtgcattgtcacaatgctgacagtgtgtgcaggcactgtgtgtatatgttaaaacattgaactttcccagtaaatgaagagatgtcctttttgtacattcgcatttgtgaaagataaaatttctacagatctcagctctttggaaaagattatatggctatgtgcatatgtagtagtgactcactgcagcttttgtattgatcttgtcaaaagacttatgttctctattacagtatttcagatgrgtgcagttataaagctgggtatagacaattaccaaccataggtgacataagtttttatatatttcactttttgacctatttatttatgaatattgttcatctgcttataactgatatgcaactgtc

SEQ ID NO: 191371 - DNA, 650 bp, Homo sapiens
tatctaactttgtcctatatagctttgccytgtagaataatttctctaacttttctggaagaaagtacagttaaaattaaagtttaatataattatacttttaatatgagtttcctacatggttttaaagaaaaaaatatgaattatttttctgcaccttgtagttatccatgaataaactcagcttaaccactgattacactactctaaagtggtaacggtggtggctactgaggaaggcttaacctctgattttagccttatagaatttaacctaattactccgtggaaataataatgattaataaatacaattgcaagatattttatgactgtaaaatatcaacatgtataattagttcactgggctaactcagattattttttctgtctgtgagactatcttctaagttacctgcccttctcctactcttatctcaggctccttcatatgctcttggtactataaaacttgtgcttttgaatcacattcaccctgtactgcaaaggcaatccagctctccttctctgttccagctcctgtgcaaattaaatgtcaatggaaaaaatccatagcaaagcttattagtgtctttcttttatcactttgtttttaaaaacatttatagaatgctatctctgtgccacgc

SEQ ID NO: 191372 - DNA, 650 bp, Homo sapiens
tatctaactttgtcctatatagctttgccttgtagaataatttctctaacttttctggaagaaagtacagttaaaattaaagtttaatataattatacttttaatatgagtttcctacatggttttaaagaaaaaaatatgaattatttttctgcaccttgtagttatccatgaataaactcagcttaaccactgattacactactctaaagtggtaacggtggtggctactgaggaaggcttaacctctgattttagccttatagaatttaacctaattactcsgtggaaataataatgattaataaatacaattgcaagatattttatgactgtaaaatatcaacatgtataattagttcactgggctaactcagattattttttctgtctgtgagactatcttctaagttacctgcccttctcctactcttatctcaggctccttcatatgctcttggtactataaaacttgtgcttttgaatcacattcaccctgtactgcaaaggcaatccagctctccttctctgttccagctcctgtgcaaattaaatgtcaatggaaaaaatccatagcaaagcttattagtgtctttcttttatcactttgtttttaaaaacatttatagaatgctatctctgtgccacgc

SEQ ID NO: 191373 - DNA, 539 bp, Homo sapiens
ctgataattcctttctcttgcttaaatatctttggttaatgcatacaggataaagtctgaatttagcacaatgcataagaccctttacctgagwaaaattcatccactatacaagcagaaagttttcaggcttggtttgctaccaaatatactatttaaaattcttggacctgcaagtttattaaaagcctaatgttgacaaggatttggataaaagtgttgtctcacatatagttgcctatgtactatatttttatgatcaagaaaaagttatgctccttgaattaggccccatttcccaaaacaatctagcatcagttcttgacagagtacaggttacatttttagccccatgaaaaaacttaatacaggtgaagaggaaggattggtactctgaaaatgctggggctcaggaccttatattagtggtgctaaaatcagagataatgagataatgttttcagtgttgatggatattacgaaattttaaagggaagagagaaataaataaacatctttagaagaccaagtagtaagtg

SEQ ID NO: 191374 - DNA, 539 bp, Homo sapiens
ctgataattcctttctcttgcttaaatatctttggttaatgcatacaggataaagtctgaatttagcacaatgcataagaccctttacctgagaaaaattcatccactatacaagcagaaagttttcaggcttggtttgctaccaaatatactatttaaaattcttggacctgcaagtttattaaaagcctaatgttgacaaggatttggataaaagtgttgtctcacatatagttgcctatgtactatatttttatgatcaagaaaaagttatgctccttgaattaggccccatttcccaaaacaatctagcatcagttcttgacagagtacaggttacatttttagccccatgaaaaaacttaatacaggtgaagaggaaggattggtactctgaaaatgctggggctcaggaccttatattagtggtgctaaaatcagagataatgagataatgttttcagtgttgatggatattaygaaattttaaagggaagagagaaataaataaacatctttagaagaccaagtagtaagtg

SEQ ID NO: 191375 - DNA, 545 bp, Homo sapiens
agaaatgaattatttaaacatttttggtatacatgatcaaagtttaccttatgaaataattaaggtatatgtgttacatttattttaagaggcattagactcacatgaaatacatctcatttcttttcttgacaacatcataaagtactggttcttcctttttttttttttttttttttttttttttttgagacagagtctcactctgtcatccaggctggagtgcagtggcgtgatcttgactcactgcaacctccacctcctgggttcaagcaattctcctgcctcagcctcccgagtagctagaattacaggcatgtgccaccatgccctgctaatttttgtatttttagtagagatggggttttaccatgttgatcaggctggtcttgaactcctggcctcaggkgatccacccacctcggcctcccaaagtgctgggattacaggagtgagccaccatgcctggccaaagtactggttcttaaaatgcttttacgtttaaaaagactgtgattatttctttcacatttttaccttactag

SEQ ID NO: 191376 - DNA, 509 bp, Homo sapiens
attagacacataatattttcttttaaagaacatcmtaccaatgttttatattgttgaatatttccttgcttgtttaatgtttattcagttgtttttcaatgctaataactgcattaatattttaatacaggtgaggttctatattcttttaatcatgaacttaatgtttgcagccacatagcttcattgccaaaaaatggtcttcaagattggttgtgaaatatggaacagtagtgacaaaatacatatctttcctttaattttataatacaaaagacagtctctataatttctttctccagttgaaagaatgttgaagaatgaaatattttgttatattttcctggtagaaaattattatcattaatttaaatcaaattgtgttttcctaaaaatagtctcacgttgccaaaggacaaaatggccatttagcaggattatcatgcaacagagataggaaagctcaagagttttgcttttcttgttcaatttgccagtttcacaaatgt

SEQ ID NO: 191377 - DNA, 509 bp, Homo sapiens
attagacacataatattttcttttaaagaacatcctaccaatgttttatattgttgaatatttccttgcttgtttaatgtttattcagttgtttttcaatgctaataactgcattaatattttaatacaggtgaggttctatattcttttaatcatgaacttaatgtttgcagccacatagcttcattgccaaaaaatggtcttcaagattggttgtgaaatatggaacagtagtgacaaaatacatatctttcctttaattttataatacaaaagacagtctctataatttctttctccagttgaaagaatgttgaagaatgaaatattttgttatattttcctggtagaaaattattatcattaatttaaatcaaattgtgttttcctaaaaatastctcacgttgccaaaggacaaaatggccatttagcaggattatcatgcaacagagataggaaagctcaagagttttgcttttcttgttcaatttgccagtttcacaaatgt

SEQ ID NO: 191378 - DNA, 535 bp, Homo sapiens
cctatgtgacccactgtaatccaagtgaatttataaagtgaaaatatgattatatgaaaactgtgtcttaagtttttttaatgactcacagtgtaaattgcagactttccatcataacaaaaaagactcttcatgacatgaccccttgccaccctttccaaactcacctcttgcccaccaatcacacagactatttgcaattctttgcaaatgctgtgtcatttcattctgattgattgactgatggcacattgttagccctgccttttcttttcttcaggacttagctcaaatgttgcttcctcagtaaagcaaagcaccattaatcttctctctaggcaaagttggtcattctgcttccaaagttcccattgtctatttgtcatatcacctattrcataatcatgtaacaattatcaaatgatgttacagttatttatttgtatgaccctctttcccaataaactatgtactttttgagggcattgattttcatatgcatctttataaaccccaaatctttatagacacaaaa

SEQ ID NO: 191379 - DNA, 565 bp, Homo sapiens
taattggatcatggagatggctgccccatgctgttcccatgatagtaagtgaggctcacgagatctcatggttttataagcatctggcatttcccctgtttgcattcactctgctaccctctacagaaggcacctgcttttcctttgtcttccaccatgattgtaagtttcctgaggcctccccagcaatgtggaactgtgagtcaattaaacctctttcctttataaattaygcagtctcaggtatttcttcatagctgtgtgagaatggactaatacagttatcattagccatttccttttctgtagaatctcttcccatgaactgaaaggtgaatggagaaagagaaaatacagaagatccacttatttttactgagtacttttatgtgccagacagtgtgctaagttttggagcagaaaagtagagatagagtgtttcaggtagacaaacatgtgcaaaaccttgtagcaaagatgctgcatagcatctgagaattaacagctttgctagtatacaaatagtatgtcatggacatgtgggtaagaactaaaccagactaga

SEQ ID NO: 191380 - DNA, 640 bp, Homo sapiens
cagcacgtagggttagaaaaacattttcagacggtttaaaacactatggactcttttgaagtacattatttaaattctctaatcttcatttttctcattaaaatagaaataccaatatttgttctcactgtaaatatcacaatgaaatttgtcatatgtaaaggcaccataaaaatgtataaaattttcaatactgttaaattatttatataagtatcagatttttcatgatcattattaatttttccagctgatttgtgattggtcttttgaactcattgtcattacactttatagtctttaagataattcctaattcactttatgtcactgtcacattatttacaaggcacaaagtacatgaatgtccttctttttttgcatttcaaattctgtttggaaacaaaggcagagaatatactatagagaattataaaccagtaaactaaatatatccagttgactattgtattttaaagattttaaaaactcaaaatgctccwgaagaaatattattatattttaaatgaagagcagatttcaaaaaagaaaactttaaatattctaggagtcttaacagacttcatggatagtaactgacaaaaaattatgtaaaatggcttcacactaggtacacaag

SEQ ID NO: 191381 - DNA, 379 bp, Homo sapiens
cataagatatccattgattgaaataaaagaaagcctgtggtgtccatgaacctctacatagcacaraagacctgaagaaacccaagcatttttaacttacaagtgaaaccacaattattagcttattaccattattgaaactcatcatgatgactcacatactaatttattatttcggcaatgcttttaatctaaccattttaaagcaacgttctaggccttttcccagcacagattttatttaacactatggtatatatacaaacttactggtttgtatgtatactaggaaatatccctagcaaaattttaattaccaagatttgccatgcaagctgatgtagaatgggcactgtaagcaaataaagcattatgaatt

SEQ ID NO: 191382 - DNA, 379 bp, Homo sapiens
cataagatatccattgattgaaataaaagaaagcctgtggtgtccatgaacctctacatagcacagaagacctgaagaaacccaagcatttttaacttacaagtgaaaccacaattattagcttattaccrttattgaaactcatcatgatgactcacatactaatttattatttcggcaatgcttttaatctaaccattttaaagcaacgttctaggccttttcccagcacagattttatttaacactatggtatatatacaaacttactggtttgtatgtatactaggaaatatccctagcaaaattttaattaccaagatttgccatgcaagctgatgtagaatgggcactgtaagcaaataaagcattatgaatt

SEQ ID NO: 191383 - DNA, 600 bp, Homo sapiens
ctggaattctggagtaaggccatgtcatctgaagcagaaaatactatgctttttgagaaacagtttttggtgttactggaacctggtaaaggaaggacacttgactatgggacattaagtaaccacacacttagaacttgccattatgtcctgggttctgtcaggctgccaagacataaattcagatgggcactagcagcaatccattatactggagaaatgttatatacagaattgaacccaagtgggaccgggggaacaagtaagctgcattaataggtagcccaaaccccaatgtcaccttcacactcactgcagttaccttctcctagcttataactacaggaatatgtgttagggtgagaaaatagctcccatatgactagctggaggaggagaaaaagcttcagcttgatttatggttgggtcagcttggtaggcagttctagctgaaaatggatagcaacagcaaaaaaggtacacttatgcgtactctgaataacaacagagaagaaaaaagtcatcctaaggrgtagatctgtgagcagtgtaccagctcatcatcttttgtgtggcaagagaagtgacctgaagtgagga

SEQ ID NO: 191384 - DNA, 595 bp, Homo sapiens
agtgcagcacacggctccaggagacactcctccctcccacttgaggagaggagaggaaagcataaatataactttgtcttgcaacttggataccatctcagccacaatagaatagggcaccaggcagagtcctgaggtccccattccaggccgtagctccgagacgacatttctagacaaaccctgggccaaaaggaagcctackgccttgaagggaagcaggatccattaccttctgaataaaaatctcttggtccccaaataatcagcagttgtagccaggctgtactcaccatgggccttgggtgaaacacagagacatggtggctttagatgtgatgcagtgcattcccagctatggtggctattgggagatattctgcttgagcaaaggacagggacaagtagaggggacttgattttgcaacttaggtaccagctcagccacagtgagatagagcagcaattgggctcttggggtccccgattaaagactttggctcttgcacagcatttctggactggctttgggtaagagaggagtccacttccctgaagagagagtcctatgcctgggagcattcaccacaagctg

SEQ ID NO: 191385 - DNA, 571 bp, Homo sapiens
aacatattgatagtatctgcttcactggccctgcaaagggttcctgtagcaccctgaagactctctaagatagcatttacaatgctgcattgtagttgcttagttacttatctgtgtttcttgctagattataggctttgtgatggaaaaagcaatggctgccttgttcatcattttatctacagtgactagcacagtacctggcccatggttagtattcaaaaaatatttgtgaaaggrgggaaaaaggaaaggagagggggaagtttgtttggtggaagtattatactagtgtaatacattacacactcaaacaaaaacgaatcttggtaaaacattattcttaaaggaattatgcaaacctactttactcattctgagcatgaaaatcttggctgtaaaagttggatatcgtccatgcagcccaagagttcatttgtaacagtccagtaggggctcttatatcaactagatgaggggagaataataaaactcctggtctggaatgaaagctatagccattttactatatggtcaacctgaacaaacacaaatatggcaacaataatgt

SEQ ID NO: 191386 - DNA, 662 bp, Homo sapiens
taaaacaaaatttcaagtcctgaacacctatggtggttgcattaggcaataattaagagaagcaagtaaatgagttagaaatacatagtaatcaagtttcctggctgtgccaagacttcctcctgtctgtcagtaaatcccacattgcccatttgtggtttgcagactgattaagctatacaaatggaatcatctgttcttttctggtcttcaagcgccttttcctcctcagggatccaacgsaaggttgcctccaggcatcaaatcacagcaatcaataaaccaccatgagtagcatggctcatttagaaacagagacacaggcattttgctagaagaaacaatgattacctgtcatgggttcagagacttatggtacttattagaagtcaaagaatgtgagacttttcatggccaaatattaaactattccttggccctcaaacctgttcttactgtgattcacatgtaggtgaatggtatgttcaatgacgttaaccaaaagtttggggagtaatctttaatttcttcttcctccttttcttctccctcaactccaacatctacatagatattgagacttatagttttttcttccttaatatctttataatctttccagtgtcacagatttacttcaaactctcattggacttctattt

SEQ ID NO: 191387 - DNA, 524 bp, Homo sapiens
ctaacttcatccctttctagcttaataatctcartaaagttacctagcattcctgggcttcagtgtccttcaaaatgtggttaccaacactggtaggattaaatgagatgtacttagaggacttagccaatgacttagtggcacacagaaataatttaaacgcagtctgtattagcagcaaataggttaacatgacaaaaggtatgtacttcttaggcgtcacctatacagggtactttacaagaaaattggggagttgtgacctctgactgccaagacttggaacccacattgcacatatcacccctgtattagtcaggattctctagagggacagaactaatagactagatatatatatataaaggggagtttattaagtattaactcacccaatcacaaggtcccacaacagccatctgcaggctgaggagcaaggagagccagtccgagttccaaaactgaagaacatggagtccgatgttcgagggcaggaaggattcaacatgggagaaagatgtagg

SEQ ID NO: 191388 - DNA, 592 bp, Homo sapiens
gtattactagtttcaatcaagaaaggaaccagtgttttgggtaattatctggagaaattgaagaggacatagaaaacatctggtgaacagaaaaaagttgctttataaagtttacactacaaaaaggccaatgtacacagctttcagtttatgctcttggtaaagattttgagtgccaaagttttttctcccattcattaaatgaagttaaatggacttattatccattggtttccttcctgacataagtgaatgttaggattatgtcaggcacagtggtccctgaaagagtgggcagaccacaagctattgatcaatgggtattaggtttagtgtcgggatgagccaggttgctgaacactgggtgttatgatgatgctgagggtgstacccaaactcaatgtaatgcccacagtaagattccacaggttagcattttgttgcatactatctaatatcctcatggtataaaattgatgacccagggaagtcaaatttacacattacagcagggaagtcattctccttctgcttctcacatgcaaagcttgcccttactttgcagaattactgcaagcagaagccacgtgag

SEQ ID NO: 191389 - DNA, 559 bp, Homo sapiens
gcccctataactctcaccctctagtagtcatgtttttgtgtaattccctctccttgagcgtgggcaggatctgtaactctctaagcaatagatatggcaaaggtgatgggatatctttcttgtgattattttttrtgtcatatatggttgtatggaagaggtgaagatgtaattaatatccctaatcacttgaattatatctaattaaagggcagttatactagtgggccttacctaatcagatatgccctttaaaagatggcctaggctttccctgaagtcagaaactccaagcaacagagactctgtctctcagcgtctgtcttctaagaaacaagccaccgtgaatagtacagccacaaattctgccaataacctgagggagcttgaaatcagatccttccctagtcaagcattcagatgaaaatgcagcctacctgacacctagatttcagccttgtgagatactaagcacacaacgcagccacggtgtaattgaactcctgacacacagaaagtgtgagataacaaatgggccttcttttaggccattattgtg

SEQ ID NO: 191390 - DNA, 559 bp, Homo sapiens
gcccctataactctcaccctctagtagtcatgtttttgtgtaattccctctccttgagcgtgggcaggatctgtaactctctaagcaatagatatggcaaaggtgatgggatatctttcttgtgattattttttatgtcatatatggttgtatggaagaggtgaagatgtaattaatatccctaatcacttgaattatayctaattaaagggcagttatactagtgggccttacctaatcagatatgccctttaaaagatggcctaggctttccctgaagtcagaaactccaagcaacagagactctgtctctcagcgtctgtcttctaagaaacaagccaccgtgaatagtacagccacaaattctgccaataacctgagggagcttgaaatcagatccttccctagtcaagcattcagatgaaaatgcagcctacctgacacctagatttcagccttgtgagatactaagcacacaacgcagccacggtgtaattgaactcctgacacacagaaagtgtgagataacaaatgggccttcttttaggccattattgtg

SEQ ID NO: 191391 - DNA, 559 bp, Homo sapiens
gcccctataactctcaccctctagtagtcatgtttttgtgtaattccctctccttgagcgtgggcaggatctgtaactctctaagcaatagatatggcaaaggtgatgggatatctttcttgtgattattttttatgtcatatatggttgtatggaagaggtgaagatgtaattaatatccctaatcacttgaattatatctaattaaagggcagttatactagtgggccttacctaatcagatatgscctttaaaagatggcctaggctttccctgaagtcagaaactccaagcaacagagactctgtctctcagcgtctgtcttctaagaaacaagccaccgtgaatagtacagccacaaattctgccaataacctgagggagcttgaaatcagatccttccctagtcaagcattcagatgaaaatgcagcctacctgacacctagatttcagccttgtgagatactaagcacacaacgcagccacggtgtaattgaactcctgacacacagaaagtgtgagataacaaatgggccttcttttaggccattattgtg

SEQ ID NO: 191392 - DNA, 435 bp, Homo sapiens
gtgagaaaactatatagttttctgctatatgtatgtgagtattttccctatatgtaggggaaaggatttcctttgtttcacagagtaggtcatttcaatgaaagttatgaaaacaggaaattatatttgtatattgattcattttacagaagaggaagaaaaaaatatgttgctctggaaggggaaaagaatcctwtggcctaactcataattcttggtacattgtatgttttaaaagaaatgtaactagaactcttcagtatcctagaccagtatgaaatgacagattttctattattttccttctgtttgtgtatagtttgtcactttttttcagcagtttgtgtccttagtgaatcacagagtaagattctaagcactttctgaacaaagtaacccctgcattagaaattggatactatgcaacagttgaaa

SEQ ID NO: 191393 - DNA, 512 bp, Homo sapiens
gtaacagtccccatgattcaattatctcccaccaggtccctcccatgacacatggggattatggaaactacaattcaaaatgagatttgagtggcaacacagccaaactatatcattccaccactggccccttccaaatctcatgtcctcacatttcaaaacacaattatgcctttccaccagtcccccaacatcttagctcattgcagcatcaacccaaaaatccaagtccaaagtctcatctgatcccttttgcctatgagcctatgaaatcaaaagcaagttagttacttcctagatgcaatgagggtacaggcattgggtaaatacacccaatccaaatgggakaaattggctaaaacaaaggggctaccagccccatgcaagtccaaaatccaaaagggcagtcattaaaccttaaagttccaaaatgatcccctttgactccatgactcacatccagataccttccaccagataccctaaattatctctctcaagtttgaagttcc

SEQ ID NO: 191394 - DNA, 555 bp, Homo sapiens
tgctagtattttgttgaggatttttgcagctaacattttttcagtcttcaccrtgtaccaggcaatggactcaacacttcccattcaccaggtcctctaattcttctttgtcactatgaggcaaaggttgatactccttccattatgaatggcaaactaagccttggagaaattaaatattttgtccacagttattcagattatatgtggtagagttgagatttgaaagcagtgctaaagccagtatgctgcgtatagattttcagctacctgaagacagaggccattcttgacctttctttcattgacattttagtatgccctcctgacaataacttcttgcctaattcattcatggtatttaaaaagaatgtgaaataaaatagaaaaagcattgtaatatacaacatgtaaatatgtatacaacaagcaaaagaaatagggtactaaattgtacatagatcatgattacaaaatttttaaaaagaaagacagaaaagtatatgtagagtctagaaaaagatttatcaaaattctattgatggttatggaatt

SEQ ID NO: 191395 - DNA, 555 bp, Homo sapiens
tgctagtattttgttgaggatttttgcagctaacattttttcagtcttcaccgtgtaccaggcaatggactcaacacttcccatkcaccaggtcctctaattcttctttgtcactatgaggcaaaggttgatactccttccattatgaatggcaaactaagccttggagaaattaaatattttgtccacagttattcagattatatgtggtagagttgagatttgaaagcagtgctaaagccagtatgctgcgtatagattttcagctacctgaagacagaggccattcttgacctttctttcattgacattttagtatgccctcctgacaataacttcttgcctaattcattcatggtatttaaaaagaatgtgaaataaaatagaaaaagcattgtaatatacaacatgtaaatatgtatacaacaagcaaaagaaatagggtactaaattgtacatagatcatgattacaaaatttttaaaaagaaagacagaaaagtatatgtagagtctagaaaaagatttatcaaaattctattgatggttatggaatt

SEQ ID NO: 191396 - DNA, 573 bp, Homo sapiens
aaattaggtatattagtgttggttgctctctcagcacagatgcagagacttcttttgtcttgactgactaatgcttatgacttgatccttaatctttctttccctagtgtttgccaagtacacctgtaaacagatctgcatggwatttgagagtgcaagtgtaattgctttagatgaggccctgggtccttgatgaattcaaaatgctttcaagccttgtcactacttgtcacccttctcagcactcacttgtgccaactgggtcaggcccagaagaaacagagttgtgtgtgtggccattgtatcgtttctgcttgtttaacctttgacgtcagaaggtaggacacgggaagaggccagtaactactacactcttgtgagggaacaaaattatcttggcaccaaggaatggtgccaagaatattgagttgagaaatccacaggtatttagctgcccaggagaggcacagaatataaatcttacgtagagggaccaggtactatcttttgctatgatgaagtattttttgttttgttgtgtttttccttttcctatcaggtgtgagaattgcc

SEQ ID NO: 191397 - DNA, 573 bp, Homo sapiens
aaattaggtatattagtgttggttgctctctcagcacagatgcagagacttcttttgtcttgactgactaatgcttatgacttgatccttaatctttctttccctagtgtttgccaagtacacctgtaaacagatctgcatggtatttgagagtgcaagtgtaattgctttagatgaggccctgggtccttgatgaattcaaaatgctttcaagccttgtcactacttgtcacccttctcagcactcacttgtgccaactgggtcaggcccagaagaaacagagttgtgtgtgtggccattgtatcgtttctgcttgtttaacctttgacgtcagaaggtaggacacgggaagaggccagtaactactacactcttgtgagggaacaaaattatcttggcaccaaggaatggtgccaagaatattgagttgagaaatccacaggtatttagctgcccaggmgaggcacagaatataaatcttacgtagagggaccaggtactatcttttgctatgatgaagtattttttgttttgttgtgtttttccttttcctatcaggtgtgagaattgcc

SEQ ID NO: 191398 - DNA, 635 bp, Homo sapiens
caggaagagtgcaattctgttagaaataaatactctctatttataacaaaaacttaaagcagtaattggttaattttaattgactttaaataaagctacttagattctttctcacactagtgatggacttttttttttttttttgaggtggagtcttgttctgtcacccakgctggagtgcagtggtgcaatctcagctcactgcaagctccgcctcccgggctcatgccattctcctgcctcagcctcccaagtggctgggaccacaggtgcccgccaccatgcccagataatttttttgtatttttagtagagacagggtttcaccatgttagacaggatgatctcgatctcctgaccctgtgatccgcccacctcagcctcccaaagttagtgatggacttttattgtggaaccattttggccccaaaggcactatttgaaagtcatctgacaaaggagtatatagtttatgtcagaagataaatggaatttttaatctttgtttttgtttaaagataactgacctatatggggataaaattaattgatttgaacacttttctctgaatatctatatgcatcatgctctttggtgaaatattgattaacaaattactagtgtattaatgcag

SEQ ID NO: 191399 - DNA, 513 bp, Homo sapiens
atattgcactgggtttcaagttagggcatgtgtgttgaggtgttctcttcccaaggtgaatctcctgacccccatgtatgtaaagtcctggtatgttacagcgttccacactggtagttcctccatccacccacaatactccctaaccaccaccaccascaaaaataagtattctctagttcgtatctccttccagcctcctctgtgtcccacatgtgggttctggtagcttgttgctgaggttgaaatttttggaaactgtgctctcaacctttccctggttgtgctctggggattgtagacattcttggggttgtttggtagagagaaggattggattttctaagtcggtcacccagattctcatcatgttacctttcattgggtcattcgagacctttgaaatgcctatgtgtcagtcatatattgcagttagagtcttctcaactggtgttgattttagaagaggagaaaaaaatgagcataaaagagaagaagaatgaggcaacacaa

SEQ ID NO: 191400 - DNA, 579 bp, Homo sapiens
tccctctaggccagtaaagaataatcttttcatttatagcagaaaaccaggtaggagggaaaaatctaatgtagaatgttatttcctaagaattacttcaaggattaaaacacatacatttatatccaagttctttaatgatgccattttcattctattgtacatccaaaatgttatttattattaacactattgccttagcttaataattacctgggtaataattctgacaaagtgtttctaactggcataacatacaaattgctttgtttctttttccccttttgcccgggaaaatatcataatagacagttgtattcataatagtcccttgtgtataaaatctgcttcctggaaatgattcatacacstcaactattagctttgtggtgacatttttcagaaatgtcaatgacacctcagatgcacctcttttgtttggtagtaaagatattttgccagtgttgacagcaacgttgccagtttttataatatccacatatttatttctcccaccatgactgacagataagagagtgttttcccgcatatattctatctgcacattatggacaagaa

SEQ ID NO: 191401 - DNA, 594 bp, Homo sapiens
ctatcagtaattaacttaaatgtaaatggattaaaatctctacttaaaaggctgacattggcataatggataaaaatgatacaactctatggtatctataagagattcacttgtgattcaaagacaataaatgaattaaaaataaaaggatgaaaaaagatataccatgcaaacactaaccaaaagagagtaggagtaactgtaattagtagctagtaatatacacaaaatagactttaagacaaaatgttttgctagagacaaagacattttataatatragtcaatctatcaaaaatattcagcacttaaaaacatatttgcatctaacaacagaggcccaaaatacatgaagcttatttgacagaatttatgggagaaataggccattcagcaatattgattggagacttcaatacctcactatcaataatgggtagaacaactaaagagaagatcagcaaggtaacagaagatttgaacaacactattagccaagatagttcacatattatctgtgtatctatctatctatctatctatctatctatctatctatccatctatctatatctctgtgtatatagatagata

SEQ ID NO: 191402 - DNA, 350 bp, Homo sapiens
ctttgggtggcataataggagactggctgcttaggaacttagtccctcacatggtctaaggacagtgcatgtgaaatactccagcatcttgttaaaatgcagagtctyattcagtgggtctggggtgggacctaagattctgcatatctaaaaggctcccgggcgatccctgtgctgaaggtctgcaaactgtgttttcagcaccaaagttaacattgaacccccaaagtgaccacggactgatggcctcagatcatccaggcccaccgatgtactaagcacaatgggcattgtaacagcatctgccacctgtttgaggggccagctagggattagtgggcatggggagg

SEQ ID NO: 191403 - DNA, 621 bp, Homo sapiens
cctgtccactaatgctattttcttagttttgacaaatatactgtggttatgcaagattttaacattagtgaacatgagaaatcgctgtactatctttacaactcatccataaatctaaaattatctcaaaattttgaaaaatgaattagaataaggtggaccttcaaatgttggagaatgagaggctatggaggaacagccatgaaaaggcctggtaatatatgaaatactgaaaaaatgtgggttcctctcttcacatcctaaggcctttcctttgctgaggaaacaggatgagcacccaattcaatccaacgtggtagccacttggatgcatttttttcccctaagaagggttgtgactgtaattggagagccattttaagtacgataaagagaggtgaagtttcaagtgtcagagaccaactagagcagaggccacctcgccaaagtgaaaggctcatgccctgtgtggtgactaagggtgtggctccaccattggatttagcaattccgcctccaggtaggagtgtattccatggggaaaaaagaatcaygtatatgtgcaaatatttagataggcagacattcactactgtgttgtttataatactcaaaaatgga

SEQ ID NO: 191404 - DNA, 587 bp, Homo sapiens
ggatgtcagttgtccacaaattgatattccaatttaatgaaattsctttcaaaatcctagccaggtttttaaataaatatagacaagataatctaaaatttatacagaaaggcaatataactaaaatagctaaaatacttttgagaaaaatggaaagaatcagtctactcaattctgagacttattacatagctacaataaccaaaagtgcatgctatcagcagaggaatgtacacatagatcaatgaaacagtagaaacttaaaaatagatgggagggaaatgtgagtggctaataaaaggcagcaggagggatccttatttgatggaaatgttttgtatcttcattctatcaatgtcaatgtcctgatttaatattatactataaatttgcaagatgttaccattgggggaaaccaggttaagggtacaccgaatctctctatattgttttttacatcttcacgtgaatctacaagtatctcaaaagacaagtatctcagagtctaattaaatataattacctcaatagacacagaaaatgcatttgacaaaatacaacatccattaaggatagaatctctcaac

SEQ ID NO: 191405 - DNA, 643 bp, Homo sapiens
ttgtccacaaattgatattccaatttaatgaaattcctttcaaaatcctagccaggtttttaaataaatatagacaagataatctaaaatttatacagaaaggcaatataactaaaatagytaaaatacttttgagaaaaatggaaagaatcagtctactcaattctgagacttattacatagctacaataaccaaaagtgcatgctatcagcagaggaatgtacacatagatcaatgaaacagtagaaacttaaaaatagatgggagggaaatgtgagtggctaataaaaggcagcaggagggatccttatttgatggaaatgttttgtatcttcattctatcaatgtcaatgtcctgatttaatattatactataaatttgcaagatgttaccattgggggaaaccaggttaagggtacaccgaatctctctatattgttttttacatcttcacgtgaatctacaagtatctcaaaagacaagtatctcagagtctaattaaatataattacctcaatagacacagaaaatgcatttgacaaaatacaacatccattaaggatagaatctctcaacaagctaaaagagaagagaatttccttaacttcataaaggacatctatgaaaaacacagtttacat

SEQ ID NO: 191406 - DNA, 415 bp, Homo sapiens
acaccccctctgcagaaacggacycagcagagcaggaccagtgtggactctctaaaggccagcccaccctcctcctttcaggctgagggcctccctggccaggcccagacccaatgtctggcctcatttcctgctgtatgatgccagcctttgtaagtcacttgcagtccccaagagcaacctctgtctcatatccccatggacccattttttattatatgcctgcctgggatcccccacttgctttgttcatccactgaacccccaaccaacaccaaaactccagtctggctcttactctgttgcacaatgatgattttatagtctgccttccagaccagatggatgttctcagtccaagcacaatgcccaacatagggttgatatttaatcaacgtattgcctgaatgaatga

SEQ ID NO: 191407 - DNA, 415 bp, Homo sapiens
acaccccctctgcagaaacggacccagcagagcaggaccagtgtggactctctaaaggccagcccaycctcctcctttcaggctgagggcctccctggccaggcccagacccaatgtctggcctcatttcctgctgtatgatgccagcctttgtaagtcacttgcagtccccaagagcaacctctgtctcatatccccatggacccattttttattatatgcctgcctgggatcccccacttgctttgttcatccactgaacccccaaccaacaccaaaactccagtctggctcttactctgttgcacaatgatgattttatagtctgccttccagaccagatggatgttctcagtccaagcacaatgcccaacatagggttgatatttaatcaacgtattgcctgaatgaatga

SEQ ID NO: 191408 - DNA, 418 bp, Homo sapiens
cacaccccctctgcagaaacggacccagcagagcaggaccagtgtggactctctaaaggccagcccaccctcctcctttcaggctgagggcctccctggccaggcccagacccaatgtctggcctcatttcctgctgtatgatgccagcctttgtaagtcacttgcagtccccaagagcaacctctgtctcatatccccatggacccattttttattatatgcctgcctgggatcccccacttgctttgttcatccactgaacccccaaccaacaccaaaactccagtctggctcttactctgytgcacaatgatgattttatagtctgccttccagaccagatggatgttctcagtccaagcacaatgcccaacatagggttgatatttaatcaacgtattgcctgaatgaatgatt

SEQ ID NO: 191409 - DNA, 605 bp, Homo sapiens
taagtctttgaaggcctaaataaaacaaaatgtctggcctcccagaggcttctctaaaaactcttcagatgactgcttttggaaactttcttgcctgaccaccttcaaagtgggacattggttttatttccttctttggacttgaattgaaacattggttcttcctagatcttgggcctgctcgccttcagactggaaccacaccaccagctctcctgggtctctagcctgctgactcaccctgcagctcatgggacttgtcagtctccataatcgggtgagccaattccttataataaatttctttctgtaaagctatatgcaccctgctggttcaatttcactggagacccctartatacaatctatttttggttcattttgggtcatttcagctgtgaaggaatgtagagatggaggagagagtcccactgtgtggtgccctgggctttctgccagacaacaaacagggcccagtaccaaagcaaaccaaagacatgtggacctcagactgcatctgagtgtccttgccagagtatacaagcttctgggtggctacctcctaaattttcaatattgcccaagttcaccaagtacttgtatga

SEQ ID NO: 191410 - DNA, 396 bp, Homo sapiens
tgtaagccaaactgaggtgattgctgtctctcttttgggtctagccacccagcaagtctacccagctctggtctggtactgggggttgtctgcacagagtcctgtgatgtgatcctctcagccatggataccagttcctattccagtggaggtggyggagggtgcaatggactccatgagggtcctgacctatggtggtttcatgctctatttttgtgctggtttttctcctgccaggaggtggcactttccagaaagcatcagctgtagtagtatggagagggactggcagtgggtggagccctagaactcccaagattatatgccctttgtcttctgctaccaaggtggatagagaaggcccatcaggcggggctagatgtgtctgagctcaga

SEQ ID NO: 191411 - DNA, 590 bp, Homo sapiens
ggtgttagggctacagcatatgaattttagaggggcacaaacattcagtctgtaacaaacagacaataatactttcaaattaccaggagaaaagtaagtgcaccactttctatacataccacttcactaaaccacacacatacacatacacaccacttcactaaacacacacacatacacatatacacacacasagagagagagaaaaggaagcacatgtatcaagcatatctgttagaaatacaaatataaatagaaatataaaatctgttaaaaaataatttctttgtttgatccaaaagctaattacatgccaaaagtaaaagatatgttaaaaaattacaaagttataaattaaaggttagacaaagataaagcaaacaaatgccaacaaacttaagtggggattgttgtattaataagcaggcaaattttaattttaggcaaaagacatgaaaaatcctaaatgaactcattgtttaatgatgcagaaagtatttcacaataaatgtaaaaatgtcaggaacctttatgctcagataatatatcaacaaaaatacacagaaaaagctactgaaaatacaaaaata

SEQ ID NO: 191412 - DNA, 585 bp, Homo sapiens
ttggttccctggtgagggctctcttcctggcttgcagacagccaccttcttgctgtgttctcttatggtggtggtgtggagagagatctctggtctcttttcctctttttataaggatgctaattccatcgtgagggtcccactttcatgaactcatctaaaaataattaccacacgaaggctcgcctcccaaatatcatcatcttgggtgttagggctacagcatatgaattttagaggggcacaaacattcagtctgtaacaaacagacaataatactttcaaattaccaggagaaaagtaagtgcaccactttctatacataccacttcactaaaccacacacatacacatacacaccacttcactaaacacacacacatacacatatacacacacacagagagagagaaaaggaagcacatgtatcaagcatatctgttagaaatacaaatakaaatagaaatataaaatctgttaaaaaataatttctttgtttgatccaaaagctaattacatgccaaaagtaaaagatatgttaaaaaattacaaagttataaattaaaggttagacaaagataaagc

SEQ ID NO: 191413 - DNA, 590 bp, Homo sapiens
ggtgttagggctacagcatatgaattttagaggggcacaaacattcagtctgtaacaaacagacaataatactttcaaattaccaggagaaaagtaagtgcaccactttctatacataccacttcactaaaccacacacatacacatacacaccacttcactaaacacacacacatacacatatacacacacacagagagagagaaaaggaagcacatgtatcaagcatatctgttagaaatacaaatataaatagaaatataaaatctgttaaaaaataatttctttgtttgatccaaaagctaattacatgccaaaagtaaaagatatgttaaaaaattacaaagttataaattaaaggttagacaaagataaagcaaacaaatgccaacaaacttaagtggggattgttgtattaataagcaggcaaattttaattttaggcaaaagacatgaaaaatcctaaatgaactcattgtttaatgatgcagaaartatttcacaataaatgtaaaaatgtcaggaacctttatgctcagataatatatcaacaaaaatacacagaaaaagctactgaaaatacaaaaata

SEQ ID NO: 191414 - DNA, 576 bp, Homo sapiens
ttcaatataaatctaccatttgatccagccattctgctcctaagtttttttaaaagtaaatgaaaacatatgtccacttgtgtatgaatgatcttagaattttatttgcattagaaaaaacccagaaacaatccataagtccacctacaggtaaatacatagattatatatatgcgtacaatgaaatactcttctgcaataaaaagaaattaactgttgttacagacaatgtctataaatgtcaaaataatttttctgagyggaagaggaagacaaattagagtatatactgtttgactccatttatataaaactcaaaaaatgctaaccatgctgacggaaaccagatgtattagtctattggcatgactgtaaaggaataattgaggttgggtaatttatgaagaaaagaggtttaattggcttgtggttctgtgggctgtacaagaagcatgacaccagtatctgcttctgctgagggcctcagaaatcttacagtcatggcagaaggcaaagaggaaacaggtgcatcacatggtaaaagcaagagcaacacagcaagcaggggaggtgcca

SEQ ID NO: 191415 - DNA, 621 bp, Homo sapiens
catggttaagtaaagtacactggcaccatgctttagatcacctaaataaaagaaaacctggagatttcccaaatactcaaaaactagccaatggattatatacttagatttctgaagtatttccaaaaactatagactgggaaaagattcaacagtgtactcaagaacctgagtaacgaatctataaatactgtgacagattagasacagtctatttataatatccaggtttagataaagtttactatcaaacttcctctctgtttgattctacttttgttaatgggttagaggaagaacttagcaccctaatgaaacataagcaattaaattgggccactgcagaaacccccaacctacttaatttggctgaacaagtttccaaaatcaaaaagaaatcagctaaacaaaaagctgctagagtcatagattttcagattcaaactgcaaaagttatgaactaccaaatgcagcaactagaattaaacaaatcccaaaaaacaccataaagcccttgtcattattacaaggaagcaggtctttggaaaaacgaatgccacagactacaaagacttaaaatgaaatcatagaaaagcatgatattttggatgaaacctgaga

SEQ ID NO: 191416 - DNA, 553 bp, Homo sapiens
gatactattaaccaatccttgtaccgctaagcttaaaagcattgatgtgtagatacctgtgtcttatttttaaaaaagatatccctcccaaggggacctcacaaccagatggaaatctgcaaattaaactaaacaggaaccactctgttcagtcttggaataagaagcagaagatatcataggttaacagctaycccaagtacgtggaccaggcctgtatatcattatcagccttataattgtcatcatacttcttttcatatgaatcacacagcccaaatcttcaaactcttaatcttgctcattaccttattaggaattttgcttaaattcttcattccaatatgtaactacttgaaaatttctggtggttgcaattaagttctctatgatgacattactcctaatttttgttataagtaacatactagccaaatattcaagttactccaaggctatgtaccagattaactaatcttttcaagatatccctgaagacacatggcattttcccaacccttacctataatgaggtctaattacctcctgcccc

SEQ ID NO: 191417 - DNA, 583 bp, Homo sapiens
aaccacagcctcatttcagcaaacatgcctctgaaattcagcccctcaaaaatatccccaccccagtgaccaagcatctccagctgagttaacccattcctgccagtgaatcttcatcaatacctgaacgccatgcctcccaacagccctatgtaagatcaacactcttctttgtttggagatagtgtgcctaacaaacatagctcttttttttaagtgataaattcagatttttgattccaaattaaatgctgatcttatacttcaagagttgaataaatgattggatgatgacacaatttgagtcagatatagaaagccaccatagaacaaacctaactactataaagataagagagcatactgctagctaggtttctcctgatacttagaacaagccacaaaaggagagtgtgaatctcagaacgcataatgacaaaaccaagtttattgtaaaagatgaatgtttcctaggtagctgcatctagtgcacgctgctagagctaccacaacaaaagmccacagactgcgtagcttagacaacagaaatttattttctcacagttctggaggtcagggtcca

SEQ ID NO: 191418 - DNA, 575 bp, Homo sapiens
aatgacagtccagtaaaagagtttaacttagatcttatgagagttgcttgatggatgttaaaaagccattaggtatttttgacaagtgtttgcagtgaaaatttgtatgaaattcttactgtctttttctactcttggtctgattctgttgaacaccttccttatgactttaagcaaactgttggagtagagtcttgccatcacatgctctcatattcaaaatcagtaaacctggtatagataaaaaattttaaaacctgatagctttaactttgaaattgggttccatcatttactagttgtattatctaaagtttctttaacttctctaaatcaataaaaagagtttcacaatactgccttaaagctactttgttttaaggattaaatgatttgtgcaaaggcgtagtgcattgctctggcatcaacctgccagctcatctgggttagacatcacatggccctcacagtggctacctactgcattttatttctaaacatttttctgcagtttagtyttatccttctattcaaattgctttcttactataagaaacttcagatataaataaaat

SEQ ID NO: 191419 - DNA, 670 bp, Homo sapiens
atctatcccttacttttaatatcttataaaatatttatacaaatgcttcattaaagtccatttacattttctttttctttcgtttatttattttttttagagaaaaggtctcagtctgtcacccagactggaggtcagtggcatgatcccagctttgaactcctgagctcaagctgtcttcctgcctcagcctcttgagtagctgagaatacaaagaacagagatattggtagatcaataagccatgagcgcaggcacctgccactcatgcctggctaagtttttaattttttgtagagacacggtcttgctatgttgcccaggttggtcttgaactcttggcctcaagtgctccttccsccttgacctcccaaagtgccgggattataggcataagccaccatgcttggcctgtccatttacgttttcaaaaacccagttcctgttaaacagctccttttaactgatgataaaagggttttaattctataatgtaacatatgtctggattttgagttaagcatgttctgtctttggtgaaaaacatgaaaacttggaactttagtgccaaagagaagagaaatgcatacaggtcttaagtaatgaataaaactctaaaatgggatgaaaatgacttttgcttataaatattgatgtaactggcttatca

SEQ ID NO: 191420 - DNA, 520 bp, Homo sapiens
aaatcaaaatgcaacaaaatctttacctttttggtggaaattattaagtatttttgactattttagaaatactgatayacaaacaacatacttgaatttaaacatgggcaacctacactttgagaagctgattaaaatcatttttcaccaataatatgacataggagagaatgcaattaatctaattttgaacctgagaaacaaaaactaaaaaaaaaaaaaagattcaaattatcagtaattgtggaataaccctcctccccttttgaattaagaagaggttttttcttttttttttttttaattttaaatagtgaattttttcttgtccttgacagagactgtggcagccagccatggggccatgctctgatgcccctggtggtagttcccactgcttcccaaattctgtcccagccccaagggtgagctcctgtaggatggcaagaaggagaggggctgaggctgtatgaaagaggtgtactcctcctccctccccctggaagaaaggaaggacgaa

SEQ ID NO: 191421 - DNA, 568 bp, Homo sapiens
tgggctattgatacttgtgtatgcttcacaaaattcttgtgctgtgtttttcaactccatcagttcatttatgttcttctctaaactggttattctagttaggaattcatctaacctctttggaaggttcttaactctcttgcattgggttagaacatgctcctttagctcagaggagtttgttattatccaccttctgaagcctccttctgtcaattcatcaaactcattctttgtccagttttgttcccttgcyggtgaggagttgtgatcctttggaggagaaaaggcgttctggcttttggaattttcagcctttttgtgctggattttcctcatcttcatggatttatctccatttggtctttgatgttggtgacctttggatggggttcctgtgtggacatcctttttgttgatgttgatgctctttatttctgtttgttagttttctttctgacaggcccctctgctgcaggtctgctggaatttgctggaggtccactccacgaccctctttgccagggtatcaccagcagaggctgcaaaacagcacagattgctgctt

SEQ ID NO: 191422 - DNA, 387 bp, Homo sapiens
tttagactatctttcctattcattcatctaacttcctctagttcctactggtctaccagaattcagctgatcattttctcctacatgggatattctctacttgttcttatttagaaacacttgcctttatgcatccctctgcatactctaaaacagtcatcacatgaaacaatacctttgaatgaatatttttactctgaagaacaaatcattgcacatacggctttcttcaacataaaaataaaatagcaccattattaaaactgtcctttgttgccatgaggatgtwaaagctaaaatagaataaaaacaaaagtatatgtgctttttctcagacactgggataattgctttagatagagtattcgactctcacaatattccatc

SEQ ID NO: 191423 - DNA, 618 bp, Homo sapiens
atgtgctttttctcagacactgggataattgctttagatagagtattygactctcacaatattccatcagggttatttttcaatttttcattgcagtaaaatacaatgttaaatttattatcttagccatttttaaggatacagtgcagtagtatcaagtatattcatattgctgaacaacaatcacgaccatccatctccagaactcctttcattttgcaaaactgaaattctataccattttaaaatgggcatagaaattgagtattaaccccacttctcaatcccctgagcctttggaaatcactattctacttactgtctctatgattctaatcactcttacttaataccccatataagtagaatttgtctttttgcaattggcttacttcacttaacacaatgttcatccatttcagaatttccatacttttaaaagatgaataatattccaccatatgtatatatcacaatttgtttatccattcatctgccaatggaaacttttgttgatctcacatatagctattgtgaatgatgctatgctgctataaacatctgttcaggtccctacttttaaatctactggatatatacccagaagcaggattgcta

SEQ ID NO: 191424 - DNA, 594 bp, Homo sapiens
ttatacactctatgagaaggtacaattattaccattttggtaagttaggtgatcaggattcagagaggttaagtcacttatccaaagtaatttctttgtattaagagtcaaaatttgaatacagatccatctgattccaaaattccttccactatatattacatcattctaaataaatagggcctgcaagtgactctgaagacattttttgtctctaaacacattcctattgcccagtttggtgaaggtagwttactcagatgatctgtaccacaaatctgcagcactttcttttgtgaaactagaacaatatccaatctactgaaaattagttattgtcacacacgtccgtgtgaagagaccaaaaaacaggctttgtgtgagcaacaaggctgtttatttcacctgggtgcaggcaggcggagtcagaaaagagtcagcaaagggagataggggtggggccattttttttataggatttgggtgggtagtggaaaattacagtcaaagggtgttgttctcttgcgggcaggggcaggggtcacaaggtgctcagtgggggagcttctgagccaggagaaggaatttcacaag

SEQ ID NO: 191425 - DNA, 594 bp, Homo sapiens
ttatacactctatgagaaggtacaattattaccattttggtaagttaggtgatcaggattcagagaggttaagtcacttatccaaagtaatttctttgtattaagagtcaaaatttgaatacagatccatctgattccaaaattccttccactatatattacatcattctaaataaatagggcctgcaagtgactctgaagacattttttgtctctaaacacattcctattgcccagtttggtgaaggtagtttactcagatgatctgtaccacaaatctgcagcactttcttttgtgaaactagaacaatatccaatctactgaaaattagttattgtcacacacgtccgtgtgaagagaccaaaaaacaggctttgtgtgagcaacaaggctgtttatttcacctgggtgcaggcaggcggagtcagaaaagagtcagcaaagggagataggggtggggccattttttttataggatttgggtgggtagtggaaaattacagtcaaagggkgttgttctcttgcgggcaggggcaggggtcacaaggtgctcagtgggggagcttctgagccaggagaaggaatttcacaag

SEQ ID NO: 191426 - DNA, 412 bp, Homo sapiens
tgaacaatatacagttattttgaggaaattgaggctaaaggacacttgaatctgctttgctgctggagccctgggaggtgttgatctcaaaggtgttccctgggctccacagagcaagaataataaggtggagtgggatggctgagaccttcagaggagagaaacctgaggtagcctcccatggccctggagtaggtcatggcacggccaaaatttctatgtcccagggagaatattaggtttctgagccagagagtcctatctggctcacccctagtattcacaggctctggggcaggagtacaaatgaaggcctcctactatatgtttacacagaagttataagtcaaactaaccactgtcaaatgagttatatgcttctgcttgacmaacatgcttttataatgacctt

SEQ ID NO: 191427 - DNA, 622 bp, Homo sapiens
aagcttgttgtgaagtcctgactttgagcagctagggcagttttccaaaggcaccctggtggctggcagcaatttcagaaaggaaaaaaagactggggataggaagaatatatctctgggtatggggagtggagggaggaatgttcaaagagaatttgtttcagcaaaaatattttattttcttattatcagtataaaatatagatgtttacaaacaaatcctgtctaaaaagttggaggcaaaaaaatatgaaagacttctgtaaagggctaaattattcaatgaagaaaagatccctcagtgttgaaattatgaataatttttttactttcttctttgtatatttttataataaatctgtattgcttttattattagaaacaaaaaagccatttttcatctacagggggaggaaaaagctgtaaaaatactcatatgagtagtcratgaagctgtatggacatctcttcatctataggcagaactagaaaaaataaacttgtgagaaaatactatttgagaaaatggtgaagttttcaaaatcattttaaattagaaaagatgttctaaaatctcttatttgtgatcatcatttcagtttcttctagctgctttactcat

SEQ ID NO: 191428 - DNA, 438 bp, Homo sapiens
tgaccttactaaaacagtttctatttatggaaccctttgattgtatartgaatcaacattttatccactaatacacaaatgagctataatgtggtcaagattagtattgttaagtttctctaatgactatatttgaaacctctaaaagtaattcaatttcaggttttgatttgggttgctctgccatttttgcatctcttaacttgtaaatggttttctaaggaatgtttaaaactgagaacactgtggatcacctcaattaaaaaatagaaactcccttttcaacttacccttctacaccccaattcagttccctagaaggtttcagaccctttgtttttatagggctgttttgtagtttgtttttgtttttctggaaagataattcctagatgaaatgtgggggtgctgctttaggttttaaatacaaccacttgg

SEQ ID NO: 191429 - DNA, 266 bp, Homo sapiens
tcagtgtatcagtatcaatgaccttactaaaacagtttctatttatggaaccctttgattgtataatgaatcaacattttatccactaatacacaaatgagctataatgtggtmaagattagtattgttaagtttctctaatgactatatttgaaacctctaaaagtaattcaatttcaggttttgatttgggttgctctgccatttttgcatctcttaacttgtaaatggttttctaaggaatgtttaaaactgagaacactgtg

SEQ ID NO: 191430 - DNA, 431 bp, Homo sapiens
tgaccttactaaaacagtttctatttatggaaccctttgattgtataatgaatcaacattttatccactaatacacaaatgagctataatgtggtcaagattagtattgttaagtttctctaatgactatatttgaaacctctraaagtaattcaatttcaggttttgatttgggttgctctgccatttttgcatctcttaacttgtaaatggttttctaaggaatgtttaaaactgagaacactgtggatcacctcaattaaaaaatagaaactcccttttcaacttacccttctacaccccaattcagttccctagaaggtttcagaccctttgtttttatagggctgttttgtagtttgtttttgtttttctggaaagataattcctagatgaaatgtgggggtgctgctttaggttttaaatacaac

SEQ ID NO: 191431 - DNA, 566 bp, Homo sapiens
tgggcttcttaatgaaaaaatttaagctaaaaacatcaaaaattaaaagtttttaaaacatttttcatttaacaggccattgaaatgcatggtacaaaaatcagtgataaggttattataaaatgaaatggacagaataaatgtttgatttaattttccatctatgagaatttcacaataaaatcagtttactttttaaaaaagaaaaaaaaaacatagacaatgttaaaaacagtgacataactattcaaaatttggagttgtctgggcacagtgtctcacacctgaaactttgggaggccgaggttggaggatcacttgaggccaggagttcaagaccagcctgagcaacatagtaaggaccccatctcttcaaaaaakttaaaaagtagctgagtggggtggcatttgcctgtactactagctacttgagaagctgaggtgggaggatggctgacctcaggagctggaggcttcagtgagctatgatcgcaccactgccccccagcctgggcaacagagcaagaccctgtctcaaaaaaaaaattgggggagttgaagagagg

SEQ ID NO: 191432 - DNA, 240 bp, Homo sapiens
attaaatgataatacagtactgccccccgaccttattcgcggtttcacttttcatggttggtgcaaaaacaggtgagtacagtacaattagagtttctgagatatatatctcacatgcacatcacttttttrtagtgtgacaatttttctatgttatcattagttattgtttgtaatatcttactgtgaccagtttatacattaaacttcatcacaggtatatatgtatatgcaggaaaa

SEQ ID NO: 191433 - DNA, 382 bp, Homo sapiens
agggaagtaatcttcaggaaaaatgtctaaaagtctctttaggggagtgataatgaaaaaaaaagcttaagaaacgcttctctatatgtttcaagaacaaaaatgcaagtcarctttgaagtcatttctcagactgtacatacaaactcaaaatcaaggtatgtgtttctcaattctgttgagtatgttttcaagcatcagtggttcttttcttttataagcccaggctttatgctggtcaaagcatgggttttagagtcaagtggatttatcaagttgtcaaatcagctcaactactcataagttttgcaattacttgaactttctgagtttcatcttacaggaccattgaaatattgaaatgcaatagcatgtgaaatgc

SEQ ID NO: 191434 - DNA, 350 bp, Homo sapiens
agctcagctaaggaaaagatgaaaragactaaaatggagtcctatgcccaagaaaatagtaaaagtagggaaatggaatggactcagtgattacaaaggaagagttttgcaaaggagaaccagataaaaaacagtcagaaaagataatataaaaagaaaacctacaggaaaaatcataaaataaatacaaaaaaaatcactgcaggctttttgcagaaactaattcaaattcttattccaatacacagaacctaacgtaggcaaaacaattttaaaacagtttccaaaaataaaaatccaggttgtagatttatagtacctgatttcaaaatttactattaagctactat

SEQ ID NO: 191435 - DNA, 350 bp, Homo sapiens
agctcagctaaggaaaagatgaaaaagactaaaatggagtcctatgcccaagaaaatagtaaaagtagggaaatggaatggactcagtgattacaaaggaagagttttgcaaaggagaaccagataaaaarcagtcagaaaagataatataaaaagaaaacctacaggaaaaatcataaaataaatacaaaaaaaatcactgcaggctttttgcagaaactaattcaaattcttattccaatacacagaacctaacgtaggcaaaacaattttaaaacagtttccaaaaataaaaatccaggttgtagatttatagtacctgatttcaaaatttactattaagctactat

SEQ ID NO: 191436 - DNA, 570 bp, Homo sapiens
agatctctgtcatctggagarcttggaccgcagtagctggaggccctagttgggaggtcccacccagtgaggaagaacaggatcaggcacccacttaaagctgcagtctggccacattttggtagagcagctgtgctatgccgatggatcccttccaccccagcttggctcagacactccaaagcctgaaggctggaacactaaggcttctgaacagcaaagatggcaccccacccctccacccgggagctccttcttagggaggtgaaatgctgctgctggtagctagctggaattctaagccattgggtctcatcttgtgaggtgccatgaaagtgggacctgcaggctgctgcttagccccctggattcagccactttcctaggggtatgtacaggagtctaacctactttgctagagttgcagtgacatttgctggaaagcccaagtattcaaggctccagggtctccatgtatacttgagtggctgctctgttgaaactccatgtagctctgtctgtcagactgaagattaaaggccctggtggagtgggttcacaaggagacct

SEQ ID NO: 191437 - DNA, 530 bp, Homo sapiens
tggaggccctagttgggaggtcccacccagtgaggaagaacaggatcaggcacccacttaaagctgcagtctggccacattttggtagagcagctgtgctatgccgatggatcccttccaccccagcttggctcagacactccaaagcctgaaggctggaacactaaggcttctgaacagcaaagatggcaccccacccctccacccgggagctccttcttagggaggtgaaatgctgctgctggtagctagctggaattctaagccattgggtctcatcttgtgaggtgccatgaaagtgggacctgcaggctgctgcttagccccctggattcagccactttcctaggggtatgtacaggagtctaacctactttgctagagytgcagtgacatttgctggaaagcccaagtattcaaggctccagggtctccatgtatacttgagtggctgctctgttgaaactccatgtagctctgtctgtcagactgaagattaaaggccctggtggagtgggttcacaaggaga

SEQ ID NO: 191438 - DNA, 570 bp, Homo sapiens
agatctctgtcatctggagagcttggaccgcagtagctggaggccctagttgggaggtcccacccagtgaggaagaacaggatcaggcacccacttaaagctgcagtctggccacattttggtagagcagctgtgctatgccgatggatcccttccaccccagcttggctcagacactccaaagcctgaaggctggaacactaaggcttctgaacagcaaagatggcaccccacccctccacccgggagctccttcttagggaggtgaaatgctgctgctggtagctagctggaattctaagccattgggtctcatcttgtgaggtgccatgaaagtgggacctgcaggctgctgcttagccccctggattcagccactttcctaggggtatgtacaggagtctaacctactttgctagagttgcagtgacatttgctggaaagcccaagtattcaaggctccagggkctccatgtatacttgagtggctgctctgttgaaactccatgtagctctgtctgtcagactgaagattaaaggccctggtggagtgggttcacaaggagacct

SEQ ID NO: 191439 - DNA, 682 bp, Homo sapiens
gcctaacaattggtctgcccagacatgtgaactgtctgcactcaaccaagctttagaacatttacaaaacaaagaaggaagtatctatactgactctaagaatgcctttgggatggcacacacatttggaaaaatttggatggagaagggtcttatcaatartagagtccaagatttagttcatggagaactaattgcccatgtccttaacagtctccaattgccagaagagatagctattgtgcatgtcccagggcatcaaagggacttgtctttcacaagtcagggaaataatctcacagatcagatagcaaagcaagttgccatttcttctcaaacgcctgtttttcatttaactccatgccttccttctcctactgcaacctccattttttcttccattgaactaaagagaatgcagaagggaaatggatatcaccagatcaaacggagatgtcaaaacctctcatgagggaggtcttgtgtctattacgtcaggggaaccactggggaccccaagcaatgtgcaatgcagttctccaggtttatgggtgtataggaatttacaccctggctaaacaagttgtagatagttgcttaatatgtaaaaagactaataagcagattctaaggaaatcaccccttggaggaaggaatccagggctaagaccatttcaaagtg

SEQ ID NO: 191440 - DNA, 464 bp, Homo sapiens
actgtcaccccattgagaattactaatgtgtctcagtggacatgagattaggtagtcagccaaagaactattttcctcccgtcttgaggtgggagtaggaatgagaataggaaacaagtggaaatgtgaaaagctatttctggtgctctgtttgagttgctcacgccatggtgtgcaaaataaactgaagcaaaccaaacaaacaaacagcagtaacaacaacaagaataayaagcatactttcactgttatttctccagaggaggactagatcttgagggaggacatcaaacccagattctatttctgtctttgaccagtcatttccaaactgctcagggagaatgctggtgctcatccaacatggtttatcatgaaaagttaataaagcactttctcctgattcacaaattaattttaaaaagtaataaaaggaaagtatgtaaaacaaactgatacagtgg

SEQ ID NO: 191441 - DNA, 563 bp, Homo sapiens
ttattcagaagcgtactcatactctggtcatcccgtggcctagttgacacatgaaattaacaactatacagtctcgtttatattaaataaataatatatatttaaatctattttatcttatttcataaactacaaatcatacgttatataataaagcatttttttatyattgtgttcttttacaaccaaattatctaaaccctggaaatagcttttatccaaagttggtcatgtctctggcctcaggtttctaatttatattgctgaagtagaaagctcaagctgtgttgctttatggtctttaggccactgtgagacatagaagactaagcaaatagcatcttcacttcagccccatttttaaatatgaggccgaataatgatgatatgaggggagtcgttatgtgtcctgtagccttgatagtgatgccaaaccatcagaaatggaatccttggaggaccaaggtcttgtacctcctatgcctaaagctttctattaggtgtttaatgtatatataaatatatagcagggtaaaatgggactttctttctttttttttttt

SEQ ID NO: 191442 - DNA, 563 bp, Homo sapiens
ttattcagaagcgtactcatactctggtcatcccgtggcctagttgacacatgaaattaacaactatacagtctcgtttatattaaataaataatatatatttaaatctattttatcttatttcataaactacaaatcatacgttatataataaagcatttttttattattgtgttcttttacaaccaaattatctaaaccctggaaatagcttttatccaaagttggtcatgtctctggcctcaggtttctaatttatattgctgaagtagaaagctcaagctgtgttgctttatggtctttaggccactgtgagacatagaagactaagcaaatagcatcttcacttcagccccatttttaaatatgaggccgaataatgatgatatgaggggagtygttatgtgtcctgtagccttgatagtgatgccaaaccatcagaaatggaatccttggaggaccaaggtcttgtacctcctatgcctaaagctttctattaggtgtttaatgtatatataaatatatagcagggtaaaatgggactttctttctttttttttttt

SEQ ID NO: 191443 - DNA, 573 bp, Homo sapiens
tcaaacatttaaacctttaacccatcttgcgttaatttttgtatatggtgagaggtaggggtccagttttatttttctgtatgtggttagccacttattgcagcaacatttattgaagagtgaaacctttccccattgtttaatattgtcaactttgttgaaggtcagttgactgtaggtgtgtgggtttatttttggrttctgtattctgtttcattgatctatgtgcctattttggtactggtaccatgctgttttgtctattatagccttgtatagtttaaagtcagatactgtgatgcctccagctttgttatttttgctttgggttgttttggctatttgggttcctttttgattctgtatgaattttggaatagttatttctaatttcatgaagaatgtaattggtattgtgatagtaatggggttgcatctgtagattgccttggacagtatggacattttaaaagtattgattctttcaatccatgagcatggaatgatttttcatttgtgtcatctctgatttctttcagaagtgttttatatttcttcttgtagagatctttc

SEQ ID NO: 191444 - DNA, 465 bp, Homo sapiens
ggtcttttcaaactccctgttttacctcrccgggcctcaaggatttcaacttcttagagaatgctgcatacaaaccagctacagaggtggagatttaggaaagaattacaagttaacctttcaccaacacaatgattgtcaataacattattatgattgtcagattgatggcaagagactaattggttcagcataaaaagtgatagaaaaactttgactttgctgttctagatacaagagcaggctgtaaatattgtttaagaacagctgctctagttagaacaaaaatttataccaattccattggtactctaggcatagaagttctgtctgattctgttttcttgctatataataatgaataccgtaatgagattccaactaaaggttatctggtttctgctactaaaatatcatggcacttgccttgaatcaatcatccaaagtgattaggagtgtgtgaga

SEQ ID NO: 191445 - DNA, 465 bp, Homo sapiens
ggtcttttcaaactccctgttttacctcgccgggcctcaaggatttcaacttcttagwgaatgctgcatacaaaccagctacagaggtggagatttaggaaagaattacaagttaacctttcaccaacacaatgattgtcaataacattattatgattgtcagattgatggcaagagactaattggttcagcataaaaagtgatagaaaaactttgactttgctgttctagatacaagagcaggctgtaaatattgtttaagaacagctgctctagttagaacaaaaatttataccaattccattggtactctaggcatagaagttctgtctgattctgttttcttgctatataataatgaataccgtaatgagattccaactaaaggttatctggtttctgctactaaaatatcatggcacttgccttgaatcaatcatccaaagtgattaggagtgtgtgaga

SEQ ID NO: 191446 - DNA, 566 bp, Homo sapiens
cacatgttctctacccatttttcaaaaacyttattgataaatcactatacttttcataggctgatgaataatttttaaaacaaattgcttataaaatagagaccctaaaataaacatttacccaagtcctgcacatgcaatagtcagcttggtagaaaacagtgtattaggaagatatttagaaagagaatgtaggatttgatggtttatcagatatagaaagatgaagagttgaatatgtcctccaagtatttgacttgaataattcggtagataaaaactgttgtaatgaatttccacaaaattatgattactccatattatgtaattcatggttttgtaatgtaatgccattggaagagtaatttgttctttaactaccattctaaatatttgtccaaattgccatgcatattaaaaaagaacaagagtcagaggtaatttttttctttcctctatctctcttaaatttaaaacactgtaactctagctaatatttttacatgaatgagtggattgcataaaatgcataaaaagatccaaatcacaaaaccttcctgagtttt

SEQ ID NO: 191447 - DNA, 610 bp, Homo sapiens
actatccagttactgctatttgttttaactagtatattcttttggaggtgaggtgggtactgaatatagcactttggttaaaataattaaattcacaggctgctacatatagatttgaatactaactttatcatgtaactttggacaatttgcttaacatctctggccttgatttcttttactataaaatagaaaattacctttatcatagaattttaataataaattaataaaaaagtgaacgttactaacaccaagaaaatattcggtaaacggtatgctttttaatttttattgacattaacatcattattatttttgtaatataattgccttatgatgatcaacattaaattaaaacagtattttttccaaataattttctaaatgttagccataaaattcatttatcttattaaaaatattttagaattctcactaatatcttaaatcaagtttacatggaggatattgcaaaaattataaagaatgcatctggaagcatttaggaatgctcttaaaaaccagaggttatgactgaaaaaamgaacaaaaaactaatgtaaggcataaaactattttgatatttgtattggtttggctaaataat

SEQ ID NO: 191448 - DNA, 566 bp, Homo sapiens
cacatgttctctacccatttttcaaaaaccttattgataaatcactatacttttcataggctgatgaataatttttaaaacaaattgcttataaaatagagaccctaaaataaacatttacccaagtcctgcacatgcaatagtcagcttggtagaaaacagtgtattaggaagatatttagaaagagaatgtaggatttgatggtttatcagatatagaaagatgaagagttgaatatgtcctccaagtatttgacttgaataattmggtagataaaaactgttgtaatgaatttccacaaaattatgattactccatattatgtaattcatggttttgtaatgtaatgccattggaagagtaatttgttctttaactaccattctaaatatttgtccaaattgccatgcatattaaaaaagaacaagagtcagaggtaatttttttctttcctctatctctcttaaatttaaaacactgtaactctagctaatatttttacatgaatgagtggattgcataaaatgcataaaaagatccaaatcacaaaaccttcctgagtttt

SEQ ID NO: 191449 - DNA, 629 bp, Homo sapiens
gctgagttcaggtaatgaatgtctttgttaattttctgtcttgatgatttgtctgattctgtaagtggggtgtagaagtcacccactattattgtgtgggagtcaaattctctttaaacatctccaagcacttgctttatgaatctgggtgcttctttattgagtgcatatatttaggataattaggtcttcttgwtgaattgaaccctttgccattttataattgtagggaccagccccacagggtcggtgggtttctccctgtgtgcggagatgagagagtgtagaagtaaagacacaagacaaagagataaaagaaaagacagctgggcctgggggaccactaccaccaagtcgcagagaccagtagtggccccaaatgccaggctgcactgttatttattggatacaagacaaaaggggcagggtaaagagtgtgagtcatctccaatgataggtaaggccatgtgggtcacatgtccactggacagggggcccttctctgcctggcagccaaggcagagagagagagggagagagatagacagcttacgccattatttctgcatatcagagacttttagtactttcactaattttgctactgttatctaaaaggcagagccggg

SEQ ID NO: 191450 - DNA, 604 bp, Homo sapiens
tactatctctctagtaaacttttttctttaactcactgctgttttggtaaattattttaccactcacaacattastgataatcagttgcaaccagtgacgagaaaaatagttgatttttgttatgttgatttgtattcttcagttttactaattgtatttattagctctgacagggttttatttgcttttttggttgtagttgtagtctatagggctttctacatgtacaaacgtttcatttgggaatagtgctgattttacctctttctttctgagttggatgttacttacttattcatttatagtctaattgttctggctaggccttatagtactatgctgaatagaaataaaaagagtggacagcctcactttgttcttcattttagagcaaaagtatccagtctttcaccactgagtatgatgatagctgtgagcttgtcatgtgcggcctataaaggataaaagaggtagataccttctatgcctcatttgttttgtagataatttttatcatgaaagagcatttaattatgtttgatgctttttgtccctcaaaaaacaaaacaaacaaaatacaaacaacaaaagaaaaagacaaga

SEQ ID NO: 191451 - DNA, 604 bp, Homo sapiens
tactatctctctagtaaacttttttctttaactcactgctgttttggtaaattattttaccactcacaacattactgataatcagttgcaaccagtgacgagaaaaatagttgatttttgttatgttgatttgtattmttcagttttactaattgtatttattagctctgacagggttttatttgcttttttggttgtagttgtagtctatagggctttctacatgtacaaacgtttcatttgggaatagtgctgattttacctctttctttctgagttggatgttacttacttattcatttatagtctaattgttctggctaggccttatagtactatgctgaatagaaataaaaagagtggacagcctcactttgttcttcattttagagcaaaagtatccagtctttcaccactgagtatgatgatagctgtgagcttgtcatgtgcggcctataaaggataaaagaggtagataccttctatgcctcatttgttttgtagataatttttatcatgaaagagcatttaattatgtttgatgctttttgtccctcaaaaaacaaaacaaacaaaatacaaacaacaaaagaaaaagacaaga

SEQ ID NO: 191452 - DNA, 552 bp, Homo sapiens
aataggataataggtttgagaacttgtccaaagtccagtgtggctagagcacaggccatgaaaaaagagacagtttggtacacaaatattacggcctcatataatacatataatgccaaatatatgtatttgtttttgtttttgtttttgttttgagccagagtctcgctctgtcgcccaggctggagtgcagtggcacgatcttggctcrctgcaagctccgcctcctgggttcacgccattctcctgcctcagcctcccgagtagctggaactacaggagctcgccaccacacccagctaatttttttatattttcagtagagatgagttttcaccgtgttagccagaatggtctcaatctcctgacctcaggatccacccgcctcggcctcccaaagtgctgggattacaggcatgagccaccacgtccagcccaaatgtatgtatttttaagagctgttaatagcaaagaacttaataaagcaaaggacttaataaagaagtatatgtgtaataaaggagagaactgtgaccagagttaccctattgt

SEQ ID NO: 191453 - DNA, 602 bp, Homo sapiens
gcttcaaatataaaacaaagcacttattataaacttgtatgttcagtttgatagttttatggggtttaggacttactcattgtttagtattaatacattttatatgaagccaatgcttacttatggggaaaacttaaaaataaatatattttattaaaaaatgctagtttattgaaaaatacagcagctataatacattcgttttctaaggctgttttaacaaattatcacaaccttagtgtcttaaagcaacataaattattctttcacatttccagaagccaaaagtcctaaatcagtagcactgtgctgaaaccaaggtgttgacagagctatgttattttcagaggctctaggaaggaatrcattctttcccttttctggcttctgttggctgctggcattccttggattgtggctacattatttaaatcaaggctcacatcttcaaatctttctctgctcccttttcatattgacttcttctctgtgtgtggctgtgtgaaatcactgtctgcctttctcttataaaattacttgaggttgcagttagataacctttcctggataatccaggagaatcactgtgtttcaacatcgtt

SEQ ID NO: 191454 - DNA, 602 bp, Homo sapiens
gcttcaaatataaaacaaagcacttattataaacttgtatgttcagtttgatagttttatggggtttaggacttactcattgtttagtattaatacattttatatgaagccaatgcttacttatggggaaaacttaaaaataaatatattttattaaaaaatgctagtttattgaaaaatacagcagctataatacattcgttttctaaggctgttttaacaaattatcacaaccttagtgtcttaaagcaacataaattattctttcacatttccagaagccaaaagtcctaaatcagtagcactgtgctgaaaccaaggtgttgacagagctatgttattttcagaggctctaggaaggaatacattctttcccttttctggcttctgttggctgctggcattccttggattgtggctacattatttaaatcaaggctcacatcttcaaayctttctctgctcccttttcatattgacttcttctctgtgtgtggctgtgtgaaatcactgtctgcctttctcttataaaattacttgaggttgcagttagataacctttcctggataatccaggagaatcactgtgtttcaacatcgtt

SEQ ID NO: 191455 - DNA, 552 bp, Homo sapiens
cagtgtttttttaaaatataaagaagcacagtgacatgatttttataaaagcatgttctaaactggaaagcactatacaaatgtagacttmtttatccctgaagttttgcatgttaattcattggcaagtcatgaaatttatagctcaaatgcacagaacacacagactttttacacagcatttggtatcatatcttattttctgaacactggaactccaaattacaatgtaggacagcaaattgcagaggagtgaaattaagaggccacctctaaattatcagctaaggccaacatgtggtcaatcctctttaaagtaggtagaatgaaattagtaaaacacatgtgacctcttgggagcacagaagagaagataaagctaagaagtaaatggatgcaagcaatggagtaggataaatataatacaattttagaagctagtaaacactaataatattacatatcatccaaatcaaattcttttgatggtgaaaagaaggtgattctaataacatctctacaacaacaggagcaaaccaggactctaagcac

SEQ ID NO: 191456 - DNA, 552 bp, Homo sapiens
cagtgtttttttaaaatataaagaagcacagtgacatgatttttataaaagcatgttctaaactggaaagcactatacaaatgtagacttctttatccctgaagttttgcatgttaattcattggcaagtcatgaaatttatagctcaaatgcacagaacacacagactttttacacagcatttggtatcatatcttattttctgaacactggaactccaaattacaatgtaggacagcaaattgcagaggagtgaaattaagaggccacctctaaattatcagctaaggccaacatgtggtcaatcctctttaaagtaggtagaatgaaattagtaaaacacatgtgacctcttgggagcacagaagagaagataaagctaagaagtaaatggatgcaagcaatggagtaggataaatataatacaattttagaagctartaaacactaataatattacatatcatccaaatcaaattcttttgatggtgaaaagaaggtgattctaataacatctctacaacaacaggagcaaaccaggactctaagcac

SEQ ID NO: 191457 - DNA, 464 bp, Homo sapiens
gagttctggaacagtcgatgaagaagtttgacaaacaccaactggtcaagtcatttggtctgtgttgttcagttcctggttgtggatgctgtctagcaggctttaacatgtgtctgcaaaaccttccagttatcctcccactctcatgtatctacctgtgtgcttgtatcacagacctccttatttccattccattaattttctattattggtgtaatagattactgcaaactcagtrgtataaataaatacacatttattctgttacagttctgtagattagatgtcaaacactggtttcactgggataaaatccaaatgtccacggagctatattcctctctaagggaacgcctatttctttatctttttcagcttctagaggctacccacatttcttgactgaagaccctctgcatccttcttattaagcttttgtagtcacaattccttcccaatacagc

SEQ ID NO: 191458 - DNA, 579 bp, Homo sapiens
ctaataatgcaggataatctcaccatatcaaggcctttaattttacttaygtctacgaagtcccttttactatgtaagataatacatcctcaggttccaagaattaggatgtggatattttggggggagggggatattgttccttctaccacatgggttttctagttcttttccttttaggcacctgagcacataaacagaccattggtcactgtctagaaatctatatgcattctcatcttgggccaccttttcttcatccaatatggatgactaggtgtagtgctgtagttttgtccactgggaaaatttttgatctccactatctttcaaggctacttctaatgtggccacaatgcagctgctatccatttttggtttccacacatgctctgagacaatctgtctgtaagccatagtcagattgtgtttttctcctccttcaactggtcgtaaggatctctccccacaatatgaccgcaagcacagtgtgggtacctggtcatgaagcttacccacatatttttactttgcttaggctgaaaacagtataaaatatttttacgttaagactgcctg

SEQ ID NO: 191459 - DNA, 579 bp, Homo sapiens
ctaataatgcaggataatctcaccatatcaaggcctttaattttacttacgtctacraagtcccttttactatgtaagataatacatcctcaggttccaagaattaggatgtggatattttggggggagggggatattgttccttctaccacatgggttttctagttcttttccttttaggcacctgagcacataaacagaccattggtcactgtctagaaatctatatgcattctcatcttgggccaccttttcttcatccaatatggatgactaggtgtagtgctgtagttttgtccactgggaaaatttttgatctccactatctttcaaggctacttctaatgtggccacaatgcagctgctatccatttttggtttccacacatgctctgagacaatctgtctgtaagccatagtcagattgtgtttttctcctccttcaactggtcgtaaggatctctccccacaatatgaccgcaagcacagtgtgggtacctggtcatgaagcttacccacatatttttactttgcttaggctgaaaacagtataaaatatttttacgttaagactgcctg

SEQ ID NO: 191460 - DNA, 579 bp, Homo sapiens
ctaataatgcaggataatctcaccatatcaaggcctttaattttacttacgtctacgaagtcccttttactatgtaagataatacatcctcaggttccaagaattaggatgtggatattttggggggagggggatattgttccttctaccacatgggttttctagttcttttccttttaggcacctgagcacataaacagaccattggtcactgtctagaaatctatatgcattctcatcttgggccaccttttcttcatccaatatggatgactaggtgtagtgctgtagttttgtccaytgggaaaatttttgatctccactatctttcaaggctacttctaatgtggccacaatgcagctgctatccatttttggtttccacacatgctctgagacaatctgtctgtaagccatagtcagattgtgtttttctcctccttcaactggtcgtaaggatctctccccacaatatgaccgcaagcacagtgtgggtacctggtcatgaagcttacccacatatttttactttgcttaggctgaaaacagtataaaatatttttacgttaagactgcctg

SEQ ID NO: 191461 - DNA, 588 bp, Homo sapiens
gttttcaatctgtgaataaaatacaagttccagggatttcaaataattcactttaagtggagctgaataaagattgtaatcttaattcaaagtatgtgtaaacttcccaacttaagtcatatgctttagtaagtctagttatagaattaattaccaatttaataaactatttatgaatagtaataataacttacttttatgttttcctttactaatcaaagtacattatttcctttagtctttgaaaaagcacatgtataaatataaaaaggcatgtctcactatgaataatttacaatgacaaatcagaggaaaattagtggtaggtgagttccctgaggtcgcctgtccagtgagtaacaggaccaggcagagaaggatcttctagtgcggatcttttttcactatttcgcatttacataattcatataatattcagaagattaaagatggctttttggcattttatctcccatatmcacctataagtaattggaaatcaattaatgtttgttggactcaaatagtggataatgaattatataaccagaaatatctgtattttttgtccaacgagattatactaag

SEQ ID NO: 191462 - DNA, 495 bp, Homo sapiens
attgtgttctttaaattaaagttacaaatgtcatttataataggcaaatagcactcagccatcaagaaaaaaatacctcttgcagataagttccatgtaaaattttgtcattcacaaattactttgtacacccttcacctatattgtgtgaataccaaaagatgaactttccatatcaaagattatrtactttatatacaaatattataattgaaaatgctaaccttcaaggataattacatttctggcatcatatttaaattagaatataagaaagaggaaattcatggctatagagcaagctgaccaattcatcacaatcttttgagaaattgccataggacttacataatagcttgcgtggaggcttgatccatgcatttgttactgctctttccaaagctcagtattagtcacgttcagagatttcttttagacaatgaaagtactttagcaattaaccagcatcctttgactgcagtgagaacatgagca

SEQ ID NO: 191463 - DNA, 620 bp, Homo sapiens
aataacgtaatctgtgcatagaaatatagataatgcatacaaattacctgtagtaacatttttcagaagctctgtttgtatattatacatcacagtgagaagaactatttgagttagttgaaatttatattgttaatatatttaattatttgctattgaattagaatgtgtgctattagtaaaaaactttttgtataaaattccagtttgcttcttcattgaaaaacagaagcaaaagaaactrtttcctaatagaagcatggtttaacgtacttttgtattaaaattgtcataggattcatcatacactagattaagaggaaaagacaatggcaaggtaacactggagtgatttaatgggagtgatactttagctcactttaaaaaaaactcttttaagaaaagatgagagtacaaaaaataggagaatgtttaggattaaaaattgatttggatatcattagaaaagatgtgaaggacaaaaattcctgctctgggaggaagaaatgtgttcaaagtattaaaatctattttctaaaaagactcctcatgttgagggatgactcttttacttgtttggaagtacaagaattttacataaaatgtttattttgcctcag

SEQ ID NO: 191464 - DNA, 620 bp, Homo sapiens
aataacgtaatctgtgcatagaaatatagataatgcatacaaattacctgtagtaacatttttcagaagctctgtttgtatattatacatcacagtgagaagaactatttgagttagttgaaatttatattgttaatatatttaattatttgctattgaattagaatgtgtgctattagtaaaaaactttttgtataaaattccagtttgcttcttcattgaaaaacagaagcaaaagaaactgtttcctaatagaagcrtggtttaacgtacttttgtattaaaattgtcataggattcatcatacactagattaagaggaaaagacaatggcaaggtaacactggagtgatttaatgggagtgatactttagctcactttaaaaaaaactcttttaagaaaagatgagagtacaaaaaataggagaatgtttaggattaaaaattgatttggatatcattagaaaagatgtgaaggacaaaaattcctgctctgggaggaagaaatgtgttcaaagtattaaaatctattttctaaaaagactcctcatgttgagggatgactcttttacttgtttggaagtacaagaattttacataaaatgtttattttgcctcag

SEQ ID NO: 191465 - DNA, 620 bp, Homo sapiens
aataacgtaatctgtgcatagaaatatagataatgcatacaaattacctgtagtaacatttttcagaagctctgtttgtatattatacatcacagtgagaagaactatttgagttagttgaaatttatattgttaatatatttaattatttgctattgaattagaatgtgtgctattagtaaaaaactttttgtataaaattccagtttgcttcttcattgaaaaacagaagcaaaagaaactgtttcctaatagaagcatggtttaacgtacttttgtattaaaattgtcataggattcatcatacactagattaagaggaaaagacaatggcaaggtaacactggagtgatttaatgggagtgatactttagctcactttaaaaaaaactcttttaagaaaagatgaragtacaaaaaataggagaatgtttaggattaaaaattgatttggatatcattagaaaagatgtgaaggacaaaaattcctgctctgggaggaagaaatgtgttcaaagtattaaaatctattttctaaaaagactcctcatgttgagggatgactcttttacttgtttggaagtacaagaattttacataaaatgtttattttgcctcag

SEQ ID NO: 191466 - DNA, 559 bp, Homo sapiens
aataataagctattaaaacaacaaaggtttttgtttgtttgtctgtttgtttttgaacagaatttcactctgtctcctgggctggrgtgcagtagcatgctctcgggtcactgcaacctccacttcctggttcaagcaattctcatgcctcagcctcccgagtatctgggtttacaggcacatgccattattcccgggtaattttttgtattttttagtagcaatggggtttcaccatgtgcccaggctggtctcgaactcctgagcttcaggcaatccacccccatcggcctcccaaagtgctgggattacaggtgtgagccactgtgcccagccaaaaaagttttaaactccaaaataaactagaagtatttgaaatacaaaacattttattttacattaaagcaaacatgtagagacattaatggaaattagacatggcatatttagtacttagtggataagaaaagcagtttaggctaaaacttagggcagcaaaactagaagataattgatgacatgagaagatcatacaactataagctcttacaggaaagag

SEQ ID NO: 191467 - DNA, 559 bp, Homo sapiens
aataataagctattaaaacaacaaaggtttttgtttgtttgtctgtttgtttttgaacagaatttcactctgtctcctgggctggagtgcagtagcatgctctcgggtcactgcaacctccacttcctggttcaagcaattctcatgcctcagcctcccgagtatctgggtttacaggcacatgccattattcccgggtaattttttgtattttttagtagcaatggggtttcaccatgtgcccaggctggtctcgaactcctgagcttcaggcaatccacccccmtcggcctcccaaagtgctgggattacaggtgtgagccactgtgcccagccaaaaaagttttaaactccaaaataaactagaagtatttgaaatacaaaacattttattttacattaaagcaaacatgtagagacattaatggaaattagacatggcatatttagtacttagtggataagaaaagcagtttaggctaaaacttagggcagcaaaactagaagataattgatgacatgagaagatcatacaactataagctcttacaggaaagag

SEQ ID NO: 191468 - DNA, 504 bp, Homo sapiens
ctttgtactttttctggtgtcatatttggcagcctttctgtgaaattactgcagtgttctcatctgccagatgtcagtgaaacttgaagtaaagggacaagcatcccagagatgtcagtggaaactggtttttgttgttttgtttttaaatgaagtctccactaaagactgaagaagatacaaactcatagacactgcagttgcttgtaaagtgctttccatcatagctttaaaatatatagagaaaagtaaaaggcagtatcaagataacatcgaaagatatacatgtaagtttagcagaaatgagatgtagtgaaacaaaaatgcagcacaaaaaacctcaaagattaagaaaayaacagaaatatatgaagagacaagagaaaacagtggtgaattacaactagataaaacaggaaatacgtagcatgcaatttcaaggaccctcaatgttctacctgaacaaaatcaacttcccttattacataattttttaaaaattgt

SEQ ID NO: 191469 - DNA, 581 bp, Homo sapiens
caacaaacttcaaacctaactaacttctgactagattaacccaaacacccacattagtgtcctagcagaacaaagaaaaaaccatgttcaacagcaaacataaaaatacattgacatcagtatctattatcttatgcatcatattttgctttcaacaaaaagtcaaagaatacaaaaaagcaagataaacacatcagaagacaaaacaatcataaaagacagatctagaagtatatggttgttagatatatcaagcaagataaacacatcagaagagaaaaaaatcataaaagacagatttagaaatatcagtcagggaatttaaaataactaaaattgatgctaaaatttttaataaatcaggtagataacatgcaaaattagataaaaatgccatcagagagatggaaataagaaaaaattaagtgaaaattctataaatcraaaatttagtcacagaaataaagaattttttaaaaggcatatctttgtactttacagtagaaaaaaatgaatttgactttacatgaatagaaagtttccaacctaacatttaaacactgaatgagcaaaaagcagaa

SEQ ID NO: 191470 - DNA, 535 bp, Homo sapiens
ggtgacatagctgctgagtgatggaatggggactagatcaaactctaaaatcaaagagcatgctcacaatwacccattaagagaactaaaggaaacaaaattctccaatctattctccctgtgcacattaaaattaaaacaatggtgttgcatttttcaaacagttatgtactgatattataccaagatgcaagcacgggtggattccttaattgtaataggtataagtaatataatgctaaaatgcaaattttgaatcccattctgtcttccaactattatctctgccaaattctttcacaattctacattaatacatattacacattttggaaaatttaatatataaggctactgtttgtattatatttgaaattagttatgttagccattaatatttacactgtttcacgatcctaaaaatatcactatcttgtcttactaaaaaaaattgaaaatggagtcattaaaaaaaagtgaaaaaaaaacctctcaaagagtaaaaaatctaaaagctatgcctttaggaggaggt

SEQ ID NO: 191471 - DNA, 535 bp, Homo sapiens
ggtgacatagctgctgagtgatggaatggggactagatcaaactctaaaatcaaagagcatgctcacaattacccattaagagaactaaaggaaacaaaattctccaatctattctccctgtgcacattaaaattaaaacaatggtgttgcatttttcaaacagttatgtactgatattataccaagatgcaagcaygggtggattccttaattgtaataggtataagtaatataatgctaaaatgcaaattttgaatcccattctgtcttccaactattatctctgccaaattctttcacaattctacattaatacatattacacattttggaaaatttaatatataaggctactgtttgtattatatttgaaattagttatgttagccattaatatttacactgtttcacgatcctaaaaatatcactatcttgtcttactaaaaaaaattgaaaatggagtcattaaaaaaaagtgaaaaaaaaacctctcaaagagtaaaaaatctaaaagctatgcctttaggaggaggt

SEQ ID NO: 191472 - DNA, 630 bp, Homo sapiens
cttgactgcacaatctgtagtttcaagcttatcatgagtagagtctgcaataggcctttcctgtgttcgtaagaccagttacatctaactgaagggaagaataagaaacagcctgctgttgttcttccctcaaattaatgaacaggagtgcagtgggtcttcatgtgaataagaagacaaaagggaagctcagcaaacctgcttaaatctatagtgttagcaggccagcttggcagccatgaataatctatatattgtattactggagtgagcacaatgggctaagaaggcaaaccaaaatccagacacatctaaggagataattcaaagtgtataggcatgcacacattctgcacattttttttcatgctctatacgaggcttttacactaaatttttaaaacacaggatgtgattcctgacattctatcaaccattttattaggtsatatgtatcacaaatcataaagatcaaatctctactatagccctaccaccctgaatgcacccaatctagtctaatatttctctattttaattccacacagctggagccctccattattataagtttgaagttttgcaaatcttccctttttgtttatttagtaatatataacgtaaaattca

SEQ ID NO: 191473 - DNA, 642 bp, Homo sapiens
gcacccacacacaccggtaccatgaattcaactggtatcaagacattgcaaccagagtttcatgtctagtgctgtaacaatggctgatgtttggagttatgtattctactcaaaattaataggcatgaaagaaaaaaaggagggacttattaactgaaggaaggatatattcaaatcaatatgttaccccaygaagttatcttcccagcgtgagcataattaaaaacacaattatggttttccattaccagaaaatatttttgggtaacaaaattaaagtatttaatttttagaataagcttatgtgttcagcatgaaaatacattttcaaaagaaattatacattaaatcaagtctataagtaatgcatatgttttctgagcattcaacttaaagaaaaaaggtataaatagaatggcatttagttgatgtgaataggttaccatttgtttctctgtgatccaaggggaaataaccagaggaagtatgcattttaacatagttttagcattccatgtctaaggaaacaaacatggctattgtggataataaaacaatagtagtgaaatataaaaaaaagacacttgaacagttcctgaatagtgaattttgctcccaagatgcatcctggcacactataga

SEQ ID NO: 191474 - DNA, 594 bp, Homo sapiens
gtctgaacatcttcacagaaatgaaagctaatgagagcaagagattggcttttatgtttgttgccatttcctagtactaagaattggtgaccaaaacattgaaggtgttcaataattattmttttgaagaggcagaataataccctagttaagaacactgatcatgaagacagatttcctgtactgaaattctggatctaacacgttttactgttcaacttgtgcaagttagttaattatgtgctttatttcttgaatatgtaaaatgggataataaaaattcctaactcatacaattgttgagatgattagatgatttaaaatatgtaaagctatgacgcatagtaagtagtattgctaccatattacctgatgttaaaagaaatcattcacatagtgttatgttacatgtgaatagaatgtgctcctggagttgcacaaattagcagccttcataagagcaacaaagttaaccataaaagtatgttcttatgaagagcaacatagctacctgttaatagccagatgtaaagttatcaaatattttatggcctaaacaatactgttataagccaactacaaagcacatttcat

SEQ ID NO: 191475 - DNA, 597 bp, Homo sapiens
tttgagttatttcttttttctgtgtggtaaattatcttttctaatgacttatacaacacaactaatgagtcctcattatacttgaaaaagcaaggttttcattctaataracctggttcctctgggggagaggtgctaaaaattaaagttgtgttctaaattaattagttgaagcaacaaaaaccagaggaaaatctgttatgtaaatacatggtcacaatggactttatcttgaagaaacttgtcagggagtgaatagcagatgcagaatttttctgccaatgtgagttattgagctgccggcttctgtaaatttttaaatacgatccctcagcaacctatggacaataccagatttcctatcacctacttgattttcaggtcatttttgttataagcatatactcagtagagggttaagaaagaagttggattagagccaaagaaggcagttgcctttcaccattgttgaaagtggggatgaagaaattctgctgcttcaatagtgtttcttttgagtacagttggaatagtaggagtgaaagaaaaggcagatttagggaaaggagaagaaaagataggaagagggataggaag

SEQ ID NO: 191476 - DNA, 597 bp, Homo sapiens
tttgagttatttcttttttctgtgtggtaaattatcttttctaatgacttatacaacacaactaatgagtcctcattatacttgaaaaagcaaggttttcattctaataaacctggttcctctgggggagaggtgctaraaattaaagttgtgttctaaattaattagttgaagcaacaaaaaccagaggaaaatctgttatgtaaatacatggtcacaatggactttatcttgaagaaacttgtcagggagtgaatagcagatgcagaatttttctgccaatgtgagttattgagctgccggcttctgtaaatttttaaatacgatccctcagcaacctatggacaataccagatttcctatcacctacttgattttcaggtcatttttgttataagcatatactcagtagagggttaagaaagaagttggattagagccaaagaaggcagttgcctttcaccattgttgaaagtggggatgaagaaattctgctgcttcaatagtgtttcttttgagtacagttggaatagtaggagtgaaagaaaaggcagatttagggaaaggagaagaaaagataggaagagggataggaag

SEQ ID NO: 191477 - DNA, 569 bp, Homo sapiens
ttggttggttctgggttaggcacaggattcacaccaacgagaattaaaaaagaagtttctggaatcttctggaaggggaatttacctgatgttctgtgggtggtacctagaaagctgctgtttgtccctgggcttaactaagctagcatgtagccctagaagctacctgtgacaatgagggaagcaggcttaggataaagtggactctgtgagagacagagaagagagayggcaagaaattggatgtttcgtgatatagttgagctgctatatatcaagcccaatctaagcccctgtttatctctgaactttctagttaggtgagctaataaatctttgctatttaatccaggtccaattaaattttctgttagttgcaacataaagtatcataagtgacatatctttttgtcaatcacctaatttagaaggtgggccttttaacatttgagattctgcaaggtctgtaccaatattacccaaactgattatgacaagtcttgtcaatgagagattttaagtgctgaatatctgacactaagtccaaccttctccccaaaattcaatat

SEQ ID NO: 191478 - DNA, 566 bp, Homo sapiens
tggttggttctgggttaggcacaggattcacaccaacgagaattaaaaaagaagtttctggaatcttctggaaggggaatttacctgatgttctgtgggtggtacctagaaagctgctgtttgtccctgggcttaactaagctagcatgtagccctagaagctacctgtgacaatgagggaagcaggcttaggataaagtggactctgtgagagacagagaagagagatggcaagaaattggatgtttcgtgatatagttgagctgctatatatcaagcccaatctaagcccctgtttatctctgaactttctagttaggtgagctaataaatctttgctatttaatccaggtccaattaaattttctgttagttgcaacataaagtatcataagtgacatatctttttgtcaatcacctaatttagaaggtgggccttttaacatttgagattctgcaaggtctgtaccaatattmcccaaactgattatgacaagtcttgtcaatgagagattttaagtgctgaatatctgacactaagtccaaccttctccccaaaattcaat

SEQ ID NO: 191479 - DNA, 467 bp, Homo sapiens
acgtcattgcatcaaatggcatatataatacttgcaaaattactgtgaaaaatcttgttccaaaaatggtgccagatttctctttaacatggttagcaaagatcagcgaggaacatgattcattcaataattcttgaatggggtgactgagttatgaatggagttcatcacagccagtcatttctgtctaaacagattacaagaggcattggatcaatttctttttcaagcaggcacttgtctaagggctaaatcttctacatctacttrccagggtgacaggttgaaatctgcttgttcatgtgagataaagaatcacctcacagagggcttagacaagggtggtaatacctgaaagctgtgtaagattattttgaggaaagaagtaaggatagaataactcttgactcacctccaggtcttttggtcagtcctgaaatttctacctcattgcttatttatttatt

SEQ ID NO: 191480 - DNA, 506 bp, Homo sapiens
gcatttagttttccagatttagtgattccagttcccactgtaagttctgtcctacagagaagagtaatcacagagatcttcraagatgttgggctcctctcataaatttatttctcacagtagtggtgaaagtcatgtcttctgaatcctctgagtatggctgagtatatcttaaatgatagttctgctataacattccagtctgcctaagctttgaatcccttcctctatgttaaaccaaggcatgtccagcatttctagtttgctcactgtgggccatcttctgatccatatttcagccaaccaaccaaaatgttagcgccatttctagccctcagaggtccaacattaaatgtagactctttgcttagtgggaccatatcaataactttggcctgatataacttatgaaagttgtcatattcagaatggattcacttatgttacaagacaaaataaaacaaaacaaaatgaaataaaaacaactctgacaaatagcatggaga

SEQ ID NO: 191481 - DNA, 506 bp, Homo sapiens
gcatttagttttccagatttagtgattccagttcccactgtaagttctgtcctacagagaagagtaatcacagagatcttcgaagatgttgggctcctctcataaatttatttctcacagtagtggtgaaagtcatgtcttctgaatcctctgagtatggctgagtatatcttaaatgatagttctgctataacattccagtctgcctaagcyttgaatcccttcctctatgttaaaccaaggcatgtccagcatttctagtttgctcactgtgggccatcttctgatccatatttcagccaaccaaccaaaatgttagcgccatttctagccctcagaggtccaacattaaatgtagactctttgcttagtgggaccatatcaataactttggcctgatataacttatgaaagttgtcatattcagaatggattcacttatgttacaagacaaaataaaacaaaacaaaatgaaataaaaacaactctgacaaatagcatggaga

SEQ ID NO: 191482 - DNA, 543 bp, Homo sapiens
tctatttatgtgatatatgccatgaagactatgtaaaaacataaaaggaactcttacttttcttaggtgaagaaaataagagtgttatgtagttttctctgttggcataaatgagcagattaagcataagtaggagattcagcatatctctatttccctgacacagaaatagtgtgtttgaccacttttttgtgtgttttagtatatttttgtcaacagtcttttattatatatataaaaaaacccatctctattccttatagaagttttaaaatcatttcacagctgagtggaaccctaaacagagctatcttagtgtaatgaagcagaaaacgattgcttcttaacaaractggtatatggtgacaaacaactcataaaaatcccatctgccacaaaatgcctctattttagttgcctcagaatctaaatagtatatttcccatttcttttcagaaacaacagaggaaatataaagccttcaccaccatcaaattgtcctgtgacaagaaaagcacttagctcttaatgtactgatgtggc

SEQ ID NO: 191483 - DNA, 530 bp, Homo sapiens
tgggtggccgcagacacctcaggctcccgcctccctgcattttcatgccccacagcaaaaaacatggggggtatttctttccagttatgccctgagccaaatgttgagcttttctgcccaagaagggcaaaattctagcaccagcaggggtgcaacccaaggggtggctagggttctcactgcccttggccatggggcaggctggcctagacagaaggaggatgttttcagggtggaagtttccccccacctagtcctgaagacataaggtgcygtagcacctgtgttcccatgaggccaccgtgggccactcatgacttcaaaaggccctcgaggctcaactaagtgtgctggtttcattctgaacatgctgctctaaaacacatccctgctgagccacaggaggatcagatactgtgagcttctggtcagttgatgttcaagagccagggcatgtagggaagactccagaactcctaactcttgctaaccttacatctgggattcttacgccctcagctgaagaactc

SEQ ID NO: 191484 - DNA, 484 bp, Homo sapiens
ctgtgattgacttgttcagtccactttatctgcttataatgacaaatctctttcagtaatatatggtcttgaggctcctaaaacagagggcaggatcttgaatatccagactacacatgttggtggtggttataactgtttagaagggaaaccacttctaaacttcttagtcccaatacttgtatgagtccaaagcagtggtcacaatttgctaccacaccaattccattagctgtttttgtgttatgttataaggtgaacaattcatattgtaaatgggaagtataatggtgagaatagactctcatctgtgayaaattgttttcaggtggagtcatgagtcttgaaagatgagtaaaaaaaattccaggcttgggccaggatattggtgtgagtgtatatatctagcaataaaaaattgttttaaacatgaaaatactgaacaatataagtcattatagatgaatttgaaggatcaatgatg

SEQ ID NO: 191485 - DNA, 611 bp, Homo sapiens
gtatgcaccataatatcatatcagaactacaaacgggaattggaagcacattacatatgcaagaaaagtatgtatgtacttataaagatttccataaaatattgcagcacaaaaaggcattgttaatttatcttcacatactgtcatatattatttcagaattatttttaagtgcttccaacttaayaaaatatgccattttttctattcttcttcactattacttaatttctttatgatattaacaaaaaattgagttacctacttaattagccataacaatatttcaggaatttgagagaatgtttctggagaagtagaactacaaatgatgatttagaaacgcaagcaagaatggcaagataaattttagtactgcatgcacacattcttatatacgcacccttatatttatcttttattgtgtacctatctctgtatacatgaggaatttaaaacagaatattaaattacatagtatatatgtatactaaggatttaaagggcacatattagatgggcccaggagtcccttttcgtccaaagactaatgaggtcccactttagcctcttggatgtctgccacaaccccttctcagtttcaggaatat

SEQ ID NO: 191486 - DNA, 611 bp, Homo sapiens
gtatgcaccataatatcatatcagaactacaaacgggaattggaagcacattacatatgcaagaaaagtatgtatgtacttataaagatttccataaaatattgcagcacaaaaaggcattgttaatttatcttcacatactgtcatatattatttcagaattatttttaagtgcttccaacttaataaaatatgccattttttctattcttcttcactattacttaatttctttatgatattaacaaaaaattgagttacctacttaattagccataacaatatttcaggaatttgagagaaygtttctggagaagtagaactacaaatgatgatttagaaacgcaagcaagaatggcaagataaattttagtactgcatgcacacattcttatatacgcacccttatatttatcttttattgtgtacctatctctgtatacatgaggaatttaaaacagaatattaaattacatagtatatatgtatactaaggatttaaagggcacatattagatgggcccaggagtcccttttcgtccaaagactaatgaggtcccactttagcctcttggatgtctgccacaaccccttctcagtttcaggaatat

SEQ ID NO: 191487 - DNA, 572 bp, Homo sapiens
gtatgataacttttgaaacataatttatctctctccagtgctcatttttgtcaaaagaaaacaaatcatcataagactgagtggtttgcaaaatagacgttagtcttaaacacttgacctgattatttgtataaattgcagcacgaataattatttctacataggccttttggattgtctttgaaggaactctgttccacaaggattctcagataagaccttttaaggctgagcccagtcatggatatayactcagatacctgtgagttgggtgatcctctcctcttaaggtcccgagataaagttggagctcctggacctctgagaaagtgacattctctactaagcacaagtcagaaccctatacagggattgcataggtaagggtatgaggccagtctccccaaggggcttttatcagctctgcaagtcaagactgaccccttaaagggaagcatacccttccagtcaaagccttggcaaagtaagcagtttctctaattacattctgttgcaaaagaaaaatagattcttattgcactgatgcaaacaactatattgctataagttat

SEQ ID NO: 191488 - DNA, 572 bp, Homo sapiens
ttgaaacataatttatctctctccagtgctcatttttgtcaaaagaaaacaaatcatcataagactgagtggtttgcaaaatagacgttagtcttaaacacttgacctgattatttgtataaattgcagcacgaataattatttctacataggccttttggattgtctttgaaggaactctgttccacaaggattctcagataagaccttttaaggctgagcccagtcatggatatacactcagatacctgtgagttgggtgatcctctcctcttaaggtcccgagataaagttggagctcctggacctctgagaaagtgacattctctactaagcacaagtcagaaccctatacagggattgcataggtaagrgtatgaggccagtctccccaaggggcttttatcagctctgcaagtcaagactgaccccttaaagggaagcatacccttccagtcaaagccttggcaaagtaagcagtttctctaattacattctgttgcaaaagaaaaatagattcttattgcactgatgcaaacaactatattgctataagttatgaatactcagat

SEQ ID NO: 191489 - DNA, 606 bp, Homo sapiens
ttaaccattggcataccaccatgtgtcatgtgccctcagggttccatctaccatcagtgatggagtttttattgcttgctgggtcacaagtgatcagttccaaagtatcatgttagcatctgctttctggtagcaacccaggcaccaactgttgcagttcaagtcccatatgaaggagactcggagatggagatttgcattcaggaattactcttaatattatcactagcgcagggagcaartagctgtgatgtggtcataacaaaggcctcagtcaattccacaagaagctctgatgctaggatgggccctgcagagtatacccaaattaagacaaggaattcaagcttttctgcttttgcattgaccagtcattggttgtgggtgtggattcagacaagtcaacactcttcagttgagggcaataatcaggtgaattcacctgcaagctgtttgctactagtatttctaacaggatgcttagtgcttcagcactgaagatgaaggatcgttggcacactcagtatttactacaatatatattcagaattgtgttattttcctgacaagttttgcgtgtaaaagttgttgtatctatatccctac

SEQ ID NO: 191490 - DNA, 610 bp, Homo sapiens
tccatgtgtactcaatgtttagctgccacttagaagtgagaacatgtgatatttggatttctgttcttttgttacttcacttaggataatggcctctagctgcatctacgttgctgtakagaacataatctcattttttattatgactgtgtagtattccgtggtatatatgaaccattttctcattatatagtctaccattgatgggcatttaggttgattccatgcctttgctattgcaaatagcactgcaatgaacctatgtgtgcatgtgtctttatagtagaacaatttatattccttggagtatacacccaataatgggattgctggctcgaaaggtagttcttttctaagttctttgagaaattgacaaacggctttcttcactggttgaactaatttacattctcaccagcagggtataagcactcccttttctctgcaaccttaccagcatttgttattttaaatatgataacaatagccattttgactagggtgagatggtctcattgtggttttaatttgcatttaattcgcaaacagggaaagctgtttcgagatgtagcaaagacagtactccagcctgcatggagcccagaaagtt

SEQ ID NO: 191491 - DNA, 610 bp, Homo sapiens
tccatgtgtactcaatgtttagctgccacttagaagtgagaacatgtgatatttggatttctgttcttttgttacttcacttaggataatggcctctagctgcatctacgttgctgtatagaacataatctcattttttattatgactgtgtagtattccgtggtatatatgaaccattttctcattatatagtctaccattgatgggcatttaggttgattccatgcctttgctattgcaaatagcactgcaatgaacctatgtgtgcatgtgtctttatagtagaacaatttatattccttggagtatacacccaataatgggattgctggctcgaaaggtagttcttttctaagttctttgagaaattgacaaackgctttcttcactggttgaactaatttacattctcaccagcagggtataagcactcccttttctctgcaaccttaccagcatttgttattttaaatatgataacaatagccattttgactagggtgagatggtctcattgtggttttaatttgcatttaattcgcaaacagggaaagctgtttcgagatgtagcaaagacagtactccagcctgcatggagcccagaaagtt

SEQ ID NO: 191492 - DNA, 610 bp, Homo sapiens
tccatgtgtactcaatgtttagctgccacttagaagtgagaacatgtgatatttggatttctgttcttttgttacttcacttaggataatggcctctagctgcatctacgttgctgtatagaacataatctcattttttattatgactgtgtagtattccgtggtatatatgaaccattttctcattatatagtctaccattgatgggcatttaggttgattccatgcctttgctattgcaaatagcactgcaatgaacctatgtgtgcatgtgtctttatagtagaacaatttatattccttggagtatacacccaataatgggattgctggctcgaaaggtagttcttttctaagttctttgagaaattgacaaacggctttcttcaytggttgaactaatttacattctcaccagcagggtataagcactcccttttctctgcaaccttaccagcatttgttattttaaatatgataacaatagccattttgactagggtgagatggtctcattgtggttttaatttgcatttaattcgcaaacagggaaagctgtttcgagatgtagcaaagacagtactccagcctgcatggagcccagaaagtt

SEQ ID NO: 191493 - DNA, 483 bp, Homo sapiens
tagttatttttcacataggcttttaacttggctttgatggaactttgttccatagaaggaatctcagataagacttttttaaaccccaggccggccatggatttgtaccatcaaatacctagtggggtaaatttctcttctcttgaggtcccaaaataactttgacctcctgatctgttagaaagtgacattctttacttaccacaggtcagcaactctgtacaggactgtgtagacaaggtatgargccaggtttcccaaggggtttttattggctctataagtcaaatttgattccttaaaggaaagcatgccattccagtgaaagccttggtaagacaacccttttctccaattgtcctgttacaaaagaaaacattctcatgcacttatgcaaataaccatattgccgtaagttaagaatactcacacatagtttccaaattatagagaaatcaggtagagagaagcaaatatgcaaca

SEQ ID NO: 191494 - DNA, 558 bp, Homo sapiens
ggagttaagctatgaggatgcaaaggcataagaatgacacagtggactttggggactcaggggaagggggtgagggataaaatactacaaattggatgcagtgtayactgcttgggtaatgggtgcacgaaaatctgacaaatcaccactaaagaacttactcatgtaaccaaacaccacctgttccccagtaacctatggaaattaaaaaaaaatatttcagtaagttgaagcaacttgtatacaatctcactgtgttctggtttctatagtttttattgggaagacaattaggattctatttgttgcatcattgaaggtaacacgtctcttttctctgaaattagtattttctctttttttctatttgtagcaattttttattatgtactatgatatagtttggctatgttccccacccagatctcatcttggattcccatgtgttacgggatggacccagtgggaggtaattgaatcatgggggcaagtctttcttgtgctgttcttgtgatagtgaataagtctcacaagatctaatggctttaaaaaatgaga

SEQ ID NO: 191495 - DNA, 548 bp, Homo sapiens
tctggtcatgtggcccccacccaggaaccaccttagtgcaagaagacagctttgacaacctatgattgcatccccaatacaaccaatcagagttcctcattccctagtcccctgcctaccaactgtccttgaaaaaccctagtctcaaagtattcagggaggctgatttgtgtaattagtcccatcctttcatttggcyaaccctgggattattaaaatctctttactgcaatcttgctgtctcagtgaactggttttatctgtgcagtgggcaaggagaactgactaggtaattacagttttgaagaaaaaacagtggtgccttctctgctgagttttcttttggatacacctatggattctctgcaaatacttcttttcttatccaccacccctttcccaaacttgccttatctatttcattcaaacataagaggatgcataacaggaattcctatgggtaacataaatgtccagcttatgatatggattctggttgactcagtctgcagaaagaaagtacaaaagaaataatgacaagctgtatt

SEQ ID NO: 191496 - DNA, 548 bp, Homo sapiens
tctggtcatgtggcccccacccaggaaccaccttagtgcaagaagacagctttgacaacctatgattgcatccccaatacaaccaatcagagttcctcattccctagtcccctgcctaccaactgtccttgaaaaaccctagtctcaaagtattcagggaggctgatttgtgtaattagtcccatcctttcatttggctaaccctgggattattaaaatcyctttactgcaatcttgctgtctcagtgaactggttttatctgtgcagtgggcaaggagaactgactaggtaattacagttttgaagaaaaaacagtggtgccttctctgctgagttttcttttggatacacctatggattctctgcaaatacttcttttcttatccaccacccctttcccaaacttgccttatctatttcattcaaacataagaggatgcataacaggaattcctatgggtaacataaatgtccagcttatgatatggattctggttgactcagtctgcagaaagaaagtacaaaagaaataatgacaagctgtatt

SEQ ID NO: 191497 - DNA, 634 bp, Homo sapiens
gctgttttggttactgtagccttgtagtatactttgaagtcaggtagcatgatgcctccagctttgttcttttggcttaggattgacttggcagtgtgggctcttttttggttccatatgaactttaaagtagttttttccaattctgtgattcaatgccatccccttcaagctaccaatgactttcttcataagaakgatttttaaattgccttgagaattcattgttttcaagtaatttagtggaaccagtttcaagataagcatttactatagaatgcaaggccctaagtgctattagtactttccataccatgctacaggcaatttgacagtaataaaactgtattttttaagaaactctttaataagactttatgaatttaaattattctaaactagcaatgttaagaattagaaatatagtttatctcattgtacttctttgattcatttgatgaaaacctcttccacccactaagtagagaatattttcttaaatggtttagatacattgaattacatcgataaaacagaaaaatttgggtagtagaaaatattgggaaattggttcattcaggaccatgtcattattttctcccatatttttactatgaaaaatacatttcagagg

SEQ ID NO: 191498 - DNA, 499 bp, Homo sapiens
agagcatttatgcttttccccacagagcgtatgttgccacagtctgcagaataagaaggaaagaattgagttgattgttctttgtgcagtaatgagatgggtggattcccaaagttattggtaccccaaatgtgatggagcaattggcatagccaggtacatagaagtgtttctctatgcctgctctttagaacaaaccctcaaaggagacaaaagcttcagcatgaaaggcatgagagcaagcaacaaatgccagaagcctatcaaaggactcggatacctttaagatmagctcttagctctgaactaaactgttctctgaactaaagctcttctgtgaaataaggccagcattctacctgaatttgcctttagagatgaatcacatgatgaaaggcagatgtgtccatgtatcattaatgaactcagaatctgatgcttgtattagtaaatgtcttgattcaaaacagtattgagagcagaatgtctaataggtaaa

SEQ ID NO: 191499 - DNA, 499 bp, Homo sapiens
agagcatttatgcttttccccacagagcgtatgttgccacagtctgcagaataagaaggaaagaattgagttgattgttctttgtgcagtaatgagatgggtggattcccaaagttattggtaccccaaatgtgatggagcaattggcatagccaggtacatagaagtgtttctctatgcctgctctttagaacaaaccctcaaaggagacaaaagcttcagcatgaaaggcatgagagcaagcaacaaatgccagaagcctatcaaaggactcggatacctttaagataagctcttagctctgaactaaactgttctctgaactaaagctsttctgtgaaataaggccagcattctacctgaatttgcctttagagatgaatcacatgatgaaaggcagatgtgtccatgtatcattaatgaactcagaatctgatgcttgtattagtaaatgtcttgattcaaaacagtattgagagcagaatgtctaataggtaaa

SEQ ID NO: 191500 - DNA, 400 bp, Homo sapiens
taccagtgggttcaggtggggatagtctgactccytcattgttaaagtgtgttttccaccttataaccaacctctaatctgtgagttggtaacttgacacctcataagtctccagttccccattgtggcagacaaaataatgccctctcctagatatggttatgccctaatctccagaacctgtgaatatgttgttacatggcaatagaaaataaaggttgcagatggaattaaagttcctaatcagctgaccttaaaaggattatcatgggcgtatcatggataacgcaggtgaacccaattaatcacaaggtcctttaaagtggaaaagggaggcttagagcgggtcagagtcagagagaggtttgaagctgttccactgctggtgttgaagaaagag

SEQ ID NO: 191501 - DNA, 510 bp, Homo sapiens
tttaaaaattatatatgtatttaattatayataaatttgggcttactaaataagcattgattatataaagtggtaataaaggttaattttgagtggtataaatagaaagttgaaacaaaaatattataaaatgataacatgtatatggaggaagtgattggagtgaaagatttaagtcactgtataatataaatgagggtagagttctttaactttagatcttaagtcaaatatgtgtattaaaaattgtagatgcagaaaagtcttttgataaaattcaacattccctcatgttaacgactctcaataaactaagtattgaaggaatatacctcaaaataatgagagccatctatgacagacacacagccaacatcatactgaatgggcaaaagctagaagcattccccttgaaaactggcaaaagacaaaaatgtcctctctcaccacttattttcagcatagtattggaagtcctggccagggcagtcaggcaagagaaagaaagtg

SEQ ID NO: 191502 - DNA, 591 bp, Homo sapiens
ttttccagccatctcaactaggtccaagcctagcaccatgcaagttttctctccgtgactctaagggacctacacctgggcgtacaaatacaattctcccacctctgcttgccctagctgtacctaacctccatggctaacctaacacaagactcgcctcctccaagaagtccttgactgattctaccctccctgactcatatctttctaaattgtttttatgctgagccactccacggagtccacagaattattgcckgttttgcagtgttcttttatggctgtgagcagctgctgtattcttataaactttttaaggacagggctcttctccttgcttgtgggaaaagagaaaaggcacagaactgggagtatacaggaataggtttcaagcctgatctctgccactaacaaggtgtgtgacctcagagaagtcacccaacccctatgagcctcagattcttaatctgcaaaatggagaacataataattccagcctccccagacacgttgagaagggccagtggggctgtgctgcccccacctctttaccaagaagctccacctctcactaggcctgctatccccact

SEQ ID NO: 191503 - DNA, 541 bp, Homo sapiens
ttgggtttcataatctggggataatcctacctcaaagcattgttgcaacaatctctgtaaaatgcctggcatatagtgggtactcaataaacagtagctatttttttgctgttttgsgggggggttgatcagctttcttgaggataatccatataccataaaattcaccaattttaagtgtataatttgatgacttttagcaaatgtatatagtcatgtagtcaccatcaaaatcatgatattaacaattccatcatcctaaaagctttccttgtgccccttctcaagcaatacccaccccctgactcatggcccctagcagccaccaatctgatttctgtccttacagttttcctcttctagaatttcatataaatggaataacgcattctggagtcttttttacctttcttctttcacttagcataatacacctgagattcatccatgtggttaaatgtatcagtaattcattcctttttattgatgagtagtttttcactgtatgggtataccataatttgtttatccttttgacagt

SEQ ID NO: 191504 - DNA, 561 bp, Homo sapiens
gacctctctctggccagatcatcagtcctggagactgggagtggggtttgattgcatctgtacccccagtgcctaacacagagcccagcaccgagtgggtgctttggaaatgtttatccaagcagcacttggagggtggaacagtgcaatatgttggaaagtgcctggctttgggatcaaagagatctgatttaaagtctgggtctagctgtgtgatcttaagcaagtcactcagcctctctgagcctctaattcgccatctgttagaggaaatactggcacctaagttgaagggccrttgtgaggattaaatgaaatgacccagggatgtacccagtaccagagaccagttgcttaatgaaggcagcaattattatgatgcagttttgagggatggtgagtagccgggtgtggtagaggaataggtgggagatgaaagatgtgattgtcagaggaggctggaagtcacaaaggagcctgaatgccacattaaggacatgcggttttcttctgtctgcaacggggagcccctgaggaactcgtgatctacttggtgagatg

SEQ ID NO: 191505 - DNA, 540 bp, Homo sapiens
ctgggagtggggtttgattgcatctgtacccccagtgcctaacacagagcccagcaccgagtgggtgctttggaaatgtttatccaagcagcacttggagggtggaacagtgcaatatgttggaaagtgcctggctttgggatcaaagagatctgatttaaagtctgggtctagctgtgtgatcttaagcaagtcactcagcctctctgagcctctaattcgccatctgttagaggaaatactggcacctaagttgaagggccgttgtgaggattaaatgaaatgacccagggatgtacccagtaccagagaccagttgcttaatgaaggcagcaattattatgatgcagttttgagggatggtgagtagccgggtgtggtagaggaataggtgggagatgaaagatgtgattgtcagaggaggctggargtcacaaaggagcctgaatgccacattaaggacatgcggttttcttctgtctgcaacggggagcccctgaggaactcgtgatctacttggtgagatggaactatgataca

SEQ ID NO: 191506 - DNA, 557 bp, Homo sapiens
ggctctgacagctttcccattgtgatagggaattcatttcagaagtttggggagcaaatgacaaagtgaactgttctccatctgtggatttcttttatatttcacttatgccctgatgacttactgtcctcgtcttttgcaactggagcgataaagtgaagggaaaacagctagatttggacagcaattcacattagttcaacagttacacattcaacagataatttattgaatgcttactagctgcctgaaccctggttcatcccttaacctctctgcctcagttttcttatttgttaattgggataatcatagtcctacctcatagggttgttgtgaggattaaatgrattaaaatattcaaagggcttggaagagagcctggtacatagtagacaccatgtactttctacaaccatgactgccactattattatgatacttagtgtggtgggtactgagaagtttcagaacataccctcccttccctcaagtaacttacaatctgatggaggagatggacacatccacaaccaactctttgaagactaggattg

SEQ ID NO: 191507 - DNA, 557 bp, Homo sapiens
ggctctgacagctttcccattgtgatagggaattcatttcagaagtttggggagcaaatgacaaagtgaactgttctccatctgtggatttcttttatatttcacttatgccctgatgacttactgtcctcgtcttttgcaactggagcgataaagtgaagggaaaacagctagatttggacagcaattcacattagttcaacagttacacattcaacagataatttattgaatgcttactagctgcctgaaccctggttcatcccttaacctctctgcctcagttttcttatttgttaattgggataatcatagtcctacctcatagggttgttgtgaggattaaatgaattaaaatattcaaagggcttggaagagagcctggtacatagtagacaccatgtactttctacaamcatgactgccactattattatgatacttagtgtggtgggtactgagaagtttcagaacataccctcccttccctcaagtaacttacaatctgatggaggagatggacacatccacaaccaactctttgaagactaggattg

SEQ ID NO: 191508 - DNA, 537 bp, Homo sapiens
ccccaccctgtgggcaggtccaggtcatgcccacctccactttcccttgctcttttggagtgagctgggcccagctcaccctgtccctctctcaccttctctctcttgtcgctgggcacctgcacaactcctactccccaggtccctcctccttgagtatgcttgccagaatagagtctgttccttgtcaaaggaaacttttgtaatttgtacttaaactgcactgggaaagattgtgttttcagcttgcattagtttgataagtaaatgggcacaaaaattaagaactttgcttctgccagagcctggctgggatctgaacaacttgggatctgaactttaaagaatttcagtcactaggctacaaacrcaatggggaagaggggcatgtggaagaccctcccccttctccatccagcaagtgagctcctaagtcacctcctccagggtgtcttccatgattctctcagagttagctgcttctttctctgtgcctcagcttcctcatctgtaaaaggcagatgcttattcacaggg

SEQ ID NO: 191509 - DNA, 524 bp, Homo sapiens
ttgatttttgcactgttactcactaattgtgataatgtggaacaagtcatctcacctctccgagtctgttttctcacctgacaagtggaataatcggacctgcctcgcagagaatggtgcgacttcagtaagcaactgtagggaaatcgctgggctcctggcccttagctggaagagcgcctgagaaacccggcgccaccacaggagtactttctggctccgaaattatgcccggtcccaggtcgtggcatagatccgtggctatgaccacggaaaatgaccattttagcggtgwcagaggacggggacaggaaaccaagctgcgcgtctccctgtccacagagggtgtgcgcggctgagggtcttcatcagcatgactcatgagttgatctggaggaaaatgtcgctacgtgtctgtgtgtacacgtgcgtgtgttcacataggaacaggagagtctgtggttgtgcgggaaaacgcgtgtagggcaacccgtggagattccttctcccaaaggcactttccc

SEQ ID NO: 191510 - DNA, 529 bp, Homo sapiens
cgctcggcttccgcccacccatggactacgcctttagtgatctcatgcgtgaccgctcggccgccgctgctgcggcggtgcacaaggagccgacctacggcggcggcctgtacgggcctatggtcaacggcgctccggagaagcagtagggcgaggggcctggcagccggccggtccccaaacaggaaccccagccctsttcccgcgggccatcgacccctcttcgcccagcgctctctctgcgccctggctgggggtcttctcactctaaggtggtttttgggttttgtttaggagggtgggtggggaaggctgagcaaagggggagcagctacagacaggtgcaggtgttctcggagggggtgcgcggcctgggtcctcatctcctacctctggatccctcttccagcctcacccggccccctttccaaaaggctgggaattcatgagaattcagaggctgcgacagcagcgcaggctcctgcggctccttagctgtgctcatccggctctcagtggatggcaggat

SEQ ID NO: 191511 - DNA, 450 bp, Homo sapiens
tgagagtcctcagaggaggctggaacctgaatccctggaaggtgtgaaatcctccaaggagagtgtgttggtgacaccagaaaggagaagcagtgtctggatcctgagaaatgccagcagttcaggggagggctgtagagattaaaccgtaaggaataattcattcactcaacaaactgaatgcctcctatgtgccaggctcttgtctgtgaatactgtgaatgtagcagagaacaaggcagaaaaaaccctgccccatggcagtacacttgagtgggaagaggcaaacaaaagtaggacatactacagtgataagtgctatggaagctgattaagcaaaggaggttggagggtcagattgggcagcaatggtaaatggaggaggtgccactgaaaaggtgacttggaataaagatttgaagtagrtgagcaaggtggattttgggggaa

SEQ ID NO: 191512 - DNA, 529 bp, Homo sapiens
ctaagttaagacagagcaatacaaggtgttctctgatgaaagattttacagctgatttatcaaatgagggaccagagaggaagaacggtgagggctcagaagagggaggggactggggcaggcagggcgggcttcttggaggcaacagagcttggaatgagcatgggaagacagggatgtggatgaatggaatggaggtgcactgtgcctggtgctgtagggaggagagacctgggcctgaaacaccagattaaaggatttgggttggatcccaaggcacagtgtctgtgtgaatccttagagccaggtctcactgcctgccrtagccagcaaggggctggcctggctggggcagagacacagggacagcaagaaatgaagtgggagggctcagggcctgcagcatgtactgcagctcccatgccagctgcagaggactgggcccacctagaggccctgggggaatctgggggcccctctattttccttcagaggagaggtgttctgcgggatcttttctgggccaggg

SEQ ID NO: 191513 - DNA, 364 bp, Homo sapiens
tgcctatttcttaaaatttaacatttcataagcagatatggcttaccatatctatgcaaaaccaatttgcacatgtaaataacaaattaaatttgaagcatgaagcagaaatcagctaagaatccacggtgtgagtctactgaatagaaatatttaagtgagaggaaagggggatttaaatataatttattcacttagagattaagtaaaaatctttttaactaaggtgawgtagtaagagctacacaggatttgtgctccatggatttttagattaatatcccctacagctcattacctgatttttaaatgtccctgatcttatgaggttgtgtatgactcaggctttttgtcatgctgctac

SEQ ID NO: 191514 - DNA, 364 bp, Homo sapiens
tgcctatttcttaaaatttaacatttcataagcagatatggcttaccatatctatgcaaaaccaatttgcacatgtaaataacaaattaaatttgaagcatgaagcagaaatcagctaagaatccacggtgtgagtctactgaatagaaatatttaagtgagaggaaagggggatttaaatataatttattcacttagagattaagtaaaaatctttttaactaaggtgatgtagtaagagctacacaggatttgtgctccrtggatttttagattaatatcccctacagctcattacctgatttttaaatgtccctgatcttatgaggttgtgtatgactcaggctttttgtcatgctgctac

SEQ ID NO: 191515 - DNA, 364 bp, Homo sapiens
tgcctatttcttaaaatttaacatttcataagcagatatggcttaccatatctatgcaaaaccaatttgcacatgtaaataacaaattaaatttgaagcatgaagcagaaatcagctaagaatccacggtgtgagtctactgaatagaaatatttaagtgagaggaaagggggatttaaatataatttattcacttagagattaagtaaaaatctttttaactaaggtgatgtagtaagagctacacaggatttgtgctccatggatttttagattaatatcccytacagctcattacctgatttttaaatgtccctgatcttatgaggttgtgtatgactcaggctttttgtcatgctgctac

SEQ ID NO: 191516 - DNA, 451 bp, Homo sapiens
ttgtcaaattcacaaattatttgggacatgaagctaagagacaaaacaaaagttatctgaataacagcactgaagacttagggtccagrtccctgcagtgggtaacaccctactgattgcaccagtctcccagttggaccacttttcctgttagctaagtcctaagactggggattaattagagctagactaaggcttagcagatgtgcaaccttacctcaggttgggtcaatacatgattaaaagaaagcaatctgtctcttactctatctgcctaggaaaggaaagtgaaagctaacaaaacaaaaaaagagaagtaaatacattcataaataaaaatggtagtttttaacataatttttcagtaactcatagaacaagcaaaccaaaaaataaaaaaataatttgaatatttgaattgtaatattaagaaattcagcttaacaagaat

SEQ ID NO: 191517 - DNA, 587 bp, Homo sapiens
taaggatccttgtggttgcattgtgtccacatggataatccagggtaatatacctatcttaaagttagcagataagaaatattaattccatctgcaatcgtaattcctcttgctatgtaacataatgtatttgcaggttctaggtattaggatgtgaatacctttggggtgtgcygttattctgtccaccacacctttcttagcaaattcattcaaacttattctggaatatgaaacctgttagaaactattatctcagcgcttaggctaaaactgaggctagaataatctcattttacgtcttattaaggtacttacatacacaatcacatagaatttatgagtactaaaatatagttctggtattaactctatttcgtcctcacaaaggagttggtggaataatcaactattgggggcaggtcctttctgccacatcttctttgaccttttaacagttttgtttcatcttccaatccctctttgatatggttcaccagggtgtgtttcaccatgatttatgctgaaattaactgcagattagcctcagtgtctctgtttccgtgctaaaatttaaaattattcat

SEQ ID NO: 191518 - DNA, 587 bp, Homo sapiens
taaggatccttgtggttgcattgtgtccacatggataatccagggtaatatacctatcttaaagttagcagataagaaatattaattccatctgcaatcgtaattcctcttgctatgtaacataatgtatttgcaggttctaggtattaggatgtgaatacctttggggtgtgccgttaytctgtccaccacacctttcttagcaaattcattcaaacttattctggaatatgaaacctgttagaaactattatctcagcgcttaggctaaaactgaggctagaataatctcattttacgtcttattaaggtacttacatacacaatcacatagaatttatgagtactaaaatatagttctggtattaactctatttcgtcctcacaaaggagttggtggaataatcaactattgggggcaggtcctttctgccacatcttctttgaccttttaacagttttgtttcatcttccaatccctctttgatatggttcaccagggtgtgtttcaccatgatttatgctgaaattaactgcagattagcctcagtgtctctgtttccgtgctaaaatttaaaattattcat

SEQ ID NO: 191519 - DNA, 580 bp, Homo sapiens
taattgcagcggagctggggcaggaagtcaaggagactgtggggaaagcttttacgtcaacacgtcttccatgaaaactgctccttaaagagccaatcatcagaaagagaaaacaacaagaagcgggagctcattttcaggctgactacacaggagtgcttcaaagcgacctccctgaattttgcttttycttccacccacactgctttctctcctttttctacgttcacatgtgacttcaatactacttcccttagtactttgtaataaattaccataagatttcatgttcaatctttcgtttcttttcctaagactcaattattatagtcttagaagtattaggcctgagacctccacctcacagaaatttggggttatacatcagcaaaggctctcggtgagggatgtgtgtgtctgccacagtgcttgtcacgcacatgggcacactgaaaaactacttcatttaatcctcacaactccatgtattcaaaagaatgagctacgttcctcggataaaattgctgagggtcttcaacacagttcacgagataacaattgtctgggttggtacctgctg

SEQ ID NO: 191520 - DNA, 580 bp, Homo sapiens
taattgcagcggagctggggcaggaagtcaaggagactgtggggaaagcttttacgtcaacacgtcttccatgaaaactgctccttaaagagccaatcatcagaaagagaaaacaacaagaagcgggagctcattttcaggctgactacacaggagtgcttcaaagcgacctccctgaattttgcttttcyttccacccacactgctttctctcctttttctacgttcacatgtgacttcaatactacttcccttagtactttgtaataaattaccataagatttcatgttcaatctttcgtttcttttcctaagactcaattattatagtcttagaagtattaggcctgagacctccacctcacagaaatttggggttatacatcagcaaaggctctcggtgagggatgtgtgtgtctgccacagtgcttgtcacgcacatgggcacactgaaaaactacttcatttaatcctcacaactccatgtattcaaaagaatgagctacgttcctcggataaaattgctgagggtcttcaacacagttcacgagataacaattgtctgggttggtacctgctg

SEQ ID NO: 191521 - DNA, 587 bp, Homo sapiens
taattgcagcggagctggggcaggaagtcaaggagactgtggggaaagcttttacgtcaacacgtcttccatgaaaactgctccttaaagagccaatcatcagaaagagaaaacaacaagaagcgggagctcattttcaggctgactacacaggagtgcttcaaagcgacctccctgaattttgcttttccttccacccacactgctttctctccttyttctacgttcacatgtgacttcaatactacttcccttagtactttgtaataaattaccataagatttcatgttcaatctttcgtttcttttcctaagactcaattattatagtcttagaagtattaggcctgagacctccacctcacagaaatttggggttatacatcagcaaaggctctcggtgagggatgtgtgtgtctgccacagtgcttgtcacgcacatgggcacactgaaaaactacttcatttaatcctcacaactccatgtattcaaaagaatgagctacgttcctcggataaaattgctgagggtcttcaacacagttcacgagataacaattgtctgggttggtacctgctggagatct

SEQ ID NO: 191522 - DNA, 587 bp, Homo sapiens
taattgcagcggagctggggcaggaagtcaaggagactgtggggaaagcttttacgtcaacacgtcttccatgaaaactgctccttaaagagccaatcatcagaaagagaaaacaacaagaagcgggagctcattttcaggctgactacacaggagtgcttcaaagcgacctccctgaattttgcttttccttccacccacactgctttctctcctttttctacgttcacatgtgacttcaatactacttcccttagtactttgtaataaattaccataaratttcatgttcaatctttcgtttcttttcctaagactcaattattatagtcttagaagtattaggcctgagacctccacctcacagaaatttggggttatacatcagcaaaggctctcggtgagggatgtgtgtgtctgccacagtgcttgtcacgcacatgggcacactgaaaaactacttcatttaatcctcacaactccatgtattcaaaagaatgagctacgttcctcggataaaattgctgagggtcttcaacacagttcacgagataacaattgtctgggttggtacctgctggagatct

SEQ ID NO: 191523 - DNA, 557 bp, Homo sapiens
acttggaagacagagtacttcaaagggccagaaaaatttttctgaagcaatgaaaatattcgacatcttttgtgtgacggtggttacaggggtgtatacatttgtaatgaatcattaaaaagtacattgacaaaaatatgtgcattttattgtatgtgaattttacctagaaagtgcatacaattgtctgattttcaaagaaatatctgaactttttgcagaaaatttttgtaccatgtctcaaccatcatctctaacaaagaattaataataaaaaaccccaggaatgttactttaacgtgaaggactcatttgtaatggtgagaacaataacaacaacattatagttaggcacaactaatttggaaaatttgaaaacttctgtgaaaatgtcatckatagtttgtagatgatttggtctctcatatgtgttggaacttgacatcaagcatcaaccccaggtttgtgtgtttgctgtcccttaatttggcaccatggctgcatatagctagtgatacaaaaaatagtgatatgacagtcaatcacttaaaatgtaa

SEQ ID NO: 191524 - DNA, 473 bp, Homo sapiens
gaactgggtgttatctgacccacaaagccctaaggttgaatgtgcacagaaacactatccttaaatgaaagtggtatacatgtgatagggcttgagcagactctgaaggcacaaggaagttacatgaagaagtggctcccatgcccatggtccccactccggctatgctgccctctctctacaaccctgcacatacgacctcatgaaaagttccttacaatcactcggcatasgaataggagacttggttcttgatttcagatggttctgcatggtaggcaggcgccactcaaaagtggacagctgcagcactacagcccctctctgggatacccataaaggacattggtaaagggaactcctttcagtgggcagaacttcagacggtgcacctggtttcgtacttcatttagaagaagaaatggccagatatgcaattacataccaaaacaagccaatggtttggttgaata

SEQ ID NO: 191525 - DNA, 432 bp, Homo sapiens
aattcctaaaatacaatcagtgctccaggtgctgatatttcagacaatctcattgctctcctggagcttacattgcagtataggaaaaaatagacagtcataaatagcataagctggaaagtaagtagaactagagacaaagaaaaaaagaaagtaaagaagggaaatagaaggggtgtaggcgtgggggtgaagttttccagtaaaaggcagaaaatataaacatttcatayatgtcaaaggaagtgaagaggaatgactcacacagactcaaagagcatttaatgcaggaagaacaggtgcagaagccctgggggagcaaatgatgggttgaattgaggctgttttctggaaggctgatcatgagaggctttcaagagcaagaggaaggacattagcttgacggagagccattggagggatgtccacgga

SEQ ID NO: 191526 - DNA, 432 bp, Homo sapiens
aattcctaaaatacaatcagtgctccaggtgctgatatttcagacaatctcattgctctcctggagcttacattgcagtataggaaaaaatagacagtcataaatagcataagctggaaagtaagtagaactagagacaaagaaaaaaagaaagtaaagaagggaaatagaaggggtgtaggcgtgggggtgaagttttccagtaaaaggcagaaaatataaacatttcatacatgtcaaaggaagtgaagaggaatgactcacacagactcaaagagcatttaatgcaggaagaacaggtgcagaagccctsggggagcaaatgatgggttgaattgaggctgttttctggaaggctgatcatgagaggctttcaagagcaagaggaaggacattagcttgacggagagccattggagggatgtccacgga

SEQ ID NO: 191527 - DNA, 612 bp, Homo sapiens
aactcttaacagccttaggggatgctggcaggcccctaagcagagcacacgagcatctatttcctcataagaactgtcttcaccttcgtcttttaaaattgtggctgcttcaggtagggtaaaaagttactggttaaaagaaaaattttcttcccacagtatgacagttaattttatatgtcaacttcactgggygaagggatgcctctatagctaataaaacattatgtctgggtgtgtctgtgaggatgtttctaagagattagcattggaataaatgaatggagtaaaaaagatcaccctttccagtgtgggtcaacatcatccaatccattgagggcctgaataggacaaaaaggtggggaggggcaaattggatctgtcttcttaaactgagacgtctgtctcatgttgtcctaaaactgtggagctcctggttgacttggactgaattacactggctttcctggttctgcagcttgcagacagcagatggtgggatctctcagcctctgacacagtttgaatgtgtgtctctgcccaaatctcatgtggaaatgtaatccccaatgctggaggtggagtctggtgggacgtgattggatcatgggg

SEQ ID NO: 191528 - DNA, 535 bp, Homo sapiens
  misc_feature (1)...(535): n = A,T,C or G
cttttctgacaagtggtcttctgatctgatgccatgttatcctattgagatcccatcctagtgggtgagatatttcataaaccctcagatagtctttctagttgaaacttgtgggcaggaaaggcaaatccatgcccagaatacttggctttttatgttagaacaaatctctggcttttccaagatagaaagtgatcggtgtactcacttaccaccaaatggccgactggtctctttaaggaagagtaacatattgggggctcagtgttgttttctctggctggaggtttgggcattcaatggcagcagtagccaatttaatcttggtaaataggcagccatgccattggacccaccckgcatagccttcctctttcccactgtgaccactccaagcaagcccatctgcaagcactggtgtggccaatgaccaaggctagtggaagtcaaatggccaagcaattttgtctacacaattgttcattgccttttccatgacagatgctctctgatgggcatttgcatatgacatann

SEQ ID NO: 191529 - DNA, 601 bp, Homo sapiens
ggacaagtttgcaaaaatggaaatttttaagggcaaattcataacatatctagttaacagagaccttttctaaatatattctgaagaagtaataaaacaccttcaatccatgatcgttcacaaaaataaagacctttaaaaatcagactatgcctttttctgaatgatcttttagcgtaatattgcttagaggcaatgcaaatgttgaatgaataaaaaatagcttaggggaagctgtgatctccttgtcttcatttagcaactgcccaactccttaaaatgaagactgagcatacagtttaatggggagaaaaacaaaaaacacctcagtcttgccaaagtcaacaaaattttgttggagtcaccagactagcaaaagtaatgtcttcttacacattgacaggctgttatgtaaaragtgctaacacaacagagtgccagtgagttcacagggccttcttgccttctcatcaaggcagaatgacaagaagcagaagaaattactcagtaaaaacaaagggtcacactggaacagggaaggaaatactgggaacaagagagttttttgttttgcttttaaactagaaaagcttgatacatt

SEQ ID NO: 191530 - DNA, 523 bp, Homo sapiens
ttaagtacctaccaaatgcgtgttgaaataaagacataatgataactacgatagagggtgacttcagataagtgccacaactgtcatgtttcaaatttttttgtaatatacacagtgcagagaatattttgataataatgatttgtgaaaacttgttatggagaaagaagcctaagtattctaaattttatataaagatcaagattacagagaaaaaaatttaaaagattcaattacagagagaactaatgtagcacaatagcattattgcatggttagagagtctgcagaacagataaaacagaaaatttcaaataaagaagaattagcaatatcgatgaatggctgctaatattagtcccgtcacrttcaaaaggagaaaaaaaaatcctggtctcatgccttgcaatgaatctctttttctaaaagtctccttgttcaagatcacattttcattacttatattttaaagccattaatggagaaagaaaaaatgggtgcatcccccaaatgttaaatatat

SEQ ID NO: 191531 - DNA, 536 bp, Homo sapiens
cttttttcaggaaagctacagattcttgtaacatgttgtttaaaatgatacattacttatatacacactgtatgtggcaccgtgcttcggggaaataacattggtgagcatacatgtattcccttcatttcaggaggctcagagttaactgaatttctgtaaagcaaatatgtgatagctctcttcaagttatatattgatgcacataatccttttttgtaattttttgtattatttataaaattagtccaagccccttctctcaaaagctactgaagtttgaggaatcccacagtacttaaaatatagcttaaaagagttttataatttataaatacatttcttttgctctgtgcttgttagtcacagtagatgttgctaraatgatcacagcacaacagcctgtcctatgggtttatctagcattaattactcaagtgaccttctagctcacaaagtcaaaatgtcacattaacacccgtatttcttttgatgtgctttccagacttagaaatgcacagtgctatcaattgtgg

SEQ ID NO: 191532 - DNA, 536 bp, Homo sapiens
cttttttcaggaaagctacagattcttgtaacatgttgtttaaaatgatacattacttatatacacactgtatgtggcaccgtgcttcggggaaataacattggtgagcatacatgtattcccttcatttcaggaggctcagagttaactgaatttctgtaaagcaaatatgtgatagctctcttcaagttatatattgatgcacataatccttttttgtaattttttgtattatttataaaattagtccaagccccttctctcaaaagctactgaagtttgaggaatcccacagtacttaaaatatagcttaaaagagttttataatttataaatacatttcttttgctctgtgcttgttagtcacagtagatgttgctagaatgatcacagcacaacagcstgtcctatgggtttatctagcattaattactcaagtgaccttctagctcacaaagtcaaaatgtcacattaacacccgtatttcttttgatgtgctttccagacttagaaatgcacagtgctatcaattgtgg

SEQ ID NO: 191533 - DNA, 551 bp, Homo sapiens
taccatgcactcatatgtttattgcaggactatttacaatggccacttctctgcaacagtgtattactggaaactctaaccagagcaattatgcagaaaaaagaagtaaaacacctacaaattataaaggaagaagtaaaattatctgtttgcagattgcataacctttattttttatcttatttatttatttatttattttgagacaaagtctcactctatcacccaggctggagtgcagtggtgccatcttggcccactgcaacctctgcctcccaggttcaagcaattctcctgcatcagcctcctgagtagctgggactacaggtgcctgtcaccatgcctggctaatttttgtatttttagtagagacagggtttcaccatattggccaggctggtctygaactcctgacctcagttgatcagactgccttggcctcccaaagtgctgggataacagacatgagccaccgttcccagcctagattgcataatcttatatgtagaaactgctgaaaccttcacaaaagagaaaaatactgttagaac

SEQ ID NO: 191534 - DNA, 608 bp, Homo sapiens
tcattatcctaggcgaattaataaagaacagaaaaccaaatactgcatattctcacttgtaagtrggacctaaaaactgagtattcatatgcacaaagaatgaaacaatagacattgggcctagttgaggatggagcatgggatgaaggtgagactctacaaaacatcaggtataatgttcactacctaggtgatgaagtaatttgtacaccaaaccccagtgacatccaatttaaccatgtaacaaatctgcacatgaaccctctgaacctataataaaatttgaaaggaaaaattaaaaatgaattaaaaaaataaaatggtaaatagtaaatattcttgatttatactttcaccatttaaaaaatatccttttatcttacagtaatgatttttgtttcagtgtccattttgtctgatattaaattaacatagctactcaggcttttttgagaggttatggtttgcactttatatatttttctatactttattttcagtctgtttgtgtctttgaacctaaattgtgtttttttactggcagaatatagtcatatagttgaatcattatttaaattcagtcagtcaatctctgcctttttcacagt

SEQ ID NO: 191535 - DNA, 662 bp, Homo sapiens
gtgcaaatatattgttaaattaatcactaagcacttcaaacttttggcactagtttaagtggtgtgtatgtttcaatttcatttccaattgctcattgtcagtaaaatagaaactattttttattgatattctatcctgaaaccytgctatacttattaattcaagcaagtgttttgtaagcttttacacctagatgatcatgtagtttatgaaaaaaagaaagctttgtttcattttatgtaaactctttgcatttgtctgaacattcattatggcttggtgttaaacattgtcgaatgaatttattgcatctattgagatgattataattttaagtatgttaaatttttgaattatgttgcttaattttcaaatgttaagtaaattttctattaataggataaactctacttgttcataatatatttttctgtaatgctgaattcaaatttaccattatgtgtttcagagttttcgcatctttgttcatgtgaaatgttggactatagttttctttctttatccgtctttggtatcagggcaatgtgggcctcctaagatgaattaggatgtgttttctcctgttgtgtttttggatgactttaaataaagttgcattatttatttcatatataaatgtacggtagaattcaccaccaag

SEQ ID NO: 191536 - DNA, 613 bp, Homo sapiens
cttttttatttctgaggcatctattgtaaagtctcctctatcatctctggttctatttatcagtcttctctttcttagtctagctaaaagattgttgattttgtttatttctgcaaaaaaaaatcttggtttgtagattttgtatttttttccattttctattttatttatttctgcactaatctttattattttctttcttctactaatttagggctcagtttgttctttcttttctatgtcattgaggtataaagttaagttatttatttgtaatctttcttctgttttaatgtaarcatttaatgttataaatttccatcttagtactacttatgctgcactgcataacttttggtatattgcatttcatttttgttcctcttaagatattttaaatagtcttttttgattttctctttgattcagtgattgctcaagagtgtgttatttagttgccacatatttatgaatgcttttattttcctactgttgtagatttctggtttcatttcattgtggttaaaaataatacttggaatgatttcaatcttcctgaatttgttaagacttcttttgtgaccttacaggtggtttatcttggagaatattt

SEQ ID NO: 191537 - DNA, 613 bp, Homo sapiens
cttttttatttctgaggcatctattgtaaagtctcctctatcatctctggttctatttatcagtcttctctttcttagtctagctaaaagattgttgattttgtttatttctgcaaaaaaaaatcttggtttgtagattttgtatttttttccattttctattttatttatttctgcactaatctttattattttctttcttctactaatttagggctcagtttgttctttcttttctatgtcattgaggtataaagttaagttatttatttgtaatctttcttctgttttaatgtaaacatttaatgttataaatttccatcttagtactacttatgctgcactgcataacttttggtatattgcrtttcatttttgttcctcttaagatattttaaatagtcttttttgattttctctttgattcagtgattgctcaagagtgtgttatttagttgccacatatttatgaatgcttttattttcctactgttgtagatttctggtttcatttcattgtggttaaaaataatacttggaatgatttcaatcttcctgaatttgttaagacttcttttgtgaccttacaggtggtttatcttggagaatattt

SEQ ID NO: 191538 - DNA, 575 bp, Homo sapiens
tgcattaccaactttgaaccatggtaaagttaagccaaactgttataagtcacaggcagtctgtatgctacgaaaatatagactgctttttaatacagagtacttagattgatgacaagtgatgtttttgcataaagaatatgaatgtgraaacagataacaaaggacatctttattcacattaagtatgaaaaaaatcagggaacataaagcaaacttaatatttcttaattttaaaccttgcaatatttaggctgttagatgtaatacacagtaataataatttaaagcattacactgtgcttacatttagattagatgtcatgaacttccaaatgaaatctagagaaaaaacattattatgttcttatatcatgtgcattaacaagagagcatttgatctatttagagtgtttcttaggccataatattattcagaaacctctggtttctttcttcaaaatcaaaataaaaagagtggaggaggaggagggtaaaggggagggggaaatcagaaaagaaagaggaaagaaataagtttttgctttgatgaatagactattcccaacatctgt

SEQ ID NO: 191539 - DNA, 575 bp, Homo sapiens
tgcattaccaactttgaaccatggtaaagttaagccaaactgttataagtcacaggcagtctgtatgctacgaaaatatagactgctttttaatacagagtacttagattgatgacaagtgatgtttttgcataaagaatatgaatgtgaaaacagataacaaaggacatctttattcacattaagtatgaaaaaaatcagggaacataaagcaaacttaatatttcttaattttaaaccttgcaatatttaggctgttagatgtaatacayagtaataataatttaaagcattacactgtgcttacatttagattagatgtcatgaacttccaaatgaaatctagagaaaaaacattattatgttcttatatcatgtgcattaacaagagagcatttgatctatttagagtgtttcttaggccataatattattcagaaacctctggtttctttcttcaaaatcaaaataaaaagagtggaggaggaggagggtaaaggggagggggaaatcagaaaagaaagaggaaagaaataagtttttgctttgatgaatagactattcccaacatctgt

SEQ ID NO: 191540 - DNA, 395 bp, Homo sapiens
cattaacaagagagcatttgatctatttagagtgtttcttaggccataatattattcagaaacctctggtttctttcttcaaaatcaaaataaaaagagtggaggaggaggagggtaaaggggagggggaaatcagaaaagaaagaggaaagaaataagtttttgctttgatgaatagactattcccaacatctgtccttgagaatttaaccatgcatttatcaaaaatttcacattttttctacccacttttaatagcaagtgtgaatttctgtttttaaattcataatgctgttccaaaaccccartgttatttgtatgactactcctgacacactctgacctggtacacaattctttacacatcactgatggcttttacacaaatgctaagc

SEQ ID NO: 191541 - DNA, 580 bp, Homo sapiens
tttttttttttttttttttttggcagaaaaaaaaattgactggccatactgacctcagctaatgtcaaggatacgtcttttctcccgggttcacaaaaaatagttatttctcctgacttaragtcagctttcaaaaatatggacacagcagttcttacgccatttatgttcttgccaaagtactcacaaactgtttagctgtctgggcacaacccaaaaatcttctgaaatctgtagattttaggtgtctaaagccagcctctttttcctagcctttgtccatcacctctcttcattttaatttgttcatacttaaacatgattcaatgtatctttttttaaaacatattatatttgtttattttcaggttcactccctttccttttcccctctgcatgcatacaacaatgttagctccctgaagcaggggtccttatctggagcctagaatagcaccaggcagatagcaggtatttgatcactatactaaatgaaagaataaactgctgtaataatttcagaagatctgaatgtcgacctttgtagtaactattgccagagctccacccatacacagat

SEQ ID NO: 191542 - DNA, 580 bp, Homo sapiens
tttttttttttttttttttttggcagaaaaaaaaattgactggccatactgacctcagctaatgtcaaggatacgtcttttctcccgggttcacaaaaaatagttatttctcctgacttaaagtcagctttcaaaaatatggacacagcagttcttacgccatttatgttcttgccaaagtactcacaaactgtttagctgtctgggcacaaccmaaaaatcttctgaaatctgtagattttaggtgtctaaagccagcctctttttcctagcctttgtccatcacctctcttcattttaatttgttcatacttaaacatgattcaatgtatctttttttaaaacatattatatttgtttattttcaggttcactccctttccttttcccctctgcatgcatacaacaatgttagctccctgaagcaggggtccttatctggagcctagaatagcaccaggcagatagcaggtatttgatcactatactaaatgaaagaataaactgctgtaataatttcagaagatctgaatgtcgacctttgtagtaactattgccagagctccacccatacacagat

SEQ ID NO: 191543 - DNA, 580 bp, Homo sapiens
tttttttttttttttttttttggcagaaaaaaaaattgactggccatactgacctcagctaatgtcaaggatacgtcttttctcccgggttcacaaaaaatagttatttctcctgacttaaagtcagctttcaaaaatatggacacagcagttcttacgccatttatgttcttgccaaagtactcacaaactgtttagctgtctgggcacaacccaaaaatcttctgaaatctgtagattttaggtgtctaaagccagcctctttttcctagcctttgtccatcacctctcttcattttaatttgttcatacttaaacatgattcaatgtatctttttttaaaacatattatatttgtttaktttcaggttcactccctttccttttcccctctgcatgcatacaacaatgttagctccctgaagcaggggtccttatctggagcctagaatagcaccaggcagatagcaggtatttgatcactatactaaatgaaagaataaactgctgtaataatttcagaagatctgaatgtcgacctttgtagtaactattgccagagctccacccatacacagat

SEQ ID NO: 191544 - DNA, 534 bp, Homo sapiens
catcctgtcatagtagctccatgcccatctatcagggtggaagcctcataaactaatcgccccttaaaggttctacatcttaatactactacaatagcaagtatatttcaatatgtgtttgggaggggacaaacattcaaaccagagcaccaagtaataaatactattttttcaccaatctcaaaataayataactttttttaagtttcgggatccacttttcatgttatggtgctttaatgtgtgtgtgtgtgtgtatctatatgtatataaagacacatgcatacatacacatatatatatacacatatgcatacatatatagaaatatatagacatatgcgtacatgtgcacatttgtatgtgtacagatatatacatatatctgtgtatatatgcatatgtctatatatatagtcagatatatatagagagagacacacgcgtatctatctatctatatatgtctatctacctatctatcatctctacagaatagcaaggaagggaatactaaggaaggtcaaagctaca

SEQ ID NO: 191545 - DNA, 562 bp, Homo sapiens
ttggttgtatgaagagcacatcaagtgatacctctaatatatttagagcagtggagggtgaatttacatctcagcaaacattaactgtggctagaggaaggagaggagacaaaagttscctgtaagaaagaatgggaatttgttagtcaagctctttgtgagtgacaatttccactcttaatattgttatcacttagggaggacatagagttgtttttcatggaatttgttatggctcaaaatacccctttagaagggaaacttcagattctatgtatctgtggcaaattcagtataaatcagatactgtggatgtcgagtcaagttctgtctagatatgcagctggatagagctgttctaaatgtctgtggaggtggagaatgacaggagaggggacttctgccaaacacgtcatccccagaaacccatagatgacctcatccagctgccttttggagtctggtttatctaattcagcctgggagagagaagagtctaagacaaaaccaactcagttagatcctgaagagatcttgggcaacaccaactccagagtcagcc

SEQ ID NO: 191546 - DNA, 592 bp, Homo sapiens
tagttacagcattttctgctcagaattcaactgagggaaaaaaaaatgtgttttgagtaatactcactaaggtgaaaatctgaccatattttgagaaataaggggtttggaggctcaggacagaccatcccactgctgtcttagggacattgggctgctggagcctggcccaaagaaggtcttctgggaaatcaggactgagtctgggcaatgctagagtcagtgggtaaaatggctttggagtgtggcacacatagtaacgctctgtggaaccctccatattgacctgagcctggcctgatctatgagtcatctaaacctaacaaaaggcatctagaggacttggggttaaggccgagttattcttcaagtacacaattatggttgccagtaaaatgaatttcatgcttgaggtgatatttgtgggagaaaaaaaaaaggaagattaaaaaggctgtgtcaaamtagtgttttgattagaccagaagcatcattctagaaaatgcaaaatagtaggaacgcaataaaacaaacaaacagacaaaacccaaacaaacaaaaaatgctttgggcatgcctttcaggaatgaac

SEQ ID NO: 191547 - DNA, 492 bp, Homo sapiens
catgctcatttttctggtttctaagattgaaattgagcacatcagtgttaactctgctggctatataatttaatgcataaacctggacacttttgagagtggaaagaggtgctaaatacataaggtggctgagcataggtataaaccgggcctcccctgagcaaactagggtatgcaaccactccagatataatactttcctaagtcctttttctttctgtagctcctctcccacgtagcatttctgcctgttatatttyatccctatttcaaacattcctcagttctattttgggagggattcacccaaccactgtccaacctgttagtcctcttgaaaacagtgaagccacaaatgaggtatagctcaagtacctcaagtaaaatgatttcaaagaacctctgactgacctctaatgctgttccacatcctttgtagtactacaaaagataagcctctaatcttctcatctgcactcttctttctaaatt

SEQ ID NO: 191548 - DNA, 445 bp, Homo sapiens
gagatacaatccaaaaatcacacaattcattaaagtgtacaagtccaggatttttgtatattaacagaattgggcgatcatcactataatctaattttagaaaatttccatccactcccaaataaatcctttaccattagcagctattccccatcaccctctctgccttctaatcctatgcttcctatctctgcatgtttctctttcaggacatttcatataaatggattaataaaatatgttgtcttttgtggctaacttctttcaattagtttgatgttttcaaagtttatccatgtkgtagcatttatcagtatttactcacttttattaacatttcatatttcgttgtaacaatatgccactttattttgcatacatttatcagttgacagaaattggcttaatttcactttttgactgttataaatagtactgctatgaa

SEQ ID NO: 191549 - DNA, 479 bp, Homo sapiens
tctgttttatatggtcatggtttgtggtgccccaaaacaaatagtaacatcaaaaagcacttatcacagataaccatgacatatataataatgctaaaaaaataaaatattgcaagaattaccaaaatacgacacaaagatatgaagtgagcatgtgatgttggaaaaatggcactgatagacttgcttgatgcaaggttgccacaaaccttcaatttataaaatatcccaaatctgcctagtgtagtgaagagaagcacaataaattgagattcatgcatataaatttatggtatgtatacctagagagatgtttkgaatatctaggacagtatggtagtccctaaaatatctgtattaattagtctatatactaaatttatacacaggattttttctatttaaaaactaacaagattgtgtggagatttgggtatatgactgaggctattaataaaaccatgagttactgaaagttc

SEQ ID NO: 191550 - DNA, 515 bp, Homo sapiens
aattctgttattctgacacatgggcccagatactggccttgcatgagtgtgtttctaatattgatatttaatttatagaaaaactctgaactaatcttatccctcaaaatcagcccttacaatctcacatgcccacctcttcctcaattagtccctgagcctatagggattgatagttttaatttctggcccccatgtctcatgaaaacagttcattttgattgttaccttctcccaggtctgaagacaagtctttaacttgtgtcattactcaagatttatcaggggttggtgccttttttagacccaggagtcaaaggccagtgacttaacagaacaaggattagttaatagattactcatgtcacaagtgacaatactatggtttggtttctaagagttaytgcctgcctgcagcacttcaaatcactgcatttcagtggttaggttactcactgcatatttctagttgctagcattctagtgacagaactgtgtccaaagatatcaaaagt

SEQ ID NO: 191551 - DNA, 585 bp, Homo sapiens
catttttctgcctgttttatattcgctggtggccgattagatggtgccaacccagattaaggttgggtctsctttccccagcccactgactcaaatgttaatctcttttggcaacacctttagacacacccaggaccaatattgcatctttaatccaatcaagttgactcccagtattaaccatcacaagtccaatccttgtcaacttgatcccataaacatctcctgagatcatacataatcttcaaataaagaatagtaaggtcggctgggagcggtggctcacgcctgcaatcccagcactttgggaggccaaggcaggcggatcatgaggtcagatccttgctaacatggtgaaaccccgtctctgctaaaaatacaaaaaattagccaggcatggtggcacacgcctgtagtcccagctacttgggaggctgaggagggagaatcacttgaacatgggaggcagaggttgcagtgagctgagatcacaccactgcactccagtctgggtgacagagcgagactccatctcaaaataataataataataataataataataacaataatgtcacaattatg

SEQ ID NO: 191552 - DNA, 486 bp, Homo sapiens
gaattcttatcaggacccgtttaggattaaacaagttttattgggaatctgaagaaactccccagacctccacaaacaagtttattgggggtctgaaggaactccacaaacctccatgatttagcaggagacaagataagggtaatcaccgcagcacctgggcccatttagattaagtaaatttactgaggctccagaggaaggtcttcaggactcagctcttagttatagattaaaagaagttaatcacatatgtctttagatgagtgcacacttasacatagacatatagcttagaaggtatataatctctgaaaaaactttgtaattttgagtttggtgatattctccaggctttcttcctgtaaccagttacagaaataaaagctctcttcctccccagttcatctgcatctcattattgggctgcaagaataagcagcctgaccctcggtttggtctgaacaaatttggtgaggcagccag

SEQ ID NO: 191553 - DNA, 486 bp, Homo sapiens
gaattcttatcaggacccgtttaggattaaacaagttttattgggaatctgaagaaactccccagacctccacaaacaagtttattgggggtctgaaggaactccacaaacctccatgatttagcaggagacaagataagggtaatcaccgcagcacctgggcccatttagattaagtaaatttactgaggctccagaggaaggtcttcaggactcagctcttagttatagattaaaagaagttaatcacatatgtctttagatgagtgcacacttacacatagacatatagcttagaaggtatataatctctgaaaaaactttgtaattttgagtttgrtgatattctccaggctttcttcctgtaaccagttacagaaataaaagctctcttcctccccagttcatctgcatctcattattgggctgcaagaataagcagcctgaccctcggtttggtctgaacaaatttggtgaggcagccag

SEQ ID NO: 191554 - DNA, 529 bp, Homo sapiens
agccccaaaggatcagttagttttacaaaggacaatcgtattctctgtcacatcctttttggccatgcctcaaaagcagtcccacaatgtaagctactgctcataggctcaatgcagtccaccttcaaagcaagagaaataatttcatgagtaactccaactgccgccttgttatagggaaggcatcatgttggagcctcccagctcaaattctcacagtgaacaatttaagtctaaagttcaaaagtttcaatggcatttggtggaaaaatatcactttactgtgtacttcagacttmttgtactagtattttactatagtcagaagaaacatcattttttcaagtatcactttctttccctcttgtcttcaggaactgcattgggcaggagtttgccatgattgagttaaaggtaaccattgccttgattctgctccacttcagagtgactccagaccccaccaggcctcttactttccccaaccattttatcctcaagcccaagaatgggatgtatttgcacctga

SEQ ID NO: 191555 - DNA, 401 bp, Homo sapiens
aaaaacaaaaccaaggaccctcacagagtccacctcacccctctgctacctccactggagcaggcactggtatccatggctaagagacctgaagatggatcacatcataggactctttacagacactccccagtagcagcctagagcctcgtagctctgctgggtggctagacccagaagagcaaaaataatcactacagtttggctctcaggamgccccactcctaggggaagggggagaacatcacatcaagggagcaccccttgggacaaaataatctgaacagcagcccttgaatcccagatcttccctctgacatagtctatcaaaataagaaggaaccagaaaaaaacaattctggtaatatgacaaaacaaggttttttcacacccccaagaga

SEQ ID NO: 191556 - DNA, 523 bp, Homo sapiens
ttttactctgttgatagtgttctttggtgagcaaaagttttttattttatcaagtccagtttatctattttttctttcactgcctgtgcttttggcatcatatccaaaaaattattgccaactcctatgtcatgaagttttccttatgttttcttctaagagttttaagttgtagctctcacattcagttctttgattcatttagtgttaattttttatatggtataaagtctgcatttgctcatagatggatggatgatagatagatagatagatagatagccagagccaaacaactttttatgcataagttttatctgagttaatagaggttaaaaaaatagggattttctatttcttctccatttttcagctttccctatctataatgaggaactttcctcctctccccaccyccatctgcctttctctcactgtctcactttctgtccctctgtttctctttctgcataccagtaaggattcatggattgttaagaaatcagtgtattgaatttcatta

SEQ ID NO: 191557 - DNA, 589 bp, Homo sapiens
attttttctctgcctgctcaaatcaactgttgaaaccttatgaactttttatttcagttactgtatactccagttctagaactttatttgtttctgtttacaacttatatgtctttgttaatattctctatttgttcatacatgagtattttggttttgtttcatctttggccatggtttattgtaggtctttgagcatattgaagacagttgatttaaagttgtctagtaagtccaacgtctatgcttcctcaataacattttcttttcatttctttttcctgtgcataggccatacttccttgtttcttttacatgatttgtaatttttttgtttaaaactgaacattttaaatgttatgtaagaaaaaaaggaataaaagaaaaaaaggtaggaaagaaaataaaaatactctccaggtctttcctggttggttctgggttggggcacacctctaatatttaatyggggcatttacaagtttgccttagctttctctttcttcttgcactttgtgtaaggactagtcaaagttgaaagcctgtggtcttatcaggtcttttccaaccatgcatcctaccctgggta

SEQ ID NO: 191558 - DNA, 589 bp, Homo sapiens
attttttctctgcctgctcaaatcaactgttgaaaccttatgaactttttatttcagttactgtatactccagttctagaactttatttgtttctgtttacaacttatatgtctttgttaatattctctatttgttcatacatgagtattttggttttgtttcatctttggccatggtttattgtaggtctttgagcatattgaagacagttgatttaaagttgtctagtaagtccaacgtctatgcttcctcaataacattttcttttcatttctttttcctgtgcataggccatacttccttgtttcttttacatgatttgtaatttttttgtttaaaactgaacattttaaatgttatgtaagaaaaaaaggaataaaagaaaaaaaggtaggaaagaaaataaaaatactctccaggtctttcctggttggttctgggttggggcacacctctaatatttaattrgggcatttacaagtttgccttagctttctctttcttcttgcactttgtgtaaggactagtcaaagttgaaagcctgtggtcttatcaggtcttttccaaccatgcatcctaccctgggta

SEQ ID NO: 191559 - DNA, 200 bp, Homo sapiens
ttggtgtgtttattattgcctcaattgttcttttttgtcccaggaatcagtgctagttcttttgcctctcaatgtttttgaggaacacttccctgccctgagagaattctgagttaggtaaaacataggaaagcccytgtccttcagaaaacccacacagaagtcaaaacaaacaaaattccttgagaacaaggaccatt

SEQ ID NO: 191560 - DNA, 200 bp, Homo sapiens
ttggtgtgtttattattgcctcaattgttcttttttgtcccaggaatcagtgctagttcttttgcctctcaatgtttttgaggaacacttccctgccctgagagaattctgagttaggtaaaacataggaaagcccttstccttcagaaaacccacacagaagtcaaaacaaacaaaattccttgagaacaaggaccatt

SEQ ID NO: 191561 - DNA, 492 bp, Homo sapiens
ttttttgtcccaggaatcagtgctagttcttttgcctctcaatgtttttgaggaacacttccctgccctgagagaattctgagttaggtaaaacataggaaagcccttgtccttcagaaaacccacacagaagtcaaaacaaacaaaattccttgagaacaaggaccattctgctttctctaggatccaggaawcagaacccactgagaatgcaggctgccatcttcaagattgccatggtactggagagggatgtggggcaaggctaaattgcaatgccaccaatcttttctatcctttttcagtggtcttttttctgattaagtgtgcacctggttgctgtaaacaattaactgtcttccagaaatctgctaaagttgactataacagtttttgccagataatttttgtttttgctttgggaagggatggccctggacagttcctaatccaccatttttcctgatgtcactcttagacattattttttag

SEQ ID NO: 191562 - DNA, 492 bp, Homo sapiens
ttttttgtcccaggaatcagtgctagttcttttgcctctcaatgtttttgaggaacacttccctgccctgagagaattctgagttaggtaaaacataggaaagcccttgtccttcagaaaacccacacagaagtcaaaacaaacaaaattccttgagaacaaggaccattctgctttctctaggatccaggaaacagaacccactgagaatgcaggctgccatcttcaagattgccatggtactggagagggatgtggggcaargctaaattgcaatgccaccaatcttttctatcctttttcagtggtcttttttctgattaagtgtgcacctggttgctgtaaacaattaactgtcttccagaaatctgctaaagttgactataacagtttttgccagataatttttgtttttgctttgggaagggatggccctggacagttcctaatccaccatttttcctgatgtcactcttagacattattttttag

SEQ ID NO: 191563 - DNA, 492 bp, Homo sapiens
ttttttgtcccaggaatcagtgctagttcttttgcctctcaatgtttttgaggaacacttccctgccctgagagaattctgagttaggtaaaacataggaaagcccttgtccttcagaaaacccacacagaagtcaaaacaaacaaaattccttgagaacaaggaccattctgctttctctaggatccaggaaacagaacccactgagaatgcaggctgccatcttcaagattgccatggtactggagagggatgtggggcaaggctaaattgcaatgccaccaatcttttctatcctttttcagtggycttttttctgattaagtgtgcacctggttgctgtaaacaattaactgtcttccagaaatctgctaaagttgactataacagtttttgccagataatttttgtttttgctttgggaagggatggccctggacagttcctaatccaccatttttcctgatgtcactcttagacattattttttag

SEQ ID NO: 191564 - DNA, 538 bp, Homo sapiens
tagccacaaaatccttgaatcctgggttggtatgtgtattagtccattctcattctgctataaagacatacctgagactgggtaacttataatgaaaagaggtttaaccaactcatggttctattggctgtacagggttctgcttcttgggaggctgcaggaaacttacagttgtggtggaaggaaaaggaaaagcaggcacaccttcacgtggccaccaggagtaggggtggagtgttacacatttttaaacaagcagatctagggagaattctatcacaagaacagtaaggggaaaatccacccccatgactcagtcaccttccaccaggcctctcctccaacactgaggattacaatttgacataagattcaggtggaggcacagagccaaaccatatcagtatgtgtgtctgatccttyctcatctgagcctggtggaggtggaggtcgggggagaaattactttcctgatagacacgaaatgctcctgtctccctcaccttaccacaacctacactcgcttttgcttcagaaa

SEQ ID NO: 191565 - DNA, 502 bp, Homo sapiens
tcgtacctggcctctgaagtgaggtgctgccagccatatggtgtgggagactctgagttccctcagaaccatgttcacagcagtttatatggggttatttgatgtttagaccatgaccatcatcatcagggcaaggaccctgtcttgtatacccaacacttctcacagggatggactcagggtaggtgctcaatgagaagtagctgaatgaatgagtgagtgagtccagtagactcactacatttggagaacacaaggcagaagagcaaagacacccataggagtagccatgccaacatagagaaatgtatcatgttcaggaggtcgagtcaggaaasacttcctaagaaaggtgacacgagctgagtcttggagaatggggaggatttctagagatggggactcagagaaaagatggccttgtggtcaaggagaaaagggagctttagctttggctgaggcagaagagggtgcagagatgtcacaagacaatctaaaaccc

SEQ ID NO: 191566 - DNA, 502 bp, Homo sapiens
tcgtacctggcctctgaagtgaggtgctgccagccatatggtgtgggagactctgagttccctcagaaccatgttcacagcagtttatatggggttatttgatgtttagaccatgaccatcatcatcagggcaaggaccctgtcttgtatacccaacacttctcacagggatggactcagggtaggtgctcaatgagaagtagctgaatgaatgagtgagtgagtccagtagactcactacatttggagaacacaaggcagaagagcaaagacacccataggagtagccatgccaacatagagaaatgtatcatgttcaggaggtcgagtcaggaaacacttcctaagaaaggtgacasgagctgagtcttggagaatggggaggatttctagagatggggactcagagaaaagatggccttgtggtcaaggagaaaagggagctttagctttggctgaggcagaagagggtgcagagatgtcacaagacaatctaaaaccc

SEQ ID NO: 191567 - DNA, 582 bp, Homo sapiens
attgactaaatttaactgtactttgaattgatgagcagcttcatgcaatttgagacaaagagagaattctgcaactgtgtcgctagaggagggttagtaaagactaaacgaacgatttgacaagatttgaggattgtcatatggatacatggattttagggcatcatgaaaaaatggtcacatggataaacgtaaaaattatgatgataaggtcctgggaaatctgggagtttgaagagaatttctagggcctgttgatygagggccctttgtgcaaggcctgcttttcttatctaaccttggttctcctttatgctttgggcagaatatggtttataccacatatttgttgaactgaattaaaatttaaacccctatttaaagctctgatttttcccctcaaatcattattgtggttgtatctccaaacatttataaactggcattttatttaaaatatttgtattgtactttctaggatgaaagtggtagcagcttctcagatattgatgtacactctgaagtgagcacattcctgttggcaggacatgacaccttggcagcaagcatctcctggatcct

SEQ ID NO: 191568 - DNA, 516 bp, Homo sapiens
tgcgtgtgcaatctcagggaggcacttaattgttgctgtcttggttagcatcttatgaccttctgcaggtgccacaagactattatctggtggttaaaacagctggtcaacttgttcccagaattcctrcacagcacatttctcttttaccactgttgcaggtctggcttttctgaggctgtttttaatgattagtctataaacttaaagcagcaattatcctcaagcaagcaaaatttttctttaacatagactcaatattgtaacattctcaataggatcaaggtgagtcttcctgtatggtaatgggagtagggaaggaggcagagtctctgggcccctatgttcatacgtggcatcttcagttttgtccttgaatgttggtgtttgtaagaaaacgaccttgtgtaaatgtctcttgcactaaagaaaggtggcatttcagagaacaccatggagtcattgctccttctcctgtttcccaatggccagccagcatttactgtcagtgggtct

SEQ ID NO: 191569 - DNA, 522 bp, Homo sapiens
ttgtaaagtcagtcctctgtcctgcagagctgtggtggtttgggctgtaaatcagcctgagagctctgttgttaagaagtttagctgaggtgtagttttccttatagtggtaggaatttggaaatttgccatgccwtctgggtcctgaacactggactcctaagtaacttttgtttccttagccttaggcccatcttgtttgataaatgggcatcaattttgatccctcagatcacaagtctattaaaacaaatttttataaagaaacccattcaaatgtagccagctttgaccaggcaacataagacttattttctataaaacttctacaatttttcatatcaatgcaatataagagttatttcccactaacattctaaactttcaggagttatttttctggtggtggtggtgatggtgtgatgcctcacaggaggatctagaagggcaaaataccagcacctggagtagaacaaaggaggaatatgtgttccacattagattatgaacaatttatgatat

SEQ ID NO: 191570 - DNA, 613 bp, Homo sapiens
taacttcatatgcacactgaatttctgcacaatttattatctgatgctcatctgaacatctccctaactagatctcatatttattaagaatgaggatgctacgttttattttccttttgcctccaaactaaatgcctagtgctgtattgagtaaggaattttactgtatttagttcagaccagacctctgatagcatacatagtataaaaatgagactaggactgtacattactaacatactacatgacttcaagtcatttaaattctcaaagcttcagtttattcatctttaaaatgaagataattatcattgaccagcctctatcacagttatgatgaatattaaatggggtaatgcatatgaaaggacttattaaattataaagcagaatattaatggatggtttaaatatattgtagaaaatataatagaaatatcwagggatgattttctgcatagttattaattgatatgtatatctacacacatatgtatatatacatatatgtatatcctactctgtaggctaagttaacactcctctattagaaatgtcagtaatacatctcgcttgctcacttcctagacataatgattcttgtaagtatttc

SEQ ID NO: 191571 - DNA, 555 bp, Homo sapiens
atgcttaattattaactcatgactgaaacatagtacattgtctcataattagaaattatgaagtgttgcatgaaattctgctcattgtgtgtttatatattctttcattaaaaagatgaaaggaggagtttttgcacagataatttgattaggtcatggataacaaatagattgcttttttacatcttccaataactatcctattgacatagttaagagattgtgattctcttttctaccttggcccatcatggcccagaatcttcccaacacagcatgctgcacagcgttacaatattagcagagttgacagaacttgaaaaattttgccatgccaggcttaagtctttaatgattatcactagaggtctatataatttaaaggaaagatatatatataacttatatacttatgtaaacgtgtgtgtgtatgtgtgtawctgttactagactcatatataagattttaagtcaatttaagagagaaaaaatatagatcattccagtttctttctttcctgcattagttggatgtgtgtcttagtgatagctgtg

SEQ ID NO: 191572 - DNA, 617 bp, Homo sapiens
aaaacctttttcttctttatggcaaaagcaaatggaggatattcttgcctcccttcttcaaacactgtaatcctagttctgaaattggaaaatgtcactgattactaacagcaatcatactgggaagtaagtaaatgtaaggaaaaatagaaaagggaagcagaattttcagtctagtagatagatctaaactttcatacactaaaaaaaagttataaagttttagaagatgataaatataaaaatgtgtccctgaaattgatgctataatttgagaaaaagtgaaaatttgatcagtctattttttatttttctttttgagacagagtctcactctctcacccaggctggaatgcagtggtgcgatctcagctcactgcaacctcctcctcccaggttcaagtgattctcctgccttagctgggattacaggtgcatgccaccacacacagcttatttctgtatttttagtagagatgggcttttgccatgtgggctagtctggtcttgaactcctgacctcagatgacccaccagcctcagcctcctaaaatgctgrgatgacaggcatcagccgccacacctggctgttcagtcttttatgcaggtgaatatat

SEQ ID NO: 191573 - DNA, 617 bp, Homo sapiens
aaaacctttttcttctttatggcaaaagcaaatggaggatattcttgcctcccttcttcaaacactgtaatcctagttctgaaattggaaaatgtcactgattactaacagcaatcatactgggaagtaagtaaatgtaaggaaaaatagaaaagggaagcagaattttcagtctagtagatagatctaaactttcatacactaaaaaaaagttataaagttttagaagatgataaatataaaaatgtgtccctgaaattgatgctataatttgagaaaaagtgaaaatttgatcagtctattttttatttttctttttgagacagagtctcactctctcacccaggctggaatgcagtggtgcgatctcagctcactgcaacctcctcctcccaggttcaagtgattctcctgccttagctgggattacaggtgcatgccaccacacacagcttatttctgtatttttagtagagatgggcttttgccatgtgggctagtctggtcttgaactcctgacctcagatgacccaccagcctcagcctcctaaaatgctgggatgacaggcatcagccgccacacctggctgwtcagtcttttatgcaggtgaatatat

SEQ ID NO: 191574 - DNA, 474 bp, Homo sapiens
tatgagtactctccttaaacccatacatagacaagttatagttaggataagatttcagttaaaactagtcctcatgcaaagtacagacatctttttagaccagacacattkttacaacaaaagaaacccactgcataaaacatattttataatattctttgtttagagagtgtactgaattgttatgattaacaatctgctagtaactgtgcatgttagtgatacaaggagaataaccttttctctagaacctagatgatgtcctcaccaaaatgtggcaaaacacaggtcacttcttataagaattacattatcaaccttaagttctatgagcaacaataatctgttatccaaaaattctttatttagataaacttgctacccttgcattaagcccagttcactttattacagaaaagatcttatatgtaaaagcttttatctcaatacctatgtggattcgtttctataatt

SEQ ID NO: 191575 - DNA, 604 bp, Homo sapiens
ttatgttcaggcagatgtaggcagtctcaaaaggggaatggtagagatttctagagataatgattagttctttcttaccagtctgagtctggaataaaggtaatctgctgtcaattcatgctggtcttgaaagacattcttttagaggtgagttctatcccaatgcctattctggtcaaagggagtctttgaatctataagactgaagtgaccatatccttggattacgcctccttgcagaaatcctccctgagaattaaggctttattagaattcctgagaccattgagattaggaaaattgtaatttatttggcaccttaaatttagctcactaaggggagtttcttgtgtaccaataacagctgcattcctgccagtcagttccttgagcagcaggcagcraggtaaacagcaaaatactctgtagatcaggatccagcctcaggcttgactttactttctattttgttatatgaggtaaaatatgattatcacgtgtgagtttgacagttatcattgagctgaatatttgagtcaatcaatttcctaaagtttagtctggtatagtcaaaaaatcttttgtttccttaagagtcaaaatg

SEQ ID NO: 191576 - DNA, 570 bp, Homo sapiens
atatattccaaacccttacaaatcagtggctttggtgatagtgytgatggtgagaataacaatgtgataaagcctttatgccccacttttcagatttccacgtgttatgcgagcggaatacttcagttctctccatccacccatgggagctacctgcaacttagctgatatacaagaagaaactcgactattcagctcaatctcttcttccttccctcttttgggagctaaccttcctccaaaagatcgttctcatcttccccatgctataaacatccaggaccaggccccatggaagaggctgtgattgtcatcctgtcccactgaatagtggtaattatgtttaagtaggggtgagaataattaacctcttttgactgaatatttaaagctactcaatttatcttaaatgaacctggtattattttgacttgtgacttgattctcaatctgctttgaactcagaaggaaaagatagggaggtttattagcctcctgcattctaaagtcatggtgactaatacttctatacttgttttattacatgttgcatgctttttatggtgaaca

SEQ ID NO: 191577 - DNA, 565 bp, Homo sapiens
acataccttccttcccccaagttcatagtaggatatatatgaataaaacaaacaaaaaggcagggctgggggaagccctgctgatttatttacaactttagtgaaaaatgctttttaaaagtatatgcactttaaaaatatgatgatttaacagaattataattagcacaaactttgagcatgagttacagtcctgggaatagagacatctcagggagatcttatctgtattcactgaatgtcaaaaaacatkgaagaggccaggtataatggctcatgcctgtaatcacagcactttgaaaggcctagcggccaggatgccttgagctcaggagtttgaaaccagcctaggcaacatagcaagaccttgtctctatgaaaaattaaaaaataaaaaattagttgggcatgatggcatgtgcctgtggtctcagatactcaggaagctgatgtgagaggatcatttgaaccagggaggttgaggatgcagtgagcagtgattacgacactgcaatccagccttaagatatagcaagattctgtcacaaagaaacaaacagaaaac

SEQ ID NO: 191578 - DNA, 421 bp, Homo sapiens
gtgtgaaacctgctagtgttgtcacttggaaagattggtaggagacatcacaggattctcgtcatgaatcgataaacttctttgacactttacctacctraatattgtgtagacttctcagcctgggagatttcctgggaagttcaataatagctttttctttccatggactgattagaacaaaaattcctaccatggagacagtttttcttgtacattctgtagaggtatgacaatcagtcatttacactctagttagaatttaaggcaacccagttttatcctatatttaacagacttactatgtaccatataccgtgccagtgtttgggcaggtttcaaaaaactaatttgatctattccttgtatccacatggttgctggaggtagtaggaagaaaaacgtgtaaataaccattttg

SEQ ID NO: 191579 - DNA, 508 bp, Homo sapiens
taaacgtgaaggtgcttcagtaaaacctggcagataaacaagaggttaaacatgaatgctgtgaaaaagaggaaaggaaaaaaaaagcgaattgcaattgaaagagaactaagcataaagggtaggcctctggtgtcccagaaatatcttgggtccgagaaataagctaagagagacctgtgaaagatttaatgagagaaatgaaccaaggcgccccgtggagagakagtgggtgttaaaatgcagcccgccccccgccacagaatctggaccccggtacacagctatgtccacgcagagaggggctccttttcctaatgtgtcccttcagaggaaatgtcataacatcattttctaattagtttgtcagaagaccactcttctaattttcacaaagattccctacaagccagcagcagccctggaaacaaacctatttaatctgctgtcccctggaaaaatatttaaaggcaggaatagccaaaagaagcagaatctcataggaatt

SEQ ID NO: 191580 - DNA, 391 bp, Homo sapiens
ataaaacattcaccaaaatagactatattctgggacataaaacaaacctcacctcaataaattcaaaagaattgaaatcatacaaaatatcttctttaactataatggaatcaaactagaaatcgataacagaaagacaataggaaagtgtcaaatacttataaattaaacacacaaacaatccatgagacaaasaagatgttgctaagaaaatattttaaatgcatagaaccaaattaagatgaaaatattaatacaacatccagaatttgtggaatgcagctaaaacattgctgagaggaaaatttataacactaaatgcttaccttagaatggagaaaggtctcaattcaataattaaagtttctacctcaagtataatattcaaata

SEQ ID NO: 191581 - DNA, 383 bp, Homo sapiens
gggatattggcctgtagtttttttattcttgatatgtctttgtctagttttggtatcagggtaatactggccttatagaatgagtytggaagtattctctcatctatttttaggagtagtttgagtaagattggtattagttcttcttcaaatgttttgtaaaattcagcagtgaagccattgtgtccctggtttttctttattgggagactttttattacagcttcaatcttgttatttgttattgatctgttcagtttcagatttcttcttcgttcaatcttggtagcttgtatttgtctaggaatttatccatttcttttagatattccaatttatttgcatatagttactcatagtagccactaatgattttttgaatt

SEQ ID NO: 191582 - DNA, 383 bp, Homo sapiens
gggatattggcctgtagtttttttattcttgatatgtctttgtctagttttggtatcagggtaatactggccttatagaatgagtttggaagtattctctcatctatttttaggagtagtttgagtaagattggtattagttcttcttcaaatgttttgtaaaattcagcagtgaagccattgtgtccctggtttttctttattgggagactttttattacagcttcaatcttgttatttgttattgatctgttcagtttcagatttcttcttcgttcaatcttggtagcttgtatttgtctaggaatttatccatttcttttagatattccaatttattkgcatatagttactcatagtagccactaatgattttttgaatt

SEQ ID NO: 191583 - DNA, 406 bp, Homo sapiens
aaactgaaactctgtacccattaaacacaatattgcccctgtgcttttaaatccattcatattggaaatgaaatttaatgttagatatggttttgattcccagttgctcccttgtaaatatattattttcaaaaaaatattygtatgcccttgcacactgctacacaggatgctgaagaagttttctggaagtcttttgtcacagaactgaacagccttttatcacagaacagctgcattaaaactgaacttaagtgaccaggcacgatagttcacatctgtaatcccagtgctctgggaggccaaggcaggaggatcacttgaggacagcagtttgagaccagcctgggcaactggcaggaccctgtatctacaacaaaagcaacaacaacaacaaccacatgta

SEQ ID NO: 191584 - DNA, 406 bp, Homo sapiens
aaactgaaactctgtacccattaaacacaatattgcccctgtgcttttaaatccattcatattggaaatgaaatttaatgttagatatggttttgattcccagttgctcccttgtaaatatattattttcaaaaaaatatttgtatgcccttgcacactgctacacaggatgctgaagaagttttctggaagtcttttgtcacagaacygaacagccttttatcacagaacagctgcattaaaactgaacttaagtgaccaggcacgatagttcacatctgtaatcccagtgctctgggaggccaaggcaggaggatcacttgaggacagcagtttgagaccagcctgggcaactggcaggaccctgtatctacaacaaaagcaacaacaacaacaaccacatgta

SEQ ID NO: 191585 - DNA, 406 bp, Homo sapiens
aaactgaaactctgtacccattaaacacaatattgcccctgtgcttttaaatccattcatattggaaatgaaatttaatgttagatatggttttgattcccagttgctcccttgtaaatatattattttcaaaaaaatatttgtatgcccttgcacactgctacacaggatgctgaagaagttttctggaagtcttttgtcacagaactraacagccttttatcacagaacagctgcattaaaactgaacttaagtgaccaggcacgatagttcacatctgtaatcccagtgctctgggaggccaaggcaggaggatcacttgaggacagcagtttgagaccagcctgggcaactggcaggaccctgtatctacaacaaaagcaacaacaacaacaaccacatgta

SEQ ID NO: 191586 - DNA, 550 bp, Homo sapiens
cctgactgggatgcaaaagaaaaaaaaatgctgaacataaattgaacccttgtcagaatattatggctttcaaaccactgaactatagtcttattctctactttctcagaggctcaggagggaaggaggctgaacagaattagctctcttgggatagcacaggggacgcagtacagggcccagaagatggtatctactgtagttcttgcaagtgcttggcttcccttttatcttttattttgttgctggctgctgccttcccttctcagctatgaagacgtgggtcyccttccatacaggaagtagagcccctgcctgtattgtgatttctgagatgtgaggaggtctccaatccttcttcttgataggatccccagtactggaagtgccaccattattaagtacttatttcttcaaatcctcatgatcagaagtagtggatatagtgtttggtgaatcccaagcaacagtctctagggataagattccagctaaaacacaaaacacccagttcaatttgagtttcaaataaactacaaacattgactgc

SEQ ID NO: 191587 - DNA, 350 bp, Homo sapiens
tccttagcatcccaccctttcaagaagaaacactgatgtatggcttctattaggttaatgcaaaagtaatcgcgattttggccattgctttccatggcaaaaaccgcaattacttttgcaccaacataatagatttttttttatttgcaaatamgttatttttgacaaagtcaggatccttgacaaagtcaggatactcaccaatcctgtctcctcttcttgggcatagtgaagggttatacttcccggttttaaggattataactccccttacaggtagttgtggtcatataaccaggttctggccacagaatgtggtcagaatgattcaagccatatccagtccatta

SEQ ID NO: 191588 - DNA, 350 bp, Homo sapiens
tccttagcatcccaccctttcaagaagaaacactgatgtatggcttctattaggttaatgcaaaagtaatcgcgattttggccattgctttccatggcaaaaaccgcaattacttttgcaccaacataatagatttttttttatttgcaaatacgttatttttgacaaagtcaggatccttgacaaagtcaggatactcaccaatcctgtctcctcttcttgggcatagtgaagggttatacttcccggttwtaaggattataactccccttacaggtagttgtggtcatataaccaggttctggccacagaatgtggtcagaatgattcaagccatatccagtccatta

SEQ ID NO: 191589 - DNA, 359 bp, Homo sapiens
agtggcaaccatgggcatttgggccactttatgtaacttacttgtgccttcagggccttctcaagcccaatcacatacataaaatttccatttgatgatgaagtgctgctatgtaaggtacaatgttgtgacttggtgggttaataacatctaattcattatggraaactcaggtcacatggttgaattatcacccatgtgaaaattcagttccgactaaggtccagtaacataccaacagctgtttctcaaaaggagcatagttagccacagcggatggcaagattttgttcctaagggcctgtactatgatttacctataggaacctatcaaaggctccaaacagaatgcctgtcac

SEQ ID NO: 191590 - DNA, 535 bp, Homo sapiens
atatatgtatatatataataatgtgtaatgtgtatacatacatatatgcatatatgtaatgtatatgcatgtgtatatacatttatacaaacacgcacacacatatatatacacatgcacataaatacatatatgtcaattttactttactcccaaatagtaaaatatatctatgtgtgtttaaatgacatactcaacttgcagcatcttggaktaacgatgttctagaatgtattgcctttaggaattgtgagattttcatttgtttatttgtgttcattttaaagttatatctaagagaactgggacaatttcattcttttactttatttgtgccatatgtggttaataactccccagagcatacttacaataaatacctattgaataaagaagtgatcttgaataatagtgattatcatgtcttaaaatgagaaaatcaaatacttggtgatgaattaggtagccacatttttgttcttgtagtaatacttttgaaaatcaaagaaatctttaaaaggaaataaatgaaaat

SEQ ID NO: 191591 - DNA, 535 bp, Homo sapiens
atatatgtatatatataataatgtgtaatgtgtatacatacatatatgcatatatgtaatgtatatgcatgtgtatatacatttatacaaacacgcacacacatatatatacacatgcacataaatacatatatgtcaattttactttactcccaaatagtaaaatatatctatgtgtgtttaaatgacatactcaacttgcagcatcttggagtaacgatgtyctagaatgtattgcctttaggaattgtgagattttcatttgtttatttgtgttcattttaaagttatatctaagagaactgggacaatttcattcttttactttatttgtgccatatgtggttaataactccccagagcatacttacaataaatacctattgaataaagaagtgatcttgaataatagtgattatcatgtcttaaaatgagaaaatcaaatacttggtgatgaattaggtagccacatttttgttcttgtagtaatacttttgaaaatcaaagaaatctttaaaaggaaataaatgaaaat

SEQ ID NO: 191592 - DNA, 535 bp, Homo sapiens
atatatgtatatatataataatgtgtaatgtgtatacatacatatatgcatatatgtaatgtatatgcatgtgtatatacatttatacaaacacgcacacacatatatatacacatgcacataaatacatatatgtcaattttactttactcccaaatagtaaaatatatctatgtgtgtttaaatgacatactcaacttgcagcatcttggagtaacgatgttctagaatgtattgcctttaggaattgtgagattttcatttgtttrtttgtgttcattttaaagttatatctaagagaactgggacaatttcattcttttactttatttgtgccatatgtggttaataactccccagagcatacttacaataaatacctattgaataaagaagtgatcttgaataatagtgattatcatgtcttaaaatgagaaaatcaaatacttggtgatgaattaggtagccacatttttgttcttgtagtaatacttttgaaaatcaaagaaatctttaaaaggaaataaatgaaaat

SEQ ID NO: 191593 - DNA, 535 bp, Homo sapiens
atatatgtatatatataataatgtgtaatgtgtatacatacatatatgcatatatgtaatgtatatgcatgtgtatatacatttatacaaacacgcacacacatatatatacacatgcacataaatacatatatgtcaattttactttactcccaaatagtaaaatatatctatgtgtgtttaaatgacatactcaacttgcagcatcttggagtaacgatgttctagaatgtattgcctttaggaattgtgagattttcatttgtttatttgtgttcattttaaagttatatctaagagaactgggacaatttcattcttttactttmtttgtgccatatgtggttaataactccccagagcatacttacaataaatacctattgaataaagaagtgatcttgaataatagtgattatcatgtcttaaaatgagaaaatcaaatacttggtgatgaattaggtagccacatttttgttcttgtagtaatacttttgaaaatcaaagaaatctttaaaaggaaataaatgaaaat

SEQ ID NO: 191594 - DNA, 537 bp, Homo sapiens
aaataactccctctaaatccaaattttatctaaagttataatatcttcatagtgtccttattcagtatagaagggyataagtacagataaattgttcaggcacccattgaaatatatcctgggtgactttgtttttttcattaagaaaagccagaagtcaaatttggtcttcaggttaaagtagtaggaagaataccacagcacccctgtgagcagggattcatattatttgtgtcatttttcctggcatctctcattgctccttatcagctcatctctctcaaggttgttacagaatacttaatgtctcatttttaaatggttccttagctcctgagtggcagaaacagggattcgtatccttgatccaacttcctctgatattcttagtttaaaaaacaaacaaacaagaacaaaaacaattgcagacaaaacaaaataccttagacaggacttaattcgaacttagtttttgttgttgctgttttgttatttttttgccgcagaagacatgattttattctttgttattgctaa

SEQ ID NO: 191595 - DNA, 508 bp, Homo sapiens
ttttttcctcacatttagtgttgactcatactttaaggttgttgtgcaattaggaaattgtgattgcaaatccaggtagaccaccatgacttgaaacagaacaatgcttacttagtgtagtaatttcattaatggaactgtcagattccttgtactgcatgtctcagctgtgtttttctctgccaaattcaagggagatttgttaataaaaaacgtggagaagtagaaataattgaggggtatgctctaaagagaatacatagccctagtttgtctctagggcttaaatttcaygctggttgatgtcttcctaatacctaagtagcgcagcatgtactaaaacttagtgatgacctcaatgtgacctaaaatggtttacatttagttagttcaattgtggatataactatatatgatttttgtatttgaagatgctggagattaccataaacaaatcatattattagacaatatgccctgattatcttcaactattttcaaatgatag

SEQ ID NO: 191596 - DNA, 448 bp, Homo sapiens
ctctgccaaattcaagggagatttgttaataaaaaacgtggagaagtagaaataattgaggggtatgctctaaagagaatacatagccctagtttgtctctagggcttaaatttcatgctggttgatgtcttcctaatacctaagtagygcagcatgtactaaaacttagtgatgacctcaatgtgacctaaaatggtttacatttagttagttcaattgtggatataactatatatgatttttgtatttgaagatgctggagattaccataaacaaatcatattattagacaatatgccctgattatcttcaactattttcaaatgatagcaaaagtctaatttgaacacaccatgacatttattgtgctaattcaaccgttataagtgttttaaatggtgtatctcttaatttataccataggtattttaaatttgtgaggggaaa

SEQ ID NO: 191597 - DNA, 448 bp, Homo sapiens
ctctgccaaattcaagggagatttgttaataaaaaacgtggagaagtagaaataattgaggggtatgctctaaagagaatacatagccctagtttgtctctagggcttaaatttcatgctggttgatgtcttcctaatacctaagtagcgcagcatgtactaaaacttagtgatgacctcaatgtgacctaaaatggtttacatttagttagttcaattgtggatataactatatatgatttttgtatttgaagatgctggagattaccataaacaaatcatattattagacaatatgccctgattatcttcaactattttcaaatgatagcaaaagtctaatttgaacacaccatgacatttattgtgctaattcaaccgttataagtgttttaaatggygtatctcttaatttataccataggtattttaaatttgtgaggggaaa

SEQ ID NO: 191598 - DNA, 626 bp, Homo sapiens
ttacagtagcattaataaaaatttaaaaatggaaataatccaaatgtctatcaactgaggaatggataaatgaaatatgttacatctgtacaatgaaagattagatggcgatacaaaggaatgacatactgacgcatgccactaaatggactaaccttaaaaaattatgctaaaaacaagacagtcacaaagacaacatattggtcattaccatttataagaaatatacagaaaaggcaaatgcatagacacaaaatacattattgatcacctagagcagatggggagatgggaactgaatgctaatagattcttttcctggttaaaaaaaaaattctaaaattagatttgtgatgatggttgcacaaatttctaaatatactaaaatcactgaattgcawactttaaatggtaaggtgtatagttcgtgaattatatctcaatatagctgtttaaaaaatacatagaaattttacacataaagctattttttaatagtgtaatggagtcattatacaggtaatcaaattaaatgttcatttaaaaacttatctgtaggaattttgctggaatttgcacaatattttctctaattcactatttttaatattctcattttttaattg

SEQ ID NO: 191599 - DNA, 626 bp, Homo sapiens
ttacagtagcattaataaaaatttaaaaatggaaataatccaaatgtctatcaactgaggaatggataaatgaaatatgttacatctgtacaatgaaagattagatggcgatacaaaggaatgacatactgacgcatgccactaaatggactaaccttaaaaaattatgctaaaaacaagacagtcacaaagacaacatattggtcattaccatttataagaaatatacagaaaaggcaaatgcatagacacaaaatacattattgatcacctagagcagatggggagatgggaactgaatgctaatagattcttttcctggttaaaaaaaaaattctaaaattagatttgtgatgatggttgcacaaatttctaaatatactaaaatcactgaattgcatactttaaatggtaargtgtatagttcgtgaattatatctcaatatagctgtttaaaaaatacatagaaattttacacataaagctattttttaatagtgtaatggagtcattatacaggtaatcaaattaaatgttcatttaaaaacttatctgtaggaattttgctggaatttgcacaatattttctctaattcactatttttaatattctcattttttaattg

SEQ ID NO: 191600 - DNA, 460 bp, Homo sapiens
aaattaaataaaaaaacaattgtggtagcttgcgcttgtcagttacttgataggcagaggcaggacggtcacttgagcccaggagttcaaaactttaaggtgctataattgcacctggaaatagtcactgaactccagcgtgggcaacacagtaagaccctgtctctcaataaaaaacaaggaagtagaaaaaaacacagaaaagaagtcaagagaataggaaaaaagccagtcrtgatggttaatagtggaggaagacagtactgagaaaaaagtagaggagttaggcaaattagacatttaaattttctttctttcttttgaaataatatctctgcagtaaattatttggaatgttctatttaaaaaaattaatcaacctgcatttctggtaaccaatgatatgtctttccagttgttatacctagcaaggcactttttgaaccaatttaaagttatt

SEQ ID NO: 191601 - DNA, 404 bp, Homo sapiens
taggtggcctatacacaacagaaattatttctcacagttctagacactggaaaattgagatgagggtgccaggatggtggggatctggtgagggtcctcttcctcttccaagtttcagactgctcacttctcgtgcatcttcacatggcagaccgagggcaagctagtctctgacctcttcttacaagtacaatgctaatcatgagggtggagtcttcatgacctaattacctcccaragaccctacctccaaatatccttacattgtgggttagagggaaagaaatattcaattcataactttctattcttccccccaaattcatgtcattctcacatgcaaaatatattcaacttaacagccccaaaagttaacttacactagcatcacctctaaagtttaa

SEQ ID NO: 191602 - DNA, 476 bp, Homo sapiens
ttggataatttccagataaaatgcccaaattgacaagacaaatgttttacatgtaaacaagttgcacttacttatctyaggcccccaacaacctgattcatttcagctattggctttttcttttctctatggtcacagttatcacagtatgctctcaggaacatgggggcagagcttcaacgttaaacaggtctttctgttttcctttccactgggagatacctagttcaatgttcctgtaaccagttgtaatatatgccaatctcaaagttaaattctggctctttaggagggagctttcatctgaagacctgggatcttcagattatcactgcgttgtcacttcccctaatttaacagctgcttgttttgctttactccagtcctcaacccccagatgaggtagtagagatcccctactgtttcgtggaacaccagcaacacggacacaaaggcaaactccagctttcctcaca

SEQ ID NO: 191603 - DNA, 458 bp, Homo sapiens
caaattgacaagacaaatgttttacatgtaaacaagttgcacttacttatctcaggcccccaacaacctgattcatttcagctattggctttttcttttctctatggtcacagttatcacagtatgctctcaggaacatgggggcagagcttcaacgttaaacagrtctttctgttttcctttccactgggagatacctagttcaatgttcctgtaaccagttgtaatatatgccaatctcaaagttaaattctggctctttaggagggagctttcatctgaagacctgggatcttcagattatcactgcgttgtcacttcccctaatttaacagctgcttgttttgctttactccagtcctcaacccccagatgaggtagtagagatcccctactgtttcgtggaacaccagcaacacggacacaaaggcaaactccagctttcctcacacctctta

SEQ ID NO: 191604 - DNA, 476 bp, Homo sapiens
ttggataatttccagataaaatgcccaaattgacaagacaaatgttttacatgtaaacaagttgcacttacttatctcaggcccccaacaacctgattcatttcagctattggctttttcttttctctatggtcacagttatcacagtatgctctcaggaacatgggggcagagcttcaacgttaaacaggtctttctgttttcctttccactgggagatacctagttcaatgttmctgtaaccagttgtaatatatgccaatctcaaagttaaattctggctctttaggagggagctttcatctgaagacctgggatcttcagattatcactgcgttgtcacttcccctaatttaacagctgcttgttttgctttactccagtcctcaacccccagatgaggtagtagagatcccctactgtttcgtggaacaccagcaacacggacacaaaggcaaactccagctttcctcaca

SEQ ID NO: 191605 - DNA, 458 bp, Homo sapiens
caaattgacaagacaaatgttttacatgtaaacaagttgcacttacttatctcaggcccccaacaacctgattcatttcagctattggctttttcttttctctatggtcacagttatcacagtatgctctcaggaacatgggggcagagcttcaacgttaaacaggtctttctgttttcctttccactgggagatacctagttcaatgttcctgtaaccagttgtaatatatgccaatctcaaagttaaattctggctctttaggagggagctttcatctgaagacctgggatcttcagattatcactgcgttgtcacttcccctaatttaacagctgcttgttttgctttactccagtcctcaacccccagatgaggtagtagagatcccctactgtttcgtggaacaccagcaacayggacacaaaggcaaactccagctttcctcacacctctta

SEQ ID NO: 191606 - DNA, 458 bp, Homo sapiens
caaattgacaagacaaatgttttacatgtaaacaagttgcacttacttatctcaggcccccaacaacctgattcatttcagctattggctttttcttttctctatggtcacagttatcacagtatgctctcaggaacatgggggcagagcttcaacgttaaacaggtctttctgttttcctttccactgggagatacctagttcaatgttcctgtaaccagttgtaatatatgccaatctcaaagttaaattctggctctttaggagggagctttcatctgaagacctgggatcttcagattatcactgcgttgtcacttcccctaatttaacagctgcttgttttgctttactccagtcctcaacccccagatgaggtagtagagatcccctactgtttcgtggaacaccagcaacacggacacaaaggcaaactscagctttcctcacacctctta

SEQ ID NO: 191607 - DNA, 534 bp, Homo sapiens
taatttgcaaaaattaaataactacttgatgtgtcttttgtgcagataatacccacaaaatattartttttgccctttttcccttataattttaacatacttattttctttacttgtctcatgttttctttcagagattctaactctctttgctaaatggatataggaataaatactcttaaaatacattttttattgtattgatgtggaaaatgtagaaaagcacaaagggatttttttaaaactctgcaatatcatccaccagtcataatcattattaagatgttttcacagatattcccagcttttattctataaataagactctcatgattcacttatccctcacttgtctaactattttatactttttgacgcactaagattctaaaatgaaccataaaagctggcacatatttatagtaatcagttttcttatttaagaggatgagatagatgagtgtaaataatcttgctatacacaaaattgtttctgctactctgaagacaaggtgttcttacatctcggtcttt

SEQ ID NO: 191608 - DNA, 596 bp, Homo sapiens
tcatgcagccttttatgcagaatctttaaaaggtgacctttgtcttaagcatagcttgctcaagtttaaaatgcatttgttgaccatattaatgcaacagtaattgagcatccacagtttatatggtatttgggtcataactttaggattcaggataatgtgtaaaggaataattttagtttttctattcctagaatttttttcattaaaaacataaatgataaaaaactaataattataatattttcacatyagatcatatttttaacttatagaattttacctagtaggcttctgctttttactttctatcatattattcacttgtttcccatttatattttaaaatttatatatttaatacagttagcaatacattcataaattattttagtccaatttgatttctcaaagaaaatttctttagatttacatattttcaagatatcagtaacatttataggttactataattttcatcaaaattgatattttagcaaaattgatgtactcactgaaaagctttcaatctgatagccatttctcttagtactcaatatcaatgtacacatatatattacaatttatttgaattt

SEQ ID NO: 191609 - DNA, 546 bp, Homo sapiens
gaaaccagcctgggccacataggragaccccattggtactgaaaaaaaaaatggatagtcttttggttatatgtaatagaaacccaaattaaactggcttaagccttctcttccttaaaataagtttattggctcatggaactaaaagggttgtgatgatttttgtccaagttggagtctgagcgtcttcaggattcggtttcaccccatcacttagttctgcttccctctgtgttatctgcattaataagatatttattttctctatggccaccgccaccccatgccccaatcgccatggtttttatctttccagttttaattccagtggacaagttcataccaacgaaagccacaggagtagacaggactgggtctgatgcccattcctgaatcagtctttctctgggtgtgggatgggttatgttgatcggccaggccagggtgccatgcccattgctaggactggggcagggattaattcagcctgaacatgctgtgagggtaaagaggccttagttcttcagagaaaaaccgaggtgtttt

SEQ ID NO: 191610 - DNA, 447 bp, Homo sapiens
cagaaacaatcacagacaggaagagcccaaggagacatcaaaactaaatgtaatgtgatattgtggtcagaatcccgtaactacattttattttacttagtgtgaaaagtacaggctggccgcggtggctcacgcytgtaatccgagcactttgggaggccgaggcaggcgaatcacctgaggtcaggagttcaagaccagcctggccaacctggtgaaaccccatctctaccaaaaatacaaaaattagctgggtgtggtggtgcatgcttgtaatcccagctactctggaggctgaggcaggagaattgcttgaggttgtggtgagccgggatcgcaccactgcactccaacctgggcgacaagagtgaaactgtatctcaaaaaaaaaattttttttgaaagtacattaggtaataacaaaaaaagctcaataatatatcaaca

SEQ ID NO: 191611 - DNA, 626 bp, Homo sapiens
actttgaaagacctaagctcaccagacctggcaaatacaaatatgttccctgttgctaaaagaagactggacttccaaactcatactcttagtatgtgtttctcaagggacacaggccttcaggatctagccaagcccatgtgttttatgagaaaatgcttggtgcacaagcgatgtcttcagcattacaaaaggagttagtgttgttagactctgacttcggttcaccaaggttagtggtggatgaaatccctgcctatacctgcctttctctgggctgcccaaaaattctatctgcaagcaccctacctatcaacagaaataatgcttaattaagaattgttggtacataagctgtaaacacaatttytgctccctacactcacgccgctgtggtgaaattacaccagttacttacaggtatgtacatcattatcctcttatcctgtgcatccataatataattcaatctacaaacaaatgatttattcacaaattcttatgactgctggacagaagtggcactttatcacgtactgttgtgactaggtaagcaaggaaaaaaaaaacccttaaatggcccagaaaagtgatgtggcgttgcatctggtgtaatatacctgggg

SEQ ID NO: 191612 - DNA, 523 bp, Homo sapiens
aatagtgcgggagacttaccaagattgcaagaccagcctgaaagctccattttcttcattgtgaaatctttatgctttaaaatatcagcccaagtccataaataataaagaactttggaagaatcattgctgttcaggtccttattggatccacagcagtgggagggaagagatcatcgtatctttttcatctgtgtatcctccagagtgtctggcataaatcagtgtgcaacgcaagaatttttagcaaactttccaaggtatgcaatcatcatcttaatccaattttacaacatttttgtcactcaataagagtccctcatactcatttggaattaatccctgctctcattcccagcacctgccaatcactaacctattttctctctctagaattcccttttataaatgcgtcatatcagtggaatcatgtgtgctctcttgtgtcttctttcacgtcatgttttcaagtttcacscatgtcgtcatccatgttgtatgtagcatgtgtcaacacttcatt

SEQ ID NO: 191613 - DNA, 535 bp, Homo sapiens
actaaaggatatttagatgtgtatggtcaccatcttacaattatacttggaagaagaggaatatgaataaggataagcataaaacattgttctttggttctgaggagataatacttttccttacattgaatagggatttaaacgtatcatatagtaaaaagaaaaccaattcaaagtcrtaaaagaataagaaaagtgtcttgtttccatttgaagagttgtgagtagaaagatcccagaagatgggttaagtttagggatgtgtccatgctattcaggatcaccctaccatcttacctcttgaagtggtctctaaatttcaggatgttcatgagattctatagaattggccacatggattggtgggtagtgagttgtttaggaaaggatgtggttgctggcaccattatgtatgccacactgacatttgctcagacacagatcatccagtctggatcttgggtgcagtaaatcatggttactggcacctgaatgaatgttcacatccccaactgctctccagatgaaaaccagc

SEQ ID NO: 191614 - DNA, 519 bp, Homo sapiens
tctttaaatttacctgttttttcttgaatctgtctccccctactgaaatacaagcaccatttagagcaaggtccatgccatattttcagtttgaacactttgaccttggaagctaagtgtgtaagatgcaatgcctgggttcctgaatcactggttggagaagagctgccaggtgataatgaacaactatttttgtatttcaaatgagatttggcagcttgtctgttacattagcaaacatatccttagctaatccaatactttttgaccattttctgtcaggttgttagaacttgtttgattgattggtagaagtcttttatattctggatagaaatcttttctatgttacacaagtagcaaatattttctctgggtttgtcactcaactttgaactttctttacggtgtctttgtttyacagacattcacaattcttatctagtcaaatctgtcagtattttttaacatattatagactctgttatatgctaagaagggttttctctataccaagat

SEQ ID NO: 191615 - DNA, 436 bp, Homo sapiens
cacacttaatactcatcctaaatttcctaatcactcccattgtattaggccattcttgcattgctataaagaaacacctgagactgggctatttataaagaaaagaggtttaattggctcacagttctgcatgctgtacaggaagcacagctccagcaccagtttcttgggaggcctcaggaagcttacaatcatggcagaagggaaggcaaagcaggaccaggcacttcacatggtggaagcagagcaagaragagtgagcgaggtgccacacacttttaaacaaccagatcttacaagagttcactatcgcaaagacaagcaccaagggggaatggtgctaaaccattcataagaaatccatccccacgatccaatcacctcccattcacctcccaccaggctccacctccagtactcgggattacatttcaac

SEQ ID NO: 191616 - DNA, 648 bp, Homo sapiens
cttttgtgatatggagaacgttctagtggtctggaaagataaaccaatcacaacagtttcttaggcraaagcctaatccagagcaaggctctaactctccaattctatgaagactaagtgaggtgaggaagctgcacaggaaaagtttgaaactagcagagattggttcatggcgtttagggaatgaagccatctccgtaacataaaagtgcaaggtgaagcagcaagtgctgatggagaagctgcagcaagatatctagaagatgtagctaaaatgtttgatgaaggtgaatacactaaacaacagattttcagtgtagactaaatagccttcagttagaagaagatgccatctaggactttcatagctagagagaagtcaatgcctggcttcaatgcttcaaaggacaggctgattctcttttgagaggctaatgaggctggtgactttaatgctcatttaccactccaaaaatcctagggcacttaaaaattatgctcaatctactctgcctgtgctctataaatgaaataacaaagtctagatgacagcacacctgtttatagcatggtttactgaatgattaaggccgctgatgagacctactgctcagaaaaaaaaagattcctttcaaaatattattgttc

SEQ ID NO: 191617 - DNA, 590 bp, Homo sapiens
aggaacattcttgatccatgaaaggaggtcaaaatattaatattaacgggagtttgaaagaagttgattgcaaccctcatggatgactttgagatcattaactttagagttcaagactgcagtgaaggaggtaactgcagatgtggtgaaaatggcaagagaattagaagtagattctgaagatgtgactgaattattgcaactttatgacaaaacttgaacagatgaggagttgcttctcatggatgtgcaaagaaagttgttccttgagatggaatctattcctggtgaagatgytgtgcatatttttgaaattccagcaaaggattcagaatattatgtgagcttagttaataaaacaatagcaaagtttgagacgattgattctaattttgaaagaagtctactgtgggtaaaatgctaccaaacagcatcacgtgcaacagagaaatcttttgtgaaagagtccatgaatatggcaaacctcaatgttgtccttattttaagaaattaccacagccacctcagcctacagcaaccaccaccctgatcaagtcagcagccatcaatgtcaaggcaaaacctccacc

SEQ ID NO: 191618 - DNA, 545 bp, Homo sapiens
agttatacaataagtacaatcaggataaagactagactcccagcactcttccttcagagtaacattgacacatttactcataaaatgaatcttcccttctcaactgattctcaactggtttatttagggaaggtgaagtttccactcaggaaacaaaaataacatcagaaattttaacagagatcatttagtgtaaatcattgctcaccaggaattggagaactgagatggcagagaggataatgctgaagtttcacagagataactacaaagtggctatgccaccatggctggaggaacaaagagaagagtctagggcaactaggacctagagacatgaaggaacccttcacagagatggagcccagrcctctgaggaaggtatgccaacaggccagggctgggatcaccaaggagggacaatgggactggttctgagagtgtggaaaaaaatgaagactggagccagctgctccgctgaaatgaactgccactgccaaagcaaagaagcattgttggagtgatgctggcaggaactggaagca

SEQ ID NO: 191619 - DNA, 628 bp, Homo sapiens
agcaaatggcaagatgccagcatggataagcttcactataatcagygtgtttatttcaccaaaaaaaaaaaaaaaagaaagaaagaaaaaaaaagctcatctgggctgcttttaaggctgataaactcattatgcaaagtttcagcctccatagaactgaggcttttctatatgttaattcatttcagtaaataattagtctgtttggctgaggaaacacatgtctccataatttaataattgggagggttattacatgtgattaataggggtcataaactaacactgagagtttaaaaccattttttttcactttgaacagatataataaagaaggctgatgggaaggtagggaagattctcctccccttcacctccacccccttctcgttttctttttagagttgggaaagcagtgctcagaacaggggaggttgtctttcttccccaccagaggtctaactctgatacatggtctgcttctctcgggagctttgaaatgtgcctcagtgtgtctaagtgtgtctgtatgtaagaggtgagaaaggaagaagaaagagaagaagaaagggaagaggactaaaaagagagacaaagagagaggaaagaacttgagtgactggttcct

SEQ ID NO: 191620 - DNA, 628 bp, Homo sapiens
agcaaatggcaagatgccagcatggataagcttcactataatcagtgtgtttatttcaccaaaaaaaaaaaaaaaagaaagaaaraaaaaaaaagctcatctgggctgcttttaaggctgataaactcattatgcaaagtttcagcctccatagaactgaggcttttctatatgttaattcatttcagtaaataattagtctgtttggctgaggaaacacatgtctccataatttaataattgggagggttattacatgtgattaataggggtcataaactaacactgagagtttaaaaccattttttttcactttgaacagatataataaagaaggctgatgggaaggtagggaagattctcctccccttcacctccacccccttctcgttttctttttagagttgggaaagcagtgctcagaacaggggaggttgtctttcttccccaccagaggtctaactctgatacatggtctgcttctctcgggagctttgaaatgtgcctcagtgtgtctaagtgtgtctgtatgtaagaggtgagaaaggaagaagaaagagaagaagaaagggaagaggactaaaaagagagacaaagagagaggaaagaacttgagtgactggttcct

SEQ ID NO: 191621 - DNA, 628 bp, Homo sapiens
agcaaatggcaagatgccagcatggataagcttcactataatcagtgtgtttatttcaccaaaaaaaaaaaaaaaagaaagaaagaaaaaaaaagctcatctgggctgcttttaaggctgataaactcattatgcaaagtttcagcctccatagaactgaggcttttctatatgttaattcatttcagtaaayaattagtctgtttggctgaggaaacacatgtctccataatttaataattgggagggttattacatgtgattaataggggtcataaactaacactgagagtttaaaaccattttttttcactttgaacagatataataaagaaggctgatgggaaggtagggaagattctcctccccttcacctccacccccttctcgttttctttttagagttgggaaagcagtgctcagaacaggggaggttgtctttcttccccaccagaggtctaactctgatacatggtctgcttctctcgggagctttgaaatgtgcctcagtgtgtctaagtgtgtctgtatgtaagaggtgagaaaggaagaagaaagagaagaagaaagggaagaggactaaaaagagagacaaagagagaggaaagaacttgagtgactggttcct

SEQ ID NO: 191622 - DNA, 633 bp, Homo sapiens
ttttatgattggtaggattttttattactaattcaattttggaactaaatattgatctggtcagtgtttcaattccttcctgattcaaccttgggagactgtgtatttccaggaatttatccatttcctgtagattttctagtttgtgtgcatagaggtatattcacagtagtctctgaggatcttttgtatttatgtgagatcaggcrtagcgtcacctttgttgtttctgattgtgcttatttggatcttctttctttgttaatctagctagtggtctactgatcttgtttatcctttcaaataaccaacttggtttttgttaattctttgtatggatttggggcctcaatttcattcagttccactttgattttaattatttctcttcttctgctaactttgagattcatttgttcttatttttctggttcttctaggtgtgacattagatcattaatttgagatctttctaactttttgaggtaggcactcagtgctgtaacctttcttcttaacagtgcttttgctgcaacccagagattttggtatgttgtatctctgttttcatgtatttccaagagatttttaaatttctgccataatttcgttgtttacccaaaactcattcag

SEQ ID NO: 191623 - DNA, 454 bp, Homo sapiens
ctctacattattcgtcagaaacttcgaggaatggctgccagaagcccaaaatgcaatactggatttaagaaagtacctaaaaacatgtaaatcatgcatagaataccaacaacaaaaagcacatggggagcaaatagatatggcccctraaataaatccattcacatctcttaatttgaagaagcaggagactgaaataaagagggctcccagagcactgaattatgatatgagaatggtgtggtagaattcaaaacagactgtgaggtataatttttggaaaaatatgcatatgttacatatcctgttgtgcaattttaggttaggctacatgggactacgttgtacataccagcctaagttcctatttaataaattcaagtattcctagtagaaaaactacatttccagttagaaaagtaattttgagcaacacaatcaaaatgatgtaaac

SEQ ID NO: 191624 - DNA, 536 bp, Homo sapiens
ttctttcaacagggaaggaaaatattatttttgtatatgaataatgacggtaaagggtacattaaaatacttgaattacaaactaatctgtctctagatgtgttctccatgatcatgaagagaattaatatagtcaattttaaatagatatwgtaaacgtgcaaaacaagtaaaatttggaaatgtgttttctggttcaagactgtggcttccatatacacttgttttctttatgtttttagagcatattaaaatggtaccattaaattactcacatattgaggaaagctaaagaatcaatagactcagattgcaaagaggctgagtaggtaatttaattgtttttgcttttcataattgttggggaggctatcttgctttataaaacaagattaacttcaataatatctatgtgttttagaggtgaaaacaatgtctaaagcatttatgttaaacttggttggatttgacttcttcttatgaggttatccttccattagaaatttaaacagtgagcagaggctaagaatcctttt

SEQ ID NO: 191625 - DNA, 446 bp, Homo sapiens
tgagacttttcttttactatatacccttctacactattttcctttttaatcataggcaaggaatttacaatacatattgtaatgtaaaaattttgttttaggagtttcaacagaygttaataagttataaaccttaatttagtaatttacatgactaaatatgtaacatctaaaaatgaatcttttgtttacatacatggaaatgttgtggcttgatttaaactttatggatttttaattattagaagttcttaatattaatgtagttaaatacataaatattttcttttaggtttaattttggaatgtgtgtgttgtatatctgtatgtttttaaggaaatatttcccatagcgaagccatagtcttctctattataaccttaaataaaatttgtaaagtttagccccctgaagctttttctttaaatggtgtagggtaaccctt

SEQ ID NO: 191626 - DNA, 645 bp, Homo sapiens
tacaatacatattgtaatgtaaaaattttgttttaggagtttcaacagatgttaataagttataaaccttaatttagtaatttacatgactaaatatgtaacatctaaaaatgaatcttttgtttacatacatggaaatgttgtggcttgatttaaactttatggatttttaattattagaagttcttaatattaatgtagttaaatacataaatattttcttttaggtttaattttggaatgtgtgtgttgtatatctgtatgtttttaaggaaatatttcccatagygaagccatagtcttctctattataaccttaaataaaatttgtaaagtttagccccctgaagctttttctttaaatggtgtagggtaacccttactctagttccaccttcataagtagtcttgatatctgccaggggatttcacttcactttttcttcaggagcatcatagttattctttggccttccattcaaattttgtaatcattttagcacatttcttggaaaattcttttggaatattaattaaaattatagatcaagttgaaaattaattgagatgatgaagagtctccttgtgcatgaatatgctatttccctcaatgcatttacacgtttaaatttttcaaaatacaga

SEQ ID NO: 191627 - DNA, 561 bp, Homo sapiens
aagtgaaatttgatgttcaacttagcaaatatttttttaatttttggaatgatatcaactactgctggtgagagtgatgtacaatggcctcttttatacagcaataatggaattacaaacttgctcatcaattctcaaagggaatttcttagtatgcttatgttcattattttgaacattgacccagttattctatgtctgaaaatttattctaaaatacaaatatatactcaaagatctagatttatatgacagtattttttaataaaagcaatgttaaaaagtgaatrtatacatagaatggttaaataaatacattgaaatgataaaaggctaagtagtcattaaatttcataataattacatcaaacacttgtattgcgctaattatgtgccaatcattgctattcatttttacgtatattaactcatttaaatatcacatatttttctatgaaatagtcactgtcattaaactcatttttttttttagcaatattgaggttaagtaactatccaagctggaattgtatgccaaatctatgctgttttttgattctc

SEQ ID NO: 191628 - DNA, 550 bp, Homo sapiens
aattgggtgatgtcaccactactctgacagagctctcagacatcggccttaatcatatgtctgccattttttagaaacactgtgaacacagcatgaagacagktaagccctgtatcaaccccagtgctgctcatggggatgatgggaggatgtagtgcttgtcacagatgtttactgggtttgcaccttcatctacatgaatttgaaatccagatcagtgtgctgtgtgagaaaccagagttgtgagagaaacgaggggccctgtagccatcatcccattacaaagaactgactcccaagaggaagagcccaccccatgtccatacaccccgtgccatctctctcctcctagttgaccccacagtgtcttcgctgctcagctcccacccaaggctgagcacagtctcctgtcagggaccagcagaggctctcagcatgtgctgcctactgcagctgacattcttacacaaacacagttgtgctcacttcctccacaggcactctgaaaagggaaataaagctttaacataagtgtttatcaaaaaaatca

SEQ ID NO: 191629 - DNA, 550 bp, Homo sapiens
aattgggtgatgtcaccactactctgacagagctctcagacatcggccttaatcatatgtctgccattttttagaaacactgtgaacacagcatgaagacagttaagccctgtatcaaccccagtgctgctcatggggatgatgggaggatgtagtgcttgtcacagatgtttactgggtttgcaccttcatctacatgaatttgaaatccagatcagtgtgctgtgtgagaaaccagagttgtgagagaaacgagsggccctgtagccatcatcccattacaaagaactgactcccaagaggaagagcccaccccatgtccatacaccccgtgccatctctctcctcctagttgaccccacagtgtcttcgctgctcagctcccacccaaggctgagcacagtctcctgtcagggaccagcagaggctctcagcatgtgctgcctactgcagctgacattcttacacaaacacagttgtgctcacttcctccacaggcactctgaaaagggaaataaagctttaacataagtgtttatcaaaaaaatca

SEQ ID NO: 191630 - DNA, 550 bp, Homo sapiens
aattgggtgatgtcaccactactctgacagagctctcagacatcggccttaatcatatgtctgccattttttagaaacactgtgaacacagcatgaagacagttaagccctgtatcaaccccagtgctgctcatggggatgatgggaggatgtagtgcttgtcacagatgtttactgggtttgcaccttcatctacatgaatttgaaatccagatcagtgtgctgtgtgagaaaccagagttgtgagagaaacgaggggccctgtagccatcatcccattacaaagaactgactcccaagaggaagagcccaccccatgtccatacaccccgtgccatctctctcctcctagttgaycccacagtgtcttcgctgctcagctcccacccaaggctgagcacagtctcctgtcagggaccagcagaggctctcagcatgtgctgcctactgcagctgacattcttacacaaacacagttgtgctcacttcctccacaggcactctgaaaagggaaataaagctttaacataagtgtttatcaaaaaaatca

SEQ ID NO: 191631 - DNA, 602 bp, Homo sapiens
ggacctgaaacattttgtcacacaagatatgtagaaaagactctatcagctacactagtgtcaagggaacttgattcaggacttaagcatcaataaagacaacaactgctctatattggatagattgaaatgcataaaatatgtttaaatcgacgaatgcaaaatatttcaaaaaaagaagtaacaaattgatcccgtggaaggaagctagtgaaccaacttgtccaagtaaaatgatgaattaaaaggtcataaataaagcatctatcttgccttttctattaggtgtctaccactgggtgaccaaatrgtagattagtagaagtttccctttaagaattccagctaataaataaagaatgaataaaagaattatgctgccagtatacgcaacccctcttgaattgctgggtctaggcaatgatcatcagtggctgctaccatcacaggcagagacagatactcagtgccaactgatggaagaagacagcaccaaagtgtgccccaaattgaatctgaatctgatcgagtcttacatcccagtgctgatttacatgaaatagagaggacagaggagcatgtgacatggcaccataggagca

SEQ ID NO: 191632 - DNA, 602 bp, Homo sapiens
ggacctgaaacattttgtcacacaagatatgtagaaaagactctatcagctacactagtgtcaagggaacttgattcaggacttaagcatcaataaagacaacaactgctctatattggatagattgaaatgcataaaatatgtttaaatcgacgaatgcaaaatatttcaaaaaaagaagtaacaaattgatcccgtggaaggaagctagtgaaccaacttgtccaagtaaaatgatgaattaaaaggtcataaataaagcatctatcttgccttttctattaggtgtctaccactgggtgaccaaatagtagattagtagaartttccctttaagaattccagctaataaataaagaatgaataaaagaattatgctgccagtatacgcaacccctcttgaattgctgggtctaggcaatgatcatcagtggctgctaccatcacaggcagagacagatactcagtgccaactgatggaagaagacagcaccaaagtgtgccccaaattgaatctgaatctgatcgagtcttacatcccagtgctgatttacatgaaatagagaggacagaggagcatgtgacatggcaccataggagca

SEQ ID NO: 191633 - DNA, 602 bp, Homo sapiens
ggacctgaaacattttgtcacacaagatatgtagaaaagactctatcagctacactagtgtcaagggaacttgattcaggacttaagcatcaataaagacaacaactgctctatattggatagattgaaatgcataaaatatgtttaaatcgacgaatgcaaaatatttcaaaaaaagaagtaacaaattgatcccgtggaaggaagctagtgaaccaacttgtccaagtaaaatgatgaattaaaaggtcataaataaagcatctatcttgccttttctattaggtgtctaccactgggtgaccaaatagtagattagtagaagtttccctttaagaattccagctaataaataaagaatgaataaaagaattatgctgccagtatacgcaacccctcttgaattgctgggtctaggcaatgatcatcagtggctgckaccatcacaggcagagacagatactcagtgccaactgatggaagaagacagcaccaaagtgtgccccaaattgaatctgaatctgatcgagtcttacatcccagtgctgatttacatgaaatagagaggacagaggagcatgtgacatggcaccataggagca

SEQ ID NO: 191634 - DNA, 583 bp, Homo sapiens
tgaacgcatgcctgaccttttttcatatttaaccattcacccccttaacagggatgtataaatgtatgggtagtcaagggtggattctcaataccagaacagtacatttgcctattgttttaatctatgtcaatggtaataatagtaatagtgcatgttctttcagtgtcatctcactgtatccttactgcaattctaagaggcagggttgttctcaccctcattgctcagawgtgacaaccaaggcttcaagaaatgaagtagcctttccagggttgcaggggctttgcacccagccaggccatcagctcccaagcctgtgctcgaccccagatctgttcatccacccctctgttcccttatccctgtgttcagtgtgctgtatcatcaaacagacctgatgagagcgagctcccactccccactcacttgtgtgccccttcccgtggccctcgctggccctctctgaggtcaggctctctggctgtgatgggtgttcactgggctgcctcccaaccacctgcctcccaggcagcagctttgagctcatgccagggcctaaggaaaaatggtcatgccaacc

SEQ ID NO: 191635 - DNA, 502 bp, Homo sapiens
atattttgtagtttttcctttgacacttcagcaacttgaccaaggtgctactaaactcttctccagggagaaagcatgcagtacctgagtttgaactatcaatggtcctccatccctccatcatgtccatcactgacctcctgtagaccatgtggggctcactctgtattggccgtgggctcagtgctctgggggatgacagcaatcctgccaccgcccccatgttggagatgagaacaagaagtygtaggaagcctgagtatcctgcccaaggtcacacagttgagaaatagtagcattgggatttaacctaggtcatctccacccaactgcattcttactacaccttggcagcagctgaatctgacctctcatcatctggtgtggtcacttcagtgtatacgccaggaaataaaattctgcagcagacaactggagactgaactgagtttgaattgagaggctggccagaaggttgacatttcagagccaaactcataga

SEQ ID NO: 191636 - DNA, 553 bp, Homo sapiens
gatctccctttccttttttccttccttcctttcttcttagctacactgttcaagggatttttttttaattatgaaatttgctccagtcttactacttaagtgggaaaaatgcaaacactatttcacaaagtgtgtgtgtgtgtgtgtgtgcgtgtgtgtgtgtgtgtaattcgagagacagagacaatgcttaaattcagtttcaagagtccagagtcatgtaggaactatccaggaattaagcgatgtgtactagagaggtattagtcagggctagagatttaaatttggaagacactggtgcttaaatatttaaggcccgatagggaataagattacaagggaggaaagtgtagacagagaaaaaaaaggagctcaacacggagtcttgggygcttgaatattcataggttaagaaaagcagaaccaaaaaaaaaaaaaaactctgtctggctcagggttgaggactgcattaaaattataaatctgagagtcatcaatatagagatatttgagtccatgggaatgaatgaaggtactttcaattagttta

SEQ ID NO: 191637 - DNA, 530 bp, Homo sapiens
tcaagggatttttttttaattatgaaatttgctccagtcttactacttaagtgggaaaaatgcaaacactatttcacaaagtgtgtgtgtgtgtgtgtgtgcgtgtgtgtgtgtgtgtaattcgagagacagagacaatgcttaaattcagtttcaagagtccagagtcatgtaggaactatccaggaattaagcgatgtgtactagagaggtattagtcagggctagagatttaaatttggaagacactggtgcttaaatatttaaggcccgatagggaataagattacaagggaggaaagtgtagacagagaaaaaaaaggagctcaacacggagtcttgggcgcttgaatattcataggttaagaaaagcagaaccaaaaaaaaaaaaaaactctgtctrgctcagggttgaggactgcattaaaattataaatctgagagtcatcaatatagagatatttgagtccatgggaatgaatgaaggtactttcaattagtttaagttagatacagtaacacatagcccc

SEQ ID NO: 191638 - DNA, 530 bp, Homo sapiens
tcaagggatttttttttaattatgaaatttgctccagtcttactacttaagtgggaaaaatgcaaacactatttcacaaagtgtgtgtgtgtgtgtgtgtgcgtgtgtgtgtgtgtgtaattcgagagacagagacaatgcttaaattcagtttcaagagtccagagtcatgtaggaactatccaggaattaagcgatgtgtactagagaggtattagtcagggctagagatttaaatttggaagacactggtgcttaaatatttaaggcccgatagggaataagattacaagggaggaaagtgtagacagagaaaaaaaaggagctcaacacggagtcttgggcgcttgaatattcataggttaagaaaagcagaaccaaaaaaaaaaaaaaactctgtctggctcagggttgaggactgcattaraattataaatctgagagtcatcaatatagagatatttgagtccatgggaatgaatgaaggtactttcaattagtttaagttagatacagtaacacatagcccc

SEQ ID NO: 191639 - DNA, 592 bp, Homo sapiens
ccgcagctcagcccgctccctggtgaacgcctgagatgcagagcagcccccgtccaagggaagtcacggcttgccttgtcatctgcctccggggaaagggaactcttcagagagaaggagatacttggcttgggccttaaactctaaataagagttcccagaagggtaaggagggcagaggtctctggtgtttgctgagggcctattctgtgccaggccttcactaggcaggcattgctaacttctctcaggtaaattctctcacacacacctgaggaagaggggctcaggcacacacaggcctgtccttctactgccccacggaggagaattctccgcagagaacctccagtgcagacacgggttgggggtgggtggcctgcacacgaaggagtcccctgtgcagggggttggggaaggatttggtgtagctgygggtgtgagtgacagggcacagggttgaggggggcacaaggggctgggggtggacaggcagaatgggctgtccctgcagcatcattacagagaactcctctccacagaggggcagccgctggcgtgttgaggccagcaagggctcaggccagaagcg

SEQ ID NO: 191640 - DNA, 592 bp, Homo sapiens
ccgcagctcagcccgctccctggtgaacgcctgagatgcagagcagcccccgtccaagggaagtcacggcttgccttgtcatctgcctccggggaaagggaactcttcagagagaaggagatacttggcttgggccttaaactctaaataagagttcccagaagggtaaggagggcagaggtctctggtgtttgctgagggcctattctgtgccaggccttcactaggcaggcattgctaacttctctcaggtaaattctctcacacacacctgaggaagaggggctcaggcacacacaggcctgtccttctactgccccacggaggagaattctccgcagagaacctccagtgcagacacgggttgggggtgggtggcctgcacacgaaggagtcccctgtgcagggggttggggaaggatttggtgtagctgtgggtgtgagtgacagggcacagggttgaggggggcacaaggggctgggggtggacaggcagaatgggctgtccctgcagcaycattacagagaactcctctccacagaggggcagccgctggcgtgttgaggccagcaagggctcaggccagaagcg

SEQ ID NO: 191641 - DNA, 662 bp, Homo sapiens
cactggccaagaaatgaagacaacctttcagacacgatcggcccacaggatggagaagctcaaggccctgatgagttgggacccatttatcctgttctagtttcctgcagctgcagaaactcacatgaagttgctggttaagtgacagcttttgcttcccacttgaacagctgttttttatttgcttctttgcttttatcttgyagtctatactcactgtcccatttccgtcagtactgactttcatcttgttagattcagtgcaccacaactcctgcctaggacaagccatctggactccttttggctctagttgcccggcctaacctccaggcagaatcacacactcacagctctgcgtactcacaggaccggatccacaccccagggacctcactatcttaaggagcatcccatctcattcacctgctatctcctcactgggaagttcctggagatcaagaactgatacatgcatatttgcaaccctacgacttagtgctgaataaaacttaaccaaataaatgacaatttgatctgtgggccacgaatgttctcactgtgcaagagtaggtgtcagggcacctcagcctgcccatcagctgcctgttttttataaattaagttttactggaacacaagcacaactgttcatttatgta

SEQ ID NO: 191642 - DNA, 662 bp, Homo sapiens
cactggccaagaaatgaagacaacctttcagacacgatcggcccacaggatggagaagctcaaggccctgatgagttgggacccatttatcctgttctagtttcctgcagctgcagaaactcacatgaagttgctggttaagtgacagcttttgcttcccacttgaacagctgttttttatttgcttctttgcttttatcttgtagtctatactcactgtcccatttccgtcagtactgactttcatcttgttagattcagtgcaccacaactcctgcctaggacaagccatctggactccttttggctctagttgcccggcctaacctccaggcagaatcayacactcacagctctgcgtactcacaggaccggatccacaccccagggacctcactatcttaaggagcatcccatctcattcacctgctatctcctcactgggaagttcctggagatcaagaactgatacatgcatatttgcaaccctacgacttagtgctgaataaaacttaaccaaataaatgacaatttgatctgtgggccacgaatgttctcactgtgcaagagtaggtgtcagggcacctcagcctgcccatcagctgcctgttttttataaattaagttttactggaacacaagcacaactgttcatttatgta

SEQ ID NO: 191643 - DNA, 662 bp, Homo sapiens
cactggccaagaaatgaagacaacctttcagacacgatcggcccacaggatggagaagctcaaggccctgatgagttgggacccatttatcctgttctagtttcctgcagctgcagaaactcacatgaagttgctggttaagtgacagcttttgcttcccacttgaacagctgttttttatttgcttctttgcttttatcttgtagtctatactcactgtcccatttccgtcagtactgactttcatcttgttagattcagtgcaccacaactcctgcctaggacaagccatctggactccttttggctctagttgcccggcctaacctccaggcagaatcacacactcacagctctgcgtactcacaggaccggatccacaccccagggacctcactatcttaaggagcatcccatctcattcacctgctatctcctcactgggaagttcctggagatcaagaactgayacatgcatatttgcaaccctacgacttagtgctgaataaaacttaaccaaataaatgacaatttgatctgtgggccacgaatgttctcactgtgcaagagtaggtgtcagggcacctcagcctgcccatcagctgcctgttttttataaattaagttttactggaacacaagcacaactgttcatttatgta

SEQ ID NO: 191644 - DNA, 556 bp, Homo sapiens
ttgctaccacggtatgccatgtgtcttgcatgtcaagattctattcagatctattcaagatattatggaatgtgttttctacttttgaaatataatttcaaagaactgtggcttgtgtttaaaaatggtaagttctaattaaatgacagcacaagtataaactggaacatagatactgaaattacatttttgaagttttatatttcttggggaaacacttaggaagtgaaaaaaatcaagagaaaaccatatatattaaaaaacctcaagaatgtaaaactgcatatgtaaaagactaaaggaaaagatgctaaactgttttcatatagccatatctgccactctatttctttatcattctgggtttcctgcattatttaagaagacctctctcaattgagattatatggatcacattctactctttttcctactatttacataaytggatttttttgctctacatttaggttcaaaacccatctggaatttattcatgtacgtgcctcagtgttggcatccaattttattcccttccaacatcattgattacaac

SEQ ID NO: 191645 - DNA, 556 bp, Homo sapiens
ttgctaccacggtatgccatgtgtcttgcatgtcaagattctattcagatctattcaagatattatggaatgtgttttctacttttgaaatataatttcaaagaactgtggcttgtgtttaaaaatggtaagttctaattaaatgacagcacaagtataaactggaacatagatactgaaattacatttttgaagttttatatttcttggggaaacacttaggaagtgaaaaaaatcaagagaaaaccatatatattaaaaaacctcaagaatgtaaaactgcatatgtaaaagactaaaggaaaagatgctaaactgttttcatatagccatatctgccactctatttctttatcattctgggtttcctgcattatttaagaagacctctctcaattgagattatatggatcacattctactctttttcctactatttacataactggatttttttgctctacatttaggttcaaaacccatctggaatttattcatgtrcgtgcctcagtgttggcatccaattttattcccttccaacatcattgattacaac

SEQ ID NO: 191646 - DNA, 538 bp, Homo sapiens
cctgcaccatagagaattaaaagggagaacagccttagtagacaatgggcaggagccacttctgtaaaagagaggctggggacagctgacagcctgtgaaagcacacaccacctgccccgcacaagcagtcaagcaaatgtgagatgacacaagacacttttgctttttaatcyaatgagactgtaaaacttaaaaagagtttctaacatccggtggtggtaaagatgtggggaaacagcacttcatacattaatggtgagagcatggatcgaaaaaagatgaatcagcagatttaaaaagttaaattgcacatgccctttgcatcacagtgttaggattttattccacagaaattaagagttttaataaagaagaagacatgtgtaagaggctttcccctcctcagcattatttgggatggcaaaagcgtgaccaccatccataggggagaggcgggaggaatttggacgcagccgcactatattgtaatgagcatacactttcgcactgtcatatctttcttccttaagtcatgtt

SEQ ID NO: 191647 - DNA, 600 bp, Homo sapiens
ctattgtctcttaggtttaggaggctcatgatcaatcttgtcttaatttttgtgtacagtgtgaagtaaggatagaactttattcattcacttgtggatactaagttgcccgaccattatttgttaaaaaaacaaaaaaamaaaaaaacccaaaaaaacctgttctttccccacaaaattatcttgctgctcttgtaaagaatcaaccagacataaatgcaagggtttatgccaataccatactatcttaattattggggatttatcataaattttaaagtcagaaaatgtgagtcctcctttgtttttcgagattatcctggctattctcaatcccttgaatttccatatgaattttagggtcagcttgtcaatttctgaaaaaaaaccagctggaattttgaaagggattgggttgaatctgtacattaatctaaggagtattgccatcttagcaacattgcattttctggcccatgaatatgggatatcttttaacagcaacactgggaactggaagacaacggaagataacttcaatgtgttcaatacaaaaccctgcaaaactaaaattctaattccagtgaaagtatctttata

SEQ ID NO: 191648 - DNA, 537 bp, Homo sapiens
cattccatgcaaactgtcactccatgccacgtggctgtgcattgaaactggcagtgcattcaggagtgtgtttgcaaacctgcgatttccagccagtgagagtgtttggagtcggtgggcacccatgtctgttctgtgagaagctgcccattttctgagagatccatgaatatctaccaagaagccttgtgtaatggccatagaatatatacctgtgtagacctggacagcttggttttctctagatgggmgctgtggcaggcttggaaacttcagggccattcctgcgtggctgaggtgaggagggactgactgtgtccataccaatcagagctcatcctacaccctctcccagtccctgccagagattcccttgacctcagagggatcgggggcccttcactccctatggtatgtcatggctcaataaccagaacctgcaagggctgatgagactgtgccacagactgtgtgccactgtgccttcatggcacagtcctggcagatcctcccttagtctaagttcacacaagcaga

SEQ ID NO: 191649 - DNA, 570 bp, Homo sapiens
aagcttaaaagggaaaaaatatagtatatatgtgtcatatatattgaagcaccaggaaacttgaggaaggggacatgggctatccccagacggggaggatggtcgaggcctgaggctggagtgtgtatggtcagaggggtgaggggacactttcagggagtagccagagggagtgtgctggtggggagaaagggagaggaagtagtttatatcagagaggaacaggrtatcacatcattcagagcattgtaagatgtggtaggacttggcttttcttctgagtaagatgtgatgtcattggagaggcctgggcagagggacttaatccagttcagtttaacaagatcaccgtggctggtgtttgaaaaccagaagtcagcgtggcagggcagggacgctggcaaggagagagctgcagtattgcaagggaggaatgacggtgcttgaggatagtagcagaggaacagtgccaagaggagggctgtctcttcaaattatatttagaacccaacaggacttgctgatcggccagatgcaggtgtcaaaaatgttaaagttgactcctgcatc

SEQ ID NO: 191650 - DNA, 570 bp, Homo sapiens
aagcttaaaagggaaaaaatatagtatatatgtgtcatatatattgaagcaccaggaaacttgaggaaggggacatgggctatccccagacggggaggatggtcgaggcctgaggctggagtgtgtatggtcagaggggtgaggggacactttcagggagtagccagagggagtgtgctggtggggagaaagggagaggaagtagtttatatcagagaggaacagggtatcacatcattcagagcattgtaagatgtggtaggacttggcttttcttctgagtaagatgtgatgtcattggagaggcctgggcagagggacttaatccagttcagtttaacaagatcaccgtggctggtgtttgaaaaccagaagtcagcgtggcagggcagggacgctggcaaggagagagctgcagtattgcaagggaggaatgacrgtgcttgaggatagtagcagaggaacagtgccaagaggagggctgtctcttcaaattatatttagaacccaacaggacttgctgatcggccagatgcaggtgtcaaaaatgttaaagttgactcctgcatc

SEQ ID NO: 191651 - DNA, 533 bp, Homo sapiens
tgaggaaggggacatgggctatccccagacggggaggatggtcgaggcctgaggctggagtgtgtatggtcagaggggtgaggggacactttcagggagtagccagagggagtgtgctggtggggagaaagggagaggaagtagtttatatcagagaggaacagggtatcacatcattcagagcattgtaagatgtggtaggacttggcttttcttctgagtaagatgtgatgtcattggagaggcctgggcagagggacttaatccagttcagtttaacaagatcaccgtggctggtgtttgaaaaccagaagtcagcgtggcagggcagggacgctggcaaggagagagctgcagtattgcaagggaggaatgacggtgcttgaggatrgtagcagaggaacagtgccaagaggagggctgtctcttcaaattatatttagaacccaacaggacttgctgatcggccagatgcaggtgtcaaaaatgttaaagttgactcctgcatctttggtctgaacaaatggaagctt

SEQ ID NO: 191652 - DNA, 533 bp, Homo sapiens
tgaggaaggggacatgggctatccccagacggggaggatggtcgaggcctgaggctggagtgtgtatggtcagaggggtgaggggacactttcagggagtagccagagggagtgtgctggtggggagaaagggagaggaagtagtttatatcagagaggaacagggtatcacatcattcagagcattgtaagatgtggtaggacttggcttttcttctgagtaagatgtgatgtcattggagaggcctgggcagagggacttaatccagttcagtttaacaagatcaccgtggctggtgtttgaaaaccagaagtcagcgtggcagggcagggacgctggcaaggagagagctgcagtattgcaagggaggaatgacggtgcttgaggatagtrgcagaggaacagtgccaagaggagggctgtctcttcaaattatatttagaacccaacaggacttgctgatcggccagatgcaggtgtcaaaaatgttaaagttgactcctgcatctttggtctgaacaaatggaagctt

SEQ ID NO: 191653 - DNA, 530 bp, Homo sapiens
tggcacgatctcggttcattgcaacctctgcctcccagactcaagtgagcctcccacctcagcctcccgagtagctaggaccacaggcatgtgccaccatgcccagctaatttttgtatttttggtagagacagggtttcgtcaagttgcccaggctggtctcaaactcctgagctcaagcgatccacctggcttggcctccccaagtgctaggattacaggcataagccaccatgcctggcatcacttttactttatagatattgtatagaaattgtgaggccaatccacgcagccctctatgctatacaagttggcggcagrgccaatggttgtgccgagactcgccgctgcccgggctgctgggtcttgagtgtcacctacactgccatggatgccaccggacgctgacagacctgtggagagtcgggttgtgcctcccgggccttatcgggccaccaagctgtggaatgaagttaccacatcttttcgagcaggaatgcctctaagaaaacacagacaacacttta

SEQ ID NO: 191654 - DNA, 554 bp, Homo sapiens
agtttattaataattgtctttattaagtggaattaagtatttggaagtatatgaataaaataatgaccttaaacttttcatatgatctgatgatcaggtatgattayattgcagacattgctaaaaggttgatgaacaaagtagaagtataaaagctgataatgttgattttactagtatttaatacttaaagggatatttataatacaatctcttggtgatttttgttttgttttgtaatgtattgtgctgtagttcattggcatcatgaaaaacaagggaattaaataaaatatcctgataagtttataataacaaattaattgtgattatttgcactaaaagtgcaaagatgacaagtcatccagttttaactcaatattgtttaaggaagagaaattgtgtattattatgatactaaaacactcatcttctcatcttagttgaacaaatcaatgaataataggttaccattacagagtttacagttcattgtttctgattttgacttctctttcacatcttcaacaagtagcttcataacctttagatat

SEQ ID NO: 191655 - DNA, 513 bp, Homo sapiens
aaatgaaggagaaataaaatatttcccagataagcaagagctaaaggggttcatcaccactagatcagtgttacaaaaaaatacttaaaggagtgtgacagtctgaagcaaaaggagagtaagttttactatcatgaagacatatgaaagtataaaactcactggtagaggtaaattcataataaaatttagaaaactccattactgtaatggtggtatgtaaatctttcaaatcttagtatgaatgttaaaagttaaaatggtcaaaaataactatagccacaataagttactgaggaacacgtgatatataaagatgtaaactgtgataacaaaaataaaaattatacgtttgaaaagaaaggctagagtacttatatgcaaatgaagttagttgtaatcagcttaaaatactctatcataacttttagatgttttagatcagccccatggyaaccacaaagcaaagcattacagtacattcacaaacgagaaagatgaaatcaaaactta

SEQ ID NO: 191656 - DNA, 528 bp, Homo sapiens
cagtagaacaattgacatgagaaactagtcttcctctgaggctggtgaagctgcagatcagcacacactcagacttggtacagagaaacagaccattctcccattagcctttggtatacttcagtcacctggggtagagtgatttctgtgatttctaaaccttctgtcctactcatcttacaggccatgtccatcctcagaactcatgctttcctttattgtagcttctgttctacgactcctctaatacatttttcttaggagcttcattgagatataatttatatcccataacattcacatttgaaatgtggcatccagtgttttttawtgtagtcacagacttatgcaactatcacatcgaattttagaatattttcaccgccctctgaaaaaaactaaataacaattagcagtagctccccgtttcttttctctgccaaaccactagcaactattaatctattttctgtctttagccatttggcattccgaacatttaatacaaatacgatcatttaatatgtg

SEQ ID NO: 191657 - DNA, 466 bp, Homo sapiens
atcactttctacaaagcttcaaaattaagttctatctttacatatcagcaatatttctatatttaatatgttatcagagaatacagaaaaaatactcattctctgcatcttagcacaaccctgaaaacccgacagggcaagtccagctcagtgcctacgtccatgacccaacagagcagggacaagagctgtgcctgggacggacccgcagctgcagcacgaggcagatggcggaaacgcagaaccttgcatgccatccccgaactactgaactgagatctgcattttaacaagcccccaaactcaactttctactcaatacgttagccagtgacactaaccctgcagmcaaaatcctagatcaaacatgaggaagttaaaccaatgttagagtatagtacatcatacttaagtaaggtttcattccaaaagtagtttcatgtagacatgtctagtcgtgggattc

SEQ ID NO: 191658 - DNA, 542 bp, Homo sapiens
tgtttgccttgtacatgtgtgtgggggtggggtggggagaatagttaagatccatttttagcagtttgaatacacaatggagtattgttaactataatcaccctgccgtacattagatctccagaacttattcatcttaaaactgaaacttggtatcctttgaccaatgccactcccgggactccccagccctggtaaccaccactctaccctgcttctgagctcaacgtttttagatttcacatatgagtgagatcatgttgtatgtgtctttctgtgcctggcttatttcacttagtgtaacaacattcagattggtccatgctgcaaatagcaggatttccctccacattttttttaatttacttgtgatagttaattttatgtatcagcttggctragctaaggaatgtcattgtttctggatgtgcttgtgagaatgtttctggaagcaatgagcatttgaatcagtggactgagtaatgaagcttccctctcagtaatgcaggcaggcatcctccaaaccactgagggcccgggag

SEQ ID NO: 191659 - DNA, 526 bp, Homo sapiens
tgcttttcaagaaaggttcgatgttgtttacactacagtttgtaaaatatgaacttgagtaacaataagttacagacaagcagcaatcaaactacatgattaattgttatttgttcaatttccattatctgagaataaatttaaaggattaaaacctgcttacatccttagtttacaatwtttaccataagtgtctgcaggaaatcgtattgtctatcaaagtaagcaatttgacttgtatacagaagtacacaccagagtcagttttcaaatccactttttctgctgagggacttaggaagtgatcctgttgttatgttatatgaaacttggggaaaaaataacagaaatatgggcagaataggttcaagggatgcagataggcagctgctgtgtttggttgtgtccccacccaaatctcatcttaaattataatccccataaaccccacatgtcatagaagggatgcagtgggaggtaattgaatcatgggggcagtttcccccatgctgttctcatgacagta

SEQ ID NO: 191660 - DNA, 520 bp, Homo sapiens
cgatgttgtttacactacagtttgtaaaatatgaacttgagtaacaataagttacagacaagcagcaatcaaactacatgattaattgttatttgttcaatttccattatctgagaataaatttaaaggattaaaacctgcttacatccttagtttacaatatttaccatwagtgtctgcaggaaatcgtattgtctatcaaagtaagcaatttgacttgtatacagaagtacacaccagagtcagttttcaaatccactttttctgctgagggacttaggaagtgatcctgttgttatgttatatgaaacttggggaaaaaataacagaaatatgggcagaataggttcaagggatgcagataggcagctgctgtgtttggttgtgtccccacccaaatctcatcttaaattataatccccataaaccccacatgtcatagaagggatgcagtgggaggtaattgaatcatgggggcagtttcccccatgctgttctcatgacagtaagtaagttgtca

SEQ ID NO: 191661 - DNA, 520 bp, Homo sapiens
cgatgttgtttacactacagtttgtaaaatatgaacttgagtaacaataagttacagacaagcagcaatcaaactacatgattaattgttatttgttcaatttccattatctgagaataaatttaaaggattaaaacctgcttacatccttagtttacaatatttaccataagtgtctgcaggaaatcgtattgtctatcaaagtaagcaatttgacttgtatacagaagtacacaccagagtcagttttcaaatccactttttctgctgagggacttaggaagtgatcctgttgwtatgttatatgaaacttggggaaaaaataacagaaatatgggcagaataggttcaagggatgcagataggcagctgctgtgtttggttgtgtccccacccaaatctcatcttaaattataatccccataaaccccacatgtcatagaagggatgcagtgggaggtaattgaatcatgggggcagtttcccccatgctgttctcatgacagtaagtaagttgtca

SEQ ID NO: 191662 - DNA, 612 bp, Homo sapiens
taagatattaaaatagaagttactaaatatgtttaaaatatttagtgagaatggcaatgttaaattttgtaagaacttgcccatttctrtaatgaaatcacaaaatcagagagtgaagttctagtcttttataaccgaaactatatttttccccaaagtgtgttgctcaactttcaagcattaggcagatatatctgtatcttaaataatttatttgggtctttttcttgcctatttattttttaacaatgtcttttgatgatttttttaaagaacaaacagaatctctgctgcggaccctctgacacttgtgatttcatgttatatacagttggagggtcatatacaattttaggccaatgcttacatatcatcactccttttaaacattaaactcctcttgagaagaaggctttgcagctttgtgtattctcaatggtatctagacagtcttttgcatgtggtagattctcaacatgtacattggaaattgaatttcactgagagctctccagagcactcaggcttcacatagcataatcccagacatttagaagatatttgatgattgatagatcaaatctgtgatgggtagtataggacaaatggcct

SEQ ID NO: 191663 - DNA, 612 bp, Homo sapiens
taagatattaaaatagaagttactaaatatgtttaaaatatttagtgagaatggcaatgttaaattttgtaagaacttgcccatttctgtaatgaaatcacaaaatcagagagtgaagttctagtcttttataaccgaaactatatttttccccaaastgtgttgctcaactttcaagcattaggcagatatatctgtatcttaaataatttatttgggtctttttcttgcctatttattttttaacaatgtcttttgatgatttttttaaagaacaaacagaatctctgctgcggaccctctgacacttgtgatttcatgttatatacagttggagggtcatatacaattttaggccaatgcttacatatcatcactccttttaaacattaaactcctcttgagaagaaggctttgcagctttgtgtattctcaatggtatctagacagtcttttgcatgtggtagattctcaacatgtacattggaaattgaatttcactgagagctctccagagcactcaggcttcacatagcataatcccagacatttagaagatatttgatgattgatagatcaaatctgtgatgggtagtataggacaaatggcct

SEQ ID NO: 191664 - DNA, 612 bp, Homo sapiens
taagatattaaaatagaagttactaaatatgtttaaaatatttagtgagaatggcaatgttaaattttgtaagaacttgcccatttctgtaatgaaatcacaaaatcagagagtgaagttctagtcttttataaccgaaactatatttttccccaaagtgtgttgctcaactttcaagcattaggcagatatatctgtatcttaaataatttatttgggtytttttcttgcctatttattttttaacaatgtcttttgatgatttttttaaagaacaaacagaatctctgctgcggaccctctgacacttgtgatttcatgttatatacagttggagggtcatatacaattttaggccaatgcttacatatcatcactccttttaaacattaaactcctcttgagaagaaggctttgcagctttgtgtattctcaatggtatctagacagtcttttgcatgtggtagattctcaacatgtacattggaaattgaatttcactgagagctctccagagcactcaggcttcacatagcataatcccagacatttagaagatatttgatgattgatagatcaaatctgtgatgggtagtataggacaaatggcct

SEQ ID NO: 191665 - DNA, 612 bp, Homo sapiens
taagatattaaaatagaagttactaaatatgtttaaaatatttagtgagaatggcaatgttaaattttgtaagaacttgcccatttctgtaatgaaatcacaaaatcagagagtgaagttctagtcttttataaccgaaactatatttttccccaaagtgtgttgctcaactttcaagcattaggcagatatatctgtatcttaaataatttatttgggtctttttcttgcctatttattttttaacaatgtcttttgatgatttttttaaagaacaaacagaatctctgctgcggaccctctgacacttgtgatttcatgttatatacagttggagggtcatatacaattttaggccaatgcttacatatcatcactccttttaaacattaaactcctcttgagaagaaggctttgcagctttgtgtattctcaatggtatctagacagtcttttgcatgtggtagattctcaacatgtacattggaaattgaatttcactgagagctctccagagcactcaggcttcacawagcataatcccagacatttagaagatatttgatgattgatagatcaaatctgtgatgggtagtataggacaaatggcct

SEQ ID NO: 191666 - DNA, 566 bp, Homo sapiens
ggggtagaggttagtgacgacagtttccatggcagaaagaaggaggacgtaactgtagcactagaagaattctgaaatgaggatttttgaatatcctgagagttcaggcaaatgatgaggcaggatgcctcttacctgtggcattcagataatatgttaaccacgtcattatgcttatttttacaaacaagaaaataggctcatgaggtcaaaaaacattcctactggttaaggtcttggatggcacagtctgagcaggatttaatatctcccctcctctagtccaagtcctaccctctttatttcagttaacaggaggtttccattgtagtgaccagaatgaagagacatggttttatagtacaatacagtaggaggccaatgtgtatggggtagtggagggtggyggtattttctattccctgtatgagtggaagaaactctgcttccctgtgacctgagatcctctttctcaataggaaaggggaggtgaacgaatgcacagccttcaggagaggtgccaaaagggcttcccacaagagcctccggcacaaaggcagtagcat

SEQ ID NO: 191667 - DNA, 436 bp, Homo sapiens
cctggcctccttctccctctgcctggcaagaaagtggtcagaagcctggtggcccgggagagcctcggctgtcatgctgacgtgactgtctttgcaggacaccttgtatgacycttagagaaaggagcagtgcttctgcggaaaggttgtaacctgtaggggagttactttggaacactttggttttttctacactcttagccagttgttctttttctcttatttttacattttttattaagtttttcagaggccaactagggtgtagttttgatatttttcccagcatggtgtaatggattgaatttagttcatgtagcatacaagaattatccttttgctaaaaataacatgtcaatacacaatggagacattcttgagagtttttagctgaaagataatattctttacatacgtctccaaagcattcagtaca

SEQ ID NO: 191668 - DNA, 404 bp, Homo sapiens
agtggtcagaagcctggtggcccgggagagcctcggctgtcatgctgacgtgactgtctttgcaggacaccttgtatgactcttagagaaaggagcagtgcttctgcggaaaggttgtaacctgtaggggagttactttggaacactttggttttttctacactcttagccagttgttctttttctcttatttttacattttktattaagtttttcagaggccaactagggtgtagttttgatatttttcccagcatggtgtaatggattgaatttagttcatgtagcatacaagaattatccttttgctaaaaataacatgtcaatacacaatggagacattcttgagagtttttagctgaaagataatattctttacatacgtctccaaagcattcagtaca

SEQ ID NO: 191669 - DNA, 404 bp, Homo sapiens
agtggtcagaagcctggtggcccgggagagcctcggctgtcatgctgacgtgactgtctttgcaggacaccttgtatgactcttagagaaaggagcagtgcttctgcggaaaggttgtaacctgtaggggagttactttggaacactttggttttttctacactcttagccagttgttctttttctcttatttttacattttttattaagtttttcagaggccaactagggtgtagttttgatatttttcccagcatggtgtaatggattgaatttagttcatgtagcatacaagaattatccttttgctaaaaataacatgtcaatacacaatggagacattcttgagagtttttagctgaaagataatattctttrcatacgtctccaaagcattcagtaca

SEQ ID NO: 191670 - DNA, 598 bp, Homo sapiens
ttttcctttgcgatttaaactttattttaaactttattccaggctcccaacttgaacttgctatctactgctgggaacaagatgtctgggcatgtatggaggatcagaatgatggatgagccacgatctgttgggaaagtggctccacagtgtctggggacgacgtgtcccccagcaaaccagcctgttaagaacttggtccaggaacaccactgtcatgccatcagggtaagggctttgacgtccaggtgctaggtagagccaggactgcaagttgaaaggctttcactcaaggtctccttcaggattgggagcacaaggcaaccttgctctatgaccaacagaaaagagaaacccaaaggctgcagggaagcccacccyggcagctacagagcacttgcacctgaagtctgtgagtagaatttcggaggtctgcaaacttagatgggaaaaattatattcatatttttactaattgcagccttaaatttgcatttcattctattgtgacatgggaaacaaatctcagtattatatgcagtatctatttatctatctatctatctatcacctatcatgtatctatccatctctatct

SEQ ID NO: 191671 - DNA, 481 bp, Homo sapiens
cctacctctacttcataaaatgcacttgtcacctgtgggttcaaccctcagtgctaatgaaaatccagtgcaaatgaagcaaacaagctatggtaaaggcgataggatcaaattggtttcttttttatatttttctaagcttctatacagattactttgagttaaaatggtagagttaacagaaatgctgaaaatttcctctccccaattgtttgtgcaatcttcagaaactgtcagaggaaaataaatttttagcaactgcagtaaaaatgcagaaaacaaaaatgcttcaaattatcagaaattgcacaatctagtttcccactgcagattaagaacgaggccgtcagtaagcagaaaatcattacttcttgcarttcacctaaggaattgaagtttctcccacatcttatctaccccggagcattttcaactttcatctccatttgcagcaaatctctgcttgcagtgagcagaattc

SEQ ID NO: 191672 - DNA, 469 bp, Homo sapiens
gttggaaagcaaggccttgactgatagactcaatcaaggattcacctgggcgatggtgaagagtagacatcaacacttccaggtacaactgggagattatttccaccaccgaggaagactgttcctattagataaggcagtttcagggactggctggtgtgccgtggagagcatatgaatgctgtcgggggttataccaaaacactcccggaatggccaagacgagaagcagagagacagaaaacgtaaaagaaacaackaagaggccaggctttacaattaaaatacttatgtcagaggcttgggtccatcccatcagtgtttagagatgtctaggagcatagaaacaagcagatttcaggccatttcctagaaggcaagttttaaaaatgtatatatgtatataacagaactagaaacccagaaagaggaggctttagatgagaaatgtgagctaagctgagactta

SEQ ID NO: 191673 - DNA, 348 bp, Homo sapiens
gaaaagaagttgcaggagaaacatcaagagtgaaagaggggaatgatggcagccaggaggcgagcagggccacacaggcagcccctccttcagcccaggagacacctgtgccagaccccatgctttgaagggcccttaccctctgatggtgcaatgctgggaggtagatggttaggggaagtggggaaagatccctgagmccataaccatgcaaaaaaaaaaaaaaaaaaaaaaaggctttttcccacatcaattgacttaaaatcaagcccagcctcggaatcatccctaacgatttgattgcattaagcatgtgtgaaattgcactgtggagtgctacaggaattc

SEQ ID NO: 191674 - DNA, 570 bp, Homo sapiens
atattcccaaactatggcctcaagtaccttattatccctttctgggcttctaatgcataaagggaaggtatattatctattaaattagaaattactaattargttcacacaaaaagtttgaaattaggaaatgtcgttagcaagagaatctggtaaaacaattaattatatctacttattaatcctttgactaaaggcattttaatacatggagtctacagaatgctagctagtgatttatttattcttttttattaataacacttttttgagatataattcaaataccataaaattcactcttttaaagtggacaattgaatggttttcaatatattcacaaggttctgtagccatcatcataatcgattacagaacatttacatcaccctgcaccctataacagtcatcactgatttaatccaatcccatccccagccctgaggaagcaataatccactctgtctccatagatttgtctattctggatgtttcatgtaaatgaaatcatacagtatgtggtcttctttcacctggcatgactggcttctttcgcctagcatgttcacc

SEQ ID NO: 191675 - DNA, 570 bp, Homo sapiens
atattcccaaactatggcctcaagtaccttattatccctttctgggcttctaatgcataaagggaaggtatattatctattaaattagaaattactaattaagttcacacaaaaagtttgaaattaggaaatgtcgttagcaagagaatctggtaaaacaattaattatatctacttattaatcctttgactaaaggcattttaatacatggagtctacagaatgctagctagtgatttatttattcttttttattaataacacttttttgagatataattcaaataccataaaattcactcttttaaagtggacaattgaatggttttcaatatattcacaaggttctgtagccatcatcataatcgattacagaacatttacatcaccctgcaccctataacagtcatyactgatttaatccaatcccatccccagccctgaggaagcaataatccactctgtctccatagatttgtctattctggatgtttcatgtaaatgaaatcatacagtatgtggtcttctttcacctggcatgactggcttctttcgcctagcatgttcacc

SEQ ID NO: 191676 - DNA, 570 bp, Homo sapiens
atattcccaaactatggcctcaagtaccttattatccctttctgggcttctaatgcataaagggaaggtatattatctattaaattagaaattactaattaagttcacacaaaaagtttgaaattaggaaatgtcgttagcaagagaatctggtaaaacaattaattatatctacttattaatcctttgactaaaggcattttaatacatggagtctacagaatgctagctagtgatttatttattcttttttattaataacacttttttgagatataattcaaataccataaaattcactcttttaaagtggacaattgaatggttttcaatatattcacaaggttctgtagccatcatcataatcgattacagaacatttacatcaccctgcaccctataacagtcatcactgatttaatccaatcccatccccagccctgaggaagcaataatccactctgtctccatagatttgtctattctggatgtttcatgtaaatgaaatmatacagtatgtggtcttctttcacctggcatgactggcttctttcgcctagcatgttcacc

SEQ ID NO: 191677 - DNA, 392 bp, Homo sapiens
tcaacctggtgcactcatgctaaacacctattcatgtgcttatttgtcttttctacatgtccttatacgttttgtttgttcaaatcttctgctttcattaattttttttctggggaaaaaggatgttttattattgattcatagagattatttttatattctcaatamaagctttttgtcatatacatgaatatgttgagattttaaaaatatatacatacatatacatataaaatctcaaataatatgtttgagtcagtgtcttgcctatttatttttcacaaggtcttttgatgaaaagaagattttaattttgcttaagcccaatttattatttccttgaatatggttagtatgttttatactatatatgttacattatgaagatattt

SEQ ID NO: 191678 - DNA, 392 bp, Homo sapiens
tcaacctggtgcactcatgctaaacacctattcatgtgcttatttgtcttttctacatgtccttatacgttttgtttgttcaaatcttctgctttcattaattttttttctggggaaaaaggatgttttattattgattcatagagattatttttatattctcaatacaagctttttgtcatatacatgaatatgttgagattttaaaaatatatacatacatatacatataaaatctcaaataatatgtttgagtcagtgtcttgcctatttatttttmacaaggtcttttgatgaaaagaagattttaattttgcttaagcccaatttattatttccttgaatatggttagtatgttttatactatatatgttacattatgaagatattt

SEQ ID NO: 191679 - DNA, 491 bp, Homo sapiens
tgggaggaaactgactcttgggggtgggtctttcccatgctgttctcatgatagtgagtaagtcatacaagatctgatggttttaaaaatgggaggttccctgcacaagctccctctttgcctgccaccatccacataagatgtgacttgctcctccttgccttctgccatgattgtgaggcctcccagccagttggaactttaagtccattaaagctctttctttkgtaaattgtccagtctcagatatgtctttatcagcagtgggaaaacagactaatacaaatggcttaatggtaaatataaggggttttcaaaaaagttcatagaaaatgtatcctttaaaaaccgtgcatagatttcaaaagttttttgcatcgaagtcaacttgtactaagctactgcaagatgtctgaacaaactctagtttgaatcactcaaaaggataagacatcattttgaaaagagcacctaacagagcaaaatgaatt

SEQ ID NO: 191680 - DNA, 588 bp, Homo sapiens
tcacttaactgtaaattttcttgcttctcttgtttcagagattttctggtgctaattacacctacgcttacatccaaatatttcattgtgatgcagattatacttgtaagtgcatgaattattctttgaaggcaaaaggaattaataatgtttcaccattcactgtgacatgtttccaagcatgtaagtgacaggtgcacttttaaataatgtactttttcttctccttgacaagcaagaacccagatttaaagagatagaagatgtgaaggattgtcttgtggatctactgatgtcatgcttgggtttccatctccatcagcaaatgaaygaataagtaatgtatacaggtcccagtacctgctcagattagattgtatcagcagccttacactctgaaataccattaggacaaatccccaggcactcagggatagaaagagagagctgggttggtcatcagtaggaatggaggaaagctttttgtaaatcacaaggtgatttataaaggtcaattattagtattaattattctactatcaactttatgttcagtgctcctggctctacctacatctccttctgaat

SEQ ID NO: 191681 - DNA, 564 bp, Homo sapiens
ataacatataaaaggaaatggggattttatacatcatcatcaccctcatgaagtcaaggaaatgaatgcctaaagactagttgttgaatttcagaagattcatgtgtgtaaaacaagtggacctactgccccaattcaccagatttcattttagttctattaggatcatgaggtatttgagaaaagaagaaaaagaaaaaaaaaaaactcacaatttggtatgggcaatacaaaaagttctctctcacatgtattaatacatccactttaatggcaaaaacagactttaattttggaaaggaatatagctgagctctagattagaagcccataaactatggaccaaatctctcttctgcctgtctctgttagtaaagtttcattacaacacagccatgcccattcatttacatattgcctatgcttcttttaggataacaacagtggagctgaataggtgrgaaaaagaccacgctggccacaatgccaaaaaatagttatatttggccctttatagaaaatgtttgctgactcttgctctacagccaaactccttgatattaa

SEQ ID NO: 191682 - DNA, 549 bp, Homo sapiens
ggtgttaaggacttggtgagatgtcagtgtctcagcaaagtgtcccaggcttcactagaggaatcagtatctgaatcaagacaccaacgtagcagttcagaaccaaagctccacaaaccaatgatttttgttttgttttgttttgtttttgtttttgttttttaaagtggtgatatggttttgttgtgtccccgcccaaatctcaccttgaattataataatccccatatgtcatgggatgggcccagtgggaggtaattgaataatgagggccaggtctttcccatgctgttctcatgatagtgagtaaatctcatgagatctkatggttttataaagaggcgttcccctgcacacactgttttgcctgttgccatgtaagacatccctttgctcttcctttgactgccgccataattatggggcttccccagccatgtggaactgtgattccattaaacctctttcctttataatttacccggtcttgggtatgtctgtattagcagcatgggaacaaactaacccaagtgccaaaaccatacaggt

SEQ ID NO: 191683 - DNA, 657 bp, Homo sapiens
ttctctgtgactctgcacactcaaaaacctacatgcagtagaagcaagacaacagctggtagaggtgtcttcttcatctcccctccctcatggcctcagatcttgtccctcagtctgccctgaatgcagaaaagccactctccatcgctccttattattcatttatgtattaattcagtcattcattattgagcattttctaaatgccaggcactgggttgggtaatgggaaaaaaaacactcacacatttgtgtgtcactacacacattttatagggcaaagaccattgctgttttttytactacattttatcttatgcctggcccagtgcccacctcataggaggcatttgttagcatttgtgcaataaattaacaaatacatttaacactgggaaaaaaatcttccatatatattactttattgtttatttcaagaatcctctgaggtatttattattattctaaccttgtgttggaggacaggcctatgctccctcaataattgcagctatcagaattgttttccttgaggctaaaaggtagctgtgtgtgtagtgagagagaggggagcggaaagagaatatgttgactcacatccttcagtaaatctgtttattccaactctggcattgctgccaaatgtgttgcaaagcc

SEQ ID NO: 191684 - DNA, 494 bp, Homo sapiens
caaaaccaaattattagtgcagaaccaccaaatatgccaagcccaggtgtctgtactttaagcaatatatccaaataggcccaaggagaaatttgggggtgggttagaggaagtgttggaacctttggttaacaaaacactaagctacaaagcgccaatgttttcctgaaagcaaatgccaccaaatgaaattcagtcaatatatcttccacatgacaaagctactaccaacattttccttctgtaaagtgtttagactacagacttttactagccttttccagcctggtgtttctcaataatgaagccaactctatcaatgcttcaagtatcaatgtctggtaactctgtaaggattagcacccacttagtggtcaggaaaattcattccaagatgctaaagaggtgctttgtttttaatwtttttaatttaagatttagtagattctatgatcacagggttatgttcctttcaatagagctcagtcatgagt

SEQ ID NO: 191685 - DNA, 488 bp, Homo sapiens
cgggcatgtataatggtgctgggaaagctgaatactgtgattgggttgtgggctgtgagctagtcagggaagaaggctttataagacagaaatgtacactgaagtgacctaataaaattggcaatgtaactctgatctgagagtaatcacatctggtaaccagtgacaagttagcctcaatgttattcctttctaccagctcttcagataactatttataaacattgtaacttattttggaaaaattccctgcaaacgcatggactaaaatgatgaggggaattgccacagttctgaaaccaatgtggagatggtaggagaagcggaaacaaaccttggtggtacctcaaatcatggagtagaatggacagcgacacaaagggcakacctgtggcagaacagaggtgggggatggtgaagacactggtgataacagggattatgaacagatgaatcaaccccgaagggactccccaagagttagtagg

SEQ ID NO: 191686 - DNA, 574 bp, Homo sapiens
tgttaacatctttaggaggtcattattctacctatcacaagcagattgatttgggtcacatgaagagtgccaagtgtagatcaatggagcttctcataaagtaattgaaaaaaaaaagctrccactttttaatctatacagtaatgtaccttacatttttcaatagtgagttcatgtgagttatttgaggaattggtatgagaccttgttctctataaatgagtctatcaagaggaaatgttaaggtatttgagtggatacagttcatttctctggacaaagaatgtgaggatgctgaaatgacacataccactaggagaatagattatttacctctctttgatatcggaatagataatagtttaattaccaccagtgctcattatattttcaaaataggctttcttctcacccatactataatttgtgtccaacgtcaaagaattaaaatgctataccttatttactatttatattttggcagatggataaagaatttgatgaaatagttcacattaagattgtggcacttgggctaaggctttgggcatcattttgaaagttagtgaaactc

SEQ ID NO: 191687 - DNA, 590 bp, Homo sapiens
accggcctacaatgaaagtgagcgagtgagtgacagagagagagagagaggtgattcaactccccccycttttttttttttttttgagacagagtctccgtctgttgcccaggctgtagtgcagtggcgagatcttggctcactgtaacctctgcctcccaggttcaagcgattgtccttccctttttcttgactgccttcttatccttgacctttctatgtgtgtatgaaccacaaaatctccttttgcctaaacttaccggagtctagttctgtcatttgcaagtccaaactgtcataaacagcatcaaaatggaatcttttgcaattcttagcaaagattcttccaattgctcatttataaagcacttctgtagttttttattaatcttccatttctttgtctgaagttaatagctgtctttatctgaaggaggatgtcccaaatgatttatttcatatctagaagtagccactttttttttagtgcttgatctaaacctgctaaacacatcttcctaactgtttccatgtaggcagtcatattcagtggtcactaagacagactcttattaaaattacctaggata

SEQ ID NO: 191688 - DNA, 526 bp, Homo sapiens
tacctattgaaacaaacactttggacatgtggcttgattcctactatttcccagttgcagaaaatcctacattgttgcactttgattctgaagtgtattcatggatttttctctattcagtactttgtactgatattcagtgtaggataatgcaacaagaagtgtttattcccaaactacacaccagtggtactgtagggtggattcttgcaacctgaattttaaatgtcccagattgttgacaagcactagattacagatttttcaaatttataatggcttattgagatcctaggtgaaacatatcctaaactgctgactaatgaaaggctcactaacttgaaaaacagaaaaatagaaaaaggcatgaaaagtaaaacatgtacttgcytgattgagaagccatgagtctgtgcacagaaggacctaccatcaaaccaggattttcacgagaaataattttcagatatgcttcagcacttggctgaaactgtagttttatggattctttttgcatctgtcttga

SEQ ID NO: 191689 - DNA, 430 bp, Homo sapiens
tgataaaatgcaatagaattcatggtgttgttaaaagataaayggagatacattaaaattttaaggagtatatttcagcaggtaacatattgtgaattaggcagaccaaagagagttttggggctctgccaaagggcataaggggaagcttttatagggtcaactcagaagcaaggcaaagaaaatatttgcatggttaaagtggagcagtagctttatttggatcattccagggcaaagtccctagttagagactggttggcagtttcttattggttaagcttaagttttgtttttctatttacactgagttgggttttggctgacttacatagggaacactgtgtcttgagtcttaggagagtttgttacgcagcaatagatagtgagacagaggtcataatcttaaaaaaacgacttaagagagatt

SEQ ID NO: 191690 - DNA, 620 bp, Homo sapiens
gtaaataggactagcctggtttttagaggtgagggggcaaaggttcaacaaattgaaaccaagatttcacaggtaataaaaggacatctagactcaagctaaagttttctgacaccaaatattactctccttttataccacctttcaatttctgcgctaagcaccttgttcatttagcacgtcatgttatatccttacctacatccaacatggttttgaggtactgaacggcatacrtaaaacattttcatcagaagggaagtgaggctggagtttggggagtgaggagcagaaagagagaatgaaagtaaatataccaaaacccaggctaaaatgattaatttagtattgaattcgtgtgtgcttcctgacacaggtgagacaggacaggatatatggttttattatctgataaagggaatcttaccagagtgtcaggagagacaaatgttttccttggaccttaattattaatataaaatggatagatcatataaattcttattcaggaaactggtatagttacaaatatatttccatttgccatgacagagtgctgtttggttgattacttgctttttaaattgagattaacatataaaatgcacaaatcttaattg

SEQ ID NO: 191691 - DNA, 602 bp, Homo sapiens
tgcaatgcttagcttggctcacatcaccagcatgatatgctaagacacctttatagatctcacttcctgcctcccctcgcatgcaccctgtacagtcataaagcatcttccctccttggttccttcttcattcattaatcttctattcattaagtgaccattaattgaccattagctaatatgtgccaggaactttactaagtcctggggatataaggataaatatcctcaagaaaatgatgagtggctataatatccagagtcacaattcattacacaatattttgaaatatgctattacaaacattgtatctattaaaacagaggccagaagagggtatggctttgtctaaaggaggtgaactttgagctagaattaagaacaagtaaaaatttgtcaaatgcatagagcagtcggaaaaatggaaaacagtgttctgtaaatgttgacatgagaattgagcagtttctgatatgcaactgttttttttttcttgttaacactttttgctttgctctccccaaatcctgaagcctcttcttccagtctcctgttttctgtttccttccacctcttcrctgactttccagattaaactctg

SEQ ID NO: 191692 - DNA, 576 bp, Homo sapiens
atcccatgcatcctctggcatcatgatcacagaagttttatctgcaacaggtgtatgaggagcttatataactgtgcatgctcataccctcctaatctcatccgcatgactattctgcaaacacaaagcataaaataccccagactagacaccggcatgagtccarctgaaaaaattgacagatcagcatggtctctgtataagcatgtgataaaatctctacagtcatgttttccaactgaatgctagctctccctcccctggatccccataacctttcttccattctctgataatagcttttcatttgctttctctgcctgttaaactgtaagttcctgtgggtagggagcaggtatgatcacgtgccttacttaactcagacagcaggataaaatgagtcctctggagtctcacagacctatcctggaaggccaactttactaactgtagggctttgggcccttaacctctctgagcctcaattccaataggaaaacagttattgtaagtatccaatgacatttatgcaaatggcttagccaatgcttgcccctagcaattgatgtgataaat

SEQ ID NO: 191693 - DNA, 377 bp, Homo sapiens
tggaagggtaaacagggaaccttttagatgccaagaccttttagaataacgacccttcagaggaaactgaagtgcaaaggattgaagtaaccttccagaaggtacacagctggtgagacaaagcctgtactgggtcccaagcctgcctgactccggactcccacaccccacagtgataccagaatcaccctgaaaatgggaaacaygctgcagctgctgtcctgattccagcctctgaccaggagagctggattgaccaggaagccaatgaagctaagtttcagggccccctgtctgcctaaggcctctcccaaggccctgcaccaaagtttctatttgtgactttgttttcttagaaaaaactcctcaattatgtg

SEQ ID NO: 191694 - DNA, 533 bp, Homo sapiens
cctgcgcaatttgcttaacttcccagtacttcagtttcactgttccccctttcatttcagtttggttatatttcacttataaaaaattgatactcctgttgttgattcctttccttggtgttttctttgattgcttgaaagctgagaaaatcactgttccttactttctattgtttgttttgaacgacaaagtgatagataagtgagaaattggtgtttggagttgggaaatatgacaagctggttttcccagccatgtcatggggccttggctggcaggttttcctgtagtgctgggaacattcttagaatattctgagtgaccgaattccacaaaatgtctgaaaattcatcagcagacatgcacaccagctaatgataaatgattcattcctcaaatatttattaataatctgttatatgatacaaggtcctgggcttgtcatggattcgggggcaattctgacataggttctgtgctctaggattgggtagtmgggaggaaggtggggcgctggggacaccttgtttgc

SEQ ID NO: 191695 - DNA, 533 bp, Homo sapiens
tgctaacaccttgattttagcccagtaaaattcattttgaacttctaacctgcagaaccataagataataaatgtttgtcattttaaactacttatgtttgtggtgatttgttacagcataataggaaacaattacaggggctaccccaactgacaagtgcatcaaccccaactaygcactctagaactgggaaaatgaccaccagttgtatcaattgacccagtggaccaactgtaagctagatgttagccaggactctactgactacgtggtacttgtaagccctcactctgacaaggaggtcatgatgaagctttgggtcttttggtgtcaatgtcaacttaaatcctctgtccagtaatacctgaaacacctgggcattcccccttccccagtgtgtagtcactagggtattgctcgtaggtcctttgatgaaggactgagagattcattgcagtatatacttcctgtggtgttgcagggtcctttctctaggacacctggccaactcctcagtcaatgggttttggat

SEQ ID NO: 191696 - DNA, 410 bp, Homo sapiens
caatgttagacaccgcacaacaagccacggacctgacccaccctcaagcttccytgagaaacccacctctcgtcctcagcagctcattcttggaggctgcatctgctcttctgtcctctttgtacacgtcctgccgataagtctctctgaatgttcccctcaggcgactgagtgacaataacgaaacaaccgtcgtcgcaagcaacgctgactaagggccatgcagcaggccctttacacacagtgtctcatttagtcttcaccaggaccctactattatctcctactttacagatgagaaaacggacacccagtgacgtgggccccccgcccctaccaaagtcccctagcagagccaggactcagaagcaggtctgcctgaccccaaagcatgtgctcttgacctttca

SEQ ID NO: 191697 - DNA, 425 bp, Homo sapiens
cagcatgccaatgttagacaccgcacaacaagccacggacctgacccaccctcaagcttccctgagaaacccacctctcgtcctcagcagctcattcttggaggctgyatctgctcttctgtcctctttgtacacgtcctgccgataagtctctctgaatgttcccctcaggcgactgagtgacaataacgaaacaaccgtcgtcgcaagcaacgctgactaagggccatgcagcaggccctttacacacagtgtctcatttagtcttcaccaggaccctactattatctcctactttacagatgagaaaacggacacccagtgacgtgggccccccgcccctaccaaagtcccctagcagagccaggactcagaagcaggtctgcctgaccccaaagcatgtgctcttgacctttcaactctcc

SEQ ID NO: 191698 - DNA, 425 bp, Homo sapiens
cagcatgccaatgttagacaccgcacaacaagccacggacctgacccaccctcaagcttccctgagaaacccacctctcgtcctcagcagctcattcttggaggctgcatctgctcttctgtcctctttgtacacgtcctgccgataagtctctctgaatgttcccctcaggcgactgagtgacaataacgaaacaaccgtcgtcgcaagcaacgctgactaagggccatgcagcaggccctttacacacagtgtctcatttagtcttcaccaggaccctactattatctcctactttacagatgagaaaacggacacccagtgacgtgggccccccgcccctaccaaagtcccctagcagagccaggactcagmagcaggtctgcctgaccccaaagcatgtgctcttgacctttcaactctcc

SEQ ID NO: 191699 - DNA, 421 bp, Homo sapiens
gccaatgttagacaccgcacaacaagccacggacctgacccaccctcaagcttccctgagaaacccacctctcgtcctcagcagctcattcttggaggctgcatctgctcttctgtcctctttgtacacgtcctgccgataagtctctctgaatgttcccctcaggcgactgagtgacaataacgaaacaaccgtcgtcgcaagcaacgctgactaagggccatgcagcaggccctttacacacagtgtctcatttagtcttcaccaggaccctactattatctcctactttacagatgagaaaacggacacccagtgacgtgggccccccgcccctaccaaagtcccctagcagagccaggactcagaagcaggtctgcctgaccccaaagcatgtgcycttgacctttcaactctcctg

SEQ ID NO: 191700 - DNA, 628 bp, Homo sapiens
attgcaaactctctgccgctactctccacctccagggtagccctgccctacaggagcagtcacagggctgtaacgctgcctcttcaataaagctgttttcttctatacctccagcttgcccttgaattctttcctgggcaaaggcaagaaccctcatgtgctattgagaggtgacagcgttctggcagccctggagctcactctcagtgtctcctctgcctgggcttccaatttggcagcacttgaggagcccttcagcccaccgctgtactgtgggagccccttcctgggatggccgaggctggagccggctccctcagcttgcggggaggtgtagagggagaggcacgggcgggaaccggggctgggcgtggcgctkgcgggccagcgcgagtgccgggtgggcatgggctcggcaggccccacactcggagcggccagccagttccgccggccctgggcagtgaggggcttagcacctgggccagcagctgctgtgctcaatttctcaccgggccttagctgcctctccacagggcagggcttgggacatgcagcccaccatgcctgagcctccccaccacccactgtgggatcctgcaaggcctgagcctccccagtgagcacc

SEQ ID NO: 191701 - DNA, 628 bp, Homo sapiens
attgcaaactctctgccgctactctccacctccagggtagccctgccctacaggagcagtcacagggctgtaacgctgcctcttcaataaagctgttttcttctatacctccagcttgcccttgaattctttcctgggcaaaggcaagaaccctcatgtgctattgagaggtgacagcgttctggcagccctggagctcactctcagtgtctcctctgcctgggcttccaatttggcagcacttgaggagcccttcagcccaccgctgtactgtgggagccccttcctgggatggccgaggctggagccggctccctcagcttgcggggaggtgtagagggagaggcacgggcgggaaccggggctgggcgtggcgcttgcgggccagcgcgagtgccgggtgggcatgggctcggcaggccccacactcggagcggccagccagtyccgccggccctgggcagtgaggggcttagcacctgggccagcagctgctgtgctcaatttctcaccgggccttagctgcctctccacagggcagggcttgggacatgcagcccaccatgcctgagcctccccaccacccactgtgggatcctgcaaggcctgagcctccccagtgagcacc

SEQ ID NO: 191702 - DNA, 585 bp, Homo sapiens
atccaaatgtgaccttctaagggagtcttatctgactcttttaagttgaacaccaatatcccttccaactcctcccttgctttacaatcattacatactatgtatttttaaatttttgttttattgatttctctatattttttccctggagtgcatgggattctgtttgttttagtcactgatgtatttcgggagcctagaacagaattgtgcacataatgggcaccataaatatttgtttactgaattaaattctcctttttttctctccttccaccttgcttccctttccttccttcttctaagaggcccttctgaaaaatgatacttcagtgtccattgagatttgcatgttcagtatcttagggaccaaagttctatttggccaggtgacgaccggtctggcaccagagagtgggaatcctgacggtcttctctaccatctcagccttatactaagtatcaactgtctcatactagctatgagctcagaaaatcagttctccctatcctgtgtgkcttatactgtggctcacttcccccagatcttaagtgtgccatttcataggaggaaacgagagtgac

SEQ ID NO: 191703 - DNA, 580 bp, Homo sapiens
tcttttgtctgttttttaaggctcacctgatgatgattaggtcagatccacccttttgactaactcagagtcaactgattarggaccttaattatatctgaaagttctcttttgccacataatattaattacaggggtgatatctcctcatattcacaggtctcacccacacttacaggggtgatgagattatacagggcacatacaccagggggtggaaatgttggaggccatcttagaatcctgcctaccacaatatgcccctttgtgagagaaaatgatgaggtttgtcatctctcctcagagttggaaccattgagacgacaagcacagctactcattgtggttctggatcccctcctcttcctgctacctctgtgtgtagtcttttttcagaacctaggagagcaacacctcctataaccactcagttatgagaaacaaaccacaaaattccacataaatgaaaatgtctacctaatcaaagtctacttctttaaggacttgagtgattgaggggaaaaaaggagaattttaccactgggaggtggggtgagttgtgtggacaaggttcctccct

SEQ ID NO: 191704 - DNA, 580 bp, Homo sapiens
tcttttgtctgttttttaaggctcacctgatgatgattaggtcagatccacccttttgactaactcagagtcaactgattagggaccttaattatatctgaaagttctcttttgccacataatattaattacaggggtgatatctcctcatattcacaggtctcacccacacttacaggggtgatgagattatacagggcacatacaccaggkggtggaaatgttggaggccatcttagaatcctgcctaccacaatatgcccctttgtgagagaaaatgatgaggtttgtcatctctcctcagagttggaaccattgagacgacaagcacagctactcattgtggttctggatcccctcctcttcctgctacctctgtgtgtagtcttttttcagaacctaggagagcaacacctcctataaccactcagttatgagaaacaaaccacaaaattccacataaatgaaaatgtctacctaatcaaagtctacttctttaaggacttgagtgattgaggggaaaaaaggagaattttaccactgggaggtggggtgagttgtgtggacaaggttcctccct

SEQ ID NO: 191705 - DNA, 580 bp, Homo sapiens
tcttttgtctgttttttaaggctcacctgatgatgattaggtcagatccacccttttgactaactcagagtcaactgattagggaccttaattatatctgaaagttctcttttgccacataatattaattacaggggtgatatctcctcatattcacaggtctcacccacacttacaggggtgatgagattatacagggcacatacaccagggggtggaaatgttggaggccatcttagaatcctgcctaccacaatatgcccctttgtgagagaaaatgatgaggtttgtcatctctcctcagagttggaaccattgagacgacaagcacagctactcattgtggttctggatcccstcctcttcctgctacctctgtgtgtagtcttttttcagaacctaggagagcaacacctcctataaccactcagttatgagaaacaaaccacaaaattccacataaatgaaaatgtctacctaatcaaagtctacttctttaaggacttgagtgattgaggggaaaaaaggagaattttaccactgggaggtggggtgagttgtgtggacaaggttcctccct

SEQ ID NO: 191706 - DNA, 580 bp, Homo sapiens
caggccatgaaaggggactgctttcaataatgagaactgagcatgtagaggccagtcccaccactgttatttgcataggaagtcataatatcaggttacatacattctttttaacctgtcttcataggtctcaatgatgagcttcaggtggtaaaagaagcccctgaaatagaatggtaaatgcacgtctaacttttgggggaaagatggtccactgccttttatcagaatttaaagggatctataatcccaacaaatctaagagctattaaaaaagaaaatctttgaagttttctctagttttatgcttctcaattttatgctgtttatgtcaagataaaactaatggataatttctraaaaaggatgattagaaattataaataatagtgatataaataggtcatagtttttgagtatttacaatatgccaggcacttttctttataaaccttatcttatttagtgcacaaaacaatcttataaagtaggtatttttattgttggttacttcaggaaacagggacagatgattttccaatgagcaaacaactgggaggtggcagaacctgtcataaaa

SEQ ID NO: 191707 - DNA, 540 bp, Homo sapiens
gatagggattgatctggctgtagggatgtaccccaaagtgcatagaactgtgcctggtacacataataaaggagggaaggaagggagggagggagggagaccatcacatatatggaaaagagtctaaagtgacagagtggtgtttaattaatcagagttccaaattgatcaccagttgttactgttgttgttgtcttccaaattccagctctattatttattgaatgcatgaatgtggactttttttgtaagttcaagggtacatgtgcaggtttgttatataggaaggctcctgtcactggggttttttaggcggattgtttmgtcacccagatattaagctgtaaccgttagttatttttcctgatcctctccctcttcccaccctccaccttccagtaggtgccagtgtgtgttgttcccctctatgcattcatgtgttctcatcatttagtccccacctgtaagtgagaacatgaggcatttggttttctgttcctgctttagtttgataaagataatggcctccagttccatcca

SEQ ID NO: 191708 - DNA, 540 bp, Homo sapiens
gatagggattgatctggctgtagggatgtaccccaaagtgcatagaactgtgcctggtacacataataaaggagggaaggaagggagggagggagggagaccatcacatatatggaaaagagtctaaagtgacagagtggtgtttaattaatcagagttccaaattgatcaccagttgttactgttgttgttgtcttccaaattccagctctattatttattgaatgcatgaatgtggactttttttgtaagttcaagggtacatgtgcaggtttgttatataggaaggctcctgtcactggggttttttaggcggattgtttcgtcacccagatattaagctgtaaccrttagttatttttcctgatcctctccctcttcccaccctccaccttccagtaggtgccagtgtgtgttgttcccctctatgcattcatgtgttctcatcatttagtccccacctgtaagtgagaacatgaggcatttggttttctgttcctgctttagtttgataaagataatggcctccagttccatcca

SEQ ID NO: 191709 - DNA, 459 bp, Homo sapiens
ttgatatctgaaagagggactcatgcaatgtctgtctagcaagaaaaagtgttctttcattataaacgttaacttggacatggcttgcaaggacaaaagagaggtatcaaattatgtaagatgagagaaagaaaggcaagacaaaacaaagcatcaccaaaaaaagtgcaaaataaaaataaagagaaggactcatgatttccaacagagaatatgatccattacggtcaaatcarttgtttacagtatatcacagaattctaattaattagttaagcatttcatattttaaaaacaaatatcgtgtatactttttacaatagctgttaacataaagtagaaatatatcccttgacaaaatctataaggccgtacgttgtctcctttcattctattttcctgtaatctcaccacaacaagttataattatattgaataaatggttaatctccaaataaa

SEQ ID NO: 191710 - DNA, 459 bp, Homo sapiens
ttgatatctgaaagagggactcatgcaatgtctgtctagcaagaaaaagtgttctttcattataaacgttaacttggacatggcttgcaaggacaaaagagaggtatcaaattatgtaagatgagagaaagaaaggcaagacaaaacaaagcatcaccaaaaaaagtgcaaaataaaaataaagagaaggactcatgatttccaacagagaatatgatccattacggtcaaatcaattgtttacagtatatcacagaattctaattaattagttaagcatttcatattttaaaaacaaatatcgtgtatactttttacaatagctgttaacataaagtagaaatatatcccttgacaaaatctataaggccgtacgttgtctcctttcattctattttcctgtaatctcaccacamcaagttataattatattgaataaatggttaatctccaaataaa

SEQ ID NO: 191711 - DNA, 569 bp, Homo sapiens
ttttaaaaatctccttccctaatggttttgctaacttctattgtacctttcctttccgtttttggcaaatctcttgtgtatttcagcactttgtcagcaattgtggtggtacaaccatctcattcacatgtaataaaaatttagttttatataagtcaaactttttacctctcttatcaattcaacctacctttctcccactcctcctactgagaatggttaaagggttattgtctgatctacttttgtccacttgctagactggttctaattcatcccggattggctgggaatgagtattgaagcataaagggaatactggtgctattggattggaatttttcagtaggtattctttctatggcagttcttcacacagtgtgtgtcttctgagatatttttrttggcttttctgagagccctctcttttgagactcctataatgaatctttagcatgagtgatagattttgtggctggatgcctctgaagtctctcagcttctgcattcagatggtgtgacctagagaaactttgtcttctggggttctcctgtctcagcagtcagcc

SEQ ID NO: 191712 - DNA, 484 bp, Homo sapiens
ggacctggcctgagctagagggaaggccgcagccctgaagggtgagtcccaggcctagtaacattcgccataagctgacagaagagcccttgcactttaagtgatcattggcagtcacctgtcagaaatcctgtggactggtggaggagatagtcacagggcagagctcctctgcctgtggaaagaggaaggaagagcgaaaaggacttagtattttgtttgaatgccagctcttagccatggtaaaatagaacaccaagtaaaagctaagatttttttactccagttcctatctcctagacagcatctctgtatatgtacagggcctgggggaactcattaccctgaagcgaagggccttgggcagggaccagtgatgtgctgacttcagatttktcccagcacaatgctagtggtggtggccataggggtgcttgcgttaccacactcccagttccaagtggctcagcacaaagagactctg

SEQ ID NO: 191713 - DNA, 484 bp, Homo sapiens
ggacctggcctgagctagagggaaggccgcagccctgaagggtgagtcccaggcctagtaacattcgccataagctgacagaagagcccttgcactttaagtgatcattggcagtcacctgtcagaaatcctgtggactggtggaggagatagtcacagggcagagctcctctgcctgtggaaagaggaaggaagagcgaaaaggacttagtattttgtttgaatgccagctcttagccatggtaaaatagaacaccaagtaaaagctaagatttttttactccagttcctatctcctagacagcatctctgtatatgtacagggcctgggggaactcattaccctgaagcgaagggccttgggcagggaccagtgatgtgctgacttcagattttwcccagcacaatgctagtggtggtggccataggggtgcttgcgttaccacactcccagttccaagtggctcagcacaaagagactctg

SEQ ID NO: 191714 - DNA, 580 bp, Homo sapiens
aaaacaattctgaaaacttaaaacaacttgaaggtctatactttctgactcaaaacacattgtgaagctaaagtaatcaaggccagaggctgatgcagaagaccacttgaggccaggagtttgagatcaacctagrcaatatagcaagacttcgtctttaaacaaaatttaaaaattaatttaaattacattcctgtagtcatagctacacaggaggttgagggtggagaattgcttgagcccaagagcttgagactctggtgactataatcatgccactgcactccagtctggaaaaaaaagtgaaaccctgtctcctaaaaaaaaaaaaaaaaaaaggaaagtaaagtaaccagtaagtgtagtattgacagatagataaatacaaaggtcaatgaaacaaaatagagattcaggaaataaagtcacacgtgtgggacaatttattttaataaaggtgtaaaggtagttcaataaaaaataagataatttgagcaatacagcaagaaattatggacctccacaagcaaataagttaacctctattttatatcctgcaacatatacaaaatacacaagt

SEQ ID NO: 191715 - DNA, 528 bp, Homo sapiens
atagaattattgctcagtcacacttttagcattcttattggaatatgcttcctcattttttggaatacaaataggctgagaatttttccaartcttctaattctgtttccattttgcttaatgatttatcttttctctttcaatttattctgctcctcttacattttactatcagtagtaagaacaaaccatgctgctccttcaacactttgatttgaaagctcctcagttaaatattcaatttcaatgctcccaacttctaccttccaaaacacactagaacacaattcagtcaagttctttgaccccttttaacaaggattgcttttcctccagttgcaaataatatgtttctcatttccctctaagaccttgccaaaatggcctttgatgtccatatttttgtcaatattttgtttatgctaatctacatattttctaagacaatagaggttttcactatacctttcctgttttctttctgagccctcaccagaatcatctttaacatacatgcttttactgaaa

SEQ ID NO: 191716 - DNA, 528 bp, Homo sapiens
atagaattattgctcagtcacacttttagcattcttattggaatatgcttcctcattttttggaatacaaataggctgagaatttttccaaatcttctaattctgtttccattttgcttaatgatttatcttttctctttcaatttattctgctcctcttacattttactatcagtagtaagaacaaaccatgctgctccttcaacactttgatttgaaagctcctcagttaaatattcaatttcaatgctcccaacttctaccttccaaaacacactagaacacaattcagtcaagttctttgaccccttttaacaaggattgcytttcctccagttgcaaataatatgtttctcatttccctctaagaccttgccaaaatggcctttgatgtccatatttttgtcaatattttgtttatgctaatctacatattttctaagacaatagaggttttcactatacctttcctgttttctttctgagccctcaccagaatcatctttaacatacatgcttttactgaaa

SEQ ID NO: 191717 - DNA, 533 bp, Homo sapiens
ctgtggcttttccaggtgcactgtgaaagctgtcagtggatctaccattctggggtctggaggayggtggccctcttctcacagctccactaggtaatactccagtggggactctgtgtgggggctccaatcccacatttcttctctgtactgccttagtagaggttctccatgagggctccacccctgcagcagatttcttcctggacattcaggcatttccacacatcttctaaaatctaggtggaggttcccaaacctcaattattgtcttctgtgcacccacaggcccaaaaccacatggaagctgccaaggcttggttggggcttgcaccctttgaagcaatggcacaagctgtaccttggccccttttagcaatggctggagctggagtggctgggacacagggcaccatgtcccaaggctgcatagagaagtggggccttgggcctggcctaagaaaccatttttccatcctaggcttccagacctgtaatgggaggggatgtcacgaaagtctctgacatgccct

SEQ ID NO: 191718 - DNA, 609 bp, Homo sapiens
atatactccatgactaactcagcccagtacagagtgacatatataataaggtagatttacttaatccataaattgtgagctttctttgtaaaattttccttaactatcataccatggtgtgtcataagaaattgtcagctcaacacctcaaatgatgccttcatgtattaaaagatgtgccatctgaagctgggatagtgatgcattttgtcccgtgctttgttatgtgrtgtaattagattatctctcaaacacaatttgtttgcttgcttccaggagatattgatcaacaagagatgattccaagtaagaagaatgctgttcttgtggatggggttgtgctgaatggtcctacaacagatgcaaaagctggagaaaaatttgttgaagaggcctgtaggctaataatggaagaggtggttttgaaagctacagatgtcaatgagaaggtaaaaattaaaacctgtaagaaattgcagaaatgggaaagatagatgttccccaaatcagtatggctgaatagaaagcaaatgggaaggccaagtttttatttcttctatgcctttgtctcaaaaggatgtccagatataaaagtgtaggctgtccttc

SEQ ID NO: 191719 - DNA, 584 bp, Homo sapiens
cttcaaacaccatctagcatgggaattgtatgtgaatggtacctttccccatcagacctgaaattgcactgaattaggaggtcatatactccatgactaactcagcccagtacagagtgacatatataataaggtagatttacttaatccataaattgtgagctttctttgtaaaattttccttaactatcataccatggtgtgtcataagaaattgtcagctcaacacctcaaatgatgccttcatgtattaaaagatgtgccatctgaagctgggatagtgatgcattttgtcccgtgctttgttatgtggtgtaattagattatctctcaaacacaatttgtttgcttgcttccaggagatattgatcaacaagagatgattccaagtaasaagaatgctgttcttgtggatggggttgtgctgaatggtcctacaacagatgcaaaagctggagaaaaatttgttgaagaggcctgtaggctaataatggaagaggtggttttgaaagctacagatgtcaatgagaaggtaaaaattaaaacctgtaagaaattgcagaaatgggaaagatagatgttcc

SEQ ID NO: 191720 - DNA, 440 bp, Homo sapiens
cagcctttcattcaacctgaaaatatgtagagactactgcgtattcagtgaataagacatgctccctaccctaagtcaaaggttagtaacattttaagcaaacatatrctattatttagttatgtaatgattaaaaagcaggagttggagaatgtaaataaaatgagaacactgctgaaaaggctggtcaagaaacttgtagcagaggtgacatatcagttaactggtattttctttccatattttaaaagtattatatgatcacactgtcagagtcaagcataattaagaatgcgaaaattagttgtaaaacaccagccaatattaaatcatttaaaattttcttgagatgcatattaatatatatctaggctgataagtatagattaatatattttgcttatataaccagcatcttgctttctttatccacttctacc

SEQ ID NO: 191721 - DNA, 440 bp, Homo sapiens
cagcctttcattcaacctgaaaatatgtagagactactgcgtattcagtgaataagacatgctccctaccctaagtcaaaggttagtaacattttaagcaaacatatgctattatttagttatgtaatkattaaaaagcaggagttggagaatgtaaataaaatgagaacactgctgaaaaggctggtcaagaaacttgtagcagaggtgacatatcagttaactggtattttctttccatattttaaaagtattatatgatcacactgtcagagtcaagcataattaagaatgcgaaaattagttgtaaaacaccagccaatattaaatcatttaaaattttcttgagatgcatattaatatatatctaggctgataagtatagattaatatattttgcttatataaccagcatcttgctttctttatccacttctacc

SEQ ID NO: 191722 - DNA, 578 bp, Homo sapiens
tgtggggcttaatacctgggtggtgggttaagtgcagccaaccgtggtacatgtttacctaggtaacctgcacatcctgcgcatgtaccccaaaacttaaaaaatacaagaaaaaaaattacctgaatatgaggggaaaaaagtgggctgtagccattgatataatatctataaagtcattttgaatgttgggggaaagagaattgtcacacctaagtaaagggcatagatgaaatatggaatatgagtgagaaaagactaaaacaacattgagaacatggtgccctatatratattgactcctctcttctaggcttggcttttgtctgtaccaaaagagaagtctgaaatggctggccttgaaaactagtgattcacgagcctttgaaatattcacaacacttgacccagtacttcaaatctaggactcaaacataaggaaataatagagacgctgacagaaatgtgtttgtcagagcatttattgtgatttttatatataatagcaaaaaatcacaccgaacatcaggaatgcctttgaaaactagattccagtaatagttatgatcctatgatca

SEQ ID NO: 191723 - DNA, 427 bp, Homo sapiens
caccacgcatcttaaatgccacaayaagaatgattagtgatggaatcttccaaggctcctacagatattacaacttaaaacttcattactaatctggcagaataaagtgagaatcagcagatgtgaattctgcttttgatttagttacttggtgtcagagctcaaagcctgtcacttaacatcttgggcttcatttttctcattggcctaatgaaaatgctgttacttgttctacccatcatacataagtattatgaaaatcaaaggaactaatgttaactgggaatactctttagtcttaagccaaaaatcttacccaccactcttcctcttctcgaacattccagtatcccctgacccctcccagctgtcactgcctgttcttcctttggtttactttatttccccaggcaagctacagaacaga

SEQ ID NO: 191724 - DNA, 601 bp, Homo sapiens
aacatcttgggcttcatttttctcattggcctaatgaaaatgctgttacttgttctacccatcatacataagtattatgaaaatcaaaggaactaatgttaactgggaatactctttagtcttaagccaaaaatcttacccaccactcttcctcttctcgaacattccagtatcccctgacccctcccagctgtcactgcctgttcttcctttggtttactttatttccccaggcaagctacagaacagaacatcagctctagacttccccactgtttatgaaatgaacatattacaaccctcacccaccttcctttttaatggaatgtatttgccagttatacagttatagaagtaggctgagttgacgaaaatattacaagaaatcttaaagcaataggaagttatcaatgctctacatccttcaaatggaatggatcctgacttaattaagctcccatacttgatgtcyttggtagatgctgtgggtctttacaagtctcagtgtagtttaaatggaacactctaaaggtatcacataaaataagaatgacccagggtagggatgctaggtggacttgagagctaaggagccatcaaa

SEQ ID NO: 191725 - DNA, 601 bp, Homo sapiens
aacatcttgggcttcatttttctcattggcctaatgaaaatgctgttacttgttctacccatcatacataagtattatgaaaatcaaaggaactaatgttaactgggaatactctttagtcttaagccaaaaatcttacccaccactcttcctcttctcgaacattccagtatcccctgacccctcccagctgtcactgcctgttcttcctttggtttactttatttccccaggcaagctacagaacagaacatcagctctagacttccccactgtttatgaaatgaacatattacaaccctcacccaccttcctttttaatggaatgtatttgccagttatacagttatagaagtaggctgagttgacgaaaatattacaagaaatcttaaagcaataggaagttatcaatgctctacatccttcaaatggaatggatcctgacttaattaagctcccatacttgatgtccttggtagatgctgtgggtctttacaagtctcagtgtagtttaaatggaacactctaaaggtatcacataaartaagaatgacccagggtagggatgctaggtggacttgagagctaaggagccatcaaa

SEQ ID NO: 191726 - DNA, 591 bp, Homo sapiens
tgctttgaatttgggtgacttgcaactgcttggctcaatcgagtatgggakaagtgatcttgtatgatttccaaggctatgtcataaatacccgtgtagtttccacaggttctacactcaccctagaggaagccagatgtcatattaaaagtattgtcttaacactgccacttggaaaagccatgtgccgttgtcctagatgacagccccaactgagatcccaatcaactactggtactaaccaccagagtgaggcatcttggatatctagcctagctgagctatcagatgatttaagtcccagttgacatatgactgcaatggtagaagaaactccaagtgaaaactttccagcctaagcctttcccaaatttctgacccataaaattatgtaaaataaaaagattactttaagccgctaagttttgtagtaataataactagaatatccaagggtcatggagctaagagacttagtaacaggacttgggctagaacccaactttcccttctcacctagggtattcctgtggcccaaggtaatcagataagacactggatcaagacaaatatatatacttgttgttaaat

SEQ ID NO: 191727 - DNA, 591 bp, Homo sapiens
tgctttgaatttgggtgacttgcaactgcttggctcaatcgagtatgggataagtgatcttgtatgatttccaaggctatgtcataaatacccgtgtagtttccacaggttctacactcaccctagaggaagccagatgtcatattaaaagtattgtcttaacactgccacttggaaaagccatgtgccgttgtcctagatgacagccccaactgagatcccartcaactactggtactaaccaccagagtgaggcatcttggatatctagcctagctgagctatcagatgatttaagtcccagttgacatatgactgcaatggtagaagaaactccaagtgaaaactttccagcctaagcctttcccaaatttctgacccataaaattatgtaaaataaaaagattactttaagccgctaagttttgtagtaataataactagaatatccaagggtcatggagctaagagacttagtaacaggacttgggctagaacccaactttcccttctcacctagggtattcctgtggcccaaggtaatcagataagacactggatcaagacaaatatatatacttgttgttaaat

SEQ ID NO: 191728 - DNA, 492 bp, Homo sapiens
aatgcaaagataagatgggaaatgttagaccccagagaatgtaattgaaaattccactagtttgttttgccccatcattactcagtattctgatgtagaatattycttattttgtcaatatttcataaataagtacactatgccaacacaatttacgttcttaaaagtaattaacaagctgtcttttcgtattcatgtatggttatttcaattttttccatttgctgacctgcagatttgtgactaatgttagtcatttataacaggctcctttctccttaatagtagaggagaaataaatcttaaaatctacttgacgggtttgttttattgtttggtgataaaacttgatgatattccagatatctttagaaagagtttagtattctccctggcaggtttctgattaacggcacttgaagatgagactgcataatctgagtagggtgatgtgcttccgtggaaacctcacagtgaagacatctacacagg

SEQ ID NO: 191729 - DNA, 509 bp, Homo sapiens
atgtggggaattcgggataaggacagcttaaggaagacatgttaggggagatgaacattttgatggctcttctaatgttgcctttgagggaactacctctgtcttgcgtaaatctagcagttagtgttgtaagttgctatttagttttggttctgctggtcaaatcatcagttcggaaggaaaaagtcaatttgcagttgtgactacagatggctaaacctscattgtcagacttttcctgcaatctgtccttggattatgctgtttcttatgaaaatgtcccccctctttgcaggatgttctagaaatggtagtgcctcactgttttaggggtaggtagggataattcaaatgttggcagtgccacagcagagcttgctttagtcaactgtaatatcacttgcctaattccgaatggagattgtcagtacaacctggggtgagccgacactgaagtataccgaggtggactagaatactgtggcagtttagtttggtactaatcatgt

SEQ ID NO: 191730 - DNA, 507 bp, Homo sapiens
agatgaacattttgatggctcttctaatgttgcctttgagggaactacctctgtcttgcgtaaatctagcagttagtgttgtaagttgctatttagttttggttctgctggtcaaatcatcagttcggaaggaaaaagtcaatttgcagttgtgactacagatggctaaacctgcatygtcagacttttcctgcaatctgtccttggattatgctgtttcttatgaaaatgtcccccctctttgcaggatgttctagaaatggtagtgcctcactgttttaggggtaggtagggataattcaaatgttggcagtgccacagcagagcttgctttagtcaactgtaatatcacttgcctaattccgaatggagattgtcagtacaacctggggtgagccgacactgaagtataccgaggtggactagaatactgtggcagtttagtttggtactaatcatgtctatcatgtgagttaacaattcttaagtgtaagatgatcagagaat

SEQ ID NO: 191731 - DNA, 503 bp, Homo sapiens
tgaagagagaacatttctcccagaaatattaattactaaatgcttttgtttttctttggttcgaaaatcagtgacactgagagcctaaagcaacatgtgattactgggcataattgaaacccagggggctcaggtttaaaactaccrctatggcacaaagccagtgactgtacatttctgatatctgcctaggaaagtaaaaaatgttttactatacaaggttacctgttgctgagggcaccttctaggcctttgttatggcattcaggttaaatggatatccactaagggatttttcaagcaggctagaagagtcatgtctaagtcttttcaacaacaaacagctcaggaactcccactctgctactttgtttggtctccagagtatcatttatctatctattcccttgacacacaatctctgcaatctctcaaatggaaatcatttcatagacttgcatggataccgaggggtgtattgttatcagtatggaaaaggtgag

SEQ ID NO: 191732 - DNA, 503 bp, Homo sapiens
tgaagagagaacatttctcccagaaatattaattactaaatgcttttgtttttctttggttcgaaaatcagtgacactgagagcctaaagcaacatgtgattactgggcataattgaaacccagggggctcaggtttaaaactaccactatggcacaaagccagtgactgtacatttctgatatctgcctaggaaagtaaaaaatgttttactatacaaggttacctgttgctgagggcaccttctaggcctttgttayggcattcaggttaaatggatatccactaagggatttttcaagcaggctagaagagtcatgtctaagtcttttcaacaacaaacagctcaggaactcccactctgctactttgtttggtctccagagtatcatttatctatctattcccttgacacacaatctctgcaatctctcaaatggaaatcatttcatagacttgcatggataccgaggggtgtattgttatcagtatggaaaaggtgag

SEQ ID NO: 191733 - DNA, 552 bp, Homo sapiens
gggagatttatataacccaatcagaactgagattctttgtaaggaagaaaaattgttttgcagcaagtttatcattaatgcatatgccaagatcaagccagaatactaatatgttcttaccccacagtaggattggtgaaaactcaatatgtatttttttctctcttttatgccaaggttagtggaaaggacaaagagtttcatgaagttattactgcttttcgagtccacttacttgaatgccttttgatagtagtttatggtttctgcattatgtccccaaactgaacgtactttttttccggcttgcaccatgtataagattagtttattaaatgtattttgtctttaggctgttttcatatattgaaaaaaaagttacgaggaataartcatccctagaaacataagcagaggtgacttaaaacattttggctttccttccaacaacacatttcatttaagcatttatttaagaagaggatagggtactttttagtagaaacacttataaaccagcatttgtgaaagtatgctgtggccagtagactt

SEQ ID NO: 191734 - DNA, 552 bp, Homo sapiens
gggagatttatataacccaatcagaactgagattctttgtaaggaagaaaaattgttttgcagcaagtttatcattaatgcatatgccaagatcaagccagaatactaatatgttcttaccccacagtaggattggtgaaaactcaatatgtatttttttctctcttttatgccaaggttagtggaaaggacaaagagtttcatgaagttattactgcttttcgagtccacttacttgaatgccttttgatagtagtttatggtttctgcattatgtccccaaactgaacgtactttttttccggcttgcaccatgtataagattagtttattaaatgtattttgtctttaggctgttttcatatattgaaaaaaaagttacgaggaataagtcatccctagaaacataagcagaggtgacttaaaacattttggctttcctyccaacaacacatttcatttaagcatttatttaagaagaggatagggtactttttagtagaaacacttataaaccagcatttgtgaaagtatgctgtggccagtagactt

SEQ ID NO: 191735 - DNA, 601 bp, Homo sapiens
tatcttttgttttcactgcatttgcttttggattcctagtcatgaaatccctgcctaagccagtgtctagaagggtttttccaatgttatcttctagaattttaayagtttcaggtcttaaagtcctttatccatcttagagttgattcttgtataaggtgagagatgaggatctagtttcattctcctagatgtggatctagtttcattctcctacatgtggctagccaattatcccagcactatttgttgaaaagggtgtccttttcccactttatgtttttgtttgctttgtcaaagatcagttggctgttaagtattagggtttctgttccattgtctatgtgcccatttttatgtgagtaccatgctgttttggtgactacggccttatagtatagtttgaaatcaggtagtgtgatgcctccagatttgttctttttccttagtcttgctctggctatgtgggctcctttttggttccttatgaattttagaattgttttttctaattctgtgaaaaatgatggtgctattttgacaggaattgtgttgaatttgtagattgtttttggcaatacggtcattttcacaatattga

SEQ ID NO: 191736 - DNA, 582 bp, Homo sapiens
tcttgtattcggatgtctagttctctttcaaggccagggaagttttcctcgaatattcccccaaatatatttcccaaactgttagayttctctttaagaatgctgattattctcaggtttggtcatttaacataatctcagacttcttggaggctttgttcgtattttcttatccttttttgtctttgttggattcggttaattcaaaaaccttgtctttgagctctgaagttcttctgcttgtttgattctattactgagactttccagagcattttgcatttctataagtgcatccattgtttcctgaagttttcattatttatgctatttcattgaatattcctcccttcacttcttatatcatttttttttaatttccttacattgggtttcacctttctctggtgcctccctgattggcttaataacaaaccttctgaattctgtttcagttagatcaggggtttcttcttggtttggatccattgctggagagctagtgtgatttttttggggatgttaaagaaccttgttttgtcatgttaccagagttggttttctggttccttctcatttggg

SEQ ID NO: 191737 - DNA, 219 bp, Homo sapiens
gaataacatggtggcaaattcatggtggggccagtattccaaaccaagcctactgggcgcgggttctctacttcctgctctatacagtcttgcctcctgggcaccacacaaccttccacwacactgtgctgtggtaaaagtttgcactccaaggcaaagaacaaaatgtcagaatattgccttccattgagttggaacctttttagatcaaatcagtca

SEQ ID NO: 191738 - DNA, 429 bp, Homo sapiens
ggtatggatgatgagctgctaacatgtgatgtttaggaagtggctaggcttttctaaacctgtgtccttgcctgtatacggggaatggcagtatctgccctgcacagtctataggattgttgtgaaggttccattgagaaggctgagctccttgtcttgtttattcctctgcattgagcttgttccctggtatgtaagaaaaattcaacaaatgratgttgaatgaaagaatgaattaatgagtaatggttacttttttcctcactgcacttttaagtcttattcctagcatatacagaagtttgtaattatagatttagctgtttggtttgtgaagttatttgttaatattttgattaatattttatgtaatattttgatgcctacttaactctaaaatggcatatgataaagtaacagtaatgataa

SEQ ID NO: 191739 - DNA, 524 bp, Homo sapiens
acaaataatttcttcgtttgtcttttataacaaaaatttagctcagagaaatagactgaagaaagagaggcttcaggcttaagctgatagttctttccaaaacttaaaaatgggaattctttgtcactggttatgatcaaattttctagggccttatgaatatatatacactgatcaggagggctataaatgaatttatacrtgggttgcatatgaccatgtaagttttgtctcttattgaaacaaaataacattggaattatagttggtcttatgaatatttcttataattatagttatacatttctgaaatcattttccacagaccaatcattgggaaatcaaatatttgcccattttgaaagtctgaaaagtactttataacttatgtttattattattatatagtgatgcttattgcatatattgtagagaacagataaaactataaagaggaaacttttttttgcattctaatgaggctgagctaatctctatacatcttgtgctcttaaaaaatgtgt

SEQ ID NO: 191740 - DNA, 589 bp, Homo sapiens
ttccaaattacagtggacccagctggtccatggacctgctttgcagttattccccaggttctgaatgtataattgaaatagacacacttagcaactggaagaattcctatgggatgagggccactggaacttcccttttctaccaaggtagtaaatctggggaatttcagagactaataccaccgtaacagtcttgaaagaagcaaagatggtacctatcacacactcatttaactcaccaatttaacctatgcagacattcatggattayagagaatgactgtggattatcgcagtcttaggtagtggcaactgcagctactgacctacatgtagtatctttgctagagcaagcaaacatggctatgggcacatgacatgtaactaatgccttttgcgtcatactaatttgcaaagacccccagaagtagtttgtttgtaccttacaggggaaatagtcttccttcagggctatatcaattctgctgctctctgccatgtataatctgcagagaccttgattgtctttatgctacattgacaacattatgctgatgggctctaatgagcaggatggagcaagtactta

SEQ ID NO: 191741 - DNA, 439 bp, Homo sapiens
tgtcagatatgtggttcaaattttttctaccaagctgtggtttcttttttctttcttcctggtgttttttaatcatgtcaatttatgtatcttttcatctataagatgaaaaggtgacagctttttataacttatttaagaaatctttgattgccccaagttcatgaagatattctcatgttatcttctagatgatttatttttattttgcatttaggcttataatctatttggaattgattcatacktctgtgtgaaatagaagtcaaggttatttttcttacatgaatatctaatagatccaatgccatttattgaaaagatagtaccttcccatttttatcgaaaatgaattttatatgtgcaggtcagttcttagactttctactctgtttaacttggtaccaatactattttgtttttgttgctatagctttat

SEQ ID NO: 191742 - DNA, 439 bp, Homo sapiens
tgtcagatatgtggttcaaattttttctaccaagctgtggtttcttttttctttcttcctggtgttttttaatcatgtcaatttatgtatcttttcatctataagatgaaaaggtgacagctttttataacttatttaagaaatctttgattgccccaagttcatgaagatattctcatgttatcttctagatgatttatttttattttgcatttaggcttataatctatttggaattgattcatacgtctgtgtgaaatagaagtcaaggttatttttcttacatgaatatctaatagatccaatgccatttattgaaaagatagtaccttcccatttttatcgaaaatgaattttatatgtgcaggtcagttcttrgactttctactctgtttaacttggtaccaatactattttgtttttgttgctatagctttat

SEQ ID NO: 191743 - DNA, 464 bp, Homo sapiens
ggttttaaagtcagaaatttatgtgcyagccagtgagaggctgtaattttgggggcattggtttaaagcaacataaagcaagatgaaaacaaattggagagccaggtaacttttcatttacacaatggcaccatcaggtttgtctttggttctttctgattttctcaccatgtctttctccccacattctagccaaataaaacttttgatccaggccaagatcccatcctgaagccaaaaggaagattaattcattcttgatttacttattaaacatttgttgtattaaataagtagagtgaaaagaaggccgagtaatcctggaggaatttatttattcaacaagcattgactacctacaatgtgccagacatcaacaaaagggctaggaaaatggtggtaaacaagacagcaaagaaatgttttcttatggagctcacatatgtatacagaagaaaacgtaa

SEQ ID NO: 191744 - DNA, 389 bp, Homo sapiens
ggcatggtgacggggggcatagcttagcccctgcctccagagacctcagggtccagtgggaagacagtgaactacgagcagtggatttactgctacaattgagagaaatgcaagcacaatgtgggaagatgaatacagcacaagtcaaggaaggcttcctgaaagagtggaagtctaagctaaatctgaaagttgaacataagtaggggttgttggggtgcagagcactgtgggttgggaagggtcagggaaacccattaaagacagaagcagcggccactgcaaaggcccaagatgagggagcagggygttcaaggaaatgaagcagttcagaatggtttaaaatacgtgacttttaaaaacacttaaaatggtgttattattcacta

SEQ ID NO: 191745 - DNA, 389 bp, Homo sapiens
ggcatggtgacggggggcatagcttagcccctgcctccagagacctcagggtccagtgggaagacagtgaactacgagcagtggatttactgctacaattgagagaaatgcaagcacaatgtgggaagatgaatacagcacaagtcaaggaaggcttcctgaaagagtggaagtctaagctaaatctgaaagttgaacataagtaggggttgttggggtgcagagcactgtgggttgggaagggtcagggaaacccattaaagacagaagcagcggccactgcaaaggcccaagatgagggagcagggcgttcaaggaaatgaagcagttcagaatggtttaaaatacrtgacttttaaaaacacttaaaatggtgttattattcacta

SEQ ID NO: 191746 - DNA, 474 bp, Homo sapiens
tacctttttgaggattcctaaagccataaaagagaaagtaaggttaaggtctaaccatttgacagatgggtattattgatcagcagacttaaggaccaattgttcaagtaatatcagccagaatctataaacaaatagggtcttagagcatccaggcaacagtaaaactctgaagggctaatggttcaaccttccgcctacaagacatctgagtgctgagaaagcccaactgctagtttcctgacatcactaaatgaaaaaaaataaataaaacaaaaatgttttggatttgtgggtgtgtaactcayctgtcccctacctcagaactctatccaataatggaacttcaaaccaaatggagattcaaatatctgcttcttaatgtactggaaatctttcagtgtttcttaaagcagaagtcctggtaactaacgtgcagaatacagcctgaggcaaactgaggtccttactttc

SEQ ID NO: 191747 - DNA, 602 bp, Homo sapiens
cccacctaacctctatttgtaaccagacagggaacctcctggcttgggcccatagcacagacccttcatacttggctgattacactgagcaattgctgacctgcatctctctggagtgaaacccccaggagacaagcaaaagacccttggccacaaccactgctaaggtcccttccactgctgcctccgacytggggaaggaacataaaccctgagatcgccccagagctgcactgggcaacccaagagtgccaagccataatctacatccagtattcaagtggaagaagaactcacacttttgcagcattgagagggagcacggttgcaacttggaagaaatatagaagaaccatgattaaggaagagccctaccgactgaccactacacctaagcaccacctactggcttacatcccaaagcttcaacaccaaaactacctcactaacatacccccatgaaaccaaggacaagaagtcagctacactgcacaaagccatggtgcagtgaaaacatccagaaaaaaaaaaaaaaaactctattggttatacttaatctactctgcagtgaaagaaacagccacatgcagaaaggagaaaga

SEQ ID NO: 191748 - DNA, 417 bp, Homo sapiens
ttctttttttctctcagcctttaacttttaacctattggtgtctttatatgtgaaatgaatttctcataggtagcaaatatttgggttatgttyttaaaatccattttgataatatttctctttacattgggatatttatacaatttacaattattgtgataattgaggtggttgggtttaaactactatcttgctatgtattttctatttgtctaatctggtttttattcacttttcactatcattttttaggttcattataatgacatagttatttttttattttatggataaaaaccaacaaaggtccataaaataaaacaatgactatgtttaacaattggctttcttttcctttctttccttttccttcttttcttcttccttctttatttgagattgatttagtttatagt

SEQ ID NO: 191749 - DNA, 589 bp, Homo sapiens
ttccatggtgaaataaatttgtgaaacactgtatactttatgtttttcttaaacactgcaataagtcatttagtaaagaaaacattttaactttmttttacctagttggaccacaatttttttcctttttataccaatcagcaatatcctaccaaatgaatattctcaatttattttttaagtaggtgtttgaggataaggttacatcaaggttgttttctagaatgttgaataatttttgcctgtttaataaattccttaaagaaataaatatgtgctgtttctgtattaatttatatacatataacatatagcaatggtatttacacattctatggatattcctaaattgttgatcatctcttgtcatagtgataaaaggctttttcaatgtttaaaaaaattatttaatatgtgcttcctgtgtgccaggcaccgggctaaatgctgtataattacatttaattaattcctcacacagaataacagttgatggaaaagtaatctcattttacaatgaagaaattggaactcagggaagttaaatagttgttcatattcagcagtcagtaaaggatgaaattagtgt

SEQ ID NO: 191750 - DNA, 419 bp, Homo sapiens
attcatttagtctatttcctgtaacatttctaggtattcatatcacctctgaaggacaagattaaaataaaacaaccctaaaccattaaaaaacaaacaaacaagcaaacctttccaagtgctggccgtcctctatttcccttgccgacagatcccctgtccaccccctccccaatcctgtgcccyggggcctgcccctctggctccatcacgggctgtcatgctgagcttctggttgggctcagctggcaggagatggagggtgagaggagagaggttggatgtttatttctccagctgcctccctctcataacaccctcatgagtttccacagccctgactttacagtccctttaaaaatagtggcgtcactaactgccccatcaccttgtccacatgggccctctgtttcctgtgg

SEQ ID NO: 191751 - DNA, 533 bp, Homo sapiens
gctatcaaactaatttgttaccttagtaagtaggaaaagagcttggtacacttgagagactgactgaaggccagtgtctataatcattttcagggatatgtagttgtaaaatayatgtagctatagtcaggatgtaaagtaggtcacagtaaccaaatagcaaggggtttagggaaaattagggaactggagaaagggcaaattgttcatgagggaaaagagaaggtgtaatgtttatgggtggacttgttgcttgctctgtcacctctacccctattagtcctgccattaccattttacttaatcgtttagccaggcctgatacatagtagtctttgctaactggatattatggaggtaaagctgaaggtttttgtttgtgaaatgttacactaagataggagcttgtgacagatctttaaataatgcttttaaaatgtgcctgtttatattaatcttcaccagaatgtcacaggtagactaatggttggcctacgttggtggaatcacattgatgaagatggaaagagcca

SEQ ID NO: 191752 - DNA, 533 bp, Homo sapiens
gctatcaaactaatttgttaccttagtaagtaggaaaagagcttggtacacttgagagactgactgaaggccagtgtctataatcattttcagggatatgtagttgtaaaatatatgtagctatagtcaggatgtaaagtaggtcacagtaaccaaatagcaaggggtttagggaaaattagggaactggagaaagggcaaattgttcatgagggaaaagagaaggtgtaatgtttatgggtggacttgttgcttgctctgtcacctctacccctattagtcctgccattaccattttacttaatcrtttagccaggcctgatacatagtagtctttgctaactggatattatggaggtaaagctgaaggtttttgtttgtgaaatgttacactaagataggagcttgtgacagatctttaaataatgcttttaaaatgtgcctgtttatattaatcttcaccagaatgtcacaggtagactaatggttggcctacgttggtggaatcacattgatgaagatggaaagagcca

SEQ ID NO: 191753 - DNA, 533 bp, Homo sapiens
gctatcaaactaatttgttaccttagtaagtaggaaaagagcttggtacacttgagagactgactgaaggccagtgtctataatcattttcagggatatgtagttgtaaaatatatgtagctatagtcaggatgtaaagtaggtcacagtaaccaaatagcaaggggtttagggaaaattagggaactggagaaagggcaaattgttcatgagggaaaagagaaggtgtaatgtttatgggtggacttgttgcttgctctgtcacctctacccctattagtcctgccattaccattttacttaatcgyttagccaggcctgatacatagtagtctttgctaactggatattatggaggtaaagctgaaggtttttgtttgtgaaatgttacactaagataggagcttgtgacagatctttaaataatgcttttaaaatgtgcctgtttatattaatcttcaccagaatgtcacaggtagactaatggttggcctacgttggtggaatcacattgatgaagatggaaagagcca

SEQ ID NO: 191754 - DNA, 533 bp, Homo sapiens
gctatcaaactaatttgttaccttagtaagtaggaaaagagcttggtacacttgagagactgactgaaggccagtgtctataatcattttcagggatatgtagttgtaaaatatatgtagctatagtcaggatgtaaagtaggtcacagtaaccaaatagcaaggggtttagggaaaattagggaactggagaaagggcaaattgttcatgagggaaaagagaaggtgtaatgtttatgggtggacttgttgcttgctctgtcacctctacccctattagtcctgccattaccattttacttaatcgtttagccaggcctgatacatagtagtctttgctaactggatattatggaggtaaagctgaaggtttttgtttgtgaaatgttacactaagataggagcttgtgayagatctttaaataatgcttttaaaatgtgcctgtttatattaatcttcaccagaatgtcacaggtagactaatggttggcctacgttggtggaatcacattgatgaagatggaaagagcca

SEQ ID NO: 191755 - DNA, 560 bp, Homo sapiens
aaggacaggattcttggaggcagtatgatgtgatcccagagacaggagataggaaaaagataagcacatgttctagatgtgtttaaattctcatcaaataggaggcgacgccattctctgatgaggaaggagatatgaaatcagacacccaaagaggctttcyagaggacatcctaacttttgatagatgtttccaccatctgggtggtgtcctcttctccatccctctgttttctcagaagcagctgctggggtcccagagggatgcacacagtggctataggtgctcacagatccacagtgaaacactcttatctaaccctggaaggttttgctgcttgaaaacctttatgccttcatcctaagatacaaggttgcaaatagcaccaagagctggaaacagatgccagctgaaacctaagaacagacacagtgcatgagcagtgtcctaccaggaccaccactcggctcttggcagtggcagccctcctcctggcttctggcaatgaccatcagttgcttcatcttctgaaaaggaaaactacccagttggccaagcc

SEQ ID NO: 191756 - DNA, 560 bp, Homo sapiens
aaggacaggattcttggaggcagtatgatgtgatcccagagacaggagataggaaaaagataagcacatgttctagatgtgtttaaattctcatcaaataggaggcgacgccattctctgatgaggaaggagatatgaaatcagacacccaaagaggctttccagaggacatcctaacttttgatagatgtttccaccatctgggtggygtcctcttctccatccctctgttttctcagaagcagctgctggggtcccagagggatgcacacagtggctataggtgctcacagatccacagtgaaacactcttatctaaccctggaaggttttgctgcttgaaaacctttatgccttcatcctaagatacaaggttgcaaatagcaccaagagctggaaacagatgccagctgaaacctaagaacagacacagtgcatgagcagtgtcctaccaggaccaccactcggctcttggcagtggcagccctcctcctggcttctggcaatgaccatcagttgcttcatcttctgaaaaggaaaactacccagttggccaagcc

SEQ ID NO: 191757 - DNA, 560 bp, Homo sapiens
aaggacaggattcttggaggcagtatgatgtgatcccagagacaggagataggaaaaagataagcacatgttctagatgtgtttaaattctcatcaaataggaggcgacgccattctctgatgaggaaggagatatgaaatcagacacccaaagaggctttccagaggacatcctaacttttgatagatgtttccaccatctgggtggtgtcctcttctccatccctctgttttctcagaagcagytgctggggtcccagagggatgcacacagtggctataggtgctcacagatccacagtgaaacactcttatctaaccctggaaggttttgctgcttgaaaacctttatgccttcatcctaagatacaaggttgcaaatagcaccaagagctggaaacagatgccagctgaaacctaagaacagacacagtgcatgagcagtgtcctaccaggaccaccactcggctcttggcagtggcagccctcctcctggcttctggcaatgaccatcagttgcttcatcttctgaaaaggaaaactacccagttggccaagcc

SEQ ID NO: 191758 - DNA, 566 bp, Homo sapiens
tcactattgctatgctttagcaaacagactggtggcattgtgcccatgggctagagatctatagaactttgaacttgagaaagataatttagggtacctggcagaagaagtttctaagcagcaaagyattcaagaggtggcctggctgtttctaactgcctatactcataggcatgaaaaaagagttatctgaaactggaacttatatttaaaaggaaagcagtgcatagaaattcataaaattcacagcctggccatgtggtaggaaataaaaactcattttctggggaggaattccagcctgctgcagacgtttgcataagtaaagaggagcctaatgttagtagtcaagacaatggggaaaatgcctcctaggcatttcagagacctttgtagtagcccttcccgtcacagccctgggagcataggaggaaaaaatggtttcatggtccaagcccagggacctgctgctctgtgcagcctttaggacatggtgccctttgtcatagctgttccagctccaaccacaagtaaaagggccccatatacatctcaggccactgctt

SEQ ID NO: 191759 - DNA, 566 bp, Homo sapiens
tcactattgctatgctttagcaaacagactggtggcattgtgcccatgggctagagatctatagaactttgaacttgagaaagataatttagggtacctggcagaagaagtttctaagcagcaaagcattcaagaggtggcctggctgtttctaactgcctatactcataggcatgaaaaaagagttatctgaaactggaacttatatttaaaaggaaagcagtgcatagaaattcataaaattcacagcctggccatgtggtaggaaataaaaactcattttctggggaggaattccagcctgctgcagacgtttgcataagtaaagaggagcctaatgttagtagtcaagacaatggggaaaatgcctcctaggcatttcagagacctttgtagtagcccttcccgtcacagccctgggagcataggaggaaaaaatggtttcrtggtccaagcccagggacctgctgctctgtgcagcctttaggacatggtgccctttgtcatagctgttccagctccaaccacaagtaaaagggccccatatacatctcaggccactgctt

SEQ ID NO: 191760 - DNA, 652 bp, Homo sapiens
agagacctttgtagtagcccttcccgtcacagccctgggagcataggaggaaaaaatggtttcatggtccaagcccagggacctgctgctctgtgcagcctttaggacatggtgccctttgtcatagctgttccagctccaaccacaagtaaaagggccccatatacatctcaggccactgcttcagagagtgcaagtcccaagccttgatggcttccatgtggtgttaagcctgtggatgtgcagagggcaagagttagggcctaggagagtccacctaggtttcagaggatgtatgaaaatgcctggatgtccagacacaagtctactgcagggggagagctgttgtagagaacctatactagaacagtgcgaaagggaaatgtgaggttggagcccccacagagagtctccactgtggcactgcctagtggagctgtgagaagagggccaccatcctccagatcccagaacagtagatccactgacagcttgcaccgtgcacctgtaaaacctgcaggtactcamtgccagctcatggaggcagctgtgtggactgtaccctgcaaagccacatgatgatgctgcccaaggccatgggagcccaccacttgcatcagtgtgacctagatgtgagatgtgcagtcaaaaa

SEQ ID NO: 191761 - DNA, 561 bp, Homo sapiens
aacacaacatattccgcagtcacataaaagcaaaacaaaacaaatagacaaataaacaagaaacagagaaaccctgaaagcatgactgttgggtcatacgttatgcatgtacctggctttagtggatattgtcagttttccaaagtggctataccaacttacactaccatcagctgtgtgtgatggttcaagctgttctacacttaccacttggtattttctatttaaccattctggtgagtgggtagtgattaacaccaccttaaaataagaaaaattaaattcagggggatagactgtcttgtccccagatgccagcaaaggaagcacttgaatgagttctgtctactcagaacacccacagctcctttgcagtagtagtattctgcttttttgttctctaacgtttttatcaacactctctctattttttccatagataattatacctttgcttttaagagctgtcataaataattaaaatatttgrgctgaattaaataccatagctcagttaataacatgggctttatttaggaccagacaagtctgagttcaagc

SEQ ID NO: 191762 - DNA, 462 bp, Homo sapiens
gataggggtctagtttcattcttctgcatatggcagtccaatttctctagcatcatttattgaaaaaagtgtcctttccccagtgtacattcttatcaactttgtcaaagattagttggctctaagtatgtggccttatttctcagttctctattctgttccattaatctatgtatgtatgtctttttttaaaaaaaaacagycccatgctcttttggttactatggctttgtagtataatttgaagtcaggcaatgtgatgccttcggctttgttcttcttgcttaggtttgctctggctatttgagttctttttgatttctaatgaactttataatttttttaatcattctgtgaaaaatgacactggtattttgatagagattgaattgaacttgtagattgctttgggcagtatggccattacagcaatattaattcttccaatctatgagcatggga

SEQ ID NO: 191763 - DNA, 462 bp, Homo sapiens
gataggggtctagtttcattcttctgcatatggcagtccaatttctctagcatcatttattgaaaaaagtgtcctttccccagtgtacattcttatcaactttgtcaaagattagttggctctaagtatgtggccttatttctcagttctctattctgttccattaatctatgtatgtatgtctttttttaaaaaaaaacagtcccatgctcttttggttactatggctttgtagtataatttgaagtcaggcaatgtgatgccttcrgctttgttcttcttgcttaggtttgctctggctatttgagttctttttgatttctaatgaactttataatttttttaatcattctgtgaaaaatgacactggtattttgatagagattgaattgaacttgtagattgctttgggcagtatggccattacagcaatattaattcttccaatctatgagcatggga

SEQ ID NO: 191764 - DNA, 390 bp, Homo sapiens
tttttctatatcagtttgaattattttggatrcaagttatggaatccagactgaaagtgacctaaacaatggtgacatttatcttacatacaaagaaattcagtagtgggaatttccaccgttggctagctcagcagctcgtgatgtcagggttctgagtatgcttctctgaaattctctttactttctcctcatggtcacaaaataaatcctgtagcttcaagcatcacatcctcacagaaggaggtctaaaggcaaggaggaaaaaggatttctcctcatctgcttgactttttttttttcttttgagaaaaggtcttgctatgtttcacagtcaggtcttaaactcctaggctcaagcaattctcccacctcaacttcctgagtagc

SEQ ID NO: 191765 - DNA, 584 bp, Homo sapiens
ggttccttcctcctaagtagctgtgttcccacctcttgatccgaactttttggccacagcaaattgggccagaataaaccttgttattcaacctattgctggcttaagaagtggcctggagsctagtgtggtggagtgtgcctgtagtcccaggtacttgggagtctgaggctggaggattgcttgagcccaggagtttgagaccaagctggtcaacatagtgagaccccatcagaaaaaaacaaaaacaaaaacaaaaataaaacactgcctggtataaaagtgctgctttataaggataatggtgatatatggtgagtctattaggctctctctttcaggaatttcaactgaagatatggcaaaggtcagtcagttgcaagaacattggccaggaacttagctggaatgacctcagagggaaggagatatgtacagtcatgaagcaatgcacgtcgtgaatatgcagaaataagaatgagtgaatgcataaagtcagagagactctagaagaagcggagaggtgcttggttggtagcagcagatggagagacgaggctcgctcatggcagaggataacctag

SEQ ID NO: 191766 - DNA, 446 bp, Homo sapiens
atggaatttctaatgttcaaggttattcactgaagcattgtttctctcagggacaaacaaatataacacaattgtccattaatggtagattacttaaataagtggttagaatgtgtgtgcccaataatgtagttgtggatctgatacatttataatgtcaatgattgacaaggggaaagtagcaaaaaatgaaaatgaaattggttcttaaattatcttaagctaatgctagaaacaagaaatatggagaattagatatttctttgaaaaaaatgtaagaattatagatattgtctacagtagtggctactcattagtcgaatgtagacwttcaggaagactccttaaagggtgggagcagccttgttcttgcattctcctctctcgctcgacagaatgtagatgggtgcctgggctagagcagatatcttagattgtgaagcaat

SEQ ID NO: 191767 - DNA, 555 bp, Homo sapiens
ttctcaacaaccacacatgaaatgtttaccatacacaaattaatacaattaacgacattatcataaaccaaaaaaactataggaaatatggttctttttctcagggagataaccttcttgaagaaataaaactactatgctggaacaatctacaaaactacaagaaaatattattataaatgtaactggtatgccgcatttattcactggggtaaaaagttatattkattttcctacacttctttttaaatggcaagacctctaataaggagtacttctcccttcagaattagactcacagttcttatagagcagcagttttattcatacctacagcctccaatcctaaggcgcacccacctatgctatgtacaatggctccacgggattccagcatcagtcacacagtgaacaaagcctccgtgacaattttgggtcatgggccaaatccccatcttaaaacaaagtttcattttgggtaaccctggtttcattttatcagggcaaaaatattttcctattttaaatattcaaaccttaaaagaaaggagcaga

SEQ ID NO: 191768 - DNA, 516 bp, Homo sapiens
gccagtagatgtccaattggtcttctaagagataatttaggcattatagcaaacccatactttcgtttgaaattttgcaagtgtttctytgaattcattgtcataaagactaaggaatttatgaagcaggaaaaaaaacataaaacaatgtcttgggagactaatgcaacatcaatgattacctctcagatttaatgatttttttaaagatattttggtattaaatcatcatttgcctcacaataacaacaaaactaatatattaaatacagctggttttaaatataaaaacagtggttagatttgttttataaaattacaaatgtaagccttccatttggaagagcagcactgtttacacaggtagaacacttgtctgtaattttggattggcttagaataatctccacatgtcaaaaccactaattctgctgtcatgaactgaatggacacgccacaaaaaatcactcaccataaaagacagagcattttttttccccatatgatcccacaaag

SEQ ID NO: 191769 - DNA, 516 bp, Homo sapiens
gccagtagatgtccaattggtcttctaagagataatttaggcattatagcaaacccatactttcgtttgaaattttgcaagtgtttctctgaattcaktgtcataaagactaaggaatttatgaagcaggaaaaaaaacataaaacaatgtcttgggagactaatgcaacatcaatgattacctctcagatttaatgatttttttaaagatattttggtattaaatcatcatttgcctcacaataacaacaaaactaatatattaaatacagctggttttaaatataaaaacagtggttagatttgttttataaaattacaaatgtaagccttccatttggaagagcagcactgtttacacaggtagaacacttgtctgtaattttggattggcttagaataatctccacatgtcaaaaccactaattctgctgtcatgaactgaatggacacgccacaaaaaatcactcaccataaaagacagagcattttttttccccatatgatcccacaaag

SEQ ID NO: 191770 - DNA, 516 bp, Homo sapiens
gccagtagatgtccaattggtcttctaagagataatttaggcattatagcaaacccatactttcgtttgaaattttgcaagtgtttctctgaattcattgtcataaagactaaggaatttatgaagcaggaaaaaaaacataaaacaatstcttgggagactaatgcaacatcaatgattacctctcagatttaatgatttttttaaagatattttggtattaaatcatcatttgcctcacaataacaacaaaactaatatattaaatacagctggttttaaatataaaaacagtggttagatttgttttataaaattacaaatgtaagccttccatttggaagagcagcactgtttacacaggtagaacacttgtctgtaattttggattggcttagaataatctccacatgtcaaaaccactaattctgctgtcatgaactgaatggacacgccacaaaaaatcactcaccataaaagacagagcattttttttccccatatgatcccacaaag

SEQ ID NO: 191771 - DNA, 524 bp, Homo sapiens
tgtgcaacaaaccctcatgacacacgtttacctgtgtaacaaacgttcacatgtatccccgaacctaaaataaaagttaaaaaaattaaagtctatttttttaaataatatgttagaatgatgacttgaaacattctaaattttcttttaaactatcaaagaatgattcaattaagttgtgttggtcaatttttgcattgctataaagaaatatccaaggttgggtaatttacaaagaaaggaattgtattttggcttacgattctgcaggttgtaaaaacatggcgccaacakcagttcagcttctagtgaggccctcaggaagcttacaatcatggtggaaagccaaggtgggagctgatgtattacatggagagagatggagcaagagaaagcaagggaggaggtgccacactcttttaaacaaccagatctcgtgtgcacttggagcgagaactcagtcattactccgaggagagcaccaagccatttatgagggatctgcccccatagcctaaacacct

SEQ ID NO: 191772 - DNA, 532 bp, Homo sapiens
tctgccttatgcctgtggctaagggatgcaaagtagaattgctttacattgactatatatgtgacatgtaygttgctgttttttttaaaataactttatcatgatattcaggtagatcctgggttctagaatatttaaaacaaaaggataaaatgataaaccaaagagtcaacttgttaacttttcttttttaagagatgggttttcactagtatgcccagtctggactccaagtcctgggctcaaacgatcctccagcctcaggttcctgagtagctcaacattttatgtatgtacgatattataaagaaatattcttccaaatgaacttttgtttttagatcaataaatgaataataaataattttgtacaaacatcaatatattgtaagctattgtttttttaaatcttcatactctgcatttctgcattcaagctcagtctttcacttagttattctaatcaggaatttagatgtgtacatatttttaaatgtttttccatgaacttggaaatcacatgtaaaacatt

SEQ ID NO: 191773 - DNA, 605 bp, Homo sapiens
agccattatttttaatttatgttgaccttaaccaaatattcttccaacaattaacacaacaaatacagcaaaacaaaacttcctattcccattttaagaggctgcattctttacttgggtggtaattgtttcactttgatgtcaagtataaacaattaacctagcataaaaaatcaaatatactgcaaaggaaaaatatagtcytatttattttttagtaatttccatttgagtaaaaaacttaaatgtaaagtagttatagtcaagtcataaactggtaaagtagcaattttgtatttaatgtaatatattcctacatctgtacccaatagtcaatttctatctacctaatctcctgtttatttcactccactattcctcattcttctcttggatattttcacaccaatagcttccgtaaattatgcattatttttcactttcaagcctgaaacttgaaagacagcatacctttggtggtagaaaacatttgttctcaaagctaaagatgtgagaaataaattttcagggggccatcaggctaaactgaacaactttagccatgttacttagaatactaactgaatattcctctcacaagtatt

SEQ ID NO: 191774 - DNA, 593 bp, Homo sapiens
gatcatcattctctagcaacattaaaaacctgtgaagaccaactactttgtaaagcatttcaggagagaaagagtctttcatttataagtttttaaaaacattgactcataacttaacaattgagcaatgaacaatatgtaaacagactttaaactgtgattagtytgaggagccttaaaataagcagtaaattatattggccaaatgagagggcacaacaacaatctaggatgcagaggacagttttcagccaaacaaaagaggtttctcccagccataatggataagggttgccatgaaatcttagtgaggaggagctgggaagtgatatgagaatctactctgtacatgtgtggtacataagcatatggggcaacgattccaatatttgcctgaaaaatgaaatgtaagactgtacagaaaatgtcagagaaaaaagtaatttaaaaaacctattatgctagaataaaatagtatgtaactagcatataagaagcagacaagtagaaaggtatgtagaaaaaaataaagaatgagttaaaaaaacacttgagatgattttatgaagacgattttatagcagttaagaaag

SEQ ID NO: 191775 - DNA, 593 bp, Homo sapiens
gatcatcattctctagcaacattaaaaacctgtgaagaccaactactttgtaaagcatttcaggagagaaagagtctttcatttataagtttttaaaaacattgactcataacttaacaattgagcaatgaacaatatgtaaacagactttaaactgtgattagtttgaggagccttaaaataagcagtaaattatattggccaaatgagagggcacaacaacaatctaggatgcagaggacagttttcagccaaacaaaagaggtttctcccagccataatggataagggttgccatgaaatcttagtgaggaggagctgggaagtgatatgagaatctactctgtacatgtgtggtacataagcatatggggcaacgattccaatatttgcctgaaaaatgaaatgtaagactgtacagaaaatgtcagagaaaaaagtaattwaaaaaacctattatgctagaataaaatagtatgtaactagcatataagaagcagacaagtagaaaggtatgtagaaaaaaataaagaatgagttaaaaaaacacttgagatgattttatgaagacgattttatagcagttaagaaag

SEQ ID NO: 191776 - DNA, 659 bp, Homo sapiens
aggtttcctttttgttttaatgtgagttgtttcattttattataattgaaatacatgctctgggtcatttcattgctggagcgcaacttaccttcagtcagaaaaaaactgaaaatgaacaygtgaacaacattcagtttggtatttccactagctattgaaaaaaacaccgactgctatggtaacattcatgtttgtgtttccccgaattcttatgttgggatcctaacctctaaggagacaatatattaggaggtggagcctgtgggaggcctcatgaatggaatcagtgcccttataaagctggtatcagagagctccccgccccttctctcatctgaaggcatagcaacatgctagtcatctaaaaccaggaagtggaccctcaccagacatccaaactgccagtgtcttgatcttggacctccaagtctccagaattgtgagaaataaatacctgctgtttaaaagctgttctgcttatggcattatgttatagcagtcctgaacagatgaagacactgacaaaaacaagttgaagagaacactgaaatcattaggtataacgaaagataaaatgtgtattgtgaatccatatggagagttgctacatttactacaacaaaagaatcctaaaatctcaatgcaaaattacccat

SEQ ID NO: 191777 - DNA, 659 bp, Homo sapiens
aggtttcctttttgttttaatgtgagttgtttcattttattataattgaaatacatgctctgggtcatttcattgctggagcgcaacttaccttcagtcagaaaaaaactgaaaatgaacacgtgaacaacattcagtttggtatttccactagctattgaaaaaaacaccgactgctatggtaacattcatgtttgtgtttccccgaattcttatgttgggatcctaacctctaaggagacaatatattaggaggtggagcctgtgggaggcctcatgaatggaatcagtgcccttataaagctggtatcagagagctccccgccccttctctcatctgaaggcatagcaacatgctagtcatctaaaaccaggaagtggaccctcaccagacatccaaactgccagtgtcttgatcttggacytccaagtctccagaattgtgagaaataaatacctgctgtttaaaagctgttctgcttatggcattatgttatagcagtcctgaacagatgaagacactgacaaaaacaagttgaagagaacactgaaatcattaggtataacgaaagataaaatgtgtattgtgaatccatatggagagttgctacatttactacaacaaaagaatcctaaaatctcaatgcaaaattacccat

SEQ ID NO: 191778 - DNA, 599 bp, Homo sapiens
gcagagtagagataaggagttcagttggggaagtaagtacctagtttggggtctatggaacactcaggtagggatgtccagaagacgatgttcatgaactagcaatgatgggcagcacttcattttttgtggcctttgtcccatttctcaacaagtaacaaatgacctacaagacccagccatcttcatttctgagtccacgaacaatgtagaggcggcccaaccctgcttcacacttgaacagagctaatgataagtctctcaggacattctgttattcctgcactgctggggggctaacagggaatttctttctaagctagagacatattggacggagaagagcatcagaaaatagcaatgggcaggttcmagtatgtcaggcacccgttgtttctctcaagcattaattctaagaggaaatatagagaaagctatactggattcttagaaagcctatttaagccagcaattttagctaacacccaaaaggggaggaataatgtatcattagccaccccaagaaagacctactgaatagagggagaaaaaaataaatatattagttatatacaaccaaaaagtatacatgacatcat

SEQ ID NO: 191779 - DNA, 391 bp, Homo sapiens
aactaattcttccttagagctttcaaaagaaacacagctctgctggcaccttgatgttagtttagcccatggaacacgtttttgactcctgagctccagcactgtaagataataagttcgtgttgttttaagtcactaaatttgtggtaattcgttatagcagcartagaaaatggacataatagttacaagagatatcacaaaatatgtacagagtaaagtttaagaagtagttttggatcctcagaaagttcaggagattaaaatgatggagaacaaatgttttgactaaggatttatcagattcataatattcctcaccaaaggaatttacattatactaattgctccaattagctcttgtagcattttcattttaacttcattctaa

SEQ ID NO: 191780 - DNA, 520 bp, Homo sapiens
tgttctaaagacattcaggttggaggtaggaaggatggtcaagtttgatatgtatacatccaatattaagattctgtagtttttcagtcagcatcaatcttatccatagttccagttgaatctacctgctgcaattcatttgattcatgattattattattattattattattattattattatttttgcctggrcctcaaatattttaaatcagtgacacagctatttttattttttatttttatttatttatttttttaaattacaattgagcacaggattggagcacattctaggctaaaatgaaatatatcagggcgcaaacaacacactctcacatttgcagatatttgctactatttctacaaaagtttcatcattggtaagcattcagcctaagtattaagaacgaacagataaaagcttattcaaaaacatcactgtatagtagactaccaatttctcccctggagtgggaaaacctttctgcacctgaaccttgcctaatttagccagttc

SEQ ID NO: 191781 - DNA, 520 bp, Homo sapiens
tgttctaaagacattcaggttggaggtaggaaggatggtcaagtttgatatgtatacatccaatattaagattctgtagtttttcagtcagcatcaatcttatccatagttccagttgaatctacctgctgcaattcatttgattcatgattattattattattattattattattattattatttttgcctggacctcaaatattttaaatcagtgacacagctatttttattttttatttttatttatttatttttttaaattacaattgagcacaggattggagcacattctaggctaaaatgaaatatatcagggcgcaaacaacacactctcacatttgcagatatttgctactatttctacaaaagtttcatcattggtaagcattcagcctaagtattaagaacgaacagataaaagcttattcaaaaacatcactgtatastagactaccaatttctcccctggagtgggaaaacctttctgcacctgaaccttgcctaatttagccagttc

SEQ ID NO: 191782 - DNA, 514 bp, Homo sapiens
cgtttaaaagtgtgtggcaccgycccctgccctccttttgctcctgctttttccatggtgatgtgtctgctcctgcttcaccttctgctgctgtgagtaaaagttctctgaggcctctgcagaaaacagcagatcccagcgccatgcttcctgtacagcctgcagaactgcgagccagttaaatctcttttctttataaattaccaagtcttatagcaatgcaagaacagcctaacccagactacttggcactgaataatttataaagaaaagaggtttatttagctcatagttggccaggctgaaaagttcaagggcatggccctggcttccagagaaggctttcatgctatgctacaacatagtagagaagttcaaaggggaagcacacatgtgcaaagaggggaaaacctgaggcgctcctggctttataacagtcaactctcacgggaagcaatctattccttgagaactaattcagactccagagaacaaggactcactcactgctgtg

SEQ ID NO: 191783 - DNA, 521 bp, Homo sapiens
agatctggccgtttaaaagtgtgtggcaccgtcccctgccctccttttgctcctgctttttccatggtgatgtgtctgctcctgcttcaccttctgctgctgtgagtaaaagttctctgaggcctctgcagaaaacagcagatcccagcgccatgcttcctgtacagcctgcagaactgcgagccagttaaatctcttttctttataaattaccaagtcttatagcaatgcaagaacagcctaacccagactacttggcactgaataatttataaagaaaagaggtttatttagctcatagttggccaggctgaaaagttcaagggcatggccctggcttccagagaaggctttcatgctatgctacaacatagtagagaagttcaaaggggaagcacacatgtgcaaagaggggaaaacctgaggmgctcctggctttataacagtcaactctcacgggaagcaatctattccttgagaactaattcagactccagagaacaaggactcactcactgctg

SEQ ID NO: 191784 - DNA, 531 bp, Homo sapiens
ggattacaggcgtgagccaccgtgcccggccacctcagtctcttaatctgtaaaatggaagtaataaggtatctattttatagtgatattagaatttaatgagttagattaacacagcactgagaataatgcttaagacatagtgaagacaaagtgtttrcccaataagacaaataaggactgaaaagagaaaactttcatctcaacatgagatttttctgatatatagaaacataaagcagagactacattttattttgattgtatagaataagggcagacagggattttgttttgttttgctttataaaagttgataaaccacttcagttagttgcttccaaagaagcaaagtagaaggctttacctttttacatttatttattgttgttgttgattgcaatgtggtttacaagagatacaattttaaggctgttctgagttgaaatttagaaattaagtggtttgtgattttccacaggaagcccataattgtgaaaaataatatttctcataatttaagcttattcg

SEQ ID NO: 191785 - DNA, 531 bp, Homo sapiens
ggattacaggcgtgagccaccgtgcccggccacctcagtctcttaatctgtaaaatggaagtaataaggtatctattttatagtgatattagaatttaatgagttagattaacacagcactgagaataatgcttaagacatagtgaagacaaagtgtttacccaataagacaaataaggactgaaaagagaaaactttcatctcaacatgagatttttctgatrtatagaaacataaagcagagactacattttattttgattgtatagaataagggcagacagggattttgttttgttttgctttataaaagttgataaaccacttcagttagttgcttccaaagaagcaaagtagaaggctttacctttttacatttatttattgttgttgttgattgcaatgtggtttacaagagatacaattttaaggctgttctgagttgaaatttagaaattaagtggtttgtgattttccacaggaagcccataattgtgaaaaataatatttctcataatttaagcttattcg

SEQ ID NO: 191786 - DNA, 501 bp, Homo sapiens
aaactgattatttcttggaaacattgtcttcatatactttttgtaaagcattaataatttcaccactcttctacacaacattcactataagttttatatttgttcttgcttcyattttagcagaattcatgttgttctgatagggtttcttttcaaactgatccttttctgtacttcaaactagatgctgttcagatgcattgtaacaagttagtatacatttgttgtggtgaaaaaaatgttttgaaatctatgtgtagtttttttcctaatgtgcatttttcatgaactttttgaagacctcttgtgtaaatgaattacatacttaaagaaatttgaaaaaaaaagcattttagtattttacatgcattttagtaacttagaggcagatccttgtctggtagatctcgtggtctagtatcattattaccagatgaaataaaactaaatatagaatttggacagatactaagcaggaacttgttccataacatgacaata

SEQ ID NO: 191787 - DNA, 587 bp, Homo sapiens
ggtggttgtggttttcagctaaatatgaaaaaaaattccaactggaatagcctaaacagtaattaatatttacagtctcacataacagaatgttgtaaggtgagcggtcccagagctagttaattaaaaatgtcatcaaggcaaagagaycttccgtcttcatcttttgtttcctcagtgtattgggtttttcctcacctggtcccctttgtgatcacaatacgggtgttgtggttccaggccttagatgcagatatgccagtgtcagcatgtacatctgcctttatatcagtaaggaacttccctcagaagttcctagtagaactcctcccatgttttattggccaaaattgtgtcagatacccttatttaaatcagtcatttgaaacgtaacttgggggttttataattggcttagtccaattaagatttaaccctggagttggagacaggccactttcccctgaatttaaaatttgaagaaaagagtaaaaaagaaataaagcatttcatcaactcttctaaatttacttaaatcttcttaaatattatatttaaaacaacactacacatcgccagcaggtatt

SEQ ID NO: 191788 - DNA, 475 bp, Homo sapiens
gtttgtaaaagcctacatcatttattttgttagtgttagktcactattcctccccctttggaagagttgttagaatatacttgaatccattaatttcagacaaacttaaggtgaattttaatcaaatggattttttcttttaaattctgggcatagagctaggaatataagtttgccatcttcattagtggttgtgttattttatatttcatataaatatcttttcctagccattgggaagaactgtgtatcagaacatttcacaaaaccttataatgaattctacctttaaaagtccagaattataacaatgaatatattttacacagattattatttgactgataaacaggtttttattgccttctatagcattcgttagcagacatgcaaactgaaagagatcactaattaagtggcctttagtataattttgtaattttgaaagaaattgaaaagcaaaggaaagtgaaag

SEQ ID NO: 191789 - DNA, 214 bp, Homo sapiens
gtaaagctcactaaaattggtaaactattgaaaagaccatctaacagcaaccaaacagagagtatacagacataaattatcaacattgggaatgaaagaggagcgtaactgtagattttaaagattgcctaagtataataascaatttttatattaaaaattaagaatgcagatgaaatgaaaataacccctttaaagacaaaatattatgcca

SEQ ID NO: 191790 - DNA, 538 bp, Homo sapiens
cacacactttaaaacaaccagatttcatgagacctaacttactatcacgagaacagcatgagggaaccacccccccatgattcgatcacctccctgattcaggcccctcccctgacatgtggagatgataatccaagatgagatttgtgtggggacaaagagtcagaccatattattccacccctggtccctcctaaatctcatgtacatctcacatttcaaaaccaatcatgccttcccaacagtcccccaaactcttaatgcattccagcattaactcaaaagtccaagtccaagtctcatctgagacaaggcaagttctttccgcctatgatcctgtaaaattttttaaaagttagttacttctaaaatataataagggtacaggcgttgggtaaatgctcccattccaaaagggagaaattgaccaaaaccaagggctacaagcctccakgtaagtccaaaacccagcggggcagtccagtcattaaatcttaaagctccaaaataatcttctttgactctaagtcttatatcc

SEQ ID NO: 191791 - DNA, 494 bp, Homo sapiens
tactaaaagtctctgatatgcagaaataatggtgtaagctgtctttctctttgtctcctctctctctctgcctgggctgccaggcaggraaggtccccctgtccagtggacacgtgacccgcgtgaccttacctatcattggagatgactcacacactttaccctgccccttttgctttgtatccaataaataacagcgcaaccagacattcggggccactaccggtctctgcgcattggtggtagtggtcccctgggcccagctgtcttttcttttatctctttgtcttgtgtctttatttctacactctctcgttgccgcacacggggagagacccaccgaccctgtgaggctggtccccacagtggcctaatacatggttcgtttttattaatgttccaaatacacttgaaaagttgttttttctgtcactggggtgctgcgttaaggtcgatccctgcaccccacacccctgccaccgtgggagttggcc

SEQ ID NO: 191792 - DNA, 494 bp, Homo sapiens
tactaaaagtctctgatatgcagaaataatggtgtaagctgtctttctctttgtctcctctctctctctgcctgggctgccaggcaggaaaggkccccctgtccagtggacacgtgacccgcgtgaccttacctatcattggagatgactcacacactttaccctgccccttttgctttgtatccaataaataacagcgcaaccagacattcggggccactaccggtctctgcgcattggtggtagtggtcccctgggcccagctgtcttttcttttatctctttgtcttgtgtctttatttctacactctctcgttgccgcacacggggagagacccaccgaccctgtgaggctggtccccacagtggcctaatacatggttcgtttttattaatgttccaaatacacttgaaaagttgttttttctgtcactggggtgctgcgttaaggtcgatccctgcaccccacacccctgccaccgtgggagttggcc

SEQ ID NO: 191793 - DNA, 494 bp, Homo sapiens
tactaaaagtctctgatatgcagaaataatggtgtaagctgtctttctctttgtctcctctctctctctgcctgggctgccaggcaggaaaggtccccctgtccagtggacacgtgacccgcgtgaccttacctatcattggagatgacycacacactttaccctgccccttttgctttgtatccaataaataacagcgcaaccagacattcggggccactaccggtctctgcgcattggtggtagtggtcccctgggcccagctgtcttttcttttatctctttgtcttgtgtctttatttctacactctctcgttgccgcacacggggagagacccaccgaccctgtgaggctggtccccacagtggcctaatacatggttcgtttttattaatgttccaaatacacttgaaaagttgttttttctgtcactggggtgctgcgttaaggtcgatccctgcaccccacacccctgccaccgtgggagttggcc

SEQ ID NO: 191794 - DNA, 494 bp, Homo sapiens
tactaaaagtctctgatatgcagaaataatggtgtaagctgtctttctctttgtctcctctctctctctgcctgggctgccaggcaggaaaggtccccctgtccagtggacacgtgacccgcgtgaccttacctatcattggagatgactcacacwctttaccctgccccttttgctttgtatccaataaataacagcgcaaccagacattcggggccactaccggtctctgcgcattggtggtagtggtcccctgggcccagctgtcttttcttttatctctttgtcttgtgtctttatttctacactctctcgttgccgcacacggggagagacccaccgaccctgtgaggctggtccccacagtggcctaatacatggttcgtttttattaatgttccaaatacacttgaaaagttgttttttctgtcactggggtgctgcgttaaggtcgatccctgcaccccacacccctgccaccgtgggagttggcc

SEQ ID NO: 191795 - DNA, 420 bp, Homo sapiens
aacctctggcctcagtcacctcccctgcccagctccagggcactggaggactaatcaggctcgaggtgtagtctagggtggccgggcagcccctggtgtcaggacagcttccctgcgccaccctccccagggtggccctcaacctcgggctcccagatatcctctgcattcattccaggcttccagaggaggaaatggagcatctgggaaacggagcttatattctgggtgactagtgactggcagacccctctctcctgcccccgttcccccagcaacctgtagcagggacatgcgcccctcacctcctgcctggcagcccaagcacctgccatctgctggcctgagccccacaccagcacctkccagggtgcctcagcccatcccaacggccccagtgtgatgctaacgaaatgccaa

SEQ ID NO: 191796 - DNA, 568 bp, Homo sapiens
atctgaaaagagaaactagtggcatctaaagagaataaataattggctcaagcgaaagtttttttcaagttgtggtagcactgagagaacgtgccagtggaaggaagaaagaggaggcagggggttgcagacagaagcacaggtgaggaggggtcacaagaggagacgcagagaccagctggagtgaaattcaacmgttgtatatgagaggctcttgctgcttgctggataccccacttctgttgtgggagataagataaggcctacacagaacacatgtgggttatgaggtcccaaggggcaaggaggcttacaacagccacagtctatagagcaagcactagaatgtgaacaaaggaaaggaaaggaaaaagcccgtttacaggaataacaactgaccaactcgtgcaaaagcaaggccagacctaaattcccaaggctaaatcaactagggtttcatctcaagaaagaatcacagatatgtcagggagagtctaattgtcaaacagaaattgccagactcaggtatcagaaagggaggaatgttagtaccacagaaagaccagag

SEQ ID NO: 191797 - DNA, 568 bp, Homo sapiens
atctgaaaagagaaactagtggcatctaaagagaataaataattggctcaagcgaaagtttttttcaagttgtggtagcactgagagaacgtgccagtggaaggaagaaagaggaggcagggggttgcagacagaagcacaggtgaggaggggtcacaagaggagacgcagagaccagctggagtgaaattcaaccgttgtatatgagaggctcttgctgcttgctggataccccacttctgttgtgggagataagataaggcctacacagaacacatgtgggttatgaggtcccaaggggcaaggaggcttacaacagccacagtctatagagcaagcactagaatgtgaacaaaggaaargaaaggaaaaagcccgtttacaggaataacaactgaccaactcgtgcaaaagcaaggccagacctaaattcccaaggctaaatcaactagggtttcatctcaagaaagaatcacagatatgtcagggagagtctaattgtcaaacagaaattgccagactcaggtatcagaaagggaggaatgttagtaccacagaaagaccagag

SEQ ID NO: 191798 - DNA, 577 bp, Homo sapiens
caggagcacccaaattcataacccaagttcttaaaaacctacaaaraaagttagactcctacacaataatagcgagagactttaacaccccactgtcaatattagacagaccaacgagacggaaaattaacaagtatattcagggctggtaggttctttactactgattcaatttttgaactcactgttggcctgctcagcatttttatttctctctgattcagtcttgggagtttctgaaacttacccattttctctaaactttctagtttgtgtacagaggtattcataatagcctctgagcatcttttgtgtttctttggtaccggttgttacatcacctttgttgtttctgattgtgcttattgggatcttctctctttattttcatcattaatctagctagtggtcgattagtcttgttgatcctctcaaagaatcagcttttggcttcatttaccctttgtatggatttttaaatcttaatttcattcaattctgctctaattttagttctttcttttattctactagctctcgggttagtttttacttctttgtctaattcctctaggtg

SEQ ID NO: 191799 - DNA, 577 bp, Homo sapiens
caggagcacccaaattcataacccaagttcttaaaaacctacaaaaaaagttagactcctacacaataatagcgagagactttaacaccccactgtcaatattagacagaccaacgagacggaaaattaacaagtatattcagggctggtaggttctttactactgattcaatttttgaactcactgttggcctgctcagcatttttatttctctctgattcagtcttgggagtttctgaracttacccattttctctaaactttctagtttgtgtacagaggtattcataatagcctctgagcatcttttgtgtttctttggtaccggttgttacatcacctttgttgtttctgattgtgcttattgggatcttctctctttattttcatcattaatctagctagtggtcgattagtcttgttgatcctctcaaagaatcagcttttggcttcatttaccctttgtatggatttttaaatcttaatttcattcaattctgctctaattttagttctttcttttattctactagctctcgggttagtttttacttctttgtctaattcctctaggtg

SEQ ID NO: 191800 - DNA, 577 bp, Homo sapiens
caggagcacccaaattcataacccaagttcttaaaaacctacaaaaaaagttagactcctacacaataatagcgagagactttaacaccccactgtcaatattagacagaccaacgagacggaaaattaacaagtatattcagggctggtaggttctttactactgattcaatttttgaactcactgttggcctgctcagcatttttatttctctctgattcagtcttgggagtttctgaaacttacccattttctctaractttctagtttgtgtacagaggtattcataatagcctctgagcatcttttgtgtttctttggtaccggttgttacatcacctttgttgtttctgattgtgcttattgggatcttctctctttattttcatcattaatctagctagtggtcgattagtcttgttgatcctctcaaagaatcagcttttggcttcatttaccctttgtatggatttttaaatcttaatttcattcaattctgctctaattttagttctttcttttattctactagctctcgggttagtttttacttctttgtctaattcctctaggtg

SEQ ID NO: 191801 - DNA, 599 bp, Homo sapiens
cactaattcacttgcaccacgtcatcccaagaaagttttatttcactaacaaagtctaaagacaaagagatcaaagaaatctaaatagtgtgttagtgttcactagtctaaaacttggagatcttggttcaggattgcttcccagcaaattttagatttctatgtaggctaatctccattcaggctcagataggytaatacttttttttctcccataggaggacagatgtgagaacatcttagccaagtccttcaaatttatcaaaagaatattgctgaaaaatacattattcagctgttgattcagaaaacttagttttgcaaactattccatgttggccatgttaccagtggctctggtgagaatgactgtaacatctgctctaagctaaactataaagtaactttgtcaccctgtcctttaactagacagctgaggctttaaggggtgatgtctaaggtctgccccatcagctgaaagagtgagcaaatctaagaaggttcaccatgtatgaaaacatgtggaagcaagaggaataacagaaggcaccgatgtgtctgaaatacaccacctgaaagatgccacccctccatttgcc

SEQ ID NO: 191802 - DNA, 400 bp, Homo sapiens
acggggtaggtccctaggttaaccattctactctgcctctattctcatataaacaagttgttataaaaacagagtaccaagttcaagtataaattgaatgtataagactactatgagtaggagggtctaaaacacagaattatgttttataaatattattgtcatctcaaaagcatacacacaaacttgcccaacttaagagatgaaataataaccttagaactgcaagtgtcaggmtgagccagaagcagcaccacctcagtttccccgtctctgattgtactacctcaccctcctctggacaaaataacataacaatgctaagtctagtactgacctgagtctcagcctaaaggcttcccaataagaacaatacccaaacacccacttcccagctccc

SEQ ID NO: 191803 - DNA, 570 bp, Homo sapiens
gtcacccaggctggagtgcagtggtgtgatcttggctcactgcagcyttgacttcccccagctcaaatgatcctcccacctcagcctcctgagtaactaggactacaggcatgtgccaccatgctctgctaatttttatattttttgtagagatagggtttcaccatgttgcccaggctggtctaaagctcctgagctcaagcaagccacccacttcagcctcccgaagtgctgtgattataggcatgagccactgctcctggccttcttttctatccttggtttgcagaacagtgtcctcaacctctccacataccattcagagtctttagaagagatatccctagtggacctcctttgacaatcaacatctcctcttatttctgcttctccctctaattctcacattctacacttggtcacttggtgagcttgtccccttccaagggcccagctcaacttaatccatgtatgattctcctctttactggggctttcactttctccagtcacatcctccagtggcaacaaaggtccaacaccccccatacacacacacacacacacaca

SEQ ID NO: 191804 - DNA, 507 bp, Homo sapiens
ctgtcccagtccatgctgaactctgtccaaggtggctaaggttttgtatatccacatagcctctcctacagtaacactccaggccacctgagcctgggagccagatcacttccactcacaccacaaggcttccttgcttccatgattgggacaatctcaggtgattaaagaccaccacgaaccagaaggaaatcactgatagaacatatagttacagaaacaragaaaggacagacgccagccccaaaatctcagatcagctggggaactttaccaagaagctgctcacagaagagagcactaacagtctggactcctggatttatagtcatatttttcagggagtgtctgtgtaagatctagaaagttctttaacctctcagagactcaaggtctaaactgtaacatgcagataatgcctgcctcacaggtaggtgccataaatcccactcccagccccatcccaggataagttaagggccagtcctatgtcctgccccggattcc

SEQ ID NO: 191805 - DNA, 599 bp, Homo sapiens
aataatattggatatgtatcttcccagccttcttagcacagtatttggtaggttggtgttcagtaaatatcgaggaagaaagttccccaaggactaacaccacgccttcttcatctctgaatcccagagcctagcacttgtgtttgtctcaaagaccagatggaggcgaaagccctttgtaatgtgctatacacttcctggaaccattctctttactttcaaggtggaatcaatcattagtacaaaagaaacccatggtcacaaacaaaactcaccccagtgtttctgtggctttgctgttctcaccagttgcctgttctgtctaaccccggagaggtaaataacaccctgagaatggccctaggctcacacaggtttcccagttagccaatcaagaagmattacaaatggccacactatcagccagagctgctgcctcactggagttccaaaacggagaggatctgctcccctgcaccctcaggcttggaaatgctgagaaatgctaagccactggggtttcaattatacctaatttaaaacgagcaaagtagacttgccccccaaggtgttccacaaaaaacttaaagcctggcagc

SEQ ID NO: 191806 - DNA, 378 bp, Homo sapiens
tccacgtgaaaatttattttgcagtgaaaaatgaaatatcagtatgtgcttttttaaaaaagtggaaatgtgtttaaaaacaggcaaaggacatgaacagacacttcttgaaagaagacatagatgtctccaacaaatacatgaaaaaatgctcaccatcactaatcattacagaaatgcaaatcaaaaccacaatgagatactatctcatactagtcaaatggctattactaaaaagtcaaataaaaagatgctggcaaggttacagaaaaaaagagaacaattatatactgttggtggggatgtaaattagttcagccactgtggaaagcagtttggagawttctcaaagaacttaaaactatcagtcaacccagc

SEQ ID NO: 191807 - DNA, 530 bp, Homo sapiens
accaccatcattcttcacagaactagaaaaaacaatcctaaaattcatatgaaatccaaaaagagcccacatatccaaagcaagactaagcaaaaaaacaaatctagaggcatcacattacccagcttcaaactgtaccacaggctatagttaccaaaacagcatggtactggtataaaaataggcacataacctaatggaacagaatagaaaacccagaaatgaagccaaacacttacttggcttgcatatgttaaamcatccctgaatccctggtatgaaactcacttgatcatggcaaattatctttttgatattctgttggattcagttagctagtattttgttgaggatttttgcatctatattcatcagatatattggtctgcacatttctttttttgttatatcatttcctggttttggtattagggtgatactggctttatagaatgacttagagatgattccctctttctctatcttgtagaatagtgtcaataagattggtaccaattcttctttgaatg

SEQ ID NO: 191808 - DNA, 573 bp, Homo sapiens
ttattaggcctaacttaaagaatgaaggggagagtgatactgtccaagcatacttctactccagaccctgtcccttgttctaagtgaccatgcaaggccatttcttttaatgcctattagtatttcttggtgaagggagatgagatcgtctgtgtctgcacttttggttaacttctcagcatctctgccttaccccattgtttcatataattgtacataatttatagaatatcataaagttgttccctgttggctttaaaattgcacatattggcattgaatttgcacaacatcctctgctttttcttgagaatcaggtgaaataattcatgcagcttccctagcagagggatggagtatcatgggtgtgctatatatcttarggctttttcctttctattataggtgctggttgaacacgtaggtaaatagtggttttaaaggcaccagcaaacttctcacttcccttagtgttcccattaaccctgtccatagacgaccatcattaatccctgagaaaatgttgctgcttctgcttggaatgactttacttcccttttctgtatggcaaaa

SEQ ID NO: 191809 - DNA, 599 bp, Homo sapiens
ctctaactcatgctcagtgaacctgagaactctttctggrtagggcattacctaccttccttgggtaatattcagccttagaacagggaatggaatgggaggctccttctccctaggctgaggaaaattttcttcctcggtggcaagtgctcatcattcagaggggtgtccagggctgacgggactgaaggagtgtgacttgcaacacaggaggcccctcttcagaacaagaatcttccactcagcttctgcatctgcattgaaagcaccccagcagattaaaccacttcatcttagctaaggcatcaggtgaaatcaaagaaattttagagctgaataaatttgtagaccatcaattcaatatccttagttttcagatgatgcaataaagggccagagaatttaattgacctttcaaagttacacagctcattatttattaatcaagttgctgaggtacaaataagtgctctttccatgaccctgggattcctttctagtgatcttgattttatgatttttgttgccaatgaacaagtaaatcttgtttccacacaacaaaattccccggggtcctgtgatctttcataaaatgaaca

SEQ ID NO: 191810 - DNA, 599 bp, Homo sapiens
ctctaactcatgctcagtgaacctgagaactctttctggatagggcattacctaccttccttgggtaatattcagccttagaacagggaatggaatgggaggctccttctccctaggctgaggaaaattttcttcctcggtggcaagtgctcatcattcagaggggtgtccagggctgacgggactgaaggagtgtgacttgcaacacaggaggcccctcttcagaacaagaatcttccactcagcttctgcatctgcattgaaagcaccccagcagattaaaccacttcatcttagctaaggcatcaggtgaaatcaaagaaattttagagctgaataaatttgtagaccatcaattcaatatccttagttttcagatgatgcaataaagggccagagaatttaattgacctttcaaagttacacagctcattatttattaatcaagttgctgaggtacaaataagtgctctttccatgaccctgggattcctttctagtgatcttgattttatgatttttgttgccaatgaacaagtaaatcttgtttccacacaacaaaattycccggggtcctgtgatctttcataaaatgaaca

SEQ ID NO: 191811 - DNA, 414 bp, Homo sapiens
gaattcaaatcctcactctacctactctgtgattttagacaacatttttttagtaaattctccatgtaaaatagggrcaataacaccccctccaatacctacctgtcatgatgccctacatacgatagctgcaactatgtcagctctaaccgtgtatatgattaccaaagtaggttttcacccatgagaaagccactgtttccagaagatatacgcagtgataactacttataatattcatttcatctcaacacctatctttttagacttttctgagagaagccgtatctccatctatctaagatacttctgcttcccaggaatatcaattgatatggatgtgagcaaagattagaaatgagagaaacaggaaagtgtctctggagatcactttccatactggtaaaaagcctg

SEQ ID NO: 191812 - DNA, 414 bp, Homo sapiens
gaattcaaatcctcactctacctactctgtgattttagacaacatttttttagtaaattctccatgtaaaatagggacaataacaccccctccaatacctacctgtcatgatgccctacatacgatagctgcaactatgtcagctctaaccgtgtatatgattaccaaagtaggttttcacccatgagaaagccactgtttccagaagatatacscagtgataactacttataatattcatttcatctcaacacctatctttttagacttttctgagagaagccgtatctccatctatctaagatacttctgcttcccaggaatatcaattgatatggatgtgagcaaagattagaaatgagagaaacaggaaagtgtctctggagatcactttccatactggtaaaaagcctg

SEQ ID NO: 191813 - DNA, 521 bp, Homo sapiens
aagtagctgagaaagaaatacatgggggaggtgagcactttgctggccaggatggtcaccacaatgaggccattgcccagcacaacagctgtgtacatgaggagaaacatcacagaaatgaccctctgctcactccaattctgggaaaatcccacgaaaattatttcagtcacattgtttgtagcaaccatattttaaagcacaggagctgacagcctggaatcacagaaatcaaagaactctcctcaatcattagaaacatccttcccaggcctgaggactatcatcatcctgctccctctygagtttgttctctcccttggttttccccaaaacatgttctgagacaagtgaacaaaacagcaaatatcagctgcttgatgttattcccaacataagcctcgattttgtagtgttgcggccttgaagtgtttttgctgatctagcacatgctgattgaatgctcacaagaaaaatcagaggacattttatagataagaaaaaaactgagactcagagag

SEQ ID NO: 191814 - DNA, 597 bp, Homo sapiens
tagctccccaccatgctcctctgtgtacccagctgatccttctgccatataccaatctttcacacacaggatgtttatgcagaaggcaggaatcttacatggggaggtttcatcctcacggraacaatgactctatcactaggtgagtattttctgtgaaatttagcttgaaagcaaatgttctataattacttctggtttggagtgtcaatgagaggtcccctcaaaggatttgtaaggaccactttagtcttctgattttaaaagattcattgttgtatttttagtccaagcgtattgaaggttaacagaacaagatgtatttacaatataatcatcaaattgtctcaaaaagctacaaattgagtggatttagagtagaatttttaaaaggaaattaacatgtattaagcctctgcacggaaaagaaatacctttgagagataatttcataaagaggtcaatagatgtgtaaaccactgacagtgttagtgacattttgcctgcgatgtctaaaatactttaatactgactttgtaattggcagggccaaaagaagagaacctgaaacataaatctgtgttctaatcagacagc

SEQ ID NO: 191815 - DNA, 568 bp, Homo sapiens
tgaaatttagcttgaaagcaaatgttctataattacttctggtttggagtgtcaatgagaggtcccctcaaaggatttgtaaggaccactttagtcttctgattttaaaagattcattgttgtatttttagtccaagcgtattgaaggttaacagaacaagatgtatttacaatataatcatcaaattgtctcaaaaagctamaaattgagtggatttagagtagaatttttaaaaggaaattaacatgtattaagcctctgcacggaaaagaaatacctttgagagataatttcataaagaggtcaatagatgtgtaaaccactgacagtgttagtgacattttgcctgcgatgtctaaaatactttaatactgactttgtaattggcagggccaaaagaagagaacctgaaacataaatctgtgttctaatcagacagcacattaaatggacatttccggggttcacagttaaggaaacctaaaatggggatgcacacagaatctcaaagaaggcctaacctcagtaaacaacttctgtgaaaatttctaaatatttaaaatgaaa

SEQ ID NO: 191816 - DNA, 558 bp, Homo sapiens
gtactagtaatgctgtttacagccaaagtaatcatacagagattacactactgcactcatccagaatcaaagccaaagtgccctacccaaccaataaaatcaatacatcttcaggaaaaagcccttcccaagaaagcagattcaaaatactggaataagtgactattataccagatacacagatatcgatatacggacacagaaaatatgaaagaaatgagaaaatatgatgccctcaaaggaatatagtaattctccagtaacagaccccagtcaaaacaaatctaagaaatcctggaaaaagaattcaaaatattgatttttaggaagctcagtgagatacaggagaatactgaaaaacaatacaaagaaatcagaaagacaattcaagatatgaatgaraaatttatcaaatagatatcataaaaagaagcaaatagaaattctgaaacaataattcatttaatgaaatataaaatacatttgaaagcttcaacaataaggcagattaagcagaagaaagactctcagaactttaagatatgtcagagataaata

SEQ ID NO: 191817 - DNA, 429 bp, Homo sapiens
ttaggctggattacagtggcaggatcatggtacatggtagcctcaacctctgattcttaatgatcctcccaccttggcctcccaagagctgggattacaggtgtgagccacgacatctagccaaagaaaataaatttggctaagtcgtgtctcatttgcggaaacactgtagcatataaggtgtacagaggagtaatttaaaaaaaatttttctataactccatcaggtgcagatttttctttaaaaaaaaattctgtaactccatcatgcacagaactagtaatttcycttattatcttccccttacatctttgcagtatacgctggattcgtagaagtacctgaggaatcacctaagcaaccctctgaagtcaatgttaacccactctatgtctctcctgcatgtaaaaaaccactaatccacatgt

SEQ ID NO: 191818 - DNA, 531 bp, Homo sapiens
agcattatgtgatccaggtagcccagctccagaatgcctggccacacatgccaaattaggacaatacccaacaggctctaatgagtaagcctgatgaacacctctccaaaatgtcccaagatgacaggatgtgcatgggattatacttttaatactccactgtcaagacctgctgagggaaattctgttcttctggtcctaaagaaaggactaagcttcttttgaaaacctgccatgattactctgtcttctgtattccgccatcagcctgcactaaaacccttcttaaatgaaagatactctgtgatagagtgcttcacctttcctctcctctggacttgaaaatactggggtggcatgggagggaaggcagcattgaaacttgcttgagttttacccataccmtgtgaatctatgcctatgtgtaaagtcctatatatttagaggaaaattaatcagcttctaatttcactactgtagccagaaggtatttttaaaatcagattaatatatccctctttggccagaatt

SEQ ID NO: 191819 - DNA, 473 bp, Homo sapiens
cattgtcccttcactttcttgtttcagctggcaaaggatgtaaagattccagatggatttacatctaagtcagaaatattcattacctatgagccactttaaatattttctgtcctttctaaatgattacctaacatttcgatctccctttttgacatgtgcccagcttcctttctttattaacactttatcctttaaagctcggtttatcatttacaatctctcttacttggttactttgggacaycattgtagattcaggtcacttttgcctatttttaccagaataactgccacagagtgcaatgggggttgacttcctaaaatagtttactgtcttactgtcttcaaatatgattttaagataaaacttatttttaagcttaactttgagtaaatattatgaagaaaaaatgaattattaaaagacttgattctacacactacgtatatgaggaaattttctgaaatta

SEQ ID NO: 191820 - DNA, 555 bp, Homo sapiens
cttctttgttgcttcattgtgcatattatcctcacttagaaccaggcactaacatgagaaaatcacgttttcattggagtttcaaggtggtttggtgacattgattcctgacactgccccaccaaccatgtgtgcacacrcgcaagcacacacagacacacacacacaaatttaggaaataaaaatattaatcattacttgaatattccaggaaggggatagtgagctgcatatctctctcccactgggtgaatcccaggaaagggcaaaatttccccatgtcaggcatataagtttatatagattatccttcagattaagttcttaggatatatagatttgaggaaggtatttaagactttccttcacaatgaaaatatactgtaaactatgaaagcatgtcttcgcaaattaatataagcaaatatcctgagtcttctactcccacaccataaatccctaaaagtttagaaatacatgtagaactggttttgattatagaattaggtacttttccttgttttgcatatgtatcctgttagtgaactggaaact

SEQ ID NO: 191821 - DNA, 557 bp, Homo sapiens
attaaagggcctgattttcttaggtacagcagtatctaaacttctctatacatatatatgagaatgtttcgaatagatgctaatcaaatagatttgatcagtgagtgggtttttgagggtcagttaagaaagttatttgacccaacatgtagtgaaaggaagtattgtataatgttttaaaaacatgggatctggggtcagattttctggatttgtatcctgattgtgccacttaagtatctcaggcatgtgacctctcaattttttcatctgcaatgtgggcacaatgatactctttgacctatgggatagttgtgaaagttaactgagtttgtcaatgtaagaggttcctagaacctgttacataataagtcatccacaattttgcatttatatttatcactgttattagttacttgagtctaatggctctttgtcctggagtaattttgagacaataaccagcataytgaagaaatttcaattgattcattttctttcttaaacaatcattattttttattgctctattctactattaagaaaatagtattgct

SEQ ID NO: 191822 - DNA, 575 bp, Homo sapiens
atgacatacaatttatgatattttaaattacatttcagaaacacagtgctgacatttgggttgcctagccactaggcctattggatgggggtttgagtatttttccttttaggctgaaattatactgtttatttgcctaccaaatgtctagcactgtgaatgctttctttttaggtagaaaagtttcctcacatccttgccattttgcaaatatagcttaattaagtcagccaacaaataatgcttgagcacccttaaagcacatagcactatgcatttcattatacattgcaagttkctgaagcaggagctgaagctgaagctgagttgaggccacaggcatactaggctattgtgtcttcatagtacagtgccacaagtccagagctatgtcttggttccaccttcatcctgtgacattgtgataatgtgcctcaaaagtagggattgatatttcttaaggaaccctcaagctgctctagcatagaaaacattaaatttacctattaacattgatttgaatgtgtaaaccattctgtaataaaaatttaaaaaatacatttattgaatgcaca

SEQ ID NO: 191823 - DNA, 564 bp, Homo sapiens
atgcctgagaacagagatcccagagtctgggctgaataaattacatgtaggtctaagtggctatagcttggaaggttagagggtggcagaggcagagagttaagcaggtggatggaaacagtaggggtttgcaggtgaggaggtaartacaaggtgtgctatttaagtaaaattgttcttatattgttctcatcagatgagcatgcaggtttgaacagaaattacagctttaagactttcctggtggttaacctctacaagaattttgcaagcagctgaattcctcccacctttccacaaaacaaagtgtttcaatgacagtagaaaaccagttacaaagcttggggtggatgcctaagaattcgttagtctttagttcatgaatttctttaagggcaggaacctggactgtttcatttcaaatctactcttagaatacctagtaaagtgcattgtacatattaggcagcagggcataagggataaatggcaagcagaaatttcaatgcagactgttttgtatattttctgttgcccacactcatatactccttttattagtag

SEQ ID NO: 191824 - DNA, 577 bp, Homo sapiens
gatgtttaattttcacatttccctttgttattgattctaattttattccatataaagagaagatactttatatgatttcaatcttttaaagtttattgagacttgccttgtcatttaacacatgacctattctagaatatattgtatgagggcttgagaagaatgtgtattytgctgttttttgtggtgtgttctatttatgtctgttagttctagctgctttacagtgttattaaaatcttctatttacttgctgatcttttgtctagctctttcattcagaattataggtggagtatcaaactttccagtgttattgttgaactgtttatttcttccttaaattctgttcttgccacatatattttgagttcttttgttaagtgcatatatatgtttataattgatatactttcttaatgaattgacaatttattattatataatgtcccttttctcttgtaacaacttttgttttaatgtctaacttatctgataatactgtagtcatacccactctcttcaggttactattcacatgaaatgatttttccacccttttactttcaaactatgt

SEQ ID NO: 191825 - DNA, 529 bp, Homo sapiens
aataaagccattgagtattgctactttttaattccaaaaactgaatggtggaactaatgaattaaggtcaaacatgttttagatatcattgtcacatgtcacattttacattgttcacaaccatctcaactgatctaaaaataatagttcaagaaagagtaaaatggattctatatggatttatattttcagaagctagtccacagcctactttgtaaatatatggattaaccatttcttacagttttgccacctcgtatttcaaagtgtcttgtttggtgcttaacatacagaagctgttcaataaaaacrtgaattgaggggcagaaatgggccctttttgctttgcctggattgtttttggtgctattgtatctacaaccacttcagactcaggaatccatttgttgtttcatgaaagtatcatctgtgttctggtgaccaaaatgtcatgacctattattggtaatttcaaaagattttaccccacaaacctgaagtgaaacaaaggataggtcaatatagacat

SEQ ID NO: 191826 - DNA, 582 bp, Homo sapiens
gcttctcatcttcagctttgcacttctcagcttcctgggccatagctcaatatcttccttgtccaaatggctcttgtcattaatgacagtaatygtgctctctttttctactcttgtccacagcagagtcactgaggatgccattggcatcaatgtcaaaagtgacttcgatctgaggaacagtggagtgcaggaagtaggcctgtgagttcaaacttgccaatccatagagacagaaagtagattgatgctttctagagggaggaataagtgaatggagaatgatggctagtggatatgggatttcttttcaggttgatcaaactattataatatttttattgttgttttttgtttgtttgtttttgagacagagttttgctcttgtttcccaggctggagtgcagtggcatgatctcggctcactgaaacctctgtttctgcctcctgcgttcaagccattctcctgcctcagcctcccgagtagctgggactacaggtgcacagcaccatgcctggctaatttttgtatttttggtagagatggggtttcacaatgatgaccaggctggtcttgaattc

SEQ ID NO: 191827 - DNA, 582 bp, Homo sapiens
gcttctcatcttcagctttgcacttctcagcttcctgggccatagctcaatatcttccttgtccaaatggctcttgtcattaatgacagtaattgtgctctctttttctactcttgtccacagcagagwcactgaggatgccattggcatcaatgtcaaaagtgacttcgatctgaggaacagtggagtgcaggaagtaggcctgtgagttcaaacttgccaatccatagagacagaaagtagattgatgctttctagagggaggaataagtgaatggagaatgatggctagtggatatgggatttcttttcaggttgatcaaactattataatatttttattgttgttttttgtttgtttgtttttgagacagagttttgctcttgtttcccaggctggagtgcagtggcatgatctcggctcactgaaacctctgtttctgcctcctgcgttcaagccattctcctgcctcagcctcccgagtagctgggactacaggtgcacagcaccatgcctggctaatttttgtatttttggtagagatggggtttcacaatgatgaccaggctggtcttgaattc

SEQ ID NO: 191828 - DNA, 582 bp, Homo sapiens
gcttctcatcttcagctttgcacttctcagcttcctgggccatagctcaatatcttccttgtccaaatggctcttgtcattaatgacagtaattgtgctctctttttctactcttgtccacagcagagtcactgaggatgccattggcatcaatgtcaaaagtgacttcgatctgaggaacagtggagtgcaggaagtaggcctgtgagttcaaacttgccaatccatagagacagaaagtagattgatgctttctagagggaggaataagtgaatggagaatgatggctagtggatatgggatttcttttcaggttgatcaaactattataatatttttrttgttgttttttgtttgtttgtttttgagacagagttttgctcttgtttcccaggctggagtgcagtggcatgatctcggctcactgaaacctctgtttctgcctcctgcgttcaagccattctcctgcctcagcctcccgagtagctgggactacaggtgcacagcaccatgcctggctaatttttgtatttttggtagagatggggtttcacaatgatgaccaggctggtcttgaattc

SEQ ID NO: 191829 - DNA, 507 bp, Homo sapiens
atctgattcaatctccttttcagtataaataatgtgtagtcatagacacataatctttgcacttgtcctcaggaacaatgtatgcaggtgtgtgtgcatataaataygtaaaccaaaaatagtattctaagccaactgatggaccctgtcctctcagccaacggcattccaaagttaacctgaaaaactagttcaggccttgatgggaaggggacatgtcagacatgcctcctcattccctcctcccttttggaattcaggcccagctgaccaacattaacatcaacacagagacctgaagactgataggacagactctttaagtctgaaaagaagcatttacaatctattctctctgaagcctgctacgtggaggcttcatctacataataaaaccttcatctctacaaccccttatcttcacccagacattctaggtctttagaaaagaactctttcaaccaattgccaatcaaaaaatctttgaatctgcctatgacctggaat

SEQ ID NO: 191830 - DNA, 519 bp, Homo sapiens
tctgattcaatctccttttcagtataaataatgtgtagtcatagacacataatctttgcacttgtcctcaggaacaatgtatgcaggtgtgtgtgcatataaatacgtaaaccaaaaatagtattctaagccaactgatggaccctgtcctctcagccaayggcattccaaagttaacctgaaaaactagttcaggccttgatgggaaggggacatgtcagacatgcctcctcattccctcctcccttttggaattcaggcccagctgaccaacattaacatcaacacagagacctgaagactgataggacagactctttaagtctgaaaagaagcatttacaatctattctctctgaagcctgctacgtggaggcttcatctacataataaaaccttcatctctacaaccccttatcttcacccagacattctaggtctttagaaaagaactctttcaaccaattgccaatcaaaaaatctttgaatctgcctatgacctggaatgccacccccacct

SEQ ID NO: 191831 - DNA, 510 bp, Homo sapiens
ctccttttcagtataaataatgtgtagtcatagacacataatctttgcacttgtcctcaggaacaatgtatgcaggtgtgtgtgcatataaatacgtaaaccaaaaatagtattctaagccaactgatggaccctgtcctctcagccaacggcattccaaagttaacctgaaaaactagttcaggccttgatgggaaggggacatgtcagacatgcctcctcattccctcctcccttttggaattcaggcccagctgaccaacattaacatcaacacagagacctgaagactgataggacagactctttaagtctgaaaagaagcatttacaatctattctctctgaakcctgctacgtggaggcttcatctacataataaaaccttcatctctacaaccccttatcttcacccagacattctaggtctttagaaaagaactctttcaaccaattgccaatcaaaaaatctttgaatctgcctatgacctggaatgccacccccaccttc

SEQ ID NO: 191832 - DNA, 410 bp, Homo sapiens
ttgagttggggagtgatggttaattttaggtgtcaacctagctaaattaaggaataccttaataactggtaaagcagttgatatggtctgactctgtgtttccacccaaatctcatcttatagctcccataattcccacgtgttgtgggagggaggcagtgggcgatgattgaatmatgggggcaggtctttcctgcgctgttctcgtgatagtgaatgggtctcatgagatctgatggttttgaagatgggagtttctctgcacaggctctctctttgcctgctgccatccacagaagatgtgacttgctcctccttgccttccaccatgattgtgaggcctccccagacacgcggaactgtaagtcattaaacctctttcttttgtaaattgcccagtcttgggtatg

SEQ ID NO: 191833 - DNA, 410 bp, Homo sapiens
ttgagttggggagtgatggttaattttaggtgtcaacctagctaaattaaggaataccttaataactggtaaagcagttgatatggtctgactctgtgtttccacccaaatctcatcttatagctcccataattcccacgtgttgtgggagggaggcagtgggcgatgattgaatcatgggggcaggtctttcctgcgctsttctcgtgatagtgaatgggtctcatgagatctgatggttttgaagatgggagtttctctgcacaggctctctctttgcctgctgccatccacagaagatgtgacttgctcctccttgccttccaccatgattgtgaggcctccccagacacgcggaactgtaagtcattaaacctctttcttttgtaaattgcccagtcttgggtatg

SEQ ID NO: 191834 - DNA, 410 bp, Homo sapiens
ttgagttggggagtgatggttaattttaggtgtcaacctagctaaattaaggaataccttaataactggtaaagcagttgatatggtctgactctgtgtttccacccaaatctcatcttatagctcccataattcccacgtgttgtgggagggaggcagtgggcgatgattgaatcatgggggcaggtctttcctgcgctgttctcgtgatagtgaatgggtctcatgagatctgatggttttgaagatgggagtttctctgcacaggctctctctttgcctgctgccatccacagaagatgtgacttgctcctccttgccttccaccatgattgtgaggcctccccagacacgyggaactgtaagtcattaaacctctttcttttgtaaattgcccagtcttgggtatg

SEQ ID NO: 191835 - DNA, 607 bp, Homo sapiens
gcggtcaagaaaagctacacagagctcaagttggggttctttgggtgcaatgcaatttacagaaaccatcaggcagacagtgaattgttcgttatctgttctctccttcttccatagrataggatttcagctgcccaactgagagctatattcccagactgtcttgcagctaggtggggttattattcagttctggccaatgagttgtgagcagaagtgcagaagtggtgtataccatttctgagtcttgcccttctaaatcctgagcatattcctccctggtgtgtaggtgtggtgctgggatctagctttgatcttgcagagaaaagcaataccttaaggcatggactgctgggaaacagagacagaaaaagcctggttccctggatgtcctagtgcctcagagcccccaacctccctggactgcctgcctatagatataataggtaaactatcctgttggagctatatttgggggtcttttgggcaacagcagcagtttagcccatgctgtaaataatttattactcaagctatttgaaggaaaaaagaaaagagggcaataaaggggtactatgcaacccaagtagtggaaaatgctgcccag

SEQ ID NO: 191836 - DNA, 599 bp, Homo sapiens
ggagatgatgctctagcgcaagggagtgcatggtctgagaaggaggtcatatagggccttctaagatcttccaaagacttgcaactatgaactattcaccgtgaatgctatgtgaagccattcacgtgctttcaccagaggggtggttttgcctggctggttttgattctgttttttaagataattctagctgatatgtaagaatagatgccagcaagccatggcaggagtgagaagactggtgtggagactactgtaataatggtccagcaagagctagggtggcagtcgacatgcaraggcatgttttctacttttttaactttttattctgcaggtggtccttcgctggtctcatactgcatttccttaggtcacattggtgcaatctgtaataaaagatgcctcaatgacaaaattgtttgctacatggagggattcctcactcccatgtctggaaatgaaatcttgcaggtcattaccagttaagataacccttgaccatcctttgtagttcactctgcctttgcaccatcatcctgtcagcagatttctctatcactgaatgctatttattttctttatagcactcattataa

SEQ ID NO: 191837 - DNA, 594 bp, Homo sapiens
gttaatattaattctaagatatttgtttacaacaaatgtatacacacaacctgaaaggaatgtgtatgttatttaccatggaatatttttgattttttaaaaaagaggatacttccaagatgtgtgttttaaagtaaatgtataaaacagaaagaagcagattcaaaagagttgctaaaactattatgctctagaaaatgcggtaagtgcktttattcctgtgtgggccagcatgaatgaataccagcccttctcttttctcttcatttaatcttgcacagcattcaatattgtgttttgagctgtctcatattgcctcttgggtgttctattatctttcttatttgaccatgatgaagatggaactcctcatatttccttcaaaattcttgcttctttctaattattggtacagtcatcattctttctaggatacccttctccagatagcacattttaacatttcaaggaattctacatgtaaaatgtatgtaacagacaaaaatgattccaggttgatgatgtacctgtaaaataaattcattagtccagttgtataatgataaattatgggttgctaagcttacagacaag

SEQ ID NO: 191838 - DNA, 473 bp, Homo sapiens
tttcatgcttttctcttgaaaaccctgattgctgaaatacaaaataatttttggctacacttcttcctattcttttgactttctcctacaatattttatgtaatatttaacttttagcctttttttcactgtccacatttttgatggtagaagtaatattcccgttcattttttcaaggctttccttttctttttttgaatggcaaccatgttttaacttactgaggacttcatattcagttttatcttattgttgctaacagaaatatattttgattgaaaatacattggtgcactagagagtgaattgtaattttggacraagtattttcaaaattatgttatttagacaaataatcataagtagggttttttagcgaaagtgtgatttttaatttttggtttttttttttggtcacaatgtagtcacacaaaaatatgatggggctgttatatcaatccccttttccaag

SEQ ID NO: 191839 - DNA, 566 bp, Homo sapiens
gaataagaccctgtagtctaacaagattgtgataattttcccaaatacataggttctctttgtgtaattgaagaattagagtgctagaggtatcttgaattaaatagtaaatttgcagggtaagataattgatgtgatttgaatgtgtcccccaaaagttaatgcattaaaaacttggttgccattgtaacatattaagaggcagggccttcggaaggtgattgggccatgagggcaccaccttcaaaaagtgactgatgcccttattgctagaatgagttatcacaggagtggggctcctaataaaagggtaagttcaatccctatttcactctctgtctcatgtacttgcttcctcctttgccttctgccaagggctgtctctcaccagatactggggctatgcccttcgacttcccagcctccagaagcataagccaaataaatttttgttttttwatacattacccaacctgcggtattattctgttataggagcaggaaactgactaagacagaaaattggtactgaggagtagagtcgttgctaaaacaaatacctgaaa

SEQ ID NO: 191840 - DNA, 590 bp, Homo sapiens
agtcactaaaagctgttaggttgctgattcagtttattatagcaaaaatatacagattacaataatctaaggacacagtctcacaggagagaggaaagttccatgcatagaacttatagttatccttttccagtgaaacagtggacaaaattttcctagaaacaatgtgtgagaaaacacatgaaggtaagctcacctgtgttttggtrtccagagtctttatgtggggctccatcacatagacatgattgactgcccacgtggctgaccttagttgccagtctgtctggaggttgagctggtacctcatgattcagagcacccacaataaatcacattgttagaccatcttctgaggcccaaggcccttagatgaacaaggacacttttatcaggcaggatactccaagggcttaggaataacttcccaggagctgtggtctaaagccaaacttctctttgggcaaggttcaattgtttactctacaaaatagatatagcactcccccccagctcgggacaactcttaagggacatcctagttgcagaactcactctggagtcagctgaggcctcctttgagactatgg

SEQ ID NO: 191841 - DNA, 633 bp, Homo sapiens
ccattatggccccatcttaactaattaacctgcaaataccttgttttcacataaaggcattttctgagatttcaagtggacacaaatttttgctgacactattcagcccagtagggtatagacagtccccaatttatgatggtttgacttatataattttttgcctttatgattatgtgaaagctataggtacttagtagaaactctattttgagcacctgtacaaccattctgtttttcactagtgcagtattcaataaattacatgggatattcaatcctttttaataaaataagctttgtgtagataattttgctgaactgcaggctaatatcagtgttctgagcacatttaaggccaggctaagttatgatggctggtagactagatgcattaaatgcatttttgacttatgatattttcaacttatgtggacttatagggatgtgaccctattgtaagccaaggtgaatttatatttgtaaaggaattttccaagagaagaaagggtccatattggatgatgartaaacattattgtctttcttctgcatcctgtttctctgaactctagattacctggggtgactatgatacaaagcactaaaggactgaccagtgtcgaccaagca

SEQ ID NO: 191842 - DNA, 569 bp, Homo sapiens
tgtatggatttcagattcaagatggcagaagttttctctctctctgtcactcagatggcattaaaattatagtaataatttttaaaaactataaacttataataaccagaagaaataaagacatgtggtggtagcaatgctctaatggttgatatctttcaaaacatctttggaaggtagaaaacctatgaagaaataattgatagaactgagtgaagaaagcttcagggtaggaatgtacacttgggtgttagcaaaaggagaacacctattgctcartataattatagagaggctctacccgatgagacagtgggcatcagagtaagagtagaaagtggggctgaaaacagaagactaactgaagatccatggagctgttgactctactccttccatgttttctgtgcaacccaggacagcccttgtcctttagctgaatcttctctcaataaattgaaaataatcactcggggagaggtagtgtggggattactgtcccagagtaaagctcttctcattctggaatggaggggtccaagtgtaatgactggtttcccacctgttca

SEQ ID NO: 191843 - DNA, 569 bp, Homo sapiens
tgtatggatttcagattcaagatggcagaagttttctctctctctgtcactcagatggcattaaaattatagtaataatttttaaaaactataaacttataataaccagaagaaataaagacatgtggtggtagcaatgctctaatggttgatatctttcaaaacatctttggaaggtagaaaacctatgaagaaataattgatagaactgagtgaagaaagcttcagggtaggaatgtacacttgggtgttagcaaaaggagaacacctattgctcagtataatkatagagaggctctacccgatgagacagtgggcatcagagtaagagtagaaagtggggctgaaaacagaagactaactgaagatccatggagctgttgactctactccttccatgttttctgtgcaacccaggacagcccttgtcctttagctgaatcttctctcaataaattgaaaataatcactcggggagaggtagtgtggggattactgtcccagagtaaagctcttctcattctggaatggaggggtccaagtgtaatgactggtttcccacctgttca

SEQ ID NO: 191844 - DNA, 569 bp, Homo sapiens
tgtatggatttcagattcaagatggcagaagttttctctctctctgtcactcagatggcattaaaattatagtaataatttttaaaaactataaacttataataaccagaagaaataaagacatgtggtggtagcaatgctctaatggttgatatctttcaaaacatctttggaaggtagaaaacctatgaagaaataattgatagaactgagtgaagaaagcttcagggtaggaatgtacacttgggtgttagcaaaaggagaacacctattgctcagtataattatagagaggctctacccgatgagacagtgggcatcagagtragagtagaaagtggggctgaaaacagaagactaactgaagatccatggagctgttgactctactccttccatgttttctgtgcaacccaggacagcccttgtcctttagctgaatcttctctcaataaattgaaaataatcactcggggagaggtagtgtggggattactgtcccagagtaaagctcttctcattctggaatggaggggtccaagtgtaatgactggtttcccacctgttca

SEQ ID NO: 191845 - DNA, 414 bp, Homo sapiens
aatgcctccaacccagaaaagcagcaaagagaaattccagcctgacagctcggtcctgggcacagggagaaattagtacatattggagagaaaagacaggggatgctgtgtaagagatgttggcagtgtgggggatggaggattttatagattaaattgtatattaagaacttagggccaggcatggtggcycatgcctataatcccaagactttgggaggctgaggtggttggattatcacttgatcccaggagttcgagaccatcctaggcaacatagggagactccgtctgtacaaaaaataaaaaatttagctggatatggtggcatgcacctgtggtctcagctatgcaggagactgaggcgggaggattgcctgaagccaggagatagaggctgcagtgagctatgat

SEQ ID NO: 191846 - DNA, 515 bp, Homo sapiens
agaagaaacatacatgcacacacccatcccccaccccaatttctgtaggggcagagggatgtgtgtgggtggggagaatgagagtgtgaaatcaaaaggatgattaagagaatttgacaaagaaaacgacttcttccacccatttaacagccacattaattcacttggatgatcaaatgmaaaagacaaagagaattacaaccttttccaggccaagaaatagtaattattcagaggaaaatcttggcaaaatgaggaataaaccaagcaaaaagtgcgagagagagggggagagagaaaatgggagagagaaacacacacacacacacacacacacacacacacacacacacacacagagattgagagagagagagagagagactgaagaacaaaaaagccaagttagaccacagtgtttgggcaggctttgtacattttgcctcctcttagtttaaaaggaaacaaaaatagaaagaaaaaagtcaaagttttcattttaacaggaaatggaa

SEQ ID NO: 191847 - DNA, 515 bp, Homo sapiens
agaagaaacatacatgcacacacccatcccccaccccaatttctgtaggggcagagggatgtgtgtgggtggggagaatgagagtgtgaaatcaaaaggatgattaagagaatttgacaaagaaaacgacttcttccacccatttaacagccacattaattcacttggatgatcaaatgaaaaagacaaagagaattacaaccttttccaggccaagaaatagtaattattcrgaggaaaatcttggcaaaatgaggaataaaccaagcaaaaagtgcgagagagagggggagagagaaaatgggagagagaaacacacacacacacacacacacacacacacacacacacacacacagagattgagagagagagagagagagactgaagaacaaaaaagccaagttagaccacagtgtttgggcaggctttgtacattttgcctcctcttagtttaaaaggaaacaaaaatagaaagaaaaaagtcaaagttttcattttaacaggaaatggaa

SEQ ID NO: 191848 - DNA, 515 bp, Homo sapiens
agaagaaacatacatgcacacacccatcccccaccccaatttctgtaggggcagagggatgtgtgtgggtggggagaatgagagtgtgaaatcaaaaggatgattaagagaatttgacaaagaaaacgacttcttccacccatttaacagccacattaattcacttggatgatcaaatgaaaaagacaaagagaattacaaccttttccaggccaagaaatagtaattattcagaggaaaatcttggcaaaatgaggaataaaccaagyaaaaagtgcgagagagagggggagagagaaaatgggagagagaaacacacacacacacacacacacacacacacacacacacacacacagagattgagagagagagagagagagactgaagaacaaaaaagccaagttagaccacagtgtttgggcaggctttgtacattttgcctcctcttagtttaaaaggaaacaaaaatagaaagaaaaaagtcaaagttttcattttaacaggaaatggaa

SEQ ID NO: 191849 - DNA, 515 bp, Homo sapiens
agaagaaacatacatgcacacacccatcccccaccccaatttctgtaggggcagagggatgtgtgtgggtggggagaatgagagtgtgaaatcaaaaggatgattaagagaatttgacaaagaaaacgacttcttccacccatttaacagccacattaattcacttggatgatcaaatgaaaaagacaaagagaattacaaccttttccaggccaagaaatagtaattattcagaggaaaatcttggcaaaatgaggaataaaccaagcaaaaagtgcgagagagagggggagagagaaaawgggagagagaaacacacacacacacacacacacacacacacacacacacacacacagagattgagagagagagagagagagactgaagaacaaaaaagccaagttagaccacagtgtttgggcaggctttgtacattttgcctcctcttagtttaaaaggaaacaaaaatagaaagaaaaaagtcaaagttttcattttaacaggaaatggaa

SEQ ID NO: 191850 - DNA, 402 bp, Homo sapiens
tgcaagtgaacccacagttgacgagccactacatttgtagaatttagatcattgaggtgcttccatatgcaaagaagttgccccttttgccatggtggctaaaccttgaggttgcaaccttaggctagggggaggacatgctgaataaaaggaaaggcctgcccctctgggycaagtaagagtgggaagaagaatggggataagcagaggagaaaagcagacttaagcatctttgttcctcttggccccttgggtctttgccctttgtacccagataaacgtggggaagaagaacattgggctattgggctgggagatgtgctttattgagtgattgtgtgtgtgtgtgtgtgtgtgtgtgcgtgtgcatgcatgcgtgcacttgtgagagagagaagagtg

SEQ ID NO: 191851 - DNA, 402 bp, Homo sapiens
tgcaagtgaacccacagttgacgagccactacatttgtagaatttagatcattgaggtgcttccatatgcaaagaagttgccccttttgccatggtggctaaaccttgaggttgcaaccttaggctagggggaggacatgctgaataaaaggaaaggcctgcccctctgggtcaagtaagagtgggaagaagaatggggataagcagaggagaaaagcagacttaagcatctttgttcctcttggccccttgggtctttgccctttgtacccagataaaygtggggaagaagaacattgggctattgggctgggagatgtgctttattgagtgattgtgtgtgtgtgtgtgtgtgtgtgtgcgtgtgcatgcatgcgtgcacttgtgagagagagaagagtg

SEQ ID NO: 191852 - DNA, 402 bp, Homo sapiens
tgcaagtgaacccacagttgacgagccactacatttgtagaatttagatcattgaggtgcttccatatgcaaagaagttgccccttttgccatggtggctaaaccttgaggttgcaaccttaggctagggggaggacatgctgaataaaaggaaaggcctgcccctctgggtcaagtaagagtgggaagaagaatggggataagcagaggagaaaagcagacttaagcatctttgttcctcttggccccttgggtctttgccctttgtacccagataaacgtggggaagaagaacattgggctattggkctgggagatgtgctttattgagtgattgtgtgtgtgtgtgtgtgtgtgtgtgcgtgtgcatgcatgcgtgcacttgtgagagagagaagagtg

SEQ ID NO: 191853 - DNA, 402 bp, Homo sapiens
tgcaagtgaacccacagttgacgagccactacatttgtagaatttagatcattgaggtgcttccatatgcaaagaagttgccccttttgccatggtggctaaaccttgaggttgcaaccttaggctagggggaggacatgctgaataaaaggaaaggcctgcccctctgggtcaagtaagagtgggaagaagaatggggataagcagaggagaaaagcagacttaagcatctttgttcctcttggccccttgggtctttgccctttgtacccagataaacgtggggaagaagaacattgggctattgggctgggagatgtgctttattgagtgattgtgtgtgtgtgtgtgtgtgtgtgtgcrtgtgcatgcatgcgtgcacttgtgagagagagaagagtg

SEQ ID NO: 191854 - DNA, 427 bp, Homo sapiens
gcccatctacctgatgaggggatgaggaagggctgaggcagcctgtggacttgcaggaggcctgtggtcagagtgaagaggctgcatgtgcagggccttagagatggaggcaagtggcagggaacatgcacygccatggtgagtgccagcacactgacctcaaaagacagtgccccttcactccctgccctaaccaaaaaggaagcacaccatgagtcatggtcatcttcattgtcactactgtagggagcatatctgctccaggtgatatgcagctgggactggggatatccagagaaatgtctcccctgctggcaagaggataaaataacccttcatatatcaagatggcatcttagagaacagaaggggaggtgaaatccaagagaccaaagttcatctacatacctggactcatttgaaaagg

SEQ ID NO: 191855 - DNA, 439 bp, Homo sapiens
gaattcagaagggcccatctacctgatgaggggatgaggaagggctgaggcagcctgtggacttgcaggaggcctgtggtcagagtgaagaggctgcatgtgcagggccttagagatggaggcaagtggcagggaacatgcactgccatggtgagtgccagcayactgacctcaaaagacagtgccccttcactccctgccctaaccaaaaaggaagcacaccatgagtcatggtcatcttcattgtcactactgtagggagcatatctgctccaggtgatatgcagctgggactggggatatccagagaaatgtctcccctgctggcaagaggataaaataacccttcatatatcaagatggcatcttagagaacagaaggggaggtgaaatccaagagaccaaagttcatctacatacctggactcatttgaaaagg

SEQ ID NO: 191856 - DNA, 427 bp, Homo sapiens
gcccatctacctgatgaggggatgaggaagggctgaggcagcctgtggacttgcaggaggcctgtggtcagagtgaagaggctgcatgtgcagggccttagagatggaggcaagtggcagggaacatgcactgccatggtgagtgccagcacactgacctcaaaagacagtgccccttcactccctrccctaaccaaaaaggaagcacaccatgagtcatggtcatcttcattgtcactactgtagggagcatatctgctccaggtgatatgcagctgggactggggatatccagagaaatgtctcccctgctggcaagaggataaaataacccttcatatatcaagatggcatcttagagaacagaaggggaggtgaaatccaagagaccaaagttcatctacatacctggactcatttgaaaagg

SEQ ID NO: 191857 - DNA, 478 bp, Homo sapiens
aaaccccaagtcaaagattcaaccacccacttgatctctcaagtcgcctgcttggccctcttccaagtgtacttccttttattcctgctctaatgcttttcaataaatttcactcctgctttaaaacttgcctcagtctgtcactctgccttatgcccctcactcgaattgtttcttctgaggaggcaagaattgaggttgctgcagacccacccttatggatttgctgctgctaacagttctctgaaacaaaaacagaagggtatgggagaaggcaggttatggggaggggttcgggaaaaaatacaataaacaagagcaaggttttttctgcagatttaagttggtgccttctccactgataagagtctccagggatttttcagtcatcctcgtttcctggttcagagagggagacagccttayaaatggaagtttcctttatagatgtaaattttccttacaaaagggtaacttc

SEQ ID NO: 191858 - DNA, 592 bp, Homo sapiens
cagggctcagtgttagccctgtgtggaatgcagagtggtatcacaaatatacctctttttaaatagttcatcatagagttcaggtctagacacaaaaagagttaaatagtagaacaagacaaggtgtcacgcagtatagaccgtacctgctatgtgctcacaggagaaaaaggaagaaggagttggcagagacagtgtcaaggaaaagacatccttgagctaggccatgcatggtraagagtgtgcactttcacactgcgctttctcctggaacactcagacagctggagaccttgttctgctccaacccacatgggcacatgggcttgcacagctactgtagtttcaccattttctccttccttggccgtggctgggggctagtgcttgcctttttacagttctctacttggcttacagtcgggggatacctgcccagaaggcacctgggcccttgtttgtggccagactacaccttttgcattttagaggcggaaaaactgggtcatcctaccatgcgtgggttggggatcagggaggctgccctgggaacttgtgctgaatctatcacatatgtggcttctgggtctaa

SEQ ID NO: 191859 - DNA, 460 bp, Homo sapiens
tctccaccctccatgtgcacacacacagctccactccaacattcagcctgtccactgtctagtctccctttaaggtccacatcaaggatcgacagatcacagcccataggcaaaatccagccctccaactgttttgtaaataaaaattttattgaaacacagccatgccacaaccagagagttaagaagccacagctgagaccacctaatctgcaaaacctaaaatctttactatctagatattgattaaaaaaaaaaaaagtttactgacctctgtctagaatatcatctctcctgtccccaagcttccaccttccccacargccactgctcagaagtgattctccccttgtctgcattcctgcagtacctagttgtatgtctcctggatgtcagactagcggtaagatcccatgtcatcttccctactccactctaagcaccagggatggcagggcat

SEQ ID NO: 191860 - DNA, 460 bp, Homo sapiens
tctccaccctccatgtgcacacacacagctccactccaacattcagcctgtccactgtctagtctccctttaaggtccacatcaaggatcgacagatcacagcccataggcaaaatccagccctccaactgttttgtaaataaaaattttattgaaacacagccatgccacaaccagagagttaagaagccacagctgagaccacctaatctgcaaaacctaaaatctttactatctagatattgattaaaaaaaaaaaaagtttactgacctctgtctagaatatcatctctcctgtccccaagcttccaccttccccacaagccactgctcagaagtgattctccccttgtctgcattcctgcagtrcctagttgtatgtctcctggatgtcagactagcggtaagatcccatgtcatcttccctactccactctaagcaccagggatggcagggcat

SEQ ID NO: 191861 - DNA, 460 bp, Homo sapiens
tctccaccctccatgtgcacacacacagctccactccaacattcagcctgtccactgtctagtctccctttaaggtccacatcaaggatcgacagatcacagcccataggcaaaatccagccctccaactgttttgtaaataaaaattttattgaaacacagccatgccacaaccagagagttaagaagccacagctgagaccacctaatctgcaaaacctaaaatctttactatctagatattgattaaaaaaaaaaaaagtttactgacctctgtctagaatatcatctctcctgtccccaagcttccaccttccccacaagccactgctcagaagtgattctccccttgtctgcattcctgcagtacctagttgtatgtctcctggatgtcagactagcggtaagatcycatgtcatcttccctactccactctaagcaccagggatggcagggcat

SEQ ID NO: 191862 - DNA, 475 bp, Homo sapiens
taattcctatagttacctcctaaacctgtgttgagtcattgatttttctctcatttctcactattcttatgtcagagccaaaactgctaatgtgctctcataaacctcctgtttgagttttacctccttcctcagcatgtggtcatccacctgtggaggcgctaatgagcaatggagtggtgccagggtacaccttgcagggctggggaggtgatgaaaagaggtagagggattgtggtaaattgraaagattgagtctgtatttctgaaattaacaaatgtccatcaatgggcaggaagacatttcattaattgatggatggatcttctatctccccttctagggatcatcacttcttggcctcagacttagctctttgtttcttgaccctaacctgggtatggataaaagtccttctatggttggaaagagaaatttcagagataacctagatgtaacccagccagacagcaa

SEQ ID NO: 191863 - DNA, 551 bp, Homo sapiens
gaaacaattcactgggtatcccagctggggttcatatgcttttgattactgtgggctatttagctctacaaactgacaggctgcttaatggacttttaatggttataggtttctctctctttttttaatgagcttcaccagtttgttactaatgccctgtagaaatttggcgaggggccagacttgatgttacacatttctggtttccaggcggcatacatgcaaccatcgtagccagtggggaagaatgttgccaatkttagggtaatgccatcaggacagggagaggaggagagctaattgagtgcctgtagttctaataattatgtcatcttaaagaaggtggtttcactttgtacctaaagttaccctggaggcttcttgcttccaaggccttgggataccaggtggcagaagggtttgtgccgttgggaacagcttttgcctttctttgatttccacattgttggtaaaaggtacccttcccagactcagttgtatcctgtccatcaaagggtttctgaacttctcaaatctaggggcaagtttta

SEQ ID NO: 191864 - DNA, 551 bp, Homo sapiens
gaaacaattcactgggtatcccagctggggttcatatgcttttgattactgtgggctatttagctctacaaactgacaggctgcttaatggacttttaatggttataggtttctctctctttttttaatgagcttcaccagtttgttactaatgccctgtagaaatttggcgaggggccagacttgatgttacacatttctggtttccaggcggcatacatgcaaccatcgtagccagtggggaagaatgttgccaattktagggtaatgccatcaggacagggagaggaggagagctaattgagtgcctgtagttctaataattatgtcatcttaaagaaggtggtttcactttgtacctaaagttaccctggaggcttcttgcttccaaggccttgggataccaggtggcagaagggtttgtgccgttgggaacagcttttgcctttctttgatttccacattgttggtaaaaggtacccttcccagactcagttgtatcctgtccatcaaagggtttctgaacttctcaaatctaggggcaagtttta

SEQ ID NO: 191865 - DNA, 407 bp, Homo sapiens
aaaatataccagatgggatgaataggagattaaacactgcagaagaaaaggttagtgattttgaaggcatagcaatagaagctatctcaaatgaagcacagaaagaaaaaagactgaaaaaacaataaggaaaacaaaataaagaaaaaagtgaaagaaaatacccaaacagtattaatgagccttgggacaacatttccacttgtatataaatgttcatagtagctttatttgtagaactgggctcattaataggtgaatagttaagccaattatggtatatcaagatactagaatactactataaaaggaatgaagtattgatacacagaataacatggatgaatctaaaaatctgtaggctgmaggaagctagacaaaaagcagtggatactgcatgattccat

SEQ ID NO: 191866 - DNA, 401 bp, Homo sapiens
gaattcctgacctcaagtgatcctcccgcctcggcctccccaactgctgggattacaggcatgagccaccgtgcccagcctgggatcttcaaactttctagttggccttttatgttggatgctagaaagatgtctctctttcattggttactaataacaatttgtagtgtgtttatggtacttttgaacttcaaaagatttggccagtattaatagcttagttctgatgttgagttgatgagggtagaattgctttctcttatgagtattgctccactattcctgagatcttagtcaggtgaatataagggaaatattcccaaagacaaaccattgttgtcccagatgctgtctactactcacayagaaggtgtgccctgtaggctagtgatgacacgtaa

SEQ ID NO: 191867 - DNA, 528 bp, Homo sapiens
tattatcaccttttaagaactaccaagttttaacctgacattttctttctgttatctccagggtcttaaaagccaatattgtggtttctgaaagctaatttctcaccagtgggtggcagcctgttgctttcaagggagacagccacaagtgtttgtgtgtagaggcaggggtggggtatggtgtgtcggagataaccgggattctgggacagagaaaagattgttggatcagcttgataggaccagtttggcagtttgcttgaacaacttcaaacgactaatgtaaaaaacactgattgcataaactcttggataattcctgggaagttttgggggacatcctataaactgtcacacagagatttgatttcatcagcataaacaggcactggcacaacccccacctccctgggagcccgtcgccctgagtcagaggataaacagtaatggrgtagtctcaaactccacttgctgatgataacatttacataatgcttgtaaccatttatactgtgtgctaaatagtgg

SEQ ID NO: 191868 - DNA, 570 bp, Homo sapiens
tcaaatccaatctatcacttgttagctgaggggctggatgcagacttttgtgtctctgggcaccagtttttcaactacaaaatgaaagggctggactggacagtctccagagtcaatttctgctctaaaatttggtgatgcttccatcgttcctgtcttcaacttccccaggtaatccaatctcgtattttcttcatgaatctttccttaaattgtgggcttgggatacataatgtgtagtatattttcttcgcatttctcttaktgagatgagcatagcacattccttaccttgatccttttccatggatactttgatacacaggagggctcctctggtgagaaagttggcaactcccaaaagcatactcagtgcctctgtgtttcttttagttggctgagagagccctctcaatgtcctactcagaaaaagaaatttgttcattcaacaaatattcagtgagaacttggtgatttttaggtagactaccaggtgcagtagtgcttccaaaggactgttggaatctaccttttttcttgcctaaataaaagtctgtctactggcctgaa

SEQ ID NO: 191869 - DNA, 570 bp, Homo sapiens
tcaaatccaatctatcacttgttagctgaggggctggatgcagacttttgtgtctctgggcaccagtttttcaactacaaaatgaaagggctggactggacagtctccagagtcaatttctgctctaaaatttggtgatgcttccatcgttcctgtcttcaacttccccaggtaatccaatctcgtattttcttcatgaatctttccttaaattgtgggcttgggatacataatgtgtagtatattttcttcgcatttctcttagtgagatgagcatagcacattccttaccttgatccttttccatggatactttgatacacaggagggctcctctggtgagaaagttggcaactcccaaaagcatactcagtgcctctgtgtttcttttagttggctgagagagccctctcaatgtcctactcagaaaaagaaatttgttcattcaacaaatattyagtgagaacttggtgatttttaggtagactaccaggtgcagtagtgcttccaaaggactgttggaatctaccttttttcttgcctaaataaaagtctgtctactggcctgaa

SEQ ID NO: 191870 - DNA, 573 bp, Homo sapiens
atgaacataatgatcttttaaaaagatgtaaaaagaataacaaattttacagacatgaaatacagtatctctaataaaatattttaccaaatgggcttaaaattagattataaaagatagaaaaaagattactgaaattaagagggtatagatagaaattaattaaaataaggcaaagaatgaaaaaagacaaaaacccacagaaatttagtgacaaacaagagcatggattctaacatgtgaatttggagtttctttgaaagataatgaatcatcaaagaaaaaataatgtattgtgggcttatcctatatgtagaattaaaatgtatgacaacaatgcacaaaggactcaaaggggaattgaagtacactaatttaagagtcttatacatgaaagggtataatattatttgagggtagattgtgattaaagattcatagtttaaccatagagtaactactgacaaaataaaacaaaaatgtatatatagctaatgagccaaaagtgcagctaaaatgaaatactaaaatattctrttaccccaaaagaaggaagaaaaaaggggacaaaga

SEQ ID NO: 191871 - DNA, 400 bp, Homo sapiens
aaccacacatcccagctcacctgcaaacatctgctgttaattgatagcaccatcaggtacttatttcagctctttactctgttgtaaaagcatctgtgcagccaccttcctgaaattgtttattccaaaatgacatactggaagcataggccaaataggtgggtttgctgaagtctacaagcttcatttccttgctcttgaatgaacattcctgatgccttccccttgtcatttttaatgatatcagtgcgttacatttgggaaaaatcatawtaatgtgttcaataagtaacttgggaagaaatgtgttcatctgatttgaccaaaagctgatggccatacatttcctaatctgagtaatttttggagcggtgggtgattatggattatgatcatacaa

SEQ ID NO: 191872 - DNA, 482 bp, Homo sapiens
ttgccatgttggccaggctgatctcaaactcctgacctcaggtgacctacctgcctcagcctcccaaagtactaaaattacaggtgtaagccaccctaccacaactggcccttgtttttttttttttgttttttttttttttttttgtgacagggtctcactctgtcacccaggctgaagtgcaatagtgcaatctcagctcactgcaaccttcaccttytgggtccaagcgaatctcatgtctcagccttccaaatagccgggattacaggcatgcaacatgaggcccaaataattttttgtatttttagtagagatgggatttcactatgttggctaggctggtatggaactcctgacctcaggggatccgcccgccttggcctcccaaagtgctggaattacaggtgtgatccccgcaccagaccttgacccacttctccgtaactctaagttttataatattgggctagaaataaaga

SEQ ID NO: 191873 - DNA, 573 bp, Homo sapiens
ttatagttctgtgaaggatgtccgtggtggtttgataggaataacattgaatctgtgaattgcctggccagcatggctattttaatgatattgattcttcctattcatgagcatggaatgtttttccatttgtttgtttcatctctgattttgctgagcagtgttttgtaattctcattgkggagatctttcacctccctgattagctgtattcctagatattttattctttttgtggcaattgggaatgggattgtgttcctgattggctcctggcttagctgttgttggtatatagaaatgacagtaatatttatatattgatttttgtatcctaaaactttgctgaagttcttaatcaactgaaggagcttttaggccaagactatggggttttctagatgtagaaacaaactagaaaacctagaagagatggaaaattcctggacacacacaccctcccaagactgaaccaggaagaaatggattccctgaacaaatcagtaatgagctctgaaatttaatcagtagtaaataggctaccaaccaaaaaaaaaaaaaaaaaaaaaaaaa

SEQ ID NO: 191874 - DNA, 573 bp, Homo sapiens
ttatagttctgtgaaggatgtccgtggtggtttgataggaataacattgaatctgtgaattgcctggccagcatggctattttaatgatattgattcttcctattcatgagcatggaatgtttttccatttgtttgtttcatctctgattttgctgagcagtgttttgtaattctcattggggagatctttcacctscctgattagctgtattcctagatattttattctttttgtggcaattgggaatgggattgtgttcctgattggctcctggcttagctgttgttggtatatagaaatgacagtaatatttatatattgatttttgtatcctaaaactttgctgaagttcttaatcaactgaaggagcttttaggccaagactatggggttttctagatgtagaaacaaactagaaaacctagaagagatggaaaattcctggacacacacaccctcccaagactgaaccaggaagaaatggattccctgaacaaatcagtaatgagctctgaaatttaatcagtagtaaataggctaccaaccaaaaaaaaaaaaaaaaaaaaaaaaa

SEQ ID NO: 191875 - DNA, 573 bp, Homo sapiens
ttatagttctgtgaaggatgtccgtggtggtttgataggaataacattgaatctgtgaattgcctggccagcatggctattttaatgatattgattcttcctattcatgagcatggaatgtttttccatttgtttgtttcatctctgattttgctgagcagtgttttgtaattctcattggggagatctttcacctccctgattagctgtattcctagatattttattctttttgtggcaattgggaatgggattgtgttcctgattggctcctggcttagctgttgttggtrtatagaaatgacagtaatatttatatattgatttttgtatcctaaaactttgctgaagttcttaatcaactgaaggagcttttaggccaagactatggggttttctagatgtagaaacaaactagaaaacctagaagagatggaaaattcctggacacacacaccctcccaagactgaaccaggaagaaatggattccctgaacaaatcagtaatgagctctgaaatttaatcagtagtaaataggctaccaaccaaaaaaaaaaaaaaaaaaaaaaaaa

SEQ ID NO: 191876 - DNA, 560 bp, Homo sapiens
aaggatgtccgtggtggtttgataggaataacattgaatctgtgaattgcctggccagcatggctattttaatgatattgattcttcctattcatgagcatggaatgtttttccatttgtttgtttcatctctgattttgctgagcagtgttttgtaattctcattggggagatctttcacctccctgattagctgtattcctagatattttattctttttgtggcaattgggaatgggattgtgttcctgattggctcctggcttagctgttgttggtatatagaaatgacagtaatatttatatattgatttttgtatcctaaaactttgctgaagttyttaatcaactgaaggagcttttaggccaagactatggggttttctagatgtagaaacaaactagaaaacctagaagagatggaaaattcctggacacacacaccctcccaagactgaaccaggaagaaatggattccctgaacaaatcagtaatgagctctgaaatttaatcagtagtaaataggctaccaaccaaaaaaaaaaaaaaaaaaaaaaaaa

SEQ ID NO: 191877 - DNA, 560 bp, Homo sapiens
aaggatgtccgtggtggtttgataggaataacattgaatctgtgaattgcctggccagcatggctattttaatgatattgattcttcctattcatgagcatggaatgtttttccatttgtttgtttcatctctgattttgctgagcagtgttttgtaattctcattggggagatctttcacctccctgattagctgtattcctagatattttattctttttgtggcaattgggaatgggattgtgttcctgattggctcctggcttagctgttgttggtatatagaaatgacagtaatatttatatattgatttttgtatcctaaaactttgctgaagttcttaatcaactgaaggagcttttaggccaagactatggggttttytagatgtagaaacaaactagaaaacctagaagagatggaaaattcctggacacacacaccctcccaagactgaaccaggaagaaatggattccctgaacaaatcagtaatgagctctgaaatttaatcagtagtaaataggctaccaaccaaaaaaaaaaaaaaaaaaaaaaaaa

SEQ ID NO: 191878 - DNA, 573 bp, Homo sapiens
ttatagttctgtgaaggatgtccgtggtggtttgataggaataacattgaatctgtgaattgcctggccagcatggctattttaatgatattgattcttcctattcatgagcatggaatgtttttccatttgtttgtttcatctctgattttgctgagcagtgttttgtaattctcattggggagatctttcacctccctgattagctgtattcctagatattttattctttttgtggcaattgggaatgggattgtgttcctgattggctcctggcttagctgttgttggtatatagaaatgacagtaatatttatatattgatttttgtatcctaaaactttgctgaagttcttaatcaactgaaggagcttttaggccaagactatggggttttctagatgtagaaacaaactagaaaacctagargagatggaaaattcctggacacacacaccctcccaagactgaaccaggaagaaatggattccctgaacaaatcagtaatgagctctgaaatttaatcagtagtaaataggctaccaaccaaaaaaaaaaaaaaaaaaaaaaaaa

SEQ ID NO: 191879 - DNA, 456 bp, Homo sapiens
tcattctaaggcctctctgctcagcttgtaggcaactgctatctctctgtgagatgccatgaacttttctttgtgagagtgttgggagagagaaagagaaaaccctctggtgtctcttcttataagggcactaattccatccggagggcccatgtttataatttcatctaatcctgatcatatcccaaaagccctatctccaaataaccatcacagtcagaattagggctccaacatattaatgttgcagggacacagacattcagtccttaacaacattgtttgcccaggaagcctttatggacatttgcaggggcctaaaasctagactctgctctgggaaacaggtagagatggaggggcaggagtgggacttcagttactaaaggaatgacctacatagcattaaaacagtcaccccagactcattacactcttttgtaaaatcctgttagt

SEQ ID NO: 191880 - DNA, 516 bp, Homo sapiens
aaagggagccaagttaaggaaatgggagatctgaaccatgccttattcagagaaaaatcaatccaaagagagaataggaaagaaataaaagaaataacaaagactagagcataaataaacataatcaaaaatataaaaacaatggagaaaccaacaaagctaaaaattrgttcactgacaaggtcaacaaaactgacaaactaagctagactgacaaagcaaaaaggaaagaagattcaaattataaaattcaggaataaagaggggacatgacatcactactgatcttatggaaataaaaagtatcataagaaaatactatatacagcagtgcgtcaagaaactaaataacttacatgaaatggacaaatttatagaaagatgtaaattactaaatctgactcaggaagaattagaacatctgtagtgatcgataacaagtaaagagatgaatcagtaatttaagaacttcccataaagtaaaattcaggcctggatggcttcataaatgaattc

SEQ ID NO: 191881 - DNA, 516 bp, Homo sapiens
aaagggagccaagttaaggaaatgggagatctgaaccatgccttattcagagaaaaatcaatccaaagagagaataggaaagaaataaaagaaataacaaagactagagcataaataaacataatcaaaaatataaaaacaatggagaaaccaacaaagctaaaaattggttcactgacaaggtcaacaaaactgacaaactaagctagactgacmaagcaaaaaggaaagaagattcaaattataaaattcaggaataaagaggggacatgacatcactactgatcttatggaaataaaaagtatcataagaaaatactatatacagcagtgcgtcaagaaactaaataacttacatgaaatggacaaatttatagaaagatgtaaattactaaatctgactcaggaagaattagaacatctgtagtgatcgataacaagtaaagagatgaatcagtaatttaagaacttcccataaagtaaaattcaggcctggatggcttcataaatgaattc

SEQ ID NO: 191882 - DNA, 551 bp, Homo sapiens
gctgcaataaactgcaagtgcatgtatcttttttgataaaatgatttattttcttttggttatatgcccagtaatggaattgcttggtcaaatggtagttctattttaagttctttgagaaatctctaacctgctttccacagtggttgaactaatttacactcccaccaacatatatgtggtccctttctctccatagcctcactggcatctgttgttttttgacttttttagtaatagtcattctgagtgctgtaagatggcatcacattgtggtttggaagtgcacttctctgatgattggtgatgtggagcattttttygtatgtttgttgttgtttgtatgcctcctttagagaagtatctgttcacgtattttgctcatttttaatgtgctgtttgttttttgcttgtagatatgtataagttctttatagattttggatattagacctttgttggattcagagtttgcaaatatttttacccattctgcacgttgtctactctgtagcacagcataagaaactatctttcttacggatgccata

SEQ ID NO: 191883 - DNA, 570 bp, Homo sapiens
cccattttatccagtaatcccactactgggtatgtacccagaggagaagaagtcattattcaaaaaagatacttgcacacacatgtttatagcggcacaattcwcaatagcaaaatggtggaactaacccaaatgcccatcaatcaatgagtggataaagaaactgatatatatatatatatatatatatatatatatatatatatatatatgtatatatgtatatgatgtgatatatatatgtatatgatatatatatgtatatgatgtgatatatatatgatgtgagagatatatatatgatgtgagagatatatatatatgtgatatatatatatatatgatggaatactgtgaagccataaaaaggaatgaattaacatcatttgcagtgacctggataagattggagactattattctaactgaagtaacccaggaatggaaaactcaaatatcatatgctctcactgatatgtgggagctaagctatgtggatgcaaaggcataagaatgacacagtggtcactggggacttggggggaagggtgggaggaaggcaagggataa

SEQ ID NO: 191884 - DNA, 650 bp, Homo sapiens
agagagagagtctcagagagagaaaaggaggtcaaacttgcctcttttcataacaaattagcacttgtgtaagggtgctaatccattcatgagggcagaggcctcatgtcttaatcacctcttaaatatctcaaacctttatatagttactatagcaattaaatttcaacatgagctttggagggtacaaacattcaaaccacagcacagagcatatttaatggagctagatgctatctaagatgtgtaygttaagatcattttaaccatatacagatgtaaagattaagaatttggtaatcaagagtaagcaaaaagtcaaactgtccccaataaaactttatgaaatcaactaaggaaaaaataaaattcaactaggcttgtagcacaatcagcagtaatcattaagccagcttacccattggcccacaccttatagccggtcgctgcttaccatctgagaataatgtgggccttgtcacaagattctttgttctatagataaaaatcaagaatttctcttttaagttctgcataccaacaaaagtacggatgccatctttagcacacaggtataaagggcacagtaagaagctgactcatggaaggatgcagtttttacatcctaatgatgtcatccccttaccctg

SEQ ID NO: 191885 - DNA, 624 bp, Homo sapiens
tttacctgagtcatgcctttagaagatttagagttgcctagttagcaattgttcagggcatgggacaggtaatcaagatattaaaagtctaaagtggggaagaaaaactaattgaaaactagcaaatgaaaaatctggcccggcgcagtggctcatgcctgtaatcccagcactttgggaggctgaggagggctgatcacctgagatcaggagattgagaccagcctggccaacmtggcaaaatcccgtgtctactaaaaatacacacacaaaaaatattagctgggtgtggtggagggcgcctgtaattgggaggctgaagtactcgagcaagaatcacttgaacccaggaggcagagtttgcagtgagctgagatcctgccactgccctccagcctggggtgacagagcgggactccatctcaaaacaaaaccaaaccaaacaaaacaaaaacaaaaattaaaaaaacaaaacaaacaaaaaaacccaaaaaaaaacaaaaaacaagaaaggaaagaaaaatcttgtaagtctgaaagagttgcttctatgtgttatgtctatgtgtttatgcgtatcatatatatgtaatattttactaccaaaacatttgaaagagatct

SEQ ID NO: 191886 - DNA, 619 bp, Homo sapiens
tgttttaccatgtttacctgagtcatgcctttagaagatttagagttgcctagttagcaattgttcagggcatgggacaggtaatcaagatattaaaagtctaaagtggggaagaaaaactaattgaaaactagcaaatgaaaaatctggcccggcgcagtggctcatgcctgtaatcccagcactttgggaggctgaggagggctgatcacctgagatcaggagattgagaccagcctggccaacatggcaaaatcccgtgtctactaaaaatacacacacaaaaaatattagctgggtgtggtggagggcgcctgtaattgggaggctgaagtactcgagcaagaatcacttgaacccaggaggcagagtttgcagtgagctgagatcstgccactgccctccagcctggggtgacagagcgggactccatctcaaaacaaaaccaaaccaaacaaaacaaaaacaaaaattaaaaaaacaaaacaaacaaaaaaacccaaaaaaaaacaaaaaacaagaaaggaaagaaaaatcttgtaagtctgaaagagttgcttctatgtgttatgtctatgtgtttatgcgtatcatatatatgtaatattttactaccaaa

SEQ ID NO: 191887 - DNA, 624 bp, Homo sapiens
tttacctgagtcatgcctttagaagatttagagttgcctagttagcaattgttcagggcatgggacaggtaatcaagatattaaaagtctaaagtggggaagaaaaactaattgaaaactagcaaatgaaaaatctggcccggcgcagtggctcatgcctgtaatcccagcactttgggaggctgaggagggctgatcacctgagatcaggagattgagaccagcctggccaacatggcaaaatcccgtgtctactaaaaatacacacacaaaaaatattagctgggtgtggtggagggcgcctgtaattgggaggctgaagtactcgagcaagaatcacttgaacccaggaggcagagtttgcagtgagctgagatcctgccactgccctccagcctggggtgacagagcggractccatctcaaaacaaaaccaaaccaaacaaaacaaaaacaaaaattaaaaaaacaaaacaaacaaaaaaacccaaaaaaaaacaaaaaacaagaaaggaaagaaaaatcttgtaagtctgaaagagttgcttctatgtgttatgtctatgtgtttatgcgtatcatatatatgtaatattttactaccaaaacatttgaaagagatct

SEQ ID NO: 191888 - DNA, 621 bp, Homo sapiens
tgaaagagttgcttctatgtgttatgtctatgtgtttatgcgtatcatatatatgtaatattttactaccaaaacatttgaaagagatctaactgcctttaaaaatatttaagtccaatattttatcaaaaaaataaaaaccttaactcaaatgccttttaaaatttatctttggtaaataaagttttaacgttgctggtaaaataaaataaaaatgccttcaggatttaatttagatattaggtctgaactgatcaagcaggtcagatactgtctgctagatgttttatcacaagctgcttctatgattttttaataataatttgatttgtctgtgaccttacatcatggagccattagattctaggctctaaacaaatggccatggtaaggcctggggacatttggctttctctctggcccagctgtgtctattggctatgctgggamggctctggcattatttctactgttctgtcctttgttctaggttccacatctgatacataattaaaattgcttatctcctatgctttttgccaagagttactaagagctaacattgtaatatatgtaattaaaactactggatataagagaaacatgtctatatgcaaaatg

SEQ ID NO: 191889 - DNA, 513 bp, Homo sapiens
gtcctttgttctaggttccacatctgatacataattaaaattgcttatctcctatgctttttgccaagagttactaagagctaacattgtaatatatgtaattaaaactactggatataagagaaacatgtctatatgcaaaatgtgtaaggaaagaaraatatgttataaaaagacatgggaatgtggtttttgttaaaggtaaagtaattttacctagtgtagaggttttgagaattgttttaaattaaaggaagaaattgaataaaatggaatggatataaaatgtcagaaaagaaaataaatgcttgtggtaaggtaaaatgatggggcaaaactgaaagtttaagcatgttttagaagttttgtggaagattcatcttgtgaaagaaattttgagtgtgctcaagttggctaaaagttaaaggggattatttagtttttctataaattaaatattaatattaggttggtgcaaaagtaatggcaaaaactccatatggatgcagggtc

SEQ ID NO: 191890 - DNA, 343 bp, Homo sapiens
gtaggatccctgaagtccaagaggacatattcagtttatttggtatcttaaaatcatatgagaggcattgtcaaatatgcaatggtgtttaactttctttgggttacatttacataaatatgttattaatatatgttctaaaattgtgattttcctttaattctgttatatttcagtatatgatatcagcaataatcattattatgataaaaygttgtgtattacagaaataaccacatttccttgcaaattgtgtattcagtcatgattactggaagacttttgtcatctacaattattgttttactttaattctcccaaaaaaagcagtttataatcagct

SEQ ID NO: 191891 - DNA, 614 bp, Homo sapiens
gttatttgccttccattgcccttttcttctaaaactgtaactcattgaggaatcccacagacctagcttttttcctgacacatggtaagaggcacatacaagtttcctgaataaataaatactaaatccatagttctgtcattaaatatccaatctataggttttatttctgcatttcttttaatgtgacaagtatagactatggctacttataatgatagtataactctcaccacaattctacagtaattttccactcatatttttatagttaaaaaaattacaaatgcaccctaaatgtcccrgaaacttaccagtatgtgactataaattaaacagcaaaataaacatttagctttttagacttaaaagaatttagttctttttccatcacttcaaatgtcttagagactccaccactgatgttgaggtttcacagtcttccttggggcactgggtggcttttttctctgctaaagtttaatttctcaattttcacagtttaataaatggttgacaatcatctttgaagtgtgaggtggcctcattctcctcagaatatcccgtaatagaggtgcttacagtttgagtgtcagagacattttcagtgttac

SEQ ID NO: 191892 - DNA, 614 bp, Homo sapiens
gttatttgccttccattgcccttttcttctaaaactgtaactcattgaggaatcccacagacctagcttttttcctgacacatggtaagaggcacatacaagtttcctgaataaataaatactaaatccatagttctgtcattaaatatccaatctataggttttatttctgcatttcttttaatgtgacaagtatagactatggctacttataatgatagtataactctcaccacaattctacagtaattttccactcatatttttatagttaaaaaaattacaaatgcaccctaaatgtcccggaaacttaccagtatgtgactataaattaaacagcaaaataaacatttagctttttagacttaaaagaatttarttctttttccatcacttcaaatgtcttagagactccaccactgatgttgaggtttcacagtcttccttggggcactgggtggcttttttctctgctaaagtttaatttctcaattttcacagtttaataaatggttgacaatcatctttgaagtgtgaggtggcctcattctcctcagaatatcccgtaatagaggtgcttacagtttgagtgtcagagacattttcagtgttac

SEQ ID NO: 191893 - DNA, 576 bp, Homo sapiens
ctatttagctacttttcaaaaccaaagccattatgtctgcattatatacatagagaaaaagaatcaccatcatctctctctcctgaccgtttcaatatttcttscaaatcattacctctgtggaaagtctttatcctccatgcaattaaagttgagagcataaagcaataagacactcatgtgataattctaataatatgtgataattctaataataacactgtacctatagtctccataacagaatactagaaaaactgtctttcatagctgaaaacacacactcacagacacgtgcaaatctcagaatacataaaactcacactggaaagtgtgataaaattcctcctcttttccaataaaggaagtcaatgcaacatggtgcaagcaccctaaggcctggcttttgcacaatggtatgactgcttccacactcacctatgcacgaaggtagtggtttgtcccacactctcctgtctccactcaaacaggtcagggtgttgctgccatgcatggcgtaccccgggttgcaactgtacagaactacagtgtcggtaaagtggccttcatcacgga

SEQ ID NO: 191894 - DNA, 576 bp, Homo sapiens
ctatttagctacttttcaaaaccaaagccattatgtctgcattatatacatagagaaaaagaatcaccatcatctctctctcctgaccgtttcaatatttcttccaaatcattacctctgtggaaagtctttatcctccatgcaattaaagttgagagcataaagcaataagacactcatgtgataattctaataatatgtgataattctaataataacactgtacctatagtctccataacagaatactagaaaaactgtctttcatagctgaaaacacacactcacagacacgtgcaaatctcagaatacataaaactcacactggaaagtgtgataaaattcctcctcttttccaataaaggaagtcaatgcaacatggtgcaagcaccctaaggcctggcttttgcacaatggtmtgactgcttccacactcacctatgcacgaaggtagtggtttgtcccacactctcctgtctccactcaaacaggtcagggtgttgctgccatgcatggcgtaccccgggttgcaactgtacagaactacagtgtcggtaaagtggccttcatcacgga

SEQ ID NO: 191895 - DNA, 582 bp, Homo sapiens
acttggctattgttcttgtagtttttgtaattacacttagtaaaacaatatgacttcaaaaatgtaaccctagtatcacaatttgaacacaaaatctttcttattcattcaaataaagaaaaaaatgtgtgtttctgtgattacacaatgatcttacttcctttgccatttctatcaggaaggaattgtccttcttgattatcaggtcaactgtcaaggaaccacagtgtttgtgttcaaggaacccttatttgacttaacaattgcccaagagtaatgaaattggcatattgttatcatcattctatttttttaaatattattttatttgagacagggtcttactctgttttccaggctgggagccatcatggctgactcactatgatctcaggctcctgggctcaagtgatctttcgacctcagcccctggagtggctgggacaacaggtacatgccaccacacccagataatgattttattttacttttgtagagacaggggtctcactatgttgaccagcctggttccaagtccctgggctcaascaatcctcctgtcccagcatcccaaagcgccac

SEQ ID NO: 191896 - DNA, 563 bp, Homo sapiens
tcaaaatagctagaagagaggattttcaatgtttttaccgtaaagaaacgctgaacgttggagatgatgcaaatgctacgaaccttgatttgaccatttcacaatgtaaatatgtactgaagcataaataaacagaaatgataataaaatgctgaaggaaatataaaatgcaaaaattattttgggaaacaatttggtaactttttaaaaagttaaacatgtagttaatatatgacatggcccttccacacagaggtagtgacccaagggaaatggaagccatgtccaaagcaacacttgtacacagatgttcactgaccttcattcttaaacgcccctgcagggaaaaaaggcatgaagacactttgggggctgtcaggaaygttcaatatctttcactatgaggtattcgcactctgggaggggtcaacaatgttcaatatcttgacgaggggtggtgaaaacaagggttgatgtttatcaaaactcatcgaattgcacacttttgaatatctgcatttcttgtgcataaagtataacttaatgaaatggttaaattgtta

SEQ ID NO: 191897 - DNA, 563 bp, Homo sapiens
tcaaaatagctagaagagaggattttcaatgtttttaccgtaaagaaacgctgaacgttggagatgatgcaaatgctacgaaccttgatttgaccatttcacaatgtaaatatgtactgaagcataaataaacagaaatgataataaaatgctgaaggaaatataaaatgcaaaaattattttgggaaacaatttggtaactttttaaaaagttaaacatgtagttaatatatgacatggcccttccacacagaggtagtgacccaagggaaatggaagccatgtccaaagcaacacttgtacacagatgttcactgaccttcattcttaaacgcccctgcagggaaaaaaggcatgaagacactttgggggctgtcaggaacgttcaatatctttcactatgaggtattcgcactctgggakgggtcaacaatgttcaatatcttgacgaggggtggtgaaaacaagggttgatgtttatcaaaactcatcgaattgcacacttttgaatatctgcatttcttgtgcataaagtataacttaatgaaatggttaaattgtta

SEQ ID NO: 191898 - DNA, 478 bp, Homo sapiens
tctttttctttcagcatttggtcagaatgagtgccatgatcctggcattcctataaacggacgacgttttggtgacaggtttctactcgggagctcggtttctttccactgtgatgatggctttgtcaagacccagggatccgagtccattacctgcatactgcaagacgggaacgtggtctggagctccaccgtgccccgctgtgaaggtgcagtccctgccacccccygctcttctcctttgaaatcacacatctatcttcaggcacacacacaaaccaacaaactgtgttagcttgctagggctgccctaacaaaataccacacacagtcacttaaccaacaggagtgtacagtctcccagttctggaggctggaagtctgagatccaggtgtcatcggcagggtggggtccttctggaactctgagggaggatctgcctcaggctggtcctccagctcctggcggtgtttggca

SEQ ID NO: 191899 - DNA, 478 bp, Homo sapiens
tctttttctttcagcatttggtcagaatgagtgccatgatcctggcattcctataaacggacgacgttttggtgacaggtttctactcgggagctcggtttctttccactgtgatgatggctttgtcaagacccagggatccgagtccattacctgcatactgcaagacgggaacgtggtctggagctccaccgtgccccgctgtgaaggtgcagtccctgccaccccccgctcttctcctttgaaatcacacatctatcttcaggcacacacacaaaccaacaaactgtgttagcttgctagggctgccctaacaaaataccacacacagtcacttaaccaacaggagtgtacagtctcccagttctggaggctggaagtctgagatccaggtgtcatyggcagggtggggtccttctggaactctgagggaggatctgcctcaggctggtcctccagctcctggcggtgtttggca

SEQ ID NO: 191900 - DNA, 449 bp, Homo sapiens
tggatcatttgaggtcaggagtttgagaccagcctgtccaaaatggtgaaaccacatctccactaaaaatacaaaaagtagccaggtgtgatggcaggtgcctgtaatcccagctactcaggaggctgaggcaagaggatcacctgaaccctggaggtggaggttgcagtgagcagcgatcatggccctgaactgcagcctgggtaacagaacragactccatttcaacaacaacaacaaaaaaattcaaagaagctctttgtaaatatataagataggttctattgtttaccttattttacagataaaataattgaagaaaattggataatattctaagcattgaatagttgcatgactagtaaactggagggttcagttcggtcttttctcactgcattgtctgagcccttaaatctctcttcttggttttagttccttagcaagat

SEQ ID NO: 191901 - DNA, 419 bp, Homo sapiens
actgttccactcttcccttggatgtagcctccacatagagcttaaaataataaagagagatgattayagcactaaagtttcacaatgattgccagaacaaaatactggttaaatggcatgcaatttgcacaaggattaacaaatttaatgtcatatccaagaaaaaccaagcagaacctgagctttatgttacttgcaaatatcatatgctagttcatatgaagggatcttaaccactacaaaaccttgacaacgtaacacagaataaggcacagcaggagagctggaacctgcattaacaagcctcagaattgcagacatggtacaggtttgcactcctgagagccgctggtcttcttagcagcacttcattgagttcaaatcccctcaacaaaccatgtcatgttcaaacactcact

SEQ ID NO: 191902 - DNA, 484 bp, Homo sapiens
tccctctaattctacctagttgccatttatcttaatctgactttgttgatttttcttggtatttcactactcaagtgaagctttcaagactggctcagaccacttgatttcttggaaatttgttgtaatcagcagtaatcatgaaacttgccactttatatatcaaagacttaaatcttcccaacactaattcctaaatccctctctctctgcattctcccytggtgtatctcaattagtattgctatgagaatatcacttcctccagttcttactttcatcaggacccaaaatgaatttaaatagacttctccaaaaaaagaaaatggcagtgacgcaagtctgttacagttcacttctgcaggtgtttctcagaagtctgtgcaaattctattcattttactgcatcagtttcttattctggtgccctcaccacaggtctgacagtaactcttttgacgactactgtcttagtctgtttgtg

SEQ ID NO: 191903 - DNA, 561 bp, Homo sapiens
gggcgtgctgagcactgtggcctctaggctctcttgccagattcccaagtgaggcctcagaaccccaaggcttccctgggcctctggctgcrtttctcagactggtcggttatccctagcccaagtccatgggaatgccactccttctcccacggctgcctggagcctggctttggacttccttagttctccagtgcactggagaattgattgactgactgattgattgattgattgattggatgtgctttttttttttttaattgcactggggaattttaaaaggctgcctgaagagggcactattttcaccaagagagaactcactagcagaggaattggctgccttgggagagcaaccctgggaggttttctttgaggatggaggtctggtggggatgactccttcctggaactcaccaatcgcctcatgtggcggctgtccattcagtctgggagctgcccctttgggtaactctggaggcagctggcctgaaggttcttgccaagggcctcttaagcacccctagcaaccaaggtaattcaaagtgggagacagag

SEQ ID NO: 191904 - DNA, 256 bp, Homo sapiens
cttaacttgttgaatgaattaacctttttccaagcaccctcataactggtagtgtacatttgtaagagggctggtcaagggtaagaatttggtttgagactgtatacagaataacttgatactcakggattatttcaactgtttcttgtttccttaatgatttgcttttatgaaataatgttaatgaaaagttcaagtcattttgtatcttcaggagctaagcaaaaccaggaatgctattcaagaaaatcagaat

SEQ ID NO: 191905 - DNA, 403 bp, Homo sapiens
atatagacctcatgggagataaattcagagaatcaccattaagaggaaattggaacttgtacataaaagcataggctcaagtgaggtgagaccctggaggaccacaagctgaatgctgttggtctttttttttttctttcttggccttcgatttttttttctgaaaggggataaaatcaaatatgagkgaagaggcatataatatgggtctgcagcatatttttgttgttttatttgtcgaataatgttttattcctttttctaattttaaaattgaatgaattgaaactttaggcctgtcctactctattaaattaaattagctttccctttccccaagcactcttttcatttgatttccatgacctcactttctcctatttctgtagccattctttctcag

SEQ ID NO: 191906 - DNA, 610 bp, Homo sapiens
gttaatatccaaaacttaaaacacaagattgactaggacaccttacacattgaatcatttgctattactaatagaagaaaagtaactgggtccagaccatacagctagtaagtgtactagccaagacctaaaatcagactgaaggaaccctaaagtcattgattatcacactacctgaaccctagtggcctatgaaatgcagtaattatgttttaaaatctagaaaaataaacactaataaacagctattggttataggatttygtccttgtatgtgggagtgctttgtttagacaattatttcctacatttagattaattttaagtttcttttcaaatgaatatacttcaaatcaggtacatttttatgttgacactgggcattaaatatctaaacaatttgttaaggagtaatgccaaattagatcaattactaaatctcagcaacaatgaattacaaactatattagttttgtcatccattcagcaagcttgtcctctctctctaaccttctgcataaattctacactatgctctaatggcttgcacttttggttcatccattcatggtacatgctatctatgctttcaaatgatttcttctcttcc

SEQ ID NO: 191907 - DNA, 571 bp, Homo sapiens
catacttgtgcattttaggaatttgggatttcctctctttaacccttaaagttgcttcatagtttgcagagttctactctagtttctaaatatgcagcataacatcaaattcacatttcaggactgtaggaacaaacataaatagtcaatggccagagctagtactttttatttttgaaaaagaaactgagactgttttttgaaaaaaggagtaacattaacctagtatattttatccatctagtgcaataaaacttcatcattacaagtagatacagtccaaaaccacygttgttgaactgcacaaaccaggaacttccattactgcaaagttaatgaaacgacagagttgccagtaaagctagctggctgggaattcttggagtctggcttctagctcctgactttggtacggcaccactgggtagcaactgtccactctggcttaaatatcaataaacacgatacctggcactaatgccagctttgatgtccaagacagcagcagggatacatggaactcgagtgattctatcaccagattgtgcaaattagacccaaaatgtactta

SEQ ID NO: 191908 - DNA, 631 bp, Homo sapiens
aagtgatgaacttggatattaagatttccaagcaaaatactgagagtattacctagtgtatttgtcagcaagatgtcacagactgggtggaataaaaacaaatttattcttcacagttctggaggctgggaagtccaagatcaagtaggcaaagtaggttcattctgaggctgctgtcttggcatgtgggtggccatcatcttactgtgtacacatatgaccttttctttgtgtgagctggtggggacagggtgctcccggatgtttcttcttttgaggatgctaatcctatcaaatcaagaccccatccttaagacttcactgaaccttaattactttcctactccagatacagccacattggatgttagggcttcaacgtatyactttccttggctggggtcatggaggaagaggcacaaatattcagtccgtaacacctggcttcttcttgcagcttatagaaatatgtgagaggaaagagataaactgaggggaaaaactgtcaaacaaaaaggagcaaagacttaatgattttagaaattttcactttacccagcaaaagactaaaattaagagattcactgtcagcaaagaatgcactggagaaaaggctaacgatatgattgta

SEQ ID NO: 191909 - DNA, 529 bp, Homo sapiens
aaaatatgaaaaattttagacaaaaatatagagtaacattacttatagtttggagacagtttagttatatgttccataaaatatctagagaatgtgcccttttcattcagttaagacaatattaccagktaaatgtatattagctagtcatttagcttatactgacacctagtggcattgctgatgcataaacgattgatacacgggagaaatttgccttggtggaaaacacagtataaaaacaatacaaattcatccatgaaataattttagtgaaattttgtcatgaatttctgctgattgtttttattctttcacttgattttgtaattcataattttaactattccattatccaacattatttttcattctagtatattttattatgagcattagatttatattgaagtctgtgataaagatattgtcaggatactaatctgattaataatagtaatcattggtcttctatcaataatgcaaattaattgcttcttatgattaatataaatataaatattatggc

SEQ ID NO: 191910 - DNA, 577 bp, Homo sapiens
acttttccactatagagaattagttatttatgaagtttaaacttcagtcctaaaagctgtgcaatgttttaggctttgatcaaaggtttatcatataaaattatttacccagtgcaaaactgacatgagataagaaggaaggggttagatttaygtgggaatctagaaaggaagaaaatagaaattagtaaaatgtaggttatcacttcaacatatagaaaaatctttactataattagatttctctcttaaacccctcactggccctatttccaatggaaaggcagtctaaagaagcaaagaaatgcttactttcgtttactctcatagcagcaaagccacaaagagtgtacagaatagtttataacactagctaagagggtggttttgatgcctgaaattgaatcgagattctaatcagcttcgtacagacgcagcagaaaacactaatgctccagcatccctaaagccagacccccgcaagaaacttacccaagttaaatattttgccaattataatataaggcttgttggttttcataaaaatacattttacactttttaagactgtaaggta

SEQ ID NO: 191911 - DNA, 584 bp, Homo sapiens
tagcagcaaaccctgctttgttcacagttccgtcagaaacaaacttcatccacaaagtattggaggtagatcttatgtcttcaggtttgtcataaccacagaaacgccctatcaaagggctattttcactggttccatctctaacttccaggtagtcataagcacaattgtcatgtctttcaatctgcaacagaaaaaaatatgtgaaaatatatgtttatagataaaacattttatataggaggatagatgtcttctcagtgccatacttctgatttgttaatataaaagttatttgtatcaaatgagtgtacttgaatgtttctcatgaacgtacactgtaatakccatgaacaaaggatgttattctggtagacagggaaggataaaaaataactatgaaacagtacatccacatgagtcaggatcagcagaaattagttgtcttttaaaagaaaattaaactacaagtagaaattcttcattcaatagaggctgaaaaaaatccaaaattaaaaattatcactaaaaatctgggcctgatacactgctgcaagtaatatataacttcttctgaatcatag

SEQ ID NO: 191912 - DNA, 556 bp, Homo sapiens
ttctttccttcctctttctttcctttcttttctttgtttctttttcattctttctataaatcatcgcctttggtgttcttttactgatgaagcttaaacttactggcatgacatcgatggacttgattcacattttagtttcaatcatatttatttctatccattccatatattaattgatraagtaatttgatgtagctcaagaaaatgttacacaaatgacacaaataaagtaactcaaatattcatttgtgctcattgttatcactcgtgttgatgtagctgatgaagtataattatgattagtacaaatggagtaaattcattgtgcaagccttgcatttaggattaaactggaaaaataagtaactgaagaccattcaggtaattgacgagatatctagaattgttgttgtaaagatataatgtatttccaaatatcataaattcatgtagatgaggcacatattattttctaggcaactcaaaatctgtggcattcactgtgtgagaatgctgttgccccaaataccaggtacatatttaatatgtaaat

SEQ ID NO: 191913 - DNA, 549 bp, Homo sapiens
tactaactgccctagctccaaggtaagggaaagggcactgatctatagataacactaactcaaatagggagactggatactctttactacaagatctaaacatctacagaactccatatgtacattgtctgaaaagacaggagagaagtagagctagtgatttacgggaattgaccatcaaaagtgagatctgtgcatagttcataagaaaccactccaggyaggccagtgtaattgaaaaagaaatgagttacaaggtagcattgagaaaggccttgtaacttgaggcatgagtcaacagatacattaattacataaacccaaattaatggagtattaaatttctgtagtacttcagtactaacaaagcatttaccattttctttttctatttctaaaaacaaatttgtggcctctggggttcgattttttcctaacttccaaaaaaaggttcaatttgaaaaggtcaatgacatcttggagagaatatattcaatttcagacaacagaattatgaattttgtttcattctgtctactaaggtaatct

SEQ ID NO: 191914 - DNA, 549 bp, Homo sapiens
tactaactgccctagctccaaggtaagggaaagggcactgatctatagataacactaactcaaatagggagactggatactctttactacaagatctaaacatctacagaactccatatgtacattgtctgaaaagacaggagagaagtagagctagtgatttacgggaattgaccatcaaaagtgagatctgtgcatagttcataagaaaccactccaggcaggccagtgtaattgaaaaagaaatgagttacaaggtagcattgagaaaggccttgtaacttraggcatgagtcaacagatacattaattacataaacccaaattaatggagtattaaatttctgtagtacttcagtactaacaaagcatttaccattttctttttctatttctaaaaacaaatttgtggcctctggggttcgattttttcctaacttccaaaaaaaggttcaatttgaaaaggtcaatgacatcttggagagaatatattcaatttcagacaacagaattatgaattttgtttcattctgtctactaaggtaatct

SEQ ID NO: 191915 - DNA, 604 bp, Homo sapiens
ataatttgtcatatttcacctgtaatattggtaaagatagaattgaatgttaatatcaagtgatcataaagatacgcaactcctgaaagtagaaattaaaataaccttttagaagcacattgggtaatttgtattacactttacaaaatgtacctgcrcttttgcccagatatttatcctagaacaattatctgagtgtgtgcaaaggcaactgtttattataatagtgaaagttggaaacaaaataaattttgaaaacttaaagaaaactctgatttgagaaaatgtttacaatatattatgaaatatttaaggcaaatcaaaagttagtggtatgagaagttctgtaatttaaattatgtacattagagacaaatttatggaagaatatataagaaaatgatgcttatttctacctgctgagtttgcaaatagtttttatgtcttctttgttcctttaaaaaattaccagcaataagcatatgttattttgggcaagagaaaaatattgtctttaaaaaatacagtcattgtaggacaatgatgtgaatgtacttaatgcacagaactgtatacataagtatggttaaaatggtaactttta

SEQ ID NO: 191916 - DNA, 579 bp, Homo sapiens
gtggagactgaggcacaaaaattgcttaaacccataagctggagcttgcagtgagcactccagccagggtgaaaaagtgagactctgtgtccaaaaaaaaaaaaagaagagaaagaaaaaaaaaaacaatgagcaagatgacagactagaggtacctaatactcatcaccctcacataaaacgaccaaaacaatgagtaggctaccacatttcaacaagagtattggaaggagagcactggagtacagtagattcacggtaaagaccatgtagggcatggagactcaggcaggacacatagaaaaaaaagcaaaatgccccacggcatttccccatccttgacgtttcaccaccacttactgtgctcacacatgctagaacattatttcctagttgaacagctgtagttctctaccccctgggaataaacaactcaaaataatctgtttcrccatcccagtggctatagtgccctagtcctggctatacaaaagcctaaacccagcagaatgaccataatcccactgtctaagcccatgaggcaccctgccctctgggaacaagctcccagtagtgagg

SEQ ID NO: 191917 - DNA, 596 bp, Homo sapiens
ttttattcttctgtacaaagattttttaaaaagctattctagatctgtgttttattctgtatatattttataatgagcttgtctatgctgtaaaaattcttactgggtgccgggcacggtggctcatgcttgtaacyccagcactttgggaggccaaggcaggtggatcatgaggtcagtagttcaagaccagcctggccaatatggtgaaaccccgtctctactaaaaatacaaaaattagccaggtgcggtggcaggcgcctgtaatcctagctactcgggaggctgaggcaggagaatcacttgaacccgggagatagaggttgcattgagccaatatcatgccactgtactccagcctgggcaacagagcaagaccctgtctcaaaaaaaaaaaaattcttactggaatattgatagtaattgtcattgaacccacagaactatctggggagaattaacatttttttcaatgttgaattttcaaatctatgaacatattatgtttctatatttgtttaggttttctttgatttctttcaacagcatttaataagtttccacgtatagactctgtacatgtttcagtaagtat

SEQ ID NO: 191918 - DNA, 575 bp, Homo sapiens
ctcataaaaataaaaatttttgtcatttgaaataccccaggctgggagcggtgactcacacctgtaatmtttcttggaatcactgttaatagaggccgaggcaggtggattgcttgaggtcaggagttcaagaatagcctgatcaatatgggaaaaccccgtctctacaaaaaatacaaaaattagctgggcgtggtggtagcacctgtaatcccagctactcaggaggttgaggcaggagaattgcttgaagcaaggaggcagaggatgcagtaagccgagactgtgccactgcactccagcctgggcaacagggcaagactccatctccaaaaaaaaaaaaaaacaaacaaaaacaaaaaaaacaaaagaagccaggcatggtggcttatgcctgtaatcccagcactttgggagggcaaggtgggtggatcacctgagatcaggagttcgagaccagcctggacaacatggtgtaaccgcatctctactaaaaatacaaaaattagccaggtgtggtggcacatacctgtaatcccagctacttgggaggctgagacaggagaatcgattga

SEQ ID NO: 191919 - DNA, 575 bp, Homo sapiens
ctcataaaaataaaaatttttgtcatttgaaataccccaggctgggagcggtgactcacacctgtaatctttcttggaatcactgttaatagaggccgaggcaggtggattgcttgaggtcaggagttcaagaatagcctgaycaatatgggaaaaccccgtctctacaaaaaatacaaaaattagctgggcgtggtggtagcacctgtaatcccagctactcaggaggttgaggcaggagaattgcttgaagcaaggaggcagaggatgcagtaagccgagactgtgccactgcactccagcctgggcaacagggcaagactccatctccaaaaaaaaaaaaaaacaaacaaaaacaaaaaaaacaaaagaagccaggcatggtggcttatgcctgtaatcccagcactttgggagggcaaggtgggtggatcacctgagatcaggagttcgagaccagcctggacaacatggtgtaaccgcatctctactaaaaatacaaaaattagccaggtgtggtggcacatacctgtaatcccagctacttgggaggctgagacaggagaatcgattga

SEQ ID NO: 191920 - DNA, 575 bp, Homo sapiens
ctcataaaaataaaaatttttgtcatttgaaataccccaggctgggagcggtgactcacacctgtaatctttcttggaatcactgttaatagaggccgaggcaggtggattgcttgaggtcaggagttcaagaatagcctgatcaatatgggaaaaccccgtctctacaaaaaatacaaaaattagctgggcgtggtggtagcacctgtaatcccagctactcaggaggttgaggcaggagaattgcttgaagcaaggaggcagaggatgcagtaagccgagactgtgccactgcactccagcctgggcaacagggcaagactccatctccaaaaaaaaaaaaaaacaaacaaaaacaaaaaaaacaaaagaagccaggcatggtggcttatgcctgtaatcccagcactttgggagggcaaggtgggtggatcacctgagatcaggagttcgagaccagcctggacaacatggtgtaaccgcatctctactaaaaatacaaaaattagccaggtgtggtggcacatrcctgtaatcccagctacttgggaggctgagacaggagaatcgattga

SEQ ID NO: 191921 - DNA, 648 bp, Homo sapiens
tcatgtatttgctactggatagaagaatatagatgccccaaaagaaaacacaggaatcaaacataatatgccgactacagatgcacaatttgtattctaatagttgatggactattgaaacattgcattaataaccagcgagttctgtactctcaactcacagctaaactgtcaaagggcatctcattcagtattccatcacaactctttggaggagcaacatgaattttcagakggaaacttgcatactggaatgaattctaaagaggaaaatcaaaatgctaagagaacaatattttaagcaataattcaggttgtggctttttcttgctgcagatccacattcttcaccaggccacagaccctacattcccagagacactcaatattattactggagaacacagaatgacctttcatttatctctctgtagttttgcactattctacagctttgtgacattgtcccttttgcttcttgtattagaattagaattatattctcataatagtgctgaacattgtcatggaaatgatggagatcacaaataagaaagctaagctctatcacagtaactctgacctatggaaaaatctggaaaattaggctctccttgcaagagcaaagaaaattgtgtgctgtgaagg

SEQ ID NO: 191922 - DNA, 516 bp, Homo sapiens
cacaatagcttctgaaaattaaatcaggctcagatgatttcacaagagaattctatcaaacgtttgaggaagaattagcaccagttttacacagtttcttctggaaatggaagagaagtgcatacttttatatatatatatttttttttaaagtttattcttatttttatgaaagtagtagaatcttatttaaaaaaattataaacagtacacaaaaatttaaggaaaataaaatgcctccatccttcttcattcttctctccattatatattttaacagaagtaatcaatgttaatattaggttggtaatatatartacaatcatccatatattgaaatatactttatgggattgtatacaatttttttcttttatgattcatgattttatgtctacctcaagaaatctttgccatcctaagatcacaaagattttcttgttgtttttctagaagctttatggttttaccgcttacgtttagttttttttttattttattattaggtttcttttt

SEQ ID NO: 191923 - DNA, 569 bp, Homo sapiens
aggcttatttgaacccagttccattccccaagatcaaccagaatgatgacaacctagttctgtctccttcaaaggccatacattttccagcaattatgccatctttataaacatgctgaatataaaaatcatatatatatatatatatatatacacacacacacacacacacatacatgcacacatatagcatatactctctatgttttatattccaaaatttcctgatgttcataaacactcttagttttggttgcrattgaattagtcatctattagttttggttccaattgaattagtagataaaagaaggataataaatatggttttgctattaataaaaatgatataaaatcctcttgaaactggatcttgattcacattccctgacagtgcctgctttcttgcccattgtctttcactgcatggggtgcatggtgcatgctttatggattcttgtgagtccaaaatacactgggcggacactgggcaccagggaactctggctgccctgcaatggcctggaaagatcagcctcacctactgctaaccatctctaccagtggtt

SEQ ID NO: 191924 - DNA, 558 bp, Homo sapiens
tcctattcatgaactcctattcatacttcaagactcagaccacatttcaccatggaatgttcatcaagttccttgctattcctgtttcccatcttaccctctctcttggcaaactattaatacatcgatctacggtctagattcttaccaaacctttgctagttccttatcatgctatattttaattaatagttacatgtccatctcccccactgggtagctctctgaaggcagaaacatgactaagtcagctccagattcaaagggattagcatgtagttgatctagaagtagatgcttaatgcatcatagtggcaaagaacttaagtcacagagttctggctttgaatctcaacggctacctttgctggctgtttgtcactgggcaagcatttaacttttgagtttcagattccatggaataatactagcccttaccccataatgagacaacttattgacgcatttacttcagagattgacacaaagtaagttctcaacagatgtaagctagtttttgttayagtaattcattattactgaatggacaatgaaatg

SEQ ID NO: 191925 - DNA, 417 bp, Homo sapiens
gttcaattcaactagtaaataaaaaaaaaaaaggacttttggaagttttcatggagaaatgatgttctaactggaagcacagaattagaatcagtgcattttacagtcaatatgtgaaacttgagatgaacttctaaatagcrtatgggatgacagaaaagttagtttatccagtaccactctcttaaaggattccaaattctctatttatccaaggcaattaatgttatttagaattttccattgaacttgctataaaaaaccaaaagctataatgtagcacacaggtaatacatgatctggccctacacacttctcaaggtttatctttcttgctgactttgctcaggtcacactagttttcttttggttccatgggccaagcttcttttgcctcagggccttagcaaatgcagt

SEQ ID NO: 191926 - DNA, 525 bp, Homo sapiens
tcataggggtagaaaatcaattgctggttgccagggactgggaatgaggaacttttgtgggggtgatggaacccatctatatctttatagtggtggtgtttatytatgactgtatgtgtttgtctgaattcagagagctatacactaaaagagtacattttactgcatgaaaattattcctcaaaactaagcatctcaaactccatatttatcagtttggtgatttttaaactgactgtgtccctcacaaacagccaaaccaatgagggtaggaatacttatgttttattcacacatgtgttttcagtccatagaacagtgcctagcatgtagaaggtgctcagcaaatctctgctgaatgaatgaatgaatgaatgaatggttctcaggaaagataatggacagtggagcctcactgacctagggccaaatgccagctttgccactttctctgggaagcaaacttcactttccctggcctcaataatatctacaaagagtgcacagcactgccatggtggcccc

SEQ ID NO: 191927 - DNA, 525 bp, Homo sapiens
tcataggggtagaaaatcaattgctggttgccagggactgggaatgaggaacttttgtgggggtgatggaacccatctatatctttatagtggtggtgtttatctatgactgtatgtgtttgtctgaattcagagagctatacactaaaagagtacattttactgcatgaaaattattcctcaaaactaagcatctcaaactccatatttatcagtttggtgatttttaaactgactgtstccctcacaaacagccaaaccaatgagggtaggaatacttatgttttattcacacatgtgttttcagtccatagaacagtgcctagcatgtagaaggtgctcagcaaatctctgctgaatgaatgaatgaatgaatgaatggttctcaggaaagataatggacagtggagcctcactgacctagggccaaatgccagctttgccactttctctgggaagcaaacttcactttccctggcctcaataatatctacaaagagtgcacagcactgccatggtggcccc

SEQ ID NO: 191928 - DNA, 554 bp, Homo sapiens
agagcttctgcacagcaaaagaaactatcattagagtgaataggcaacctacaaatattctttgatatatgggaagctagctcctgaaaagtttgtgagggaggggtgcaaagtagcctatcacaagcatgacatgcctttgaagtcttatatgttatgttaaaaatttctcttaagttttgcattctactccrttatgtagtcatgattcttttaatatataaagtagtgcttaaagctatgattcataggaaaatagagcaaatgaacaatgaaggctgttcagagtctccacggtccataggcagtgctgttggattgcatccatcagtttggggaagatgagctgattcgaagagaactcatgcctcctgtgaagtgcaggaccccggtaattccttcctttctctggcctcttaaaatccaattcagagtcacataaatatgaagctataaacagcaaccatttgttcactgttttgaataaagcactgatctaaatactaatcaaagtgggtttggtacattttcaggcttttttgattaaaattttt

SEQ ID NO: 191929 - DNA, 554 bp, Homo sapiens
agagcttctgcacagcaaaagaaactatcattagagtgaataggcaacctacaaatattctttgatatatgggaagctagctcctgaaaagtttgtgagggaggggtgcaaagtagcctatcacaagcatgacatgcctttgaagtcttatatgttatgttaaaaatttctcttaagttttgcattctactccgttatgtagtcatgattcttttaatatataaagtagtgcttaaagctatgattcataggaaaatagagcaaatgaacaatgaaggctgttcagagtctccacggtccatargcagtgctgttggattgcatccatcagtttggggaagatgagctgattcgaagagaactcatgcctcctgtgaagtgcaggaccccggtaattccttcctttctctggcctcttaaaatccaattcagagtcacataaatatgaagctataaacagcaaccatttgttcactgttttgaataaagcactgatctaaatactaatcaaagtgggtttggtacattttcaggcttttttgattaaaattttt

SEQ ID NO: 191930 - DNA, 554 bp, Homo sapiens
agagcttctgcacagcaaaagaaactatcattagagtgaataggcaacctacaaatattctttgatatatgggaagctagctcctgaaaagtttgtgagggaggggtgcaaagtagcctatcacaagcatgacatgcctttgaagtcttatatgttatgttaaaaatttctcttaagttttgcattctactccgttatgtagtcatgattcttttaatatataaagtagtgcttaaagctatgattcataggaaaatagagcaaatgaacaatgaaggctgttcagagtctccacggtccataggcagtgctgttggattgcatccatcagtttggggaagatgagctgattcgaagagaactcatgcctcctgtgaagtgcaggaccccggtaattccttcctttctctggcctcttaaaatccaattcagagtcacataaatatgaagctataaacagcaaccatttgttcactgttttgaayaaagcactgatctaaatactaatcaaagtgggtttggtacattttcaggcttttttgattaaaattttt

SEQ ID NO: 191931 - DNA, 546 bp, Homo sapiens
ttctatttcaatgaaataaaagataaactaacagttttcaaaaaaaaaaaagctaatggaactgaaatctgattctttggaaaagtgacaaaaattacaaaactttagctagactgtccaaaaaaaaaaaaaagaaagaaaagaaactcaaattattaaatttgaaatgaaaaagaaaacactactaccaactttacagaaataaaaggattataaaagaacagtataagaaattttatgccaacaaattagacattctagatgaaacggacaaattagtagaaatatgtaaacaatcaacactattcaagaagaaatagaaaatctgaaaaagactttcataaatgaaaagattcaattagtaatataaataataatttaaaaatagtcacagagtaaagcccagactcagatggcttcactgattaattttaccattcagagaagagctaataacaatcttctgcaaattctttcaaaagatagaatagagggaaacactttccratgctttctagcaagcattatcctgacaccaaaaccaaa

SEQ ID NO: 191932 - DNA, 583 bp, Homo sapiens
agatctcactttgttgcccaggctgaaaatctgaattagattttcaaactggtttcaaactcctgggctcaagtgatcctcccacctcagcctcccaaagtgctgggattacaggcatgaaccactgtgcctggccattttgggcttgccttgtatatgtttttactatttaaaaaaatctctggttggtcagggggccaattctttctaatataaataaagaagctttttgaagggaggtaactctctctttcctctgtgtagatcaggattacattgtggcagccaggatggcctagagtacacagctttgatgctggcagaacaaagatagattatggccagtgaaatgtggcaccacctgataacagagtgtggagagagggttgacttakagcagatgaaaggggagggtgtagaatacagtggaatacagcaacaattgttcagaagctgcaggaaagagacagtagaggaaagcagaaagttgttatgatgaaaatgaatctgctatggttatttaagtggcagagacgtcacatcccaaaacaaatagatgtggttaggccctttatcttccacc

SEQ ID NO: 191933 - DNA, 442 bp, Homo sapiens
atggaaaactgtattaacaccaggccacttacagatacataagtttgacaaaaaatggcagatacatagcacacattgtcatgtttttgttttctgyacccgtgacagacatgactaaacgatcatgcatggcattctcttttgctgagcccctcttgggccttaacagttttcttaacacagatatcagctattaactagctgatttgcaaaaacgtcagataaaacctggttctttgtgatccctggtttggaccaggagaatgagaatgtggaatagagttttatcagaaccataggagcaataatttaaaagactaatcttactgttataaataaataataatttctattaaaagtaatagtgataaaaataaaaatacagtgagtcaatgctagccactgccactttccagacttctcacataaaaaacaattaact

SEQ ID NO: 191934 - DNA, 546 bp, Homo sapiens
atagcagctggccttccccagaacaagaaatccaaaagagaatgaggaggaagttacatgcctttgagtctcaaaagtcatacactatcacctctgccatattctgtccattcaaaaggagtcactaagtccagcccacactcaagcagaggagagataagctccacctcttcaagagaacagtaccccaaaatttgtgaacataccttaaaaccaccatacttcctttgcccatttcagacctgggatggtaatgacytcccactgtggctagtcttgaataaatcattatatacaaatttcctaaacctttgaccacatctctacaaacaatcccttcattaaattatctatagttaaacccatttgaatataattctgtttccaggattttaatacaatccattagaacaggagtgtgtgcagttatatagcatgggaatttcatgggctgacatatgtatgttaatgggcttttcatttttttcctaaataaaatgaataaatgtgctacaaagttagctggcactcagtaaccagctaatt

SEQ ID NO: 191935 - DNA, 253 bp, Homo sapiens
cattatatacaaatttcctaaacctttgaccacatctctacaaacaatccyttcattaaattatctatagttaaacccatttgaatataattctgtttccaggattttaatacaatccattagaacaggagtgtgtgcagttatatagcatgggaatttcatgggctgacatatgtatgttaatgggcttttcatttttttcctaaataaaatgaataaatgtgctacaaagttagctggcactcagtaacca

SEQ ID NO: 191936 - DNA, 546 bp, Homo sapiens
atagcagctggccttccccagaacaagaaatccaaaagagaatgaggaggaagttacatgcctttgagtctcaaaagtcatacactatcacctctgccatattctgtccattcaaaaggagtcactaagtccagcccacactcaagcagaggagagataagctccacctcttcaagagaacagtaccccaaaatttgtgaacataccttaaaaccaccatacttcctttgcccatttcagacctgggatggtaatgacctcccactgtggctagtcttgaataaatcattatatacaaatttcctaaacctttgaccacatctctacaaacaatcccttcattaaattatctatagttaaacccatttgaatataattctgtttccaggattttaatacaatccattagaacaggagtgtgtgcagttatatagcatgggaatttcatgggctgacatatgtatgttaaygggcttttcatttttttcctaaataaaatgaataaatgtgctacaaagttagctggcactcagtaaccagctaatt

SEQ ID NO: 191937 - DNA, 410 bp, Homo sapiens
gaattctctataattccaggtttctgttttggtttggtttgggttggggtcctaatttatctgcagaagtcattcaaataattgtacaactatcagtttcttatatttgtaayccttttttttttctttttcaggcttgatgctttgcaatttggcactaaaattttatgacaatacactttgttatcactggacattgtagagatatggctgcctagatttctgataggaagaccttgtctttctggactgcaattacgaaatgaaggaggaactaagtaaagcgtacggattttaatcttggttctattacatactatctttgggacccttagcaagatacttagtctctctgtgcctcagtttcctcatctgtaaagtgaggggaaataatagtttctactttatag

SEQ ID NO: 191938 - DNA, 410 bp, Homo sapiens
gaattctctataattccaggtttctgttttggtttggtttgggttggggtcctaatttatctgcagaagtcattcaaataattgtacaactatcagtttcttatatttgtaacccttttttttttctttttcaggcttgatgctttgcaatttggcactaaaattttatgacaatacactttgttatcactggacattgtagagatatggctgcctagatttctgataggaagaccttgtctttctggactgcaattacgaaatgaaggaggaactaagtaaagcgtayggattttaatcttggttctattacatactatctttgggacccttagcaagatacttagtctctctgtgcctcagtttcctcatctgtaaagtgaggggaaataatagtttctactttatag

SEQ ID NO: 191939 - DNA, 473 bp, Homo sapiens
aaaataattaaataaataaccaataacattccaaaaggagtagcatccaggaccagagggtttcacccgtggatttttccaaacattcaaggaagaaatggtaccaattatcttcaatcttttccaggaaatagaagcattccatgaggccagcattaacctaacatcracaccagataaagacatttcaagaaagaaaaaccattctatccactacatccatatccatgaaaataaataagaaataaataaataaaggagacttgtattattttttgttacaccaaaagatttctttaaaaacaatgttttgaatggcccatagatcttctgtctattgactggagtatcagaggactttgagtatactgatttacaagccatagcctctgtggaagaatgaggctcaggcgacttgaatgctatgctgtctggggagaactatcatgctgctggtactctgtacaaaacct

SEQ ID NO: 191940 - DNA, 431 bp, Homo sapiens
tatccagcaaagggcaggaaggtctatgrgtttcaggtatcttggtgatttccactgatgttgccttcttggcaggcatgtgggctcctttgcagtgaaagggcagaaacagcaggtgagggccgatgtgaaccatggcagagaatgagaagtctacagaagaatcatctcagaactggccccttgttaaaacaaagcacagccccttccagggtggagcagcgtggctctctggtgagtgagtgcctctccatccctcctgaattctccttcccttcagcgacctcccacttgaatccagctgtcactgctatctaatctcctgaggatgctacacattgtctttgaagactagccttgcagaaatggaaatatcttttgagacagtctgacttcccaaagagactttactaaataatgagaattagaga

SEQ ID NO: 191941 - DNA, 430 bp, Homo sapiens
tgaactcttcttttaagcaaattctttatccagcaaagggcaggaaggtctatgggtttcaggtatcttggtgatttccactgatgttgccttcttggcaggcatgtgggctcctttgcagtgaaagggcagaaacagcaggtgagggccgatstgaaccatggcagagaatgagaagtctacagaagaatcatctcagaactggccccttgttaaaacaaagcacagccccttccagggtggagcagcgtggctctctggtgagtgagtgcctctccatccctcctgaattctccttcccttcagcgacctcccacttgaatccagctgtcactgctatctaatctcctgaggatgctacacattgtctttgaagactagccttgcagaaatggaaatatcttttgagacagtctgacttcccaaagag

SEQ ID NO: 191942 - DNA, 433 bp, Homo sapiens
tatccagcaaagggcaggaaggtctatgggtttcaggtatcttggtgatttccactgatgttgccttcttggcaggcatgtgggctcctttgcagtgaaagggcagaaacagcaggtgagggccgatgtgaaccatggcagagaatgagaagtctacagaagaatcatctcagaactggccccttgytaaaacaaagcacagccccttccagggtggagcagcgtggctctctggtgagtgagtgcctctccatccctcctgaattctccttcccttcagcgacctcccacttgaatccagctgtcactgctatctaatctcctgaggatgctacacattgtctttgaagactagccttgcagaaatggaaatatcttttgagacagtctgacttcccaaagagactttactaaataatgagaattagagaga

SEQ ID NO: 191943 - DNA, 352 bp, Homo sapiens
tcttggtgatttccactgatgttgccttcttggcaggcatgtgggctcctttgcagtgaaagggcagaaacagcaggtgagggccgatgtgaaccatggcagagaatgagaagtctacagaagaatcatctcagaactggccccttgttaaaacaaagcacagccccttccarggtggagcagcgtggctctctggtgagtgagtgcctctccatccctcctgaattctccttcccttcagcgacctcccacttgaatccagctgtcactgctatctaatctcctgaggatgctacacattgtctttgaagactagccttgcagaaatggaaatatcttttgagacagtctg

SEQ ID NO: 191944 - DNA, 352 bp, Homo sapiens
tcttggtgatttccactgatgttgccttcttggcaggcatgtgggctcctttgcagtgaaagggcagaaacagcaggtgagggccgatgtgaaccatggcagagaatgagaagtctacagaagaatcatctcagaactggccccttgttaaaacaaagcacagccccttccagggtggagcagcgtggctctctggtgagtgagtgcctctccatccctyctgaattctccttcccttcagcgacctcccacttgaatccagctgtcactgctatctaatctcctgaggatgctacacattgtctttgaagactagccttgcagaaatggaaatatcttttgagacagtctg

SEQ ID NO: 191945 - DNA, 448 bp, Homo sapiens
attctttatccagcaaagggcaggaaggtctatgggtttcaggtatcttggtgatttccactgatgttgccttcttggcaggcatgtgggctcctttgcagtgaaagggcagaaacagcaggtgagggccgatgtgaaccatggcagagaatgagaagtctacagaagaatcatctcagaactggccccttgttaaaacaaagcacagccccttccagggtggagcagcgtggctctctggtgagtgagtgcctctccatccctcctgaattctccttcccttcagcgacctcccacttgaatccagctgtcactgctatctaatctcctgaggatgctacacattgtctttgaagactagccttgcagaaatggaaatatcttttgagacagtctgacttcccaragagactttactaaataatgagaattagagagaaattctaga

SEQ ID NO: 191946 - DNA, 575 bp, Homo sapiens
cttggtttaagtaattatttcttaaagaaaacacaaagagcataaatcatgaaagaataaaataatgaattgaacttaattaaaatgaaaactttttttaaaaaaatcaaaggacacttaaaacaagaaaagacaagcaaaagatggaaaatatttgtggaacatattttaaagagattgtatctggaatatatataaaacacaactctataatatgcagaaaaatctaattcaaaaataggcaaatgatttgaatggacatttcaccaaagaagagatacagatctaaaataagtaacaaaaagatattatcattagtttttaagtaaatgtaaattaaaaccacaatgagctaccattacacaactactacatcaactgaaatgaaaaatactggcaatgacatgaattggcaaggattcaactcagagtaagtgwaactcataaattgctagcaataatgcaaaaataatattgccgctttgcaaaatatatggcagtttcctataaagctaaacagaaagtttagcaacccagtgatttccacttgctccttagtaaatgagaaatgaaga

SEQ ID NO: 191947 - DNA, 662 bp, Homo sapiens
tgtaatatatatgatatatgtattttacatttactatatattatattatatatgcattatatatgtgtaatatatccatataatatatcatatatggtatatatgtcaaatatataggttacatatataacatatgatacataccatagatagtattttttatgtttagtatcttctaattagaatttgtttttttctccactaaaatttagtacccatgatagatttcagtcagtttggtttactgctaaatccccggcaatcaatacaggttctggcatgcttaaagcacttagtaaatatttgtttaattaatcagtcaatccaaaccaaattcttatccagcttatgcttaaacctagtgaacagataataactacctgtttagattatttattccatccctagagaactctgctrggaacttgctgcatgaaatccagcatgttgacttttgatcagcattcatatgtctgtctaatacagtcaatctgaacaagtctaatgtctcttcctccagatttttcataacaactatcttcattaaggttgtgcaaggaattctgaaaagaaggcttgcaaaaacaagcaaatttttaagcaacataatgcatatgatatgacatagctcctatggttatactgagaaccctcttcttgct

SEQ ID NO: 191948 - DNA, 562 bp, Homo sapiens
ttctgttatttaagccacccagtttgtatgatattttgttatggcagcccgagcagaataatacacatatagtctttcatattgttagaaaagtmtctcttaccataaattaattttgattttgttatcatttcaccagcatttgctgttcaaagccatagtttcatatgctgtgctagacactggagatacaaggcagaatgaggacttggagcatgtataagctagaccaaagatggcaaatacagggctcttagcaccttccattccctcccaggtcctaacttctaattgataacaacacaattccccatggaattgaacactacaatcttactaaacatagaataagtgccaaatgatcagatttacaatgtaccaggataaacgtgttggctagccatggtccactgctattgcagagacacctggaacgcaggttgttttgccaggacttgtgtaaatttaaagaaaaaaaaatcccaaaaattatgaaagaaagactttgtgtgcagttgtgcccatacaataataaagaagctaggtaggcctttggaatagt

SEQ ID NO: 191949 - DNA, 440 bp, Homo sapiens
tgcaaatcaaaaccacaatgggataccaccttactcctgcaagaatggccatcmtcaaaaaatcaaaaaataatagatgctggcacggatgtggtgaacagggaagacttctacactcctggtgggaatgtaaactagtacaaccactgtggaatacagtgtggagattccttaaagaactaaaagtagatccaccatttgatccagcaaatccactactgggtatctacccagaggaaaagaagtcattatacaaaaaagatacttgcacacgcatgtttatagcagcacaattcgcaattgcaaaaatgtggaaccaacccaaattcccatcaatcaacgagtggataaagaaacttttatatatataatatatatatatttatttatatatatttatttatatatttatacatatataaactgatatatatgtgtgt

SEQ ID NO: 191950 - DNA, 486 bp, Homo sapiens
gggatgggctgtgttttgcttgtgtggataggctgtgttttgcttgtccattcatcctctgatggacatttgggctctttccacttcttggctactgtcagtggtgctgtgtacatgggcacagaaatctgtgtgtggacgtttgtttcattcctccggggtagatgcctagaactggactgacagggtcacagggtcacacagtgagtgacattttgaggaactgttttccaaggtgctttcactgggggttgaagctctgatgaggcagaagacacatcgaatgaggacccagagtaggagtcagagctgagaccccccaccaggaggtatcctccctggggacggccagacaggctgggtcctgtcggtgcctyggacagggaaggtggggacaatggcaaatgtggaggaggtcagagagccagccccgggccctcctcctggctctctgttctgaccctgtggccatcagtgagcacagtg

SEQ ID NO: 191951 - DNA, 557 bp, Homo sapiens
tttcatatacattggtgatctgatgataaacatgtatatatttataattgatatatcttattgatggatggacattaatcactacataatgtcctgtgggcccagcccccgccgatcagtctgctccagcttctgtatgacagtggcttcctcatcaggctcctttcctggcctatggctggcccctccccagtagggccatcatgtccccaggtaacatccacgtggccccctgggcagcacatatcattcctcagttgctctcactagaagccaatacttcaggccccacttcctaaggtctggaaaattatggcagcctaataaaacaagctgataaatttaagactggtattatttctctcccagttgtttgagaatattcagcagggaaagtatttgggtctgtagttggctctgtaggaaagcttttgatgttagattcaagttatttaatcaatatgggatatttgtatttttkttccttttgtgtggattcggtgtcttgacaaatatagacagttgtgtctccaccaacacaatcaatacatagactc

SEQ ID NO: 191952 - DNA, 545 bp, Homo sapiens
taaggaagggtcatttgacaagagaccgaaggatgagaaagagccaggcatgaggacagatgtgggcataggtggtggaatacagaagtagggagcatgaagactagcakgcagagaggagctcatgggttcaagtgaccagaaaaaaaagtagtgacaataattgtacataaatcagatagaaattgatcataccatgacctgttaaatatttgtgtttgcaatttcacatgtaataattttaacatcagaggcaggcaagaatgtttattaagtacctactcagggctgcccaactgacaacccctggggataccacttgccttgtactgatgtgagtgagggtccctgcagctttgtcatgtggcagtattgctgaacattctgctaaacagttgacatggatcatctcatggaatccttatagcaacccagggtgtagatattataactgtacccactttaaagagaaactgagactaggtgagcttaggtaactttcccaaggttatataacagattatgcagcaggcaagcagtaaaaa

SEQ ID NO: 191953 - DNA, 451 bp, Homo sapiens
aagatgtatgcacagccttgccaggtgtctactgttaaagtgagggcattgattggaaaagaacgggaccctgcaacttggactggggacatgtgggaggaccctgatggaactgggaacactgagtttgtaaactctgatgaaccttttttgccagaaggaacagcttccccatccccagtagyggcaacatcccttccctgacccatggtgccatcagcctttccacctttgtctgaggagataaatcctgtgctgcctgaggcaacagtgatggcctcccctgaggcacttgccaggcaagataatgttgattctcctcaggagccgcttccaacacccctgtttgcttctagacctataactagactaaagtcccagtgggcccctggaggtgaggttgagagtgtgactcatgaagcagtacactacacttgaaaataactgtttg

SEQ ID NO: 191954 - DNA, 451 bp, Homo sapiens
aagatgtatgcacagccttgccaggtgtctactgttaaagtgagggcattgattggaaaagaacgggaccctgcaacttggactggggacatgtgggaggaccctgatggaactgggaacactgagtttgtaaactctgatgaaccttttttgccagaaggaacagcttccccatccccagtagtggcaacatcccttccctgacccatggtgccatcagcctttccacctttgtctgaggagataaatcctgtgctgcctgaggcaacagtgatggcctcccctgaggcacttgccaggcaagataatgttgattctcctcaggagccgcttccaacacccctgtttgcttctagacctataactagactaaagtcccagygggcccctggaggtgaggttgagagtgtgactcatgaagcagtacactacacttgaaaataactgtttg

SEQ ID NO: 191955 - DNA, 585 bp, Homo sapiens
ctgacttgtgtagagctctggcattggctaattaatcacagygttcctagaagtgaaattgataggagcctactgcattcctacttaaattatacaaacagaaaacttctaggtcgaatggacaaaagactaatttgaattataaaaacagagaatcacagcccctcaatcaatttccagacttgagccagtttacagacccagaaccctttgaaggaagaggaggctggataccctcgagaaaggacaccactacattactgacaatttatgcagtgaatctttctcccatccttccccaaggagacctccagccttttaccagggtaactgcattgaggaaagggaaatgatcagaaatgtgggggactactggacactggctctgagctgacattgattccaggggacccaaaatgtcattgtggtcctccagttaaagtaggggtttatgggggtcaggtaattaatgaagttttagctcaggtctgacttacagtgggtccctggactcatcctgtggtcatttcctcagtgccagaatgcataattggcataaacatacttagcagctggcagaacccc

SEQ ID NO: 191956 - DNA, 585 bp, Homo sapiens
ctgacttgtgtagagctctggcattggctaattaatcacagcgttcctagaagtgaaattgataggagcctactgcattcctacttaaattatacaaacagaaaacttctaggtcgaatggacaaaagactaatttgaattataaaaacagagaatcacagcccctcaatcaatttccagacttgagccagtttacagacccagaaccctttgaaggaagaggaggctggataccctcgagaaaggacaccactacattactgacaatttatgcagtgaatctttctcccatccttccccaaggagacctccagccttttaccagggtaactgcattgaggaaagggaaatgatcagaaatgtgggggactactggacactggctctgagctgacaytgattccaggggacccaaaatgtcattgtggtcctccagttaaagtaggggtttatgggggtcaggtaattaatgaagttttagctcaggtctgacttacagtgggtccctggactcatcctgtggtcatttcctcagtgccagaatgcataattggcataaacatacttagcagctggcagaacccc

SEQ ID NO: 191957 - DNA, 510 bp, Homo sapiens
taacagtgtaatggtttccattaaatattgaatmttgccctgtagggatggagcctagaaattcataaattatgtaatctaagggctttgctgatgactgataaaatcaaattagctgctttgggataaggatgaatttgaaacataatttcctcctttgaagagacagtgacaaatctctttgatgggtctgcatgtcaaggttttttttttttctggtagaaaatttaacaggatcttttgttaggcaaagtaaatgagactggcttaggttatgaactagttttttttttccccaaaaaatgtttatttttgttatattattaaagccatacccacccatacaaattttgtttttaaaagcaggaaaaaaattcacccataattctaacagtccaataaaacctgacatttagagcatctcctttcaggcatgttgttgtatgatcatgcacatttctacagaattgaagtcatataatatgcagatacacatatacacacatatat

SEQ ID NO: 191958 - DNA, 510 bp, Homo sapiens
taacagtgtaatggtttccattaaatattgaatattgccctgtagggatggagcctagaaattcataaattatgtaatctaagggctttgctgatgactgataaaatcaaattagctgctttgggataaggatgaatttgaaacataatttcctcctttgaagagacagtgacaaatctctttgatgggtctgcatgtcaaggttttttttttttctggtagaaaatttaacaggatcttttgttaggcaaagtaaatgagactggcttaggttatgaactagttttttttttccccaaaaaatgtttatttttgttatattattaaagccatacccacccatacaaattttgtttttaaaagcaggaaaaaaattcacccataattctaacagtccaataaaacctgacatttagagcatctcctttcaggcatgttgttgtatgatcatgcayatttctacagaattgaagtcatataatatgcagatacacatatacacacatatat

SEQ ID NO: 191959 - DNA, 343 bp, Homo sapiens
gtcaaggaggatttacgatggttgtttgcatgacccaaccatatgctgtggctggggaaatactctggttagcctgctttgacgtatgtattgatgacaaagaaagttacaccacaccacaggaaaaaaacaacatgaaaacactcccaaatctgtccgtaagctccctgtagaaataatgaccttcctggtaaaatcaagagatgattaaaagtaattaatggatacttctcaaaaaagacataacaatcagaggatytggaagccagctgttgtaacatttcttgagaacaaggtgcattttattggcttcatgaaatgcatgccttcggccccacagcag

SEQ ID NO: 191960 - DNA, 408 bp, Homo sapiens
ggggagccacaggcaccacagagaggccaggctgggaacagaggtgattggaatcttccaggtgaggggaggtggtgttctcaacrcaggaagaggggagaggcagagcgtcaagtgggtggtttggaagttatttggggacagttggatacggggaggtgagacagacaggaggcactcaggatccctggccaggtttcccacttgggcaaatgggtagatggtggagacattcactggaatggcaaagcagaggagaagcaggcttagtgttggaagacaagcccaatgtaggatcttttctatttgaaatctacaagacgggcaaataaaactgtcattaggcagaaggctctttgagtctgtagcccaggaaagccagcttggtgaagctctaaattgaagatc

SEQ ID NO: 191961 - DNA, 408 bp, Homo sapiens
ggggagccacaggcaccacagagaggccaggctgggaacagaggtgattggaatcttccaggtgaggggaggtggtgttctcaacacaggaagaggggagaggcagagcgtcaagtgggtggtttggaagttatttggggacagttggatacggggaggtgagacagacaggaggcactcaggatccctggccaggtttcccacttgggcmaatgggtagatggtggagacattcactggaatggcaaagcagaggagaagcaggcttagtgttggaagacaagcccaatgtaggatcttttctatttgaaatctacaagacgggcaaataaaactgtcattaggcagaaggctctttgagtctgtagcccaggaaagccagcttggtgaagctctaaattgaagatc

SEQ ID NO: 191962 - DNA, 570 bp, Homo sapiens
cttctaaagagtagcccttgctttacctctggttcctgtcccatgccactggcaggggatggcrtggagaacatggtggcatcttgcctctgtttattgcttatatctctatatttttcccttgaccttatcaccccagaatgttcacatggggtctggcaaggaagccagctaccctagctgcatgtgatactttcatttatgactattacagatccttctgtgctaatggggtgccctctgacataaacaggccaaaccagagcagtatctgtaggggttctaggcaagggtacaggtcaggatacaaattaagaggggtgtgtagtgacaatctagaatcgatctgattatatcttgtattctagaatgtctatttatatatcttggcctaacagacctagagagataatcaaactatttctactgggtatttcagaaaatggttggaaaatggcttggtaagtgaagctgagtcccagctcactatgttaaagagctgttctgcatgatttatgacctgggaaaaatttattgagtatctactatatgtcaggcattgtgtgcagg

SEQ ID NO: 191963 - DNA, 552 bp, Homo sapiens
caaagagtccctttttgtggtgtgtcttcttgttagttccatgaccgactttgtcatcagaagatgagcccaggctcccatgctcccatgatggaggtgcagttcaggagcaaccgctcactggtgaccttgggtgggctgcctcatccctctgtgccccagtggcctcctctgtaaaatggtgatgtccgtcctatcactcttatgggtttgctgtgaggattaaatgtgctgatacaactgaagcacttggcttagtgcccagaacatattaagcactctcaggaaggtgaagatctgctgccatgcagatgttgtctattgttactaacaaaattagcatttactaaatccttaccggttcctctccccagctctgtgataactgctttacatgcgtggtctcattgaatccaccctaacttccggtgttaattttcccattttacagacaggaactctgaggctcagagaaagtcagttagcctcccargttcataagctgggaagtgatggtgccaaggtttgaacttgggtctgtctgcaaagctt

SEQ ID NO: 191964 - DNA, 585 bp, Homo sapiens
  misc_feature (1)...(585): n = A,T,C or G
attcttctcctcaaatttgttttctgaaataaagcttcagaccaagaatgtaagtctgataagaatgcaaggcagacaaaggaaagtgtcagcgagaatgtgcgggaactgataccctcttaccttgctgatggaaatatagaatgttgcagccattttggaaacagtttggcagctcctcaaaatgttaaacatagaattactgtatgactcagcaattccactcctaagtgtctacctaagagaattgaaaacatatgcatgagtattcacaacarcattactcataaaagccaaaaagtggagacaaccaaaatgtccattaactgataaataagtaagcaaaagatggtatatccatacagtggataaaaaagaatgaagtctttattcatgccacaaaacagatgccttgtgagaacattacgctaaatgaagaaagccagtcaacaaagaaaagtcaacatactgtgtaattttatgtatatgaaatgtctagaatagacaaatctatggatactgaaagtagattcatggtagcctagagttgaggggtggggggngatgggagtgactgctaatgtg

SEQ ID NO: 191965 - DNA, 474 bp, Homo sapiens
  misc_feature (1)...(474): n = A,T,C or G
tgaaagtagattcatggtagcctagagttgaggggtggggggngatgggagtgactgctaatgtgtactcttcatagggtttctctgtggggtaatgaaartgctctaaaattagattatggtgatggttggacaactatgaatacactcaaaactactgaattgttcacttttgtgcaacttttactgcatgtgaattatatcttaataaaagctattttaaaaaagagaatgcaagcctgacttgccaaggtacccttcttttgaaaactaaatgaacaaacatctgaaatttgctattttctgtatgaaagtatgcagaactgggggagatgacttccagtaaacaaatcagtaaagacgagagaaagcagcagttgagcatgaaaggttgagagcctttaaatgtgccttaaagaatgaaatagatttgggcataatagaaaggatattctaaatgcaaggaatggtgtg

SEQ ID NO: 191966 - DNA, 583 bp, Homo sapiens
gtgccactgcactccagcttatgtaacagaccaagactctgttccaaaaacaaaacaaaacaaaaaaagaaagaaattaaggaaaaaggcacatgtacatttttgtggcagatagattcttayggtagcagccccacaatctctgcctcctggtgtccatgccccgtatgattccttatccttgaatgtgggaaggaaggattcatgacttgcttcgaacctatagaatgtggtaaagatggcaagatgtaagtcattatgtgtacgtgattatgtgattatgttatattagattgcagcacctgtattgcacatgtgttctctctttttctctccctcccccttcctctctcccacctttgctaactttgaggagtcaagaaaccatgctggggaaccccacacagcacagaactatgaggcagactgtaggatctgatgacagccagaaagaagccctcatcctagttgcaagaaactgaattctgccaacaacctaagtgagcttagaaataaatccttatccattcaagcctcaagtaagaccacaaccccagccaaagccttgattgacatcatgtga

SEQ ID NO: 191967 - DNA, 583 bp, Homo sapiens
gtgccactgcactccagcttatgtaacagaccaagactctgttccaaaaacaaaacaaaacaaaaaaagaaagaaattaaggaaaaaggcacatgtacatttttgtggcagatagattcttacggtagcagccccacaatctctgcctcctggtgtccatgccccgtatgattccttatccttgaatgtgggaaggaaggattcatgacttgcttcgaacctatagaatgtggtaaagatggcaagatgtaagtcattatgtgtacrtgattatgtgattatgttatattagattgcagcacctgtattgcacatgtgttctctctttttctctccctcccccttcctctctcccacctttgctaactttgaggagtcaagaaaccatgctggggaaccccacacagcacagaactatgaggcagactgtaggatctgatgacagccagaaagaagccctcatcctagttgcaagaaactgaattctgccaacaacctaagtgagcttagaaataaatccttatccattcaagcctcaagtaagaccacaaccccagccaaagccttgattgacatcatgtga

SEQ ID NO: 191968 - DNA, 583 bp, Homo sapiens
gtgccactgcactccagcttatgtaacagaccaagactctgttccaaaaacaaaacaaaacaaaaaaagaaagaaattaaggaaaaaggcacatgtacatttttgtggcagatagattcttacggtagcagccccacaatctctgcctcctggtgtccatgccccgtatgattccttatccttgaatgtgggaaggaaggattcatgacttgcttcgaacctatagaatgtggtaaagatggcaagatgtaagtcattatgtgtacgtgattatgtgattatgttatattagattgcagcacctgtattgcacatgtgttctctctttttctctccctcccccttcctctctcccayctttgctaactttgaggagtcaagaaaccatgctggggaaccccacacagcacagaactatgaggcagactgtaggatctgatgacagccagaaagaagccctcatcctagttgcaagaaactgaattctgccaacaacctaagtgagcttagaaataaatccttatccattcaagcctcaagtaagaccacaaccccagccaaagccttgattgacatcatgtga

SEQ ID NO: 191969 - DNA, 648 bp, Homo sapiens
ttatccctattggtagtgctggtaccagttgtgatattagtcatagatgcaacactagcagcagagtgtcaggcccgattataacttttaggaacctgagcccatgcttctctcatgcacttcatttgttgagaggaaagggaacaagaggattgatctctcatttatgagtgccctaagcagagcttaggctgtctcatcagtcatctagccctccaagatattacatcttactccctcttcccaaattattgacccagctgatacagacaagagacgaggaagtactgggtagaagtgggtgggtccccagcaaaggccccatcctcaagcctggaaactcacggccctaatgggaacaggcattcatgtttacacacccaaaagttgcatttggcctgccaggctcccttaccstgtacccgtataaaccccagaccccaggctccagaagcagacgaagatgaacagaagagcagaagcacagcagaacggcatggcagagagaagagaatgagcatctgaatgctgagaggagtttggctgggaatggtcagagagattggctgctggacagccaaactccgggagaagatcatctccccactccattcacttttcagctccccacccaacccgctgagccct

SEQ ID NO: 191970 - DNA, 326 bp, Homo sapiens
tttcacatacttcattttatggttaacatattgtaggtatcttttcaagtcagtaaatgtaaatctgctcatcattttaaagtggtacgaattttattgaackttgaatattgagttttgctgtttgtactgcacatgtacgtgtgtgtttttctttttagaacatatccttgtgagtagagttattcggtcaaagcccacgcacattcaaaaatttgacaaatattgccaaactgccctccagaaagtatctagggattttcactctgatcaagagttcaaaagagggctcattgccccacacccttctctgacttagatactgc

SEQ ID NO: 191971 - DNA, 325 bp, Homo sapiens
cagtagcaaatggcagcaactacctccttttttcaccactcctatagggcttcccaacaggactgttgtcttcttgggttacactggctcctggtcttttcttctccccatgggtgcttgttctggtttttaatactcctrtagggtcctcatggttccacagtcataacatccacactctgatccagaacatgaaggcatgctttatgctttacacatttaaagtgaaatgtagacctctatgaaaattatgtttaaaatataaattgcattcctgagtcagactaacctatggcaaactctttttaaattttactctgcagta

SEQ ID NO: 191972 - DNA, 607 bp, Homo sapiens
atcattccatagacgtgaagactcagaaagattaagtaagttactcagggttctatgcccccttactctcataccccagtaagtcaaaatggtatatcatagtcagttcagatggtctgctttaacaaaatacattacaaaatacattaggctgggctatttataaacaacagaaatttatttctcacagttctgtagactgggaagtctgagataaaggctccagcagatttggtatttggtgaggagggcttgctctctgcttcaagatggtgctttgttgctgtgtcattgcatggcagaagcagtgaaagggygaaaggaactaaagctgtgtcctaaaatcctattataagggcactaatctcattcataagagccccaccttatagcctaatcatcttccaaagaaccaacctcttaatcagttctaggtttggctctggcatcaatcacatcaaagcttgcatttgtacagtgctttagagtttcaatggattttcagtgcattttaattagtttactttctgactctatgcaagtttcatagagtcagatgatctgtgaaatttgtaaaatagggtggtgagataataagttttttcag

SEQ ID NO: 191973 - DNA, 590 bp, Homo sapiens
tcagcataaatctttaaaagttatttttgctcaacgtattattggtgggtgatatagtaacattaagaataaaagtagtaaataacatcacactaggaaatgttttaaatgatttatttgccacaaaataatacagttaaatcaaagaaaatgtgtaatgctttttagtttcaaaaactaaatgaaaagactgcttaatacatacgtacacaaactgcataaggagtagatgtgttgtattgatttgaaatttacagaactaccatagtgtagagaaattctgaaagcttttctgttttttcttaacctgttgagaagtggaatgaaattaagcctgggtggtagcctccgaagatgactgccatcacttctgtctgtgtctgtgcatgaaaaccactcctccttccaaaggtactaccagctgaattctccctgcaattctgagctggttctkcaactgctccaattaacaaagtgtcgtggaagtagcattccagaggctttaagaggacagagagcttcctattccttccttttgcagcattcccttttgtaacccaggtgccttgctatgaggaaaccctaatagt

SEQ ID NO: 191974 - DNA, 521 bp, Homo sapiens
cctgagacccctctttttacagccacaactgccgcaggggagcttggaccatctctcagctctggtctctttggagggccctttcattggcagagctctctgggcaagaggagctggggagcctcactccagttgaggggtcctctgggtccaggaccagccctcctccctatctgtggggtctaggggtgcagagagggccatgkggtggcagtgactctcaatggcagggcttcctggggactggcttcgggtgcatatcacgcaactgcttatccatgtagtttctgggcacagagcagcccagtccctccccagacgaagggccactcctttcccagcccacctgccgggggctgagctagggtcccttgcgtcctcctcataactgaacttcccagggctgtctgcgtcccagggaaggatgagggggatccaggacccatgtccccacccctcagccccaaacagtcctttctctccttgacatcaactatgcagccacgttcctctcagtggga

SEQ ID NO: 191975 - DNA, 513 bp, Homo sapiens
ttttacagccacaactgccgcaggggagcttggaccatctctcagctctggtctctttggagggccctttcattggcagagctctctgggcaagaggagctggggagcctcactccagttgaggggtcctctgggtccaggaccagccctcctccctatctgtggggtctaggggtgcagagagggccatggggtggcagtgactctcaatggcagggcttcctggggactggcttcgggtgcatatcacgcaactgcttatccatgtagtttctgggcacagagcagcccagtccctccccagacgaagggccactcctttcccagcccacctgccgggggctgagctagggtcccttgcgtcctcctcataactgaacttcccagggctgtctgcgtcccagggaaggrtgagggggatccaggacccatgtccccacccctcagccccaaacagtcctttctctccttgacatcaactatgcagccacgttcctctcagtgggaaacaga

SEQ ID NO: 191976 - DNA, 513 bp, Homo sapiens
ttttacagccacaactgccgcaggggagcttggaccatctctcagctctggtctctttggagggccctttcattggcagagctctctgggcaagaggagctggggagcctcactccagttgaggggtcctctgggtccaggaccagccctcctccctatctgtggggtctaggggtgcagagagggccatggggtggcagtgactctcaatggcagggcttcctggggactggcttcgggtgcatatcacgcaactgcttatccatgtagtttctgggcacagagcagcccagtccctccccagacgaagggccactcctttcccagcccacctgccgggggctgagctagggtcccttgcgtcctcctcataactgaacttcccagggctgtctgcgtcccagggaaggaygagggggatccaggacccatgtccccacccctcagccccaaacagtcctttctctccttgacatcaactatgcagccacgttcctctcagtgggaaacaga

SEQ ID NO: 191977 - DNA, 557 bp, Homo sapiens
acaaacaacaacaacaaaacaaaacaaaaagcctgccttcatgaacaccgacatgccgccctatccccaggtagaaygaatgactcctttctttacggttccactttatttattcacatctgtctccttgtacttccctcctcactgtcattcaaactctagtactttgcacaggattggcatgtgataaggtcttaataaatgatggctgaaaggatgaaccagaaatgttaggaccccagtgaaacctaggtccctgcattttgttgaccttgcatcaacccaaaatataggcacaaattatcagaatatatagatgaaatccagccagtttttcatggctgttccatgattcagtcttttttgagtcaaacgtggaagagaaaaaaaaagaagtcttttttttttttttctgttttctttattttttatgtgcctccttccactttagaccgtaatcctttccagctcaccccaggggaaacaaaaattgtaaatccattctagcaattcaatttgtttagcaaaattgtacaaaaacactagagccaaaatat

SEQ ID NO: 191978 - DNA, 593 bp, Homo sapiens
acagtgctataacagatataataataataaagtttgaaatatttgtgtcacagaggcgtgaagtgagcatatgctgtgggaaaaatggtgctgatagacttgctttgagcagggttaccacaaaccttcaatttgtaaaaaaataaagtmataaaataaaaatgcaatgtctgtgaagcataataaaacaaggtttacctgcattttcacttatggggctttgctccatacctgcctggtttccagcaacattttcttcccattagttctcctcccatcacatttcaaaacataagtctgataatgtcatttccctgctaaaaacttaaaacctatcattggtacaaaattgacatgggataaagtccaagtcccctaatagggtttctcaaaactgtccactaataaaagctaatactggacaggattaaatgagagactccacaggctttgcggacacagggagtgatgcctcgtaaaatttctttatattctcaagttttacgttaaaaactcaagctaagttggcatttattatataatatagccatatttacttaaacatgaagatacttttttaaactgtggtaaaa

SEQ ID NO: 191979 - DNA, 420 bp, Homo sapiens
cttgctatgcttcacactgcatggtaggctctttggattttaggggcaatgtagacccatttgggtgtgctaatacaacccatttattaatttaactataaagtgaccagggcttagtgagacccaggggaaaatgtagcatttcatcatccagtgtgcaattctgttcattcatccttgtgactcagaagatgcttgggtactccttgtatctgataaacaggcatgttgtgtggygcatcttacaagctacaatagagagatcacagtgaagatccacagagatgcagctaaaaaatatatatatgataccctctttggcagacatctattctcatttggagaaacagcttttatattttgctgggctcttatatagcctgaaagcctaatcatgagacatcaaatgatgacgtagct

SEQ ID NO: 191980 - DNA, 561 bp, Homo sapiens
agccattcattacataaaaaggaaaagaaagtagacattttaggtacctttatccttgcttcctaattggctacctasgcttgccaggtacggcagaaagataatcagactttctttttacaggatattaaagatgagaaaggccttggagatgatcaaatccaatccctttattttctaaagaaactgaggctgggaataattgacctgacagatagaaactgatggaaaattttagttctgttacttacttgctgtgagaccattttgaaaatagacatcatatcctgttttaattaccctagacttcagaaataagcattccaagataaacctatctgtatctgggggaataagagtaggctcagttgacagaagacaataggaaaagtaacacataaagatgtcaccagaagacaaagctctggatttaagatttggaagttggaaaaactcttggaagcttagcaaaattgtatataaccaggcccatatgaaatggagtgctgttgcaagttactgtgctgaggaagttgaggctctaagaccaaaatgttggca

SEQ ID NO: 191981 - DNA, 561 bp, Homo sapiens
agccattcattacataaaaaggaaaagaaagtagacattttaggtacctttatccttgcttcctaattggctacctacgcttgccaggtacggcagaaagataatcagactttctttttacaggatattaaagatgagaaaggccttggagatgatcaaatccaatccctttattttctaaagaaactgaggctsggaataattgacctgacagatagaaactgatggaaaattttagttctgttacttacttgctgtgagaccattttgaaaatagacatcatatcctgttttaattaccctagacttcagaaataagcattccaagataaacctatctgtatctgggggaataagagtaggctcagttgacagaagacaataggaaaagtaacacataaagatgtcaccagaagacaaagctctggatttaagatttggaagttggaaaaactcttggaagcttagcaaaattgtatataaccaggcccatatgaaatggagtgctgttgcaagttactgtgctgaggaagttgaggctctaagaccaaaatgttggca

SEQ ID NO: 191982 - DNA, 453 bp, Homo sapiens
ggtgatgaatgtagaggtcatttgttttttcttgctaaattctgacaacttcattgaaccaattgtatcaataggattttgtcggtagatgcarcaagcatctttatcctttcttatttaatgtgccatattaaatacattgtatattcataagtgccgctattagaaggctaccttgcatgattgatgttttaaagttcatttgaaatgtaaataaacccattaactgacttcatcaagaacttaaaaactatataacatatttcaatatattatttccatctttgcattttatggttttgtaaataaaaagaaaataaaaaggttatgtcaatgatggtttgaaacttatcacaaattatgagctattctatttgttaatccattatgattttcaaaaaaaccacaatgtaattatagccatcaaaatgggataatgaagaggaaaaagca

SEQ ID NO: 191983 - DNA, 559 bp, Homo sapiens
acaatgtgctgagcttcatctatgtcaagaattaaaggattttcatttgctaggccttttcaggttatgtatctttaggttaagaaggaggttcaaggatacaaaatgctaaagctatggctcaggtggcatttatccacatggggatrcatgctccttctaaagaaaacaaaaattgacaagtacaaaatcatgtaatctattaagaatattcaatgactatgttttcttgagataaataaaactgcttttcgcagtgtgggaactcctcaaagagctaaaaacagaactaacatttgacccaacaatcccattactgggtatatacccaaagaaatataaattgttctacattaaagacacatggtaggtgtatgttcaacagcaaagacatggaatcaatctaaatgtccatcagtggtagactggataaagaaaatatacatcatggaatactatgcaaccattaaaaagaacgagatcatgtcctttgaaggaacatggatgtctttgaagccattaggtttcactcaacatatctagatatggatatatgttc

SEQ ID NO: 191984 - DNA, 422 bp, Homo sapiens
tactttgaatctccagtggccctaaagataggcaaaactatttgctaaagataatgacaaaarcattacaataaaatgttactgaacatagtcatatgttaacagaacatgtaagtctcacaaattaaatcacacaagtataactcaagcatagaaaggatcttgtctagttgttcccaaacattatcggaatcacccagggagctttctgaaaatacacattcccaggccctacccctattgtgatttaatctattattttaaagatttgacgtgatgagtaaatgcaattaggaatgtactaaaattttatataattcatattattaattacccaataaaatgatactggggttatgacaaataggacaggatggagcacaaagccctggaacatatggccaaaaccaatcccccaaacc

SEQ ID NO: 191985 - DNA, 429 bp, Homo sapiens
gttcacatataccttatatacaaagcctaaaggtaattttatacaatcattttaataagtttgcacacgaaacaaaatttgtgcacactgaaccatcagaaaacaaaggcatcagccacttatgaagacaatctgtggttaacatcactatcatttctgactctgaaatttatatgctactgataagcaatcattttttgcacacattcacgcacaagtacttaacagtaaaaaaaatatgacataccattaacacagggaaaaattaatatgttcagggtaactaagcagcacagtagcaacatcagaatatctgtaccaactgttcaacaatagcaactgcaagctgtgtgtgcctgtgttttgactgcaacctgtcacatgaggtcagatgtaaaattytctgcttgatctcatatcagagctcac

SEQ ID NO: 191986 - DNA, 531 bp, Homo sapiens
aatctatttggtattcaccatctgccaagactattttggcctctayatacttatgtacatgttatagatcagaattcaccaaataaactttggttaaaatcaaagacaaattttgccatgactaatgcctttgtgtggcatgacaaagtgaggtaaagggtttccctccttttcaatgctttcggatttacgtggttggatgttgctttcttagagttcatgacagcatggaatatggagatcacttttttgaggattggtgttaatggcttttaaaaaggtagctttaaaactttcttctatttttactttagaatcactgcagaggacctaaaaataaccacacatccaatgcaggacacactggcagaacgaagcctgttacagctaaggccaaagaaaggggcacagtcaccatcaagctgaagaccagcctcaactggacgggacaggaatatcacttaggactggtaaacactgcggcaccaaaatgggtgcatctcaacacaaaggaggtattttaaattcaat

SEQ ID NO: 191987 - DNA, 695 bp, Homo sapiens
gtagtgtagtgttgggtactttccttcagactaatggtcctgccaatgcttcaaatgatgctcccccaacttcaatgacaccacaaatctcttgggcatcttatctttgatccatcctcctcttccattcccatatcaagccaatcatccattcctaaagactttctttatcactgccttcttttgtgtctgtctcttctcccargtagaactgcaaatgcattgaggaaagggttaatgttttgtgcactgtaggacagtacttgtgccattacaggacttagcatgctgccttcatataaaaagaagtgttcaataagcatttgatagtatgaatgaatatctgctttgaaatttttttatatgtttttttcactttccattcctacatccactcttcctgtctatgtgtagattcctgccctataaatttctagttagtagccctcactctgggttctttctccttcctttcatccatatatcattgcctttcatctttaagctctctgacaatgggatgtgttttttgctccttatcagtgttttctttttctttttctctttttttgagacaagatctcactctgtcacccaggctggagtgcagaggtgtgatcacagctcattgcagccttgacctcctgggctcaagcgatccttccaccttggcctcccaaaatgctggaattata

SEQ ID NO: 191988 - DNA, 695 bp, Homo sapiens
gtagtgtagtgttgggtactttccttcagactaatggtcctgccaatgcttcaaatgatgctcccccaacttcaatgacaccacaaatctcttgggcatcttatctttgatccatcctcctcttccattcccatatcaagccaatcatccattcctaaagactttctttatcactgccttcttttgtgtctgtctcttctcccaagtagaactgcaaatgcattgaggaaagggttaatgttttgtgcactgtaggacagtacttgtgccattacaggacttagcatgctgccttcatataaaaagaagtgytcaataagcatttgatagtatgaatgaatatctgctttgaaatttttttatatgtttttttcactttccattcctacatccactcttcctgtctatgtgtagattcctgccctataaatttctagttagtagccctcactctgggttctttctccttcctttcatccatatatcattgcctttcatctttaagctctctgacaatgggatgtgttttttgctccttatcagtgttttctttttctttttctctttttttgagacaagatctcactctgtcacccaggctggagtgcagaggtgtgatcacagctcattgcagccttgacctcctgggctcaagcgatccttccaccttggcctcccaaaatgctggaattata

SEQ ID NO: 191989 - DNA, 695 bp, Homo sapiens
gtagtgtagtgttgggtactttccttcagactaatggtcctgccaatgcttcaaatgatgctcccccaacttcaatgacaccacaaatctcttgggcatcttatctttgatccatcctcctcttccattcccatatcaagccaatcatccattcctaaagactttctttatcactgccttcttttgtgtctgtctcttctcccaagtagaactgcaaatgcattgaggaaagggttaatgttttgtgcactgtaggacagtacttgtgccattacaggacttagcatgctgccttcatataaaaagaagtgttcaataagcatttgatagtatgaatgaatatctgctttgaamtttttttatatgtttttttcactttccattcctacatccactcttcctgtctatgtgtagattcctgccctataaatttctagttagtagccctcactctgggttctttctccttcctttcatccatatatcattgcctttcatctttaagctctctgacaatgggatgtgttttttgctccttatcagtgttttctttttctttttctctttttttgagacaagatctcactctgtcacccaggctggagtgcagaggtgtgatcacagctcattgcagccttgacctcctgggctcaagcgatccttccaccttggcctcccaaaatgctggaattata

SEQ ID NO: 191990 - DNA, 558 bp, Homo sapiens
cagagagtctaaagattttaggagctgtatgtattccaggaaacaggatgaagaccaaatayatatttcacaatatcaccctggggatgtgatgaagtgctgagtctggcttcaaggtaagctcagggaaagaactaatccacattaaatttcagaggcatggaactcacagcaagaatgcactgccttagaagagtgaatttctgtcactggagattaatagacaagctctgatccaggtaacttctggctgagaatgacgtgttgatgcgtactaaacatcaactaactggtcaaactaggcccttaagactcctgccagctctgttagtgatgactctaacatacattaatccacttttatatccaaatgagtgtattgagccccttctatattgcaaagagctagaaattatataagaaagtcttgaaagatttaatgagttcacatcccactcctaagaaattatctgggatcctggagaaatacaaagtgaaaagatctgttggcttatagtattctttgcttaacaaccaatttaatatgaaaagatataa

SEQ ID NO: 191991 - DNA, 558 bp, Homo sapiens
cagagagtctaaagattttaggagctgtatgtattccaggaaacaggatgaagaccaaatacatatttcacaatatcaccctggggatgtgatgaagtgctgagtctggcttcaaggtaagctcagggaaagaactaatccacattaaatttcagaggcatggaactcacagcaagaatgcactgccttagaagagtgaatttctgtcactggagattaatagacaagstctgatccaggtaacttctggctgagaatgacgtgttgatgcgtactaaacatcaactaactggtcaaactaggcccttaagactcctgccagctctgttagtgatgactctaacatacattaatccacttttatatccaaatgagtgtattgagccccttctatattgcaaagagctagaaattatataagaaagtcttgaaagatttaatgagttcacatcccactcctaagaaattatctgggatcctggagaaatacaaagtgaaaagatctgttggcttatagtattctttgcttaacaaccaatttaatatgaaaagatataa

SEQ ID NO: 191992 - DNA, 558 bp, Homo sapiens
cagagagtctaaagattttaggagctgtatgtattccaggaaacaggatgaagaccaaatacatatttcacaatatcaccctggggatgtgatgaagtgctgagtctggcttcaaggtaagctcagggaaagaactaatccacattaaatttcagaggcatggaactcacagcaagaatgcactgccttagaagagtgaatttctgtcactggagattaatagacaagctctgatccaggtaacttctggctgagaatgacgtgttgatgcgtactaaacatcaactaactggtcaaactaggcccttaagactcctgccagctctgttagtgatgactctaacatacattaatccacttttatatccaaatgagtgtattgagccccttctatattgcaaagagctagaaattatataagaaagtcttgaaagatttaatgagttcacatcccactcctaagaaattatytgggatcctggagaaatacaaagtgaaaagatctgttggcttatagtattctttgcttaacaaccaatttaatatgaaaagatataa

SEQ ID NO: 191993 - DNA, 485 bp, Homo sapiens
tctcctaacacaaggaagttagaaaattgacatggaggttcatttggctcaagacttactttagcaatattgtaaaattctttagcccatacaagcctaatcatctgtaacttcctactttgagggtaaaaaagaaagcactaatacagatggtgttcagactaacaacaacctcccactcacattttgagccactgcaagcagccatcagggacttaaccaagctttgagccacctcrccttacctcgatttctaaaatgttttcagttttaaaatcaaaaattgaaacaaaaaaagcagtaagtcaatgatcaattcctgattaagtgttttgtccatagtaggtgctcaataaataacaaatgagtaaatgaaaaagaatgtcctatacccagtatgaccctaagttaatttactttcttcatagaatggaaaatatttctttaggtgattcaatataattttttaaaataatttttaaaca

SEQ ID NO: 191994 - DNA, 485 bp, Homo sapiens
tctcctaacacaaggaagttagaaaattgacatggaggttcatttggctcaagacttactttagcaatattgtaaaattctttagcccatacaagcctaatcatctgtaacttcctactttgagggtaaaaaagaaagcactaatacagatggtgttcagactaacaacaacctcccactcacattttgagccactgcaagcagccatcagggacttaaccaagctttgagccacctcaccttacctcgatttctaaaatgttttcagttttaaaatcaaaaattgaaacaaaaaaagcagtaagtcaatgatcaattcctgattaagtgytttgtccatagtaggtgctcaataaataacaaatgagtaaatgaaaaagaatgtcctatacccagtatgaccctaagttaatttactttcttcatagaatggaaaatatttctttaggtgattcaatataattttttaaaataatttttaaaca

SEQ ID NO: 191995 - DNA, 621 bp, Homo sapiens
gagtctcatatttaacatcatctgataatctcagaaatactttcccttaggtttctgaaccatatttcatttttgccattggatattycagagaatacttttgccaacattttcagttattgatgcgaagtatttgtgagttggtgctgcctgaggtgaaccaatgcaaaactatttaaatgtataagaagctgctatggtttgggtctgtgtccccacccaaatctcacttcaaattgtaatttccaaagttgtgggaggaacctggtgggaggtgattgaatcatgaaggcagatttcccccttgctgttcttgtgatagtgagttctcatgagatctggttgtttaaaagtgtgtagcacttcccccttcgctctcttcctcctgctccaccatgtaagctgtgcctccttcctctcctccttctgccatgactctaagtttcctgaggcctccccagccatgcttcctgtacagcctacggaactgtgagccaattaaacctcttttatttataactacccagtttcaggtagttctttatagcgacatgagaactaactaatgcagaagctatgtattattctcattcatcccttgaccctgcattctcttctgtc

SEQ ID NO: 191996 - DNA, 621 bp, Homo sapiens
gagtctcatatttaacatcatctgataatctcagaaatactttcccttaggtttctgaaccatatttcatttttgccattggatatttcagagaatacttttgccaacattttcagttattgatgcgaagtatttgtgagttggtgctgcctgaggtgaaccaatgcaaaactatttaaatgtataagaagctgctatggtttgggtctgtgtccccacccaaatctcacttcaaattgtaatttccaaagttgtgggaggaacctggtgggaggtgattgaatcatgaaggcagatttcccccttgctgttcttgtgatagtgagttctcatgagatctggttgtttaaaagtgtgtagcacttcccccttcgctctcttcctcctgctccaccatgtaagctgtgcctccttcctctcctccttctgccatgactctaagtttcctgaggcctccccagccatgcttcctgtacagcctayggaactgtgagccaattaaacctcttttatttataactacccagtttcaggtagttctttatagcgacatgagaactaactaatgcagaagctatgtattattctcattcatcccttgaccctgcattctcttctgtc

SEQ ID NO: 191997 - DNA, 410 bp, Homo sapiens
aacacaatcaactagtgtgtgagtggccggttggacgtggaggctggcaagggtatgagggggaagggaggattccagagtgactttcaggttctgcttcccggaattaaacagaagatccagataagaaagagctacagtttggggtgaaaattaaatgttgttttgacatgttgaatgagggactggcctgtccagaagaragctggaaacacagaaggatttagaactcaagaagggcatcaagtgagtaggtggatctcaagcaacagccgaggatcagaacaccaaagacgacagcaaggatacacagaattagcaaagagggcctggcccaggaagcagagcccagaaaggactaagggggcgagccagagggggcatgagcacatcacagggaagagagaatt

SEQ ID NO: 191998 - DNA, 596 bp, Homo sapiens
attaaccatcacacatgtcatcattggggtcccatttagggtcctccaatggyactgctgtttttccaattgtataaagctcttccccttgcttggcactatatgaggtacaaagctcatccccaaatttctctgccacttgcagggctgtctgcttctcagcggtagtcaggattcgattccaaagtaacattacatccttccaggagagttcaaatacttgggttaaattctggaaagcctctatataactgtccgggtcatctgaaaacctgccaagatccccctaaatttgtcttaagtcctgtagagttcaggagacctgtatcttaatgggttatattcacaaggcattttctataggggcatgagcaaggcttggacctgcctaaaatgatttttaggatgggggcaaaataatataagaagttttttcttcaaagtctgaggggtcacaggagtcccagtgattcaggatacacttgaggggagtgcaggctgcaggtggtttgttacccacctgaaaagagagaggggagaaaaggcatgccttagtctctcccttgctaatcttgaatttgaagcatccctcaaat

SEQ ID NO: 191999 - DNA, 448 bp, Homo sapiens
tagaaaaataggcaatcagcataaatatgcaattcagaaaaaatgaagtaaagcaaataaataacaaatataaaaatgtttaacttaattatatatgaattggcaataattttttccataggctttttattttacagatataaaatagtatatatgttcattatttatattgacctaggtgttacttcttttagaatgtaagctccataagggagagaattttgtctattttgtttagtgatatattaaaagaactgaaactggtgcctgtcataaaattgacactcaataataaatattattcaaakgaaataactattgaaagaatggatttttttaagtgcatgtgtgtatgcacgtgtgtgtatacgccattaacaaagatatggtaaattgcacacagtactacatgactggcagcagtataattggtacagcttttctaaaa

SEQ ID NO: 192000 - DNA, 612 bp, Homo sapiens
tccaaatctctgactattacggttaggaaaattctgaatttttctaaaatatcttgatttcatgagctatctctcaattatagtaatacataaaaagtatttattagatatatttaaaatgctaaaagtaaaaaaaactttgatttaaaaagaaaatttaaaatatgcataaaagtataattcataatcatgattaaaaatggctgttccaaattcacaggtaatatcatacttattattttaactataggtacattcccattaaagtcagcaatgatataaaggtgatcatttttagctttactattttttattccccatagccaataaatttagacagttaagtgaaataaggaatataaaagttggaacataatatttgtaacagtgaatataatgcataataactacatataagtttaaargaattttgtagatctgatatgatgaaaatggcaagaatttcttgagagataaaaaagtatacttgagtaagtggaatgccatgacatattcttccatgagattgatcaatattgaaaagacataaattctctaaaagaatattgtaaataaaatgcactccaaataaaagtaccagcagcatgtttt

SEQ ID NO: 192001 - DNA, 482 bp, Homo sapiens
gctaagtttatctttcgttagactcttcaagcagtgcatctagtcattcactcaacaaatatatatggacgatatggttctaggagccaggggttcagtcaaaacatatcatggtcatttcccccttgctctcacatacaagaggggaagacaaacatgaagcctggtatgtagtatgtaactggaatattcagaatgtgcaaatatggcaagtgatgagaagaataagaaattarttggagaaatgggagacaaaatgttttaggactcatgaaaactgtagaatgagaagccagagaaggccagaagaggtctctgtctttgcaagcacatgttcaattgataattccagaaataaactcaatgaggccaatttattttatgaacctctttgatgcaagttggactaataaaaaaaatgcagacagtacttcacatttatcaatttctttaacaaaaactttcttgtgtcattaccttgt

SEQ ID NO: 192002 - DNA, 482 bp, Homo sapiens
gctaagtttatctttcgttagactcttcaagcagtgcatctagtcattcactcaacaaatatatatggacgatatggttctaggagccaggggttcagtcaaaacatatcatggtcatttcccccttgctctcacatacaagaggggaagacaaacatgaagcctggtatgtagtatgtaactggaatattcagaatgtgcaaatatggcaagtgatgagaagaataagaaattaattggagaaatgggagacaaaatrttttaggactcatgaaaactgtagaatgagaagccagagaaggccagaagaggtctctgtctttgcaagcacatgttcaattgataattccagaaataaactcaatgaggccaatttattttatgaacctctttgatgcaagttggactaataaaaaaaatgcagacagtacttcacatttatcaatttctttaacaaaaactttcttgtgtcattaccttgt

SEQ ID NO: 192003 - DNA, 482 bp, Homo sapiens
gctaagtttatctttcgttagactcttcaagcagtgcatctagtcattcactcaacaaatatatatggacgatatggttctaggagccaggggttcagtcaaaacatatcatggtcatttcccccttgctctcacatacaagaggggaagacaaacatgaagcctggtatgtagtatgtaactggaatattcagaatgtgcaaatatggcaagtgatgagaagaataagaaattaattggagaaatgggagacaaaatgttttaggactcatgaaaactgtagaatgagaagccagagaaggccagaagaggtctctgtctttgcaagcacatgttcaattgataattccagaaataaactcaatgmggccaatttattttatgaacctctttgatgcaagttggactaataaaaaaaatgcagacagtacttcacatttatcaatttctttaacaaaaactttcttgtgtcattaccttgt

SEQ ID NO: 192004 - DNA, 482 bp, Homo sapiens
gctaagtttatctttcgttagactcttcaagcagtgcatctagtcattcactcaacaaatatatatggacgatatggttctaggagccaggggttcagtcaaaacatatcatggtcatttcccccttgctctcacatacaagaggggaagacaaacatgaagcctggtatgtagtatgtaactggaatattcagaatgtgcaaatatggcaagtgatgagaagaataagaaattaattggagaaatgggagacaaaatgttttaggactcatgaaaactgtagaatgagaagccagagaaggccagaagaggtctctgtctttgcaagcacatgttcaattgataattccagaaataaactcaatgaggccaatttattttatgaacctctttgatgcaagttggactaataaaaaaaatgcagacagtacttcacatttatcaatttctttaamaaaaactttcttgtgtcattaccttgt

SEQ ID NO: 192005 - DNA, 333 bp, Homo sapiens
gtgcatggtgtgcacagtgaagtccctgcatggtgcaaagaaaatgagtttggggtgaaatcgctcactcagggatgttaagatttagggaggattggaagaactaccctttcacctgcaaatatgagccttttctaatctttatcctattaaatcaaagtgaatgtctgaccttttaaaaaccttcatagttgaacactttacgatccctttttctttggactttattaactgtttgrgcatacattttctgtactaacgtgcatattctactacaacctgagactccatctgtgatcagtctttgcgcagagaatatcaaaaagcagaagt

SEQ ID NO: 192006 - DNA, 502 bp, Homo sapiens
gagtccccttgattaagtatccccattgtggagaaaatgataataagagagatccaaaacctcttgacactgagggcattaacaacatatgccactgacactgctcctataagctgctatagctgctatagcctactgaagtgtccatagtcattgccaaaattgaatgcacctaaagaagtggcatggaatctatacaactatacctaccccaaaatagagccaccatactctttcctaatggcacactaaaacccaacttcaggtgaaagtggaagaggcagttgtttcatcatattcacagatgtcaacacagggaaacaaagaaacatgaaaaacaagaaaatatgacaccaccaaaagaactttatgactttcttgtatcaaatyccagtgaaaagaaaatcaatgaagtgccagaaaaaaattcaaaataataatcataaggaaactaagataaaagaaaatatagataaggaatttaatgaaatcaagaaatcaa

SEQ ID NO: 192007 - DNA, 505 bp, Homo sapiens
ctaactctctgctaaatttacgactgtgtgaactcagggactatgtcattttaatgcctgcaacatatacagcaccggttagagtataagtaaaaatacactcactgaacttcaaatggattcactaaaattacaatgaagtgtagggaaaatagatgaattccaaaacatgcctcagctggagcagaaatactagagtttcttctctttcttcaggcaagagccagtcttgagatgtgaaatgtgctttatcaactgataatgtttcttggagacatcccacaaagggctctgtttttattatgagactcattgaacatctkcaagaatatgcctgttcctgtgatgtggaggaaattttccgcaaggtagggctctggtggatgctattttcactctacttccctgaatgcttggctattgcaattggaagcatagaaagcagatccagacatgtttatcctccaataatacccttctttccaaaagagttttgaaattcttt

SEQ ID NO: 192008 - DNA, 372 bp, Homo sapiens
tcggagagttaagtcctggagagagggagaccacttaaaaacaacaacagcaacaaccacacaaatgtgatagttacctatgaaatattgcattaaagtagtcagtaccgcgaccagagaaaggggtaaaaatggaatcactttaaacaraccaaggatataattcacaataagagatggcaaagaggttaacaattcagaggctctcaggtctgattcggggaggaatgtttatgatctgggcaattaatttggaatcaagagaaagatttcagagtgcattttgcaacttctagacttgtctcacacaaataacttcctctacctttctttaccctccctttgattaccagaagctgaaagaaaggaatt

SEQ ID NO: 192009 - DNA, 372 bp, Homo sapiens
tcggagagttaagtcctggagagagggagaccacttaaaaacaacaacagcaacaaccacacaaatgtgatagttacctatgaaatattgcattaaagtagtcagtaccgcgaccagagaaaggggtaaaaatggaatcactttaaacagaccaaggatataattcacaataagagatggcaaagaggttaacaattcagaggctctcaggtctgattcggggaggaatgtttatgatctgggcaattaayttggaatcaagagaaagatttcagagtgcattttgcaacttctagacttgtctcacacaaataacttcctctacctttctttaccctccctttgattaccagaagctgaaagaaaggaatt

SEQ ID NO: 192010 - DNA, 372 bp, Homo sapiens
tcggagagttaagtcctggagagagggagaccacttaaaaacaacaacagcaacaaccacacaaatgtgatagttacctatgaaatattgcattaaagtagtcagtaccgcgaccagagaaaggggtaaaaatggaatcactttaaacagaccaaggatataattcacaataagagatggcaaagaggttaacaattcagaggctctcaggtctgattcggggaggaatgtttatgatctgggcaattaatttggaatcaagagaaagatttcagagtgcattttgcaacttcyagacttgtctcacacaaataacttcctctacctttctttaccctccctttgattaccagaagctgaaagaaaggaatt

SEQ ID NO: 192011 - DNA, 372 bp, Homo sapiens
tcggagagttaagtcctggagagagggagaccacttaaaaacaacaacagcaacaaccacacaaatgtgatagttacctatgaaatattgcattaaagtagtcagtaccgcgaccagagaaaggggtaaaaatggaatcactttaaacagaccaaggatataattcacaataagagatggcaaagaggttaacaattcagaggctctcaggtctgattcggggaggaatgtttatgatctgggcaattaatttggaatcaagagaaagatttcagagtgcattttgcaacttctagrcttgtctcacacaaataacttcctctacctttctttaccctccctttgattaccagaagctgaaagaaaggaatt

SEQ ID NO: 192012 - DNA, 525 bp, Homo sapiens
tgtttaccttctgttttcaattcttttaatgcaaaatacttattaatgccccaggtggcctatattaattaaggatatgatgtgtcttgggaaaagaacagttctctcctatatatgtatatatatatatatatatatatatatatatatatatatatatgaatgagattattatatataggagagattattatgtataattatgyattatatacaattatataatcatatatttaattaatataattatatataaaattatggcctcagcaggtgttagcagaaagaacaccatatatatatatatgatcatatatatataattatggttgtctgttagtcaccttaaataaaagaaggctgttttattctttctttttctttttaattcaaccaagaaagaaaattctataaatatagaaggaataaggaaggttgttcaggtcacataatggatggacaggctcaagagggaatgagtcttagaataatgtttggcattagtaacataaataaaaattgaac

SEQ ID NO: 192013 - DNA, 561 bp, Homo sapiens
ctccaatactctgaggtggtacaggattttttcctctggaatgtttttctctagaccactgaggagtatayaaagcaaagagagataccttttatatgctgtaagtaaagtaaataaagtacgtagggtcaaatagagatgcttgcaagactcttaccaaagactccaaaacactggattcaaactcccggttcatgacttactatgtgtgtgagcttgaataggtcagtttctcttcattgctcagttctctcatttgtagaaatgtagtaataataatgtcacaaattgtgttttttaacaggggttaaaatgtttaaactatctttgtaagtatgtataaaatttgagtgctataaaagtggcaaccacaatttgattatattaattataattaaaaccaggaaagcactgtgaatgaggccagacctaagttaatacatatcagtggtggaacgacaagtttaacactcattatcatcaaatatgctgggtgacagtgcatatataagcagatgctactctgcacacatctcagttagccttttgtacaatgctcat

SEQ ID NO: 192014 - DNA, 522 bp, Homo sapiens
aagctgcttatctccaacgtccagctgtagtcccatctactggctgagtctggggtttttatgggcataggatgtggccaggtggggccgtgggtggtttaggaaaaggcaacatttgagtgggaaaacagggatagaagttctccctttgggctgtggtttcaggctttttggcttgagagtggggttttgcctggaacccacacttttctgcctagaatttctctgccccctgtccctaacacatgtattatcttgtttggtcttcttgaccattgctcttctttgcctcagcacagcagaattaaatgtcttagaagccctcggccctgagaaagagaacagtgcctcaccttctattctttgctatatgcatttcatacttttttttwaaaaaagaaaataagccaaactcaaaggcataaaactttcataaatgctgaaattagtattttcattgaaaactaattttagatttatttgattgtcaaattatgagtagttttgccaaagttgtacttc

SEQ ID NO: 192015 - DNA, 553 bp, Homo sapiens
tctatttttgcatgtataaaagtaataactttagcaccatcttttcctaatacatttttaatgatagctctctgatatatcaaatatatctctattctgatcctttggcctattttcctatccctrtgttaatagcacatcatcctaattgccccatctttgtaataaggtttgatatctgacactttgggccttctctttcatctatattttagatgcagcttaaattagaaggggaaaaagtttagttatttgtagtggaattttattaaaattttagattagtgatgacaggaatcttattatagtcaatctactcttccatgaacatagtacatatcaccatttattctgtcttctcctatatcctttaataatgtgtcagaattttctacatgaaggccttgcatattttgttagattttccatattgtctaaccaaatgggtagggtttttttttttggttttgccattacagcttctaagttgttattattatagttaagccattgatttatgagagtttatattgaatctagcaaccatgatcca

SEQ ID NO: 192016 - DNA, 553 bp, Homo sapiens
tctatttttgcatgtataaaagtaataactttagcaccatcttttcctaatacatttttaatgatagctctctgatatatcaaatatatctctattctgatcctttggcctattttcctatccctatgytaatagcacatcatcctaattgccccatctttgtaataaggtttgatatctgacactttgggccttctctttcatctatattttagatgcagcttaaattagaaggggaaaaagtttagttatttgtagtggaattttattaaaattttagattagtgatgacaggaatcttattatagtcaatctactcttccatgaacatagtacatatcaccatttattctgtcttctcctatatcctttaataatgtgtcagaattttctacatgaaggccttgcatattttgttagattttccatattgtctaaccaaatgggtagggtttttttttttggttttgccattacagcttctaagttgttattattatagttaagccattgatttatgagagtttatattgaatctagcaaccatgatcca

SEQ ID NO: 192017 - DNA, 553 bp, Homo sapiens
tctatttttgcatgtataaaagtaataactttagcaccatcttttcctaatacatttttaatgatagctctctgatatatcaaatatatctctattctgatcctttggcctattttcctatccctatgttaatagcacatcatcctaattgccccatctttgtaataaggtttgatayctgacactttgggccttctctttcatctatattttagatgcagcttaaattagaaggggaaaaagtttagttatttgtagtggaattttattaaaattttagattagtgatgacaggaatcttattatagtcaatctactcttccatgaacatagtacatatcaccatttattctgtcttctcctatatcctttaataatgtgtcagaattttctacatgaaggccttgcatattttgttagattttccatattgtctaaccaaatgggtagggtttttttttttggttttgccattacagcttctaagttgttattattatagttaagccattgatttatgagagtttatattgaatctagcaaccatgatcca

SEQ ID NO: 192018 - DNA, 553 bp, Homo sapiens
tctatttttgcatgtataaaagtaataactttagcaccatcttttcctaatacatttttaatgatagctctctgatatatcaaatatatctctattctgatcctttggcctattttcctatccctatgttaatagcacatcatcctaattgccccatctttgtaataaggtttgatatctgacactttgggccttctctttcatctatattttagatgcagcttaaattagaaggggaaaaagtttagttatttgtagtggaattttattaaaattttagattagtgatgacaggaatcttattatagtcaatctactcttccatgaacatagtacatatcaccatttattctgtcttctcctatatcctttaataatgtgtcagaattttctacatgaaggccttgcatattttgttagattttccatattgtctaaccaaatgggtagggtttttttttttkgttttgccattacagcttctaagttgttattattatagttaagccattgatttatgagagtttatattgaatctagcaaccatgatcca

SEQ ID NO: 192019 - DNA, 589 bp, Homo sapiens
tcactattcctatttataaggccaartctggagggttaaagggaagaaggtaactgtggaatagagaggacagatatggcagtttaggaacaggcccccgtcaaagttaactcagggcatgaattttaaaagatacaagtggtcttaattgcaaaaagtgaggtacatcaatttgtcttcaacaaccaaatacctgcaacttggtttcaaggcagacagagatagggttagggaacctctgcttcctaactctgggaccttggacaagtcatttcattttctaagccctaaattccacatgtgtaaagtgggactaacagtccattctctgcaggcttgttgagaggataaaaggaaatagaatcatctcaggcatagagcaggagtgcagccagggatcaggatcaggtccaggtaatttcagagctcttctttcccacctacattctgcttcccactgaggatgaggcagttgactcaggcctccagggacaggtaggccttaaaatgcagagggaagatcgaaggtgttttagtcacagagaaggctgtaaactcaggaaaagctttattcatttttcagcagttt

SEQ ID NO: 192020 - DNA, 608 bp, Homo sapiens
ttgggaccaaataaccaagggttcaaatcctggctcttctcctgagtaattttgttgccttggacaagtcatttaacttttttaagctccatmgtcctcatgtgtaaatcaaggagatctcatacatattaaatatatatgttttatatactgtatgctctataatcaataactattatcatttataccaaaccccattatacccctcattcaagtctaaattccaactaaatctctcaaaggctatcttgctgaaatactcttttgggaggtactgctatttcttattcttttctaacccctgaagggtgttatttcaaccatgttctgccccttccccaagcccaacatagctgcctctccatcacaagatcttattttggatcctaaagagatgttgtgttcagaccccttctactccacttctttctaaatctagtatttaggtagaagaatctatctaatgtagtatttacacagctacccagaaaaattgaaaaaagtgaaggacttttccaaaattaactaacttcatagcaaatacatcatcaagtctctagcatgtaaaaataaaatattttccaaaatttatcacctggccatgcaaa

SEQ ID NO: 192021 - DNA, 585 bp, Homo sapiens
agaaattctcacatgaagaatgttagtaccgtgcccccacccctgccacatcatagcaagccaatggacatttaccaccccrctcccccgactaacagaaacctcattggaagaaaagtgaaggctttccattctctgttacaaccttaagaacctgagactgttctgcaagaggaacaagaagacataatgttttttcttccttaaataacagacaacaccaagctcagagaaggctaagctgtacaggtggagattgtctacgaccatttgaggttttagacactgagagattaaaagtcaacaccatgcttctttttctgtcagtcctgactattgggcttcagagttaactatttatttcttcaatgagaggcccttatggagaagccacatttgcagaaagaatttatgacatttctgtaccattgggttaaatcagagagatgttctctagttaactgaccgaagcctgccatctcatgtcattttcacttttagatttcctggaacctctttctttcattaaaaaaagaacaaattcctatagtttattgtttatatacattatggaaaaatcagaaa

SEQ ID NO: 192022 - DNA, 585 bp, Homo sapiens
agaaattctcacatgaagaatgttagtaccgtgcccccacccctgccacatcatagcaagccaatggacatttaccaccccgctcccccgactaacagaaacctcattggaagaaaagtgaaggctttccattctctgytacaaccttaagaacctgagactgttctgcaagaggaacaagaagacataatgttttttcttccttaaataacagacaacaccaagctcagagaaggctaagctgtacaggtggagattgtctacgaccatttgaggttttagacactgagagattaaaagtcaacaccatgcttctttttctgtcagtcctgactattgggcttcagagttaactatttatttcttcaatgagaggcccttatggagaagccacatttgcagaaagaatttatgacatttctgtaccattgggttaaatcagagagatgttctctagttaactgaccgaagcctgccatctcatgtcattttcacttttagatttcctggaacctctttctttcattaaaaaaagaacaaattcctatagtttattgtttatatacattatggaaaaatcagaaa

SEQ ID NO: 192023 - DNA, 563 bp, Homo sapiens
aaggggtggctagaaagagcaggatagaacattgttttgggcttatgtatttggaatataaatgtcttatctcccaaaacagcacacctgtagtgacatcagtaatagtaatgacagtggttacagtaggatgaggaaaaggaatagtgtgatccctggatttttaaataatattgacaggaagacaatatttgygtttaccagtacagtcaaggatatccacagaattgaagacattatctaaataattggagtaaacaaactaaacaaggaaacataaaaggcaaaaaagtgagagattattatctcctgtccctgtcctttccctcttctccaaaatccagtcagtctcaggtcttaatgggtctccctctaaaatctctcccacatctatccccatttctagatcatccttctatctgggctgttacaaaggcctcttaccttatctctgcccctctagcctttccccttctttaacacatcctttcagggtagacaatgacttcataatactcctatctgagtgtgtccctccttggcttactaagtcatgaaaaacc

SEQ ID NO: 192024 - DNA, 570 bp, Homo sapiens
agcttcccctgaaaatggccagttctgagaagggttacattccctaaattgctgagtacagcttcatctagtgggccaaacatgatgggcaggagagaacaggcagctgtgtgtcttctgtctgtcccacccaaatatccctggtgatgctaccaaagacagaaccccaggaattacttgtccaaaagtcagagtttcaaccagttacccagaatgataactatttacccagcttgtcaaggtagccagtagttcctggagcttctcacctgtctggaactaggactgcacagacatggcctcttcctggaatcctctgtagaactccactctctaacattttatccatgtggactcgtatctcataaagctcaaggggcattcaatacatccaggagtaaaatcggtttccagagaaaactcataagcaaaccccctgcccaccaatttttagaggcccatcgtggtccacatggatgcargcatctgacattctaatgtatgccaggagagaataaaacctttttcctgcacagtgtgaacttctgaggtggcatctccaacaaggta

SEQ ID NO: 192025 - DNA, 571 bp, Homo sapiens
gctgtaatgctctgactcaccactcacagcctgctgtgcggccccccattcctaacaggccatgtactggtactgatggccctcggcccgggcattggggatccctgtcttaacacatagcaagggaaaaagtaagaartttcccgttttgaaatctttgcacaatgaaaaccctaaatgctaatagagatagtaagatagtaatataataaagtgggtgtgttacgaggcttccccaaacttagactaatcactgtgaatgtacaagtttatttctttccgttaactagttacaattatatatctatgtttataaagacatttgtatattccccttcactgatcatatgatgttagctctgttccctttccttgtcagtttcctttcttgcctaataagccggcacctggactgccttgtgtgaaaggggcggcttctttgcttctgccgttggaggcaacaggagtggacccatcagcataccctgcgatagtcactgagtgtcggtccacacttggtgacacaggattataccgggcgtcacaaggggacagctgttagtctgggaag

SEQ ID NO: 192026 - DNA, 571 bp, Homo sapiens
gctgtaatgctctgactcaccactcacagcctgctgtgcggccccccattcctaacaggccatgtactggtactgatggccctcggcccgggcattggggatccctgtcttaacacatagcaagggaaaaagtaagaagtttcccgttttgaaatctttgcacaatgaaaaccctaaatgctaatagagatagtaagatagtaatataataaagtgggtgtgttacgaggcttccccaaacttagactaatcactgtgaatgtacaagtttatttctttccgttaactagttacaattatatatctatgtttataaagacatttgtatattccccttcactgatcatatgatgttagctctgttccctttccttgtcagtttcctttcttgcctaataagccggcacctggactgccttgtgtgaawggggcggcttctttgcttctgccgttggaggcaacaggagtggacccatcagcataccctgcgatagtcactgagtgtcggtccacacttggtgacacaggattataccgggcgtcacaaggggacagctgttagtctgggaag

SEQ ID NO: 192027 - DNA, 533 bp, Homo sapiens
tcctgattgctgaacatgtgtgggtagcaactcttcctaagtgaaacaattttttttcattttataaaatttagtaatatgaacccaagtgagtatagtgacaataaatcttaccagtagaggtcaatgatttttttctagcttgaagatctttcagtataaaacgatctttcagtatacactatatgagggcagtatttttcccacggactaaaagagaagtaatcaatgttatttaataatactttttcatttactgatctctttgaaatttactaggtattaggcattgatgctttgtctaaaatacaaagattaatgaacaatatctcatcaaaataggctcacagattaggggacatgtaaataaatgaawctttagactattattagtgttctgataaaaagaaaaatagaatgctatgggagcatataggagagtcatctacatgatgctgtgctgacaagtgtgaaataataaagatatgttccaagtggagttttatctctgtgcatatcctactgtctgatct

SEQ ID NO: 192028 - DNA, 533 bp, Homo sapiens
tcctgattgctgaacatgtgtgggtagcaactcttcctaagtgaaacaattttttttcattttataaaatttagtaatatgaacccaagtgagtatagtgacaataaatcttaccagtagaggtcaatgatttttttctagcttgaagatctttcagtataaaacgatctttcagtatacactatatgagggcagtatttttcccacggactaaaagagaagtaatcaatgttatttaataatactttttcatttactgatctctttgaaatttactaggtattaggcattgatgctttgtctaaaatacaaagattaatgaacaatatctcatcaaaataggctcacagattaggggacatgtaaataaatgaatctttagactattattagtgttctgataaraagaaaaatagaatgctatgggagcatataggagagtcatctacatgatgctgtgctgacaagtgtgaaataataaagatatgttccaagtggagttttatctctgtgcatatcctactgtctgatct

SEQ ID NO: 192029 - DNA, 468 bp, Homo sapiens
gtatacaccatgatcaaattggatatatcccaaagatgcaagattggttcaacacatgcaaatcaataaatgtgatatatcacataaatagaaggaaggagaaaaataaatcttctcaacagatgcagaaaaaacatttgctaaaatttaatatctttttattataaaaactcttaacaaagtaggtattgaaagaaacatacttcaaaacaatgaagatcatatatgattccatcaataaactcttataactgagaaaaaatcagtaacattgcagggtacaagatcaacattcaaaaatcagtaacatttctagaaaccactaacaagctagttaaaaaaaacaagaaagcaatttcatttataatagctacaaaaatatctagcaatgaatttaatcaaggaccaaaaaaatctctgataaaaactatgaaacactgaygaaagaaattgatgaagaccccaaaa

SEQ ID NO: 192030 - DNA, 507 bp, Homo sapiens
gaatttaatcaaggaccaaaaaaatctctgataaaaactatgaaacactgacgaaagaaattgatgaagaccccaaaatggaaaaacatcttgtgtttatggattgttaaaatgatcatgtcccccaagagacctgcagattcaatgtgatccctcttaaaataccaataacatgattcacagaaataaaaaaatattctaaaattcatatggaaaccacaaaagacttcaaatggctaaygggatcctgagcaaaagaacaaagctggaggcatcataccacctgactttaaaatattctaaaaagctatagtaaccaaaacaacatagcaccaacataataaaagatacatagaccaatggaacagaatagggaacacagaaataaatccacagatttacagccaacagactgataaatactccaagaacatgcactggggatgggacagtcttaataaatgttgctggaaaaacgggatatccacatgaagaagaatgaaacta

SEQ ID NO: 192031 - DNA, 572 bp, Homo sapiens
tgccacagaaataaaaaagatcataagagactactatgaacaattacattgccaacaaattggatagcctagaagaaatggataaagtcctagaaatatacaacctatcaagattgaatcatgaataaatagaaaatttgaatagacctatgattattaagattaaatcagtaatcaaaaacctcccaacaaagaaaagcccaacactagatggcttcacaggacaactccgccaaacttttaaagaaaaattgacaccaatccttctctaactctccaaaaaattgggaggaaggaatgctttgaaacttattttatgaggcaaggaatatgctgatacaaaagccacacaaagatactacaagaaaagaaaactacagagtagtaaccaatatccctaatgaatattttattagtcaaggttcttcagagaaacagaatcaatacaatggatggatacatacatgcatacatacacacacacacacacacacacacacacacacacasagagagagatttatgagatttattataagaattggttcatatgcttatgaggccaaaaagtg

SEQ ID NO: 192032 - DNA, 572 bp, Homo sapiens
tgccacagaaataaaaaagatcataagagactactatgaacaattacattgccaacaaattggatagcctagaagaaatggataaagtcctagaaatatacaacctatcaagattgaatcatgaataaatagaaaatttgaatagacctatgattattaagattaaatcagtaatcaaaaacctcccaacaaagaaaagcccaacactagatggcttcacaggacaactccgccaaacttttaaagaaaaattgacaccaatccttctctaactctccaaaaaattgggaggaaggaatgctttgaaacttattttatgaggcaaggaatatgctgatacaaaagccacacaaagatactacaagaaaagaaaactacagagtagtaaccaatatccctaatgaatattttattagtcaaggttcttcagagaaacagaatcaatacaatggatggatacatacatgcatacatacacacacacacacacacacacacacacacacacagasagagagatttatgagatttattataagaattggttcatatgcttatgaggccaaaaagtg

SEQ ID NO: 192033 - DNA, 560 bp, Homo sapiens
cctaatgatctttctgaaggattagcaaaaggtcgtccaaccataccctcacttgctttgagtttgggggggttttgttggtttgtttccagagcacgttttcctgacagttaatcttttaattttagtgtcttgcaatctggataggctgagattttccaaagtgatccaaccctagtcctttttgtttaatgatttttcaaacattttatttgtttccactcacaatttactgtaagaagcaggaagaaatcagaacccagttttgatatttgcttggatgagatagcctcagctaaatatccacattaattacttacaaattctacttcccatatacctgcagaatacaattttgctagattttcagccactatatatcagggatttatttttttccagtttccaataacatgttccttatttccttctkagttttccctagcagttattaacatccatatttttactaacagccttttcaaggaaatcaatttttctataatgctccttaaaattcttccatctttcatatattgcccaattccaaggccacttct

SEQ ID NO: 192034 - DNA, 560 bp, Homo sapiens
cctaatgatctttctgaaggattagcaaaaggtcgtccaaccataccctcacttgctttgagtttgggggggttttgttggtttgtttccagagcacgttttcctgacagttaatcttttaattttagtgtcttgcaatctggataggctgagattttccaaagtgatccaaccctagtcctttttgtttaatgatttttcaaacattttatttgtttccactcacaatttactgtaagaagcaggaagaaatcagaacccagttttgatatttgcttggatgagatagcctcagctaaatatccacattaattacttacaaattctacttcccatatacctgcagaatacaattttgctagattttcagccactatatatcagggatttatttttttccagtttccaataacatgttccttatttccttcttagttttccctagcrgttattaacatccatatttttactaacagccttttcaaggaaatcaatttttctataatgctccttaaaattcttccatctttcatatattgcccaattccaaggccacttct

SEQ ID NO: 192035 - DNA, 588 bp, Homo sapiens
tttttgttaaaataaaaaaaaatgccattctccatttttctttgatcagtgcttaattgacataaagttgacagattaattttccctaaacatttaacaccacttatgaacctcattaattcaatttctttagacattttaaatttcacttacaaattttaacacctaaatccctcaagcatttcaaaaacacctaacaagaatgatttacaaatctaatctaagttcctttcttataacaatggaacttttcctgcaaaacccttacattgcttttctttgcctgaaaagaattgagattcagtatcccctaactcacctcaaagaatctgcttattatccagttgtcttcyaaaccctctttatgttttactttcctgtttgccaaacccatcattatttcaggtcaagtgattgatacttcgttgtttctctcactgaactctttttcatgaaggaatgtccacaaaatcagctctttcagtgtccaattagtcattatgtcttgtatgtcacattctttatcccattcattcagacataattatttccgtgaatttttcaacttcattaactttataatcacca

SEQ ID NO: 192036 - DNA, 647 bp, Homo sapiens
ttaatttataaacattaactcatatactcttaactaattaagagtataaagttggagtatatgagttaatgcaaattatttmttggaaatcctctgtagccatatgagagtaggaaaggaacattgttggattatatgtcttgttgtggggaagcacaaggtatttttgtaaaatgtgtgatggaattctactcttaactaattaagagtatatgagttaatgtacttaagaaattttccatgccctgacaaaggggttatcttttatcttatgagtcttaagaagtatgtaaaataatgtaattaatcagcaagtatttaattcttagatcactaatgaagatgaaaaaaatcacttgaattgagtcatcaacttaaaatttaactaatatatcattttctgcctaatattaattgtcataaaacgaggttaagaaatcacaatgcaaagagtgtccatgtgacagaccattatttttctatcaaaggtgaagtttaacatgcaacagacataagacatcacatttagccatcaattttcttctttggatagaaaaagctcacaaaaatgggaaagactgatccagaagttagttatgtaacagttctgatatctttctgccacggtgtgaattgtttatgtctac

SEQ ID NO: 192037 - DNA, 647 bp, Homo sapiens
ttaatttataaacattaactcatatactcttaactaattaagagtataaagttggagtatatgagttaatgcaaattatttcttggaaatcctcygtagccatatgagagtaggaaaggaacattgttggattatatgtcttgttgtggggaagcacaaggtatttttgtaaaatgtgtgatggaattctactcttaactaattaagagtatatgagttaatgtacttaagaaattttccatgccctgacaaaggggttatcttttatcttatgagtcttaagaagtatgtaaaataatgtaattaatcagcaagtatttaattcttagatcactaatgaagatgaaaaaaatcacttgaattgagtcatcaacttaaaatttaactaatatatcattttctgcctaatattaattgtcataaaacgaggttaagaaatcacaatgcaaagagtgtccatgtgacagaccattatttttctatcaaaggtgaagtttaacatgcaacagacataagacatcacatttagccatcaattttcttctttggatagaaaaagctcacaaaaatgggaaagactgatccagaagttagttatgtaacagttctgatatctttctgccacggtgtgaattgtttatgtctac

SEQ ID NO: 192038 - DNA, 569 bp, Homo sapiens
cattttcaaaataaaagtaaaaagcaaggactctgaagccakaatatgtagatgtgaatttcatctctgcatttacctgttgggctatcttaaccaagataacttagtctccttatacctcagtttcctttactgtaaaatggggataaaataataccaatcacatgaggattaagagagttaatatgctgagaaaactgctgagaaaagccactagcaaataagaatggctacacaaatgttggtcattttaaatacctcaaggagtttttgaaaggatataatagtgtatacagcactgttagcgtgatgcctggctcatgattaaggcttagtgaatggtattattactactatcactattgtaaagtcaaaatagtaaattgggtattagtcctaaaggattaaagggggttaaccagtttgcaaaattcaaaaactgaaagagtatctactcagacaggggtgatgaaaagagcacagacttgaagtcacagatgtaggtttgccttttactaggtggataacactgagcaagctatttgatttctctcttaatagcatgaagt

SEQ ID NO: 192039 - DNA, 569 bp, Homo sapiens
cattttcaaaataaaagtaaaaagcaaggactctgaagccagaatatgtagatgtgaatttcatctctgcatttacctgttgggctatcttaaccaagataacktagtctccttatacctcagtttcctttactgtaaaatggggataaaataataccaatcacatgaggattaagagagttaatatgctgagaaaactgctgagaaaagccactagcaaataagaatggctacacaaatgttggtcattttaaatacctcaaggagtttttgaaaggatataatagtgtatacagcactgttagcgtgatgcctggctcatgattaaggcttagtgaatggtattattactactatcactattgtaaagtcaaaatagtaaattgggtattagtcctaaaggattaaagggggttaaccagtttgcaaaattcaaaaactgaaagagtatctactcagacaggggtgatgaaaagagcacagacttgaagtcacagatgtaggtttgccttttactaggtggataacactgagcaagctatttgatttctctcttaatagcatgaagt

SEQ ID NO: 192040 - DNA, 647 bp, Homo sapiens
ttaatttataaacattaactcatatactcttaactaattaagagtataaagttggagtatatgagttaatgcaaattatttcttggaaatcctctgtagccatatgagagtaggaaaggaacattgttggattatatgtcttgttgtggggaagcacaaggtatttttgtaaaatgtgtgatggaattctactcttaactaattaagagtatatgagttaatgtacttaagaaattttccaygccctgacaaaggggttatcttttatcttatgagtcttaagaagtatgtaaaataatgtaattaatcagcaagtatttaattcttagatcactaatgaagatgaaaaaaatcacttgaattgagtcatcaacttaaaatttaactaatatatcattttctgcctaatattaattgtcataaaacgaggttaagaaatcacaatgcaaagagtgtccatgtgacagaccattatttttctatcaaaggtgaagtttaacatgcaacagacataagacatcacatttagccatcaattttcttctttggatagaaaaagctcacaaaaatgggaaagactgatccagaagttagttatgtaacagttctgatatctttctgccacggtgtgaattgtttatgtctac

SEQ ID NO: 192041 - DNA, 397 bp, Homo sapiens
gagcttgatccatgaggatccctggattrtcaggaagaggaaaagattaatattatggtaaaagttcctcaggtcttcatgttctgtctttagcaggccaaagagtagttaaacaggtgagaactaaattgtatccccacttaagccttcaagagcacaagggaacagaggagcagagagctgcctccagatgctttggaaggctgacaagttgatgctaatgtacactgcatacaagagaagatgccattgcaccatccattattgactgggcaagtggagcaaaagcccattgaatatatgaagaaatgtatatcatgtctaagtggggggaagataacaatgagagagagacagagaacacacaactaggaaagatgctctaatgaatagatct

SEQ ID NO: 192042 - DNA, 570 bp, Homo sapiens
tgtagaaaacatttgaggcccacagaaatgtcaaaaggcatagaatctggaggttgccacgttggaggagagaagatagttattgtcatcttggaggacaatacacagcaaatggctcattgttttattccttgtggggcttcacttttgggacaaataaagatttagtgaaagtaagtctgagttttaaaagttcttcatgtttaggcaattaggcacatcaggataactcagcatcttcttcttgactaatataagaagctttcctagagatagttgtggcaggaactgctctactgatagtgcaatactytttcagaaatagtataactgtttctgattattgtccagaagcacaggaaaatattcttaggatagatttggcttgtacattaaattatcaactgtgaaaaacaaatcaagaaaacaaggatgcttcaataaagaagaagtccaataactgacattcggtagatttatttgaccagaaggttaaaaatgtcactaacccttgcccaagaccattaattttccatgtattaacaaattttgtaaaatatcattatcaga

SEQ ID NO: 192043 - DNA, 648 bp, Homo sapiens
ttagtaagcagtctaccaccatataagtcaggctgcatcaaacatgacagatttcaaacgactcactctgattacagatgagttaatttaagtttaataaacccaagtccaagtaacagagaataggaaaggcatagaggtaggagaaatttggaactaatctttgttgtgcacttaccatggtacttgaatccatgcaagatgcttctatataatttatataaattatgacttcataataccctcacaacaaaaatatagccttatgtagatgagggaactcagaatggtctagtkatttgtttattgtcacataatcagttaaaatagcacaactgaaattcaatacaggttctgttggcttcaaacccatattctttccctactcacaaaaatccacttaaagtcaatttcctttggcttttgctattcctagaaggacccagactactccttcagttttgagaattactgtctaaggaagcaatgattcttccctttataaaccatctgggcagctactattttctgatacttacaatgaccacttctttttgtgatttatttaggatgttttccaaattgcatattagtagccactcacaggggtaaatgaaggctcatcaagtagtgaaaaggcagctgttc

SEQ ID NO: 192044 - DNA, 560 bp, Homo sapiens
ttctattcagcattgtatgtcatagacctggctaaaaaagcaagagaaaataattcatgaggatcagaaaaaaaagataacactgtctccatttggaaatgatgaatctatttactttgaaaatctacaggaatctaaaaatcaactattaaagtaagcgaattttaccaagttgcaggatacaacgttaataaaaatcaattgtagttttatataatagcaaataattggtaaatgaatttttaaaaagtcatatctaagaacactaaaatcataaagtacttgggaattaatttttcaaagatatacaaaccatctgctctgaaaattatggaacatggttgagagaaatttaaagaagacytaaataaatggaaggcatatatttaaagattcagtataattaaaatgttaattattcccaaatttatctatagattccacatagtcccagtcaaaattcaagtggggttgtctttagaagctggcaagctggttccaaaatttacatggaaaggtaaacatattttaagaaagaacatagtttaagatgcacaatt

SEQ ID NO: 192045 - DNA, 549 bp, Homo sapiens
catgcttaacaacaatgggagggggcaaaatttaccatttccagccatcactttttaactttctaacacctaacaaatattaacctttcataagtggaagtctgtaagcaattcrtctgagtaaaaggggcacgtaaattaataaacttataataggttactgtctaatatgaagtcaataatgccaactttaaaaaaaaatcttgacaaagaatctctggtttttttaaggaggctatgtaactttaaagtaaattttattaagaaaaaaagcccagattattttgtaatttcttaagaacagaacaggtccaatgacacatcaattgaggcaaaatatctgatatggcttagatttgtgtccctgcccaaatctcaagttgaattgtaattcccaatgttggaggagaggcttggtgggtggtgattaaatcatggaggcagactttccccttgcttatgataatgagtgagttctcatgagatctggttgttaaaaagtgtgtagacctccccactctctctcttcctcctgctccagccacataa

SEQ ID NO: 192046 - DNA, 434 bp, Homo sapiens
taatgatcaaatttggggaactagtatatccatcaccttcatcaacagataaatgaattttaaaaagatagtatgtatacacaatggaatattatttacagtaaaaaaagaataaaattctgttatttgcaacaacatggatagagctggaggacattatgttaagtgaaataagccaggcacagaaagacaaatatcacatgttctcactcacatgtgagaagtagtgaatagaacagtagttactagaggctaggaaggctagtggtgatggggaataaagaggagttggttgatgagtatgraaatatagttagatagaaggaataagatctactgtttggtagcacattatacatcattaaaaaattatgtacagaaaaaaagagaccatagtacacaataaaatgttaatggccctctgagtattggga

SEQ ID NO: 192047 - DNA, 462 bp, Homo sapiens
ttatgttatataagttacatatatacaactatgtttgacatattacattaacttataccacagacaatatatgtaacattttttctgattctccactttaaacaaccttttgttttcttgatgaacaaaaaactacttgccaactgtgctatataagacaccttctactatagtgttattgactgacagaaaagatttcggttccaataacttcttgctaacaaaggaaatctaacctttttaatatgctgaagactaaattgcaaacatttacggttctttctcagaggaaaaaagtatgtttttttctaatgtgacatactgtaaagaaaaggattgggttaaagaagcatayataaattaaaatgctatatttggttctaattgccaacagattattcatgacaaaagtatcattttttgaatgatagtgaaagtgtatttttttcttttattaaaact

SEQ ID NO: 192048 - DNA, 652 bp, Homo sapiens
ccctgtttctactcttcttcatccctataatttattcccagaaacaaccaaaatgatccttttaaaataaacatgagtcagatcataccacttctttgctcaaaatgttccaatggctccccatctcccacagagtaaaagccaaatcctcacaatgacctacacattcctatttaacccggcccctgtcatttttctgacttcatttcctattatttccccccttcactcatttgtctccagccactctgatctcatccctccctgtaccttgaacataccaagcacacttctacctcagagtctgcactggtccctccctctgcctggaatgctcttcccccagatatctgcatggttccctttctcttttacctcaagtttttaggcaaaaattttattctcaatgataccctccctgactatcctatttaaagttgcacatatacctccaccctgggtgctccctatcccccttttttgttttattttctccatagcatttatcttctaccttgctttataataacttactttttctttttttwaaaaaaaaataaattgcctgtttccctctactagaacgtaagctccttgagggcagagatttctgttttgatcattgatgtatctccaatccccagctggtgcc

SEQ ID NO: 192049 - DNA, 543 bp, Homo sapiens
agcccagttgagtgacagctataataactgactccaaaatatacagttaacgactggtcacaagaagctagaacactgatttttcacaggagaggaattgcagaataatttaaataaaagcaaagtaataagagaataaaatcatcattaaccacccttgagatgttgatggagagagccagtagagattagtcaatttgatatcaccagctggacacgtggatggaacaactggaactgaaagatccttagaaaaaaagtaaaattaaggttctgatataaaaatgtkatttcatttatatgaatccctgcccatcactaggaagatttcattttttgtccttatgccataaaagttcacattagttagtgcgaactatgttcagaacttgccatgctcatacatatgatataaccatttttttcgcaaaggtaatttcatggtatgtagatatatttaggaagaaaaaatagtgagaaggaaaattggcattgtacagaatgttattcctaatagtgtgttagtatatgaatacatatact

SEQ ID NO: 192050 - DNA, 372 bp, Homo sapiens
aaactatgatataacctcaccctcatatatattataccaaaatattaacaggaactatctctgaaaatgaaatataggttattttaattatcttctttaacctttctattttttctaaacaagaaactttaggaatcagaatatatagttaaaatgtaaaaataatgttggcacttaaggaggaagtctttagaaacctaagaaatacataaatgtgcaataatagattaactcattctatactgagttccctkttcaaatcacctccatgacatcctagaagaataaaggtattaaaataatataacataagagaaaaatttgattagttgttgcacaataaactcacgtgaaaaagaaaaaatgctaaaa

SEQ ID NO: 192051 - DNA, 526 bp, Homo sapiens
ataatctactcttcccagtcttaaatataggccagaacattagaactaacaaaagctgagtatataggactaaatagtgctctggcattttgaatgcatgtatactgtgtattttcacaaatacacacacacaaacacatgcacacatataatgtagatttccgacactgaatttttagtttttgaaaaagatttttttctgtgctcatttaagcattaaatgacaaaatgctaatttgaattgtttttattcccactcaagatgtaaactgaaagaaaatgtgcatttgtttgtgtggaattgcaatgtaaggcaagtttaatatgtttcctaacttctcctaagtacaacaatagtatattgaaatggcttctgattacatagagtttcaataatattcagtaatgtatggtccacatyatgcttgaaaggttcatttttgtaatatgaagtaatttatgcaaaatctcaatcttatagaattgaatattgacatcaaaatttcttctataacaggaggagcag

SEQ ID NO: 192052 - DNA, 531 bp, Homo sapiens
cctcactgaatctttacgtgaatattttactttaaattatattttaatacctaagaacccagaacttcctcttgtgaaaaaaacaagagagtttgtcactgaagattcttcagtttatattccttgaggtttggacttagttcrttttagtaatcatttctccatgcccatttccttgttcttaatcacaaatctaatcatgtatttttataaatattcaaaattaaatatatttatctacttatgtaaatactttttagttactgtctaccaatagcatgtatagggatctcattaacaaacagatttagaactttttagatttgttccagcagcttgtaaattcatcttagacttaattgtttaaatatatcaacattctaatcattttaaaaagtggacagaaaagattaattccaagttttcttttacttaccaagctctgccattccaccccgctgccttaacaatattatcagctctttggatactcattcttgctaagtaaaagcatatttcttctctagctgg

SEQ ID NO: 192053 - DNA, 594 bp, Homo sapiens
gaaacccagttggtttgaacatctagcagctgaacagaacacaacatgactaaaatatacatatatgcacatcgattcatgtggcagagcatcaacttatgccccaattactggtctagaaagaacacctaaataagaagtgtttggagaaattatctggaagacaggccataagagggaaagaaattagcaggatttttctcaataagcttcctttcaagtagtagatattttgccacagtgttctgaaggaaacagaatcatggtttgacctgaaagagaaagaaaagaaaatcccttttctctggcctcaattctttatctgtaaaatgaggtatgtttctaacactgaaattttattagcctatgactctaaggcaatcctaataggagaaatactaaaattggctkgtgaaccagagaagttgccagttctgtgtctactacctcttttatttagcctacaaatatttactgactacctgcactgtgtcaagtaccatactgactgccagacagacatacagaggcatataaataagacagcaacttcccatagtccacagtctagcaagaaatataaatggaaaataa

SEQ ID NO: 192054 - DNA, 535 bp, Homo sapiens
ataagtgaattgggaattggatgctctgtggaactttataaacatgcattttataatgaataagacaaggctacatgcagaatcgtggccactagggccttttgatgatgcagtcttttttaacatggtttgacagctttcaaataacattcttctataggttttaaactttgtgctttgctgtaaaacacaagactacataactcacgtaccaggagtacrattattttttagctctccaaggtaatgacccctgtagcagcagctgttcagaaaaaaattacaagctcaattgttattttaatcagagatagttagcagttaaaagcagttatgcaacttgtaaaattatatgacacctcatcagtagcttctcttgaacactccttcttccaaaataaagccatcccaaaaaagtcataactttccagaagacttattagcaaagcagggtgctcagtcattcataaaatattcaagccatatttattattgtggtttctgtactaggaaaggtaatgtttaagtttatgat

SEQ ID NO: 192055 - DNA, 571 bp, Homo sapiens
ctctcaattgtatttattaataacaatgaaaaaaattaatcagcacaactggggtcactgctaaaagaccaaaccaagcccctgtgcctggcacctgccaggctaagtgctcctttggttgagcccaactcctcccacagtgacacacttctcctccaggaaaaaaactcagcagggcaggcaacaatcactctgtccattactgaaagtcaacttagcagcccaaggaccagattaagggtcagttgcagagaaagagggagagaagtgcactctctttgagtaggagaaacagaaacctaaaaatcaagaccctggaatctgtatttctagagagaactatcaccataagatggttgcaatattccaataggatgagaaaaggactaggcaggcctttttcatggcattcagcctcagactaagatataacacttctagggccaaatatttgaggtgctctgaaacagctcaacctgtgaaaatwttatcagataaatttgtaattgagaatattctaaatgaaataaaaccctgctggtgtaccggaatgggaacaaattggttccaa

SEQ ID NO: 192056 - DNA, 563 bp, Homo sapiens
ctgcttgtcacatgtaccatggtcagctggaaaaatacaccttcacatttagacccacatgattcacaatcaaactttaayagaaagaaaagcatgttcagaaaaagacttttgccaagctccctgtagactgaaatgccaatttttcctactggtgagcatcatgcttccagcattattctttagcaaggaaaatataaaacaacagataggcacagaattttccaagaagtctctagtctctctggaactataaaaattatttattctgaattgtaggcagtcttccaagtatgacattttagaggattccactaccttctaaaataccagatttggaaaactgaatactacctgacaattcttggaaacaaataatggctaatttgtaccagctaaaaagtaaagtctgaaaatctgccccaaattatttaaattaaggagtcttcatttcaacaggttgccagctaatctcagaatttggactttaagcatccacgacactaaatcattctcagcagcatttttcaagaactttatattcttctcttcttaacatttcc

SEQ ID NO: 192057 - DNA, 477 bp, Homo sapiens
aaagtaagcaaatttttttccctgttttgatcttcatattatttagtctgccattgttttcaaagaactaagtctcctccacaggaccttaattttattgcttgtttgaataaaatcattaggaagataaattttgtactctactagtagtgtataatctattaataacagtatgtatcaagtgattaactgtgccagttctgtctatctctctctctttctgtttctctctctatatatactgaagtgaatacaacagagagagagagagacaaagaaagaaagaaagaaagagagagagagaaatmgaaggagagagagaaataattttctcacttaatcctcataattaccctgtaaggtaaaaactattactgtacccatttttataattggggctcagagtggtagcacaaacttttctgatagcacagtaaatgatagagccagaattcatattcaagattggtttattca

SEQ ID NO: 192058 - DNA, 553 bp, Homo sapiens
gaacattttaacacatcaagtgctgagaagagtgcctggcacatagtaagctttcactgaatgttagttgcccctgtttttgtggtagaatgctatgggtcctgaattgcaagaatgattttaggagacttgctcaagagaaggtgatagagaaactaaactacttagtatttaaacttagcttatgaacctagttacttataagacctttaatcttaattcacataaacagatgttctttgagaacttgcaatatataaggttctcttttaggtactacaaggtatataaaacatctctgctgtcatggagctcacaatctagtggggttgggtatggggatatgggaaaatatatactgactgtaatactggatagaataagattaattttaaaatagttcaggagagagaatttctaaggcccttaccttttttttwaaaaaaaaaaatagagacagggttttgctctgccccccaggccggagtgcagtggcacaatcatggctcccttcagccttgagctcttggggtcagtccacctcccagccacc

SEQ ID NO: 192059 - DNA, 521 bp, Homo sapiens
ctaatggcctgtagatggcaggctctccccttttcatagcaagcccattcagttccacagttggagttatactgcctgtttaaaaaaaaaacattaaaggcacacaagtgaaatatcttcacaattaaacatgcaagctatatttatacaacgcttaaataccatggaagaaggtaakaatggatggaccacctgtatgattttttaaggaactgcgaaaacaaagtaaaaaaccaagaaaatagttcctaataaaatcttgggattttgcaatgttttctgtacattaatgacaaaaaatatgagtgtgcaatcattactatcaaaacatagtaaacagatgattcttagattgctaaccgtgaatattattttttaaagtactgcattttatcattacttaccccagaaagcttgcatgtatttaatcattaaaaacatgatctgtgaatatttttatttatactttggtaattaaataactaagcattggcaagaaagtcatcagtggttcttggact

SEQ ID NO: 192060 - DNA, 480 bp, Homo sapiens
agcccattcagttccacagttggagttatactgcctgtttaaaaaaaaaacattaaaggcacacaagtgaaatatcttcacaattaaacatgcaagctatatttatacaacgcttaaataccatggaagaaggtaagaatggatggaccacctgtatgattttttaaggaactgcgaaaacaaagtaaaaaaccaagaaaatagttcctaataaaatcttgggattttgcaatgttttctgtacattaatgacaaaaaatatgagtgtgcaatcattactatcaaaacatagtaaacagatgattcttagattgctaaccgtgaatattattttttaaagtactgcatttyatcattacttaccccagaaagcttgcatgtatttaatcattaaaaacatgatctgtgaatatttttatttatactttggtaattaaataactaagcattggcaagaaagtcatcagtggttcttggact

SEQ ID NO: 192061 - DNA, 616 bp, Homo sapiens
ttatagggagacggctggggaagacgtgatgctcatgaagaatggcccaacctgtaactgcaatgtactgctgatataagtcgtactttaattatgaattacattttgcccatctgagaaattaaaagctgcacagaaatctatataatccccaataattaaactgctttataaaacggcactgttactaaatatgtataaattttttatatcagcacccatcctacagttgataggcaattctcacttaaatgtcttatttgacaacatgaaaagcaaaaaaaatttactatctctactcttagactacaaactgctacaaaactatcaattcaatgcttattactctaaaaaagatatacggtcctttaaagagctttttaaaatgtttttcattttgatttttcaaagtgggtacccaaaaacactgcttttatgtaaggaaaacagaagtcttacgccacaaactattctagtggaaaactytaaataacacaggccagaaaaaaaaaaaaggaaactaacatttttcagacaccaattgtatacgctaggtgccacattttgccatttttacatcaactcatttaatcctcatcatcttgggatgtaggca

SEQ ID NO: 192062 - DNA, 618 bp, Homo sapiens
gagactcaaattaaatgtaatgtaattcaagtagattttgtctttgacaatgccaaaaatcagaaaatgtagttacacacattttttataagttcagtatggaattttattttcaagattaagatgtttgtgtgattatttggaaaggtacttactcatttacatttattaaccacttttaaagttacgagtaaataccaaactataaaatggcattattcctagattcatggtattttcaaattaatttaaccaaattagcttttgtttaaataaaataaatataagcaataacccaacaaataaaaatgaatgaatatagagaagtaaaaagaatattagtgaaaatgagaacctatataagcactcagagttggcaatactgcttggaatgagagcgagtgagtaagyagttggcccaaaccatagtatggattcaaacagtgttctgaaagggaaatcattaattttctatttctattccaattacaagaagcaccaatacatgatggacaaaggatacaacatttcaactagagagtgaaataagtttgatttactgtacaacatggtgaagatagtaataatatgctgtattcttgaaaatgaaaaagagta

SEQ ID NO: 192063 - DNA, 530 bp, Homo sapiens
aagggtaacttccgtgggaaacctgagaagctagatgcagccaggcaaaccatatggaccctggcagtgatacgatgaaaatgacactttacctttgtgatcttcctcccaaaaacctacaaccctagtttcatcaggagaaaaagcaccaaattytaatagaggattgtcctgcactatgtctcaacagtgctcctcaaaattagtcaaggacgtgaaaaaaaaaaaaaacaaagtgtcaaagccaggaaggccctaaggagacatggcaactaaatgtcatgtgggatcgtggatggaatcctgaaaaagtaaaaaggacattaggtaaaaaataataagaaaattttaataaaccatggatttaattcataattatatattaatatttgttcattagttgttccaaatgccccgtattaatgtaagatgttaagattaataattggagaaactgggggaggggggaaggcacatcagaaatttccttactatcgtcttaattttttggtacagcaaaactgctgtaa

SEQ ID NO: 192064 - DNA, 530 bp, Homo sapiens
aagggtaacttccgtgggaaacctgagaagctagatgcagccaggcaaaccatatggaccctggcagtgatacgatgaaaatgacactttacctttgtgatcttcctcccaaaaacctacaaccctagtttcatcaggagaaaaagcaccaaattctaatagaggattgtcctgcactatgtctcaacagtgytcctcaaaattagtcaaggacgtgaaaaaaaaaaaaaacaaagtgtcaaagccaggaaggccctaaggagacatggcaactaaatgtcatgtgggatcgtggatggaatcctgaaaaagtaaaaaggacattaggtaaaaaataataagaaaattttaataaaccatggatttaattcataattatatattaatatttgttcattagttgttccaaatgccccgtattaatgtaagatgttaagattaataattggagaaactgggggaggggggaaggcacatcagaaatttccttactatcgtcttaattttttggtacagcaaaactgctgtaa

SEQ ID NO: 192065 - DNA, 443 bp, Homo sapiens
ctcttcatcatgtatctgattattctgatataatgtgtgacactttgaagtttttaagttcatctgtaactgtacagttttaccaataatttttgtatttgtgtttgtccataacattgttaagacggttttacttaaaatgtatttttggtaaaggacatgaatagacaattttaaagggaagacatacacatggccaacaagtatatcaaaaaatgctaaacatcaatactatctagagaaatgcaaattaaaaccacaatgagatgtgatcttatacatgtcagaatggctattactaaaaagtcaaaaaataacagacgttagcgaggatgtggacaagaaggaacacttaaacactgttggtgggaatgtaaattagtacaacctcttggaaaagcaatatkgggccttctcaaaaaactaaaactagaactgccatt

SEQ ID NO: 192066 - DNA, 443 bp, Homo sapiens
ctcttcatcatgtatctgattattctgatataatgtgtgacactttgaagtttttaagttcatctgtaactgtacagttttaccaataatttttgtatttgtgtttgtccataacattgttaagacggttttacttaaaatgtatttttggtaaaggacatgaatagacaattttaaagggaagacatacacatggccaacaagtatatcaaaaaatgctaaacatcaatactatctagagaaatgcaaattaaaaccacaatgagatgtgatcttatacatgtcagaatggctattactaaaaagtcaaaaaataacagacgttagcgaggatgtggacaagaaggaacacttaaacactgttggtgggaatgtaaattagtacaacctcttggaaaagcaatattgrgccttctcaaaaaactaaaactagaactgccatt

SEQ ID NO: 192067 - DNA, 529 bp, Homo sapiens
tcaaaaaatgctaaacatcaatactatctagagaaatgcaaattaaaaccacaatgagatgtgatcttatacatgtcagaatggctattactaaaaagtcaaaaaataacagacgttagcgaggatgtggacaagaaggaacacttaaacactgttggtgggaatgtaaattagtacaacctcttggaaaagcaatattgggccttctcaaaaaactaaaactagaactgccattctatccagcaatcacactactgggtatctatccaaagaaaaatacatctttatgtcagaaaagatacctgcactcatatgtttgtcatagcactgttcacaagagcaaagacatagaatcaacctaagcctaagcattcatcaatggatggttggatgaagctaatatacacatgcaatgatatgtatatatatatatatatatatatatatatwatatatatacacacacacacacacacacacacacacacacatacatacacatcacacataccatgaaatatagatatac

SEQ ID NO: 192068 - DNA, 529 bp, Homo sapiens
tcaaaaaatgctaaacatcaatactatctagagaaatgcaaattaaaaccacaatgagatgtgatcttatacatgtcagaatggctattactaaaaagtcaaaaaataacagacgttagcgaggatgtggacaagaaggaacacttaaacactgttggtgggaatgtaaattagtacaacctcttggaaaagcaatattgggccttctcaaaaaactaaaactagaactgccattctatccagcaatcacactactgggtatctatccaaagaaaaatacatctttatgtcagaaaagatacctgcactcatatgtttgtcatagcactgttcacaagagcaaagacatagaatcaacctaagcctaagcattcatcaatggatggttggatgaagctaatatacacatgcaatgatatgtatatatatatatatatatatatatatattwtatatatacacacacacacacacacacacacacacacacatacatacacatcacacataccatgaaatatagatatac

SEQ ID NO: 192069 - DNA, 396 bp, Homo sapiens
ctgagctaatatctttttataatttttttttaaaagcagtatcagagacaggcagactaattttcgttaacagaattactataacttaagtatatcaatatgagtgtggtctttttaaaaaccaaattcttgcagtcatacacaaagtctctaatgacaattccagaagatcctttgaaaatggggaaaatatatagaagagaaacaaacaccacagtgattgtttatattaaaatgaatgtaactactatcagaccagttcwtttttacatagtgaatacctctagaaaaatatgtagagttaatcactctcgattttcaaactaagacacacacagggaaacaaataatcatattttcagggaaaataatacatgccagagaggaacacataaa

SEQ ID NO: 192070 - DNA, 574 bp, Homo sapiens
aaatcacatcagtgaatccatacaaacactgtaaaattgtaaaattactattgcaacctattgyttccaaattgtgacttttaccatctttgaaccccgaattcctactagatctcttgctttctgtgactaccttctttggtgatctattttgcttttcctctatttctcaatgactgtggcacaactccccagagtggtgactctaatcactttcctaattcagacagctctagatacagactagaaaaatagtgcacctttatttttggcctttgaccagcaccttaccatctaacgtagtctgccacaattccactaccccaatggtgaagcttaacccaattttgatattgggatttgtgtgagagtagcttgaaattgacatcatagagaggttatttttctcttattttctttaaacctaagtgaagtataatcttacattctcttaattttttttctgttgaaataactggcatggatctaaatgcaattgcatcttttgtctgtttttatttgaaaaaatttggaagtaccactttataaaacaagctgtgtagaacctatttcc

SEQ ID NO: 192071 - DNA, 566 bp, Homo sapiens
tttggcctttgaccagcaccttaccatctaacgtagtctgccacaattccactaccccaatggtgaagcttaacccaattttgatattgggatttgtgtgagagtagcttgaaattgacatcatagagaggtwatttttctcttattttctttaaacctaagtgaagtataatcttacattctcttaattttttttctgttgaaataactggcatggatctaaatgcaattgcatcttttgtctgtttttatttgaaaaaatttggaagtaccactttataaaacaagctgtgtagaacctatttcccttccatgttcaaatgtcatgaatatttatgaacccagagatgaaagcagtaaaataaaatgaattggcttgagccaaatactattctgcgatcttttccagttcattcaactgactgccacttgaccaagacctcactcaaatgaacttacacattaaactactcactgaaaaattgatttcccaaatgttttccaattacaaaatcacatggagttttgcagaagcaatctgcaaagcaatcaatattggtaagaca

SEQ ID NO: 192072 - DNA, 395 bp, Homo sapiens
gggttcaattcttggttttggtgtggatctttctgaaggacattggggtccacactgtggaattctttctcatctgaagtcagaaatctgtcacttcagtattcscctcttgtatcctaccctctgatctagtcttcccattaccctcgggcctcactcccaacacacatgtctttgaccttcactcccttgagttttctttcttccccatcaatctcacttctctctggggctcactttatcctctacccgatttgcatcccacagatggcgttattccctctggtccccactgctctggccaaaccttctctctgctgactgcatctattgctgtgagctgattgtcctctagtttctccatctcctgaggcatgcttcacaccactgccaga

SEQ ID NO: 192073 - DNA, 534 bp, Homo sapiens
aatcaagaagagagagacagacagatgagaaacaaagaagcagataatttgaaagtaactgacatttactttgtatttaagattttctttccttgaaagttatagtttgtgtcttatgttttgttttttgtttttgtgtgtgtgtgtggctaatgttttgatttttattttgtccagactactagtttctaattagtttatcttctgtgcattcttttatgtgtctgaagtgtgatttaaaagaaacctaacctgctcaaatgtcaacactcatggaataaacacattgtctcagagtaaatcatggtcccagaagagtccaaggcaggggtgcaggtggtaaaatcagaaggacacatttttattattgttgttacttaattatacacgagtagattctccaccccagcaacataaggtcatgatggggcagtatgtccatcgttctttaaagaagggtasggtagctggagtaacctatctgtagcgacttacataaattgaagaagtattgttactaactgtcccaaatgg

SEQ ID NO: 192074 - DNA, 448 bp, Homo sapiens
gtatgcaacttgaattttcctaagtgrttgttgtgtagattacactattgcagtgattttcaaacgtttttaaccattactgttagtaagaaatacttttcagatctcaacttaggacatatatacacacacaattctgaaataatagtttcataaaacaatacttataggtattgttttctatttcatttcattacactctacaacatttctggtcataaccgactaattaattttgtgacctactggtagtggttctcaatactgtctgaaaattaaaatcaactagggaacaatagaccaatggaatggactaagatgctagaaaaaaaacctccacaaatttggacctttgatttatgacaacattggtactacaggaaaggacagacatttgaatgtccatgtacaaataaatgagtcttgattctcatcttaaaattcatac

SEQ ID NO: 192075 - DNA, 677 bp, Homo sapiens
gtttcaccgtgttagccaggatggtcgcaatctcctgaccttgtgatctgcttgcctcagcctcccaaagtgctgggattacaggtgtgagccactacacttggcgatttcttaaacaagatacaataagtactaacatgatgaaaaagatctgtaaattggttatgttaaaaataaggacttctgtttctcaaagcataccactaaaagagtaaaagacaaactgcagragaggagacatttgccatgcaaataacatgtaaggagtcatgcatataacatgacttgttatgcatgtaacaaacaaggagtcctatccaaaacagaaacaaggcaattttgaaagatagaccgccacaacagaaaaatgggcaagaggtttgaacaggtacttcacagaaaaacatattcagacagccaagagacttgaaacatactcaaccttgttagctttctggggaatgcagattaaaactgcaatgaagtaccactacacacccaccagaaaggtgaaaatttaaaagacagacaatagaaattttggcaaggatattaaaccactggaactctcatacgtcactgggaggagtgtaaatagtcacaacagctttgaaaaactgttcagcaatatctgttaaactgaatatacatatgccttatgacctggcgtttccact

SEQ ID NO: 192076 - DNA, 539 bp, Homo sapiens
actttgaatccttctccatggtactagagagatgttaatttgtgggattccactcctgaaggttgcatgcacatgcccactcaggaagtaagatgggatatttgaagaaggaatggactctaatcttctaaaaggaaaacttggatttatgacattgaggattcccaaatttggatggcaccatctattcacttaggccaatgcttgaatacccgttgaatgttcacactcccccaccctcccctccccgagcccaatcccttgctttaaggagtgtaagatgattttttttaaggccctcattttctaagggaggaagagggcttagaatgttttctgaaggagtcaacattaaaacaagagtcttcctaatctcaccccacacaaaatagaagaaacaaagccacgttgggattgttttccggacctgtttctgttctattttgattcttrttgaccccaggcagtgatggaattgtccccttctctgccagatctcttgctgtatttagagcaacagttcccagaactgctgagtt

SEQ ID NO: 192077 - DNA, 574 bp, Homo sapiens
tggactgaaaagttacttgtgaaatatagagactaaggaagtcaaagttatttgaaagcatggaattttagaagttgaaagacccttaggcaaccctctgctgcaactttttcttttcacaaagagtagcaatccagagagggtttgtggtctaacagacaaccatgctctccaaagtgcagtctgaccatcagcccaggtacagtccagggactgctagaaatacaatatctcaggccccaccagtgacctccagcatgagaatctgtagttwaccaagaaccctaggtgatttgcgagcatgttacagtttgggaagcactggtctagaaaattcatattccagacaactgaaaggaaaacggccacgcgtagccagagttcacagaactcaatttaaatttaatgcaactgccttgaggagggaaaaaaggggaaaaaactcaatttgtttttttctgtgaccttgtcaacttggataattagaacctatataacaaaaaggaatgtactttgctagtagttcagaaaattgaactgactgaatgtatttttttcatacagtgaaagctaa

SEQ ID NO: 192078 - DNA, 367 bp, Homo sapiens
acctggtgatctgcctgccttggcctcccaaagtgctgggattacaggcatgagccaccacacccagccaggtggaattttttaaaataaaatatccaataagtcttacagaaagcattttaaaaagaaggcttaggaacacattgaccccaaatgaagatcaatagagcagaatcagaagatcacattgscacatgtttgatcccccagggaaaaggagctgataatgtgcctggtgtggtgtcgagctaggaaatcctgtgtatgttagcacagtatcgtctcacattcacaccagctgattttcactaataggcagagagatgacgtgaaaattgtgtaaatgcatattgacagaaatttaagg

SEQ ID NO: 192079 - DNA, 367 bp, Homo sapiens
acctggtgatctgcctgccttggcctcccaaagtgctgggattacaggcatgagccaccacacccagccaggtggaattttttaaaataaaatatccaataagtcttacagaaagcattttaaaaagaaggcttaggaacacattgaccccaaatgaagatcaatagagcagaatcagaagatcacattgccacatgtttgatcccccagggaaaaggagytgataatgtgcctggtgtggtgtcgagctaggaaatcctgtgtatgttagcacagtatcgtctcacattcacaccagctgattttcactaataggcagagagatgacgtgaaaattgtgtaaatgcatattgacagaaatttaagg

SEQ ID NO: 192080 - DNA, 637 bp, Homo sapiens
ttgaaagaatgtgtatttgaaaagtctggaaatttttatttttaaataatatgttacattttcaaacaatatgcccaagactttttctgccagacatctttgcaagtgaagtatctgtaaattcagtcatagatttaatcattaatcaaaaaaattgartaaatgaaatttattctctaatgttccaggcaccgcagatatcctgtatgagccatgctctctctctctctgtccttctctctctctgtgtccctgtctctctctctcactctctgtgtgtgtctctctctgtctctttctctttgtccctctctctgtctcagtcattctgtgtttgtctttgtctatctctctgtctctgtcaccccctatctatttaaaatcggggtgttttacatttttttctttaagaggattcttgcattagacagggctagacagaaaagactagcctttttccagtatgaggtcttacgatttattttctcttggtgagtagttagcaagggctggtgatcactgacagagggagcagctgccctggccagagagatgaatgacccatccccatttgctcaaggtagaaaacagtaactattccaacaggtgcctaatcccccagcccaatgccattggc

SEQ ID NO: 192081 - DNA, 637 bp, Homo sapiens
ttgaaagaatgtgtatttgaaaagtctggaaatttttatttttaaataatatgttacattttcaaacaatatgcccaagactttttctgccagacatctttgcaagtgaagtatctgtaaattcagtcatagatttaatcattaatcaaaaaaattgaataartgaaatttattctctaatgttccaggcaccgcagatatcctgtatgagccatgctctctctctctctgtccttctctctctctgtgtccctgtctctctctctcactctctgtgtgtgtctctctctgtctctttctctttgtccctctctctgtctcagtcattctgtgtttgtctttgtctatctctctgtctctgtcaccccctatctatttaaaatcggggtgttttacatttttttctttaagaggattcttgcattagacagggctagacagaaaagactagcctttttccagtatgaggtcttacgatttattttctcttggtgagtagttagcaagggctggtgatcactgacagagggagcagctgccctggccagagagatgaatgacccatccccatttgctcaaggtagaaaacagtaactattccaacaggtgcctaatcccccagcccaatgccattggc

SEQ ID NO: 192082 - DNA, 465 bp, Homo sapiens
agcattcctggcaggaactgtaagtgcaaaggccctgaggctggacccagtctgggayattggaggagcagcagggccagtggctgcagcaggtttagctcagctggtggatgtgagtggagagaggtagccggggccagatcagacagggtcttgaaggctgtgtgaggcgctggctttcattccaggtgcactgggactccactgggggcttttgaggagggcagtggcaggatcaatgcatgctttaaaaagagtgttctgattggaaaacagactgcgggggtgagggaggacatagggacagcacagggacagcagtgaggaggccactgtaacagtcctggtaggatacatcaggggcctggcccagggtgatgatcggggaggcaggagaagtgctcagactactttgaaggtggaacccatgggatttgccgatgaacagaaaggagtcgaggaggg

SEQ ID NO: 192083 - DNA, 506 bp, Homo sapiens
agatggtgtccattttgctgaggctcagagaattgtacatggcctgcccaaagtcatcacaggcaactggtgagatggggatttgtaccagggtctgtctgatgtcaaagctgtgcttgtaaacacatgacattgcttttcaggcagcctggattccagagactctcagaaaagagggaagaacgaatctgacccaggcgctggtctgtacctgagaagagcctttgggctgggctgtggggaggcccgtgtttgtcctgggcygcgtcccagctcaggtctgtcatggccttgctgtgtgagcaagtcctgccccttaccctctctctgggcctcagtctttccacctgtcaaatggatggcttggagttgctggttcctaaaatcctttaatgttaggcttcttgaaaatccccaagtctgagggtatcttgggagctgcttttcagacctcaaaatggaaacagcgatttttcctctattcctgaccgagcagaggtcagcag

SEQ ID NO: 192084 - DNA, 557 bp, Homo sapiens
tttgaagggcttttttgtagagacagggtttggccatgttgtccaggctggtctcgaattcctggactcagttcaagggatccactcrcctcagcctcccaaagtgctgggattacaggtgtgagccacagcgcctggcccgaaaatttccctcttaccccatcctttggccacccagtttccctctgcagaggcaaccgctgttcctagtgtcttgttgaaatatcacatttctttatttccttaaaacaacctaatttccaaggacctgctgagctggagataatgtaagctcagcccttcttggggcagaggagcctggatctcacctggcatcaagacaaggatggtggagggggcaggcacttctagttatccattatctagccacgttagtgactttggagatgtgccttgttccaggcatgtagaatcctcagagccaagtaaagggaggagccgaaacctgagcgctacattactccagtaagtccagggtgttggtcctcaaagcattaaagagaacctcaaaattgcaagcatgaaactccccaaca

SEQ ID NO: 192085 - DNA, 616 bp, Homo sapiens
atggtcacctcgtatagcttatggtggattcctgtcatggggcttatactgacacaccaatgctaaggaggacctgaaatattccctcctgggaagcagccagagaaggatgaagcaaaaggagaagagtgcaagaaatctccagtagccaggggctgaccctctagagaaaggaatggcaagaaatctccagtaagggaggttgagcctatgaggaaaggcaataaatctaattttgggcctcacaccaaacyttcattatgcaaaatacctcaagaaagacagtaaatagaaaggatcaaattaatgacagtaacatcccctctgacagtcccctaggttctcatgctaaaaggatagtgaaaggactaaacataactacaggaagcaagccagaagccaactcctctgaaaggagtaaggtctctacccccgaacagcctgctaacatatgggacccaccagaccacttgcctctgccaaaccccatgcatcaggccggtacacaggatccccccactcatcagtccctcccccatataatcctgaatcaataccccatgttccccctagccacacacttaagccctacagcatgaaatagaacaatgtaaaa

SEQ ID NO: 192086 - DNA, 602 bp, Homo sapiens
tgccctaacagattttcttcccctcttggtcttcttaaccaccataaacaagcttgatcctatgggaaaatctttttctagcatcaaataaagccttctggagcaaatacttcagggactgagaaaataattgtgattcgcttctcacattgcagttggtgatggggtagaaygcagagtaggaattctctctctctcataacagtggacagccctgggagcaagtaaatacgcgctgctgcagtgcagtggaaccccatgccccagatatagtatttggccaacttttcaaatatatagtcaggtatattggttaatcatacataaagccctaggaagcagagcaaggattcattaacccgcaggcaaggttaaataaagtacttcctgaacacagtgaggttcaagaaacacgttatttacttcctctaagagtatggcatgtgagtgaaacttgaacacttgctagtcactcaaacaaaagcagctggaattacaaatgagtaatgtacaatgggatggagacagcacagtacagtaaacacagtgtggatctgaatgcattcccaagcaccttgggcaagtaagcctctcagtttcaa

SEQ ID NO: 192087 - DNA, 602 bp, Homo sapiens
tgccctaacagattttcttcccctcttggtcttcttaaccaccataaacaagcttgatcctatgggaaaatctttttctagcatcaaataaagccttctggagcaaatacttcagggactgagaaaataattgtgattcgcttctcacattgcagttggtgatggggtagaatgcagagtaggaattctctctctctcataacagtggacagccctgggagcaagtaaatacgcgctgctgcagtgcagtggaaccccatgccccagatatagtatttggccaacttttcaaatatatagtcaggtatattggttaatcatacataaagccctaggaagcagagcaaggattcattaacccrcaggcaaggttaaataaagtacttcctgaacacagtgaggttcaagaaacacgttatttacttcctctaagagtatggcatgtgagtgaaacttgaacacttgctagtcactcaaacaaaagcagctggaattacaaatgagtaatgtacaatgggatggagacagcacagtacagtaaacacagtgtggatctgaatgcattcccaagcaccttgggcaagtaagcctctcagtttcaa

SEQ ID NO: 192088 - DNA, 150 bp, Homo sapiens
catgtttatataaattgggattacagctggacacaagaaagaaaatctatggtacagataaggccacacaggtcactcttccctgtgcagcctctggaggaaatgagcyaaaaactagtcattagtgggcagaatgcccagagcagtgca

SEQ ID NO: 192089 - DNA, 214 bp, Homo sapiens
caatgcttttcgaaagtctctaaatcaatcttgaactttaatatgatcctactaaaaataccaacagaaattrtttttgaaatagacaagctgaatctaaatttcatacaaaatataaacaagtaacagtggtgaagaacagcctaaaaaagaaatgcagcaatgagagaatagttcttcaatatattaaagtacactataaaatctaaaataa

SEQ ID NO: 192090 - DNA, 579 bp, Homo sapiens
aagagtttttgaaagtctattatgtgccaggtgttggaagatgtgaaggtgaacaagcagatgatttcaccttaaaagagcttgtagcttagtgggaaggaggaaaaaaaaggaagtaataataacaaagtaagaaaagagctagcatagagctggggaagcaaaacacacagaatgaaagtggaacctgatcttgcagagtcctggaagggttctgggaagagatgactgtgtgctgagcaaggaagaatgaatagaaagtaggcaagaaggaagggtgagatgagaggcttcttgatttgattccagatctcaggytttatttcaccgttaagtatgatgttttagtctctcttttcttttttagaaaccttcactatgttaaaaaacagtttttttctattttttaattggcaaatagtttgttttaaatcacaagtaagtattgtgtaattgtgtcagatttttttctgcacctattaaaataattgtataggttttcctttattctttaatgaggtgatatcatatcaaatattagaccaatattatgtatctgaaaaaatatgcacacacaca

SEQ ID NO: 192091 - DNA, 579 bp, Homo sapiens
aagagtttttgaaagtctattatgtgccaggtgttggaagatgtgaaggtgaacaagcagatgatttcaccttaaaagagcttgtagcttagtgggaaggaggaaaaaaaaggaagtaataataacaaagtaagaaaagagctagcatagagctggggaagcaaaacacacagaatgaaagtggaacctgatcttgcagagtcctggaagggttctgggaagagatgactgtgtgctgagcaaggaagaatgaatagaaagtaggcaagaaggaagggtgagatgagaggcttcttgatttgattccagatctcaggctttatttcaccgttaagtatgatgttttagtctctcttttcttttttagaaaccttcactatgttaaaaaacagtttttttctattttttaattggcaaatagtttkttttaaatcacaagtaagtattgtgtaattgtgtcagatttttttctgcacctattaaaataattgtataggttttcctttattctttaatgaggtgatatcatatcaaatattagaccaatattatgtatctgaaaaaatatgcacacacaca

SEQ ID NO: 192092 - DNA, 385 bp, Homo sapiens
ttttggtaaaactaagcacacaatttaaatttatcttggaaaaccttagtagttattggaattacttgagaatctattgcaagcaatctaaatgaattcttccaaaacatgtcactggagcaggtactcaagaagtaatctgaagtaaacaaacaaaaacaaagctatatttatccttcctcttttctgtgtaatayaatccatgggaagacaagaagaaatttattttctacttgtgagatttggggatgatgatgctttttctatccttatcaccatttgtcaagatacaactttcattactttccagtaccacctttgaacagcatcttcttttttagtatattctcccttcctccttccatctctccattctttcttccct

SEQ ID NO: 192093 - DNA, 475 bp, Homo sapiens
agatctcacaaagatgcaagcttttcagtttcacagatatctgtttcccctctggagggggaattaagggaaggagcaagagacggaactacataatgcccactaaaatatttggaatctttttctttttccctttctttctcctacaaagaacatctcctgaataatagacaaacgtcattctagtcttctaaccttacaccacatcaaaaaaaaaaaaaaaaaaaaaagcatttctaaagctctgcagacttttctgagtcatcctgctgcattctacacccaaactctcagaggcaggtcactctactttgcctggggatgctctctcaccctgcctagtcctcccgtggattttaccctgagagcagctgcytccagggtccccacactgccagccacctgcacttacatctgctcctgtgcctaagctctgctagctgtcatcttttctggctacccaccaagtccccca

SEQ ID NO: 192094 - DNA, 522 bp, Homo sapiens
actagactcacaagcctgtgctctaaattaaggtggcttgtttggtatgtctgcagtggacaatggtgtgactcccacatctcagtccagaattttttargttccccctttgccattacaacaacccagtctgcttcagagccttttatatctacctgattttgctaataaggaaggaagcagaaaatattttcatgatcatgttaggagtgagaagcaaatccagtaccagatcccaggtcttctcacctcccatgacaggactcccttgatcagaccaacctactttccatcctgacacctaccttcccagagggtcctagaagaccaaggcaattttattatttaaaaaaaaagttgctagaagagaatagatactactaggagatggaaggattgttgagaaaatccgaaggaaaataagcctgggtttaatcctcaaccttgtgttgaatctgtccgcaaaggcatgtcccttcagtatgtcaacagtcaaaacagatggagcccttactgtgtaaa

SEQ ID NO: 192095 - DNA, 486 bp, Homo sapiens
tatttcatgagtcatgcagttcatgtaggaatcgaggtccttgaggcctgttggactacagacctcaacttgttgctgtctgctggataaaggcttcgcttacttcctcaccgtgcagctctcttcagtatggccacttacttcattgaagccacaaagggagaaagtctgaaatcaagacagaacatataatcttatgtaatgtcatcatgaaagtggcatcctgttggcggagcttgcagtgagccgagatcgcgctactgcactccagcctgggcgacagagcaagactccatctcaagaaaaaaaaaacaaacaaacaaaaaaaggaagtggcatcccattatctttgctgtattccattggtgacaagtaaggtatagattccacatgtactcaaggggcacgyattacacaagggatgaccactcacctgcaaggataattgaggaacattttcgattctgttcaacacagccaatttcc

SEQ ID NO: 192096 - DNA, 549 bp, Homo sapiens
tctttggttctgccatgaccttagctccacgcagctataattttgaccctttaatgtaactaatttgactacagttacttttgcaggctccagctcagtcaattctcatcaaacagcaggaactatattgaagcaggtgacaaaagagtaaaaagcaagttatttcccaaactactacagtcactcatcgtcaattattgatcagagaaggttttgtaatgtaaattctacaggacaaacacatgtggtagataatgccataaatacacatcacagacaatgtgattttaaaatggaatcatatcaaaaatacctgcatgagtctttcaaaatatctgtgaactcatacaaacttcagaccttcctggccttactaacactatgataatatatgtggcagaagcaccttcgcaggctcaaattattcagtgcctgaactattgtatattcttcagtttttaaaattaaatttcctgctggccacagacagatcccyctgggacacaccctcatttctttaaaccctgaggtaagactaattttcctggc

SEQ ID NO: 192097 - DNA, 598 bp, Homo sapiens
ttggcccctgacattgttacaatagcatttaaggaactcagaatagattaatcataatagtatccatttggagactatatcacaaagcaaaacccaggaatggctttggctttgctctcagttttgcaaacctatatatggaagctctctctcagctaatgttctttgcatgacaaatacatttggatctactgccttgtatttattttcctccaaggacgtaactatccatgtcttgcccccaagtaaycttgaaagcctagctggatactttgttttcctaggcatggttttgctagagggggttgtttctaagcactgagctgggaaaaaaaactaagcaggcttattttccaaatctagacacatacctccccaccatgggaaatggtcaagggaaaaatgtaaaatggaattaagttcgattttccaggttccatttgactttgaagagccaaggtaatgttataaaaggctagaataaagacaattagcatcttcatttgctgaaagatagaacaagaactcaaagagtttcagccaatcataaggaaccactttgcttttgtagcaaaacatacaatagattatcaaacat

SEQ ID NO: 192098 - DNA, 511 bp, Homo sapiens
gctgaatagtaagccattctgtatacatacattttctttattcattcatgcttgcacacctaggtggattctatatcttggctattgtgaatagtgctgccataaatagtgttaacaataaataaatagtgctgcaataaataaatatacagtgctgcaataaataaataaataatagtgctgtaataaataggagacatctcttcaatatcctgaatttgtttcctttggataaatacccaatagtgcaattgttggatcatatggtagttctatttttagccttttgagaagcctctctactattttccataatggctgcactaatttacattcccatcaacaggctataagagctcacttttctttgtattctcaccaggaaacatttagatcttaaaytttggggctggataatgagtagaaaaacaaggtattgctgggtctttattgagaccacatattctcacaacttatggtgactaaacaagcatctatcactgccttaagg

SEQ ID NO: 192099 - DNA, 561 bp, Homo sapiens
atacagtgatgaatagtagacattttctggatacttttcatcacaagaccaagaatatagacataattaagatagtygcacacaatcagaggttcatcaattcaaaaaaattattgagtattgattgtttgcaactaaagggggactgagtttaataattttcgtatcaccctaagaagacgtaagtttattatagagtcttctattacattgagaattttaactcctcaaaacacaagcatcaaattcttttgggaaaaacaaacaaacaaaacctattcactattaacaagagctacagtttacaaagcacatactatgtgtcagggttttttgtgttttacatatgagaagatggaggtttttagaggccaggtaagccttctaaagtatcacagggaggggtatcagagccaagatgcaaacctggttttctataactctcgagaactacataactttgcttaggatttgtaaaaagcctgcaaaaacatgctttctggctgaagaaatctgagactggtttggatacttaaaaaaaaaaaaaaaaaggatcatctg

SEQ ID NO: 192100 - DNA, 561 bp, Homo sapiens
atacagtgatgaatagtagacattttctggatacttttcatcacaagaccaagaatatagacataattaagatagtcgcacacaatcagaggttcatcaattcaaaaaaattattgagtattgattgtttgcaactaaagggggaytgagtttaataattttcgtatcaccctaagaagacgtaagtttattatagagtcttctattacattgagaattttaactcctcaaaacacaagcatcaaattcttttgggaaaaacaaacaaacaaaacctattcactattaacaagagctacagtttacaaagcacatactatgtgtcagggttttttgtgttttacatatgagaagatggaggtttttagaggccaggtaagccttctaaagtatcacagggaggggtatcagagccaagatgcaaacctggttttctataactctcgagaactacataactttgcttaggatttgtaaaaagcctgcaaaaacatgctttctggctgaagaaatctgagactggtttggatacttaaaaaaaaaaaaaaaaaggatcatctg

SEQ ID NO: 192101 - DNA, 436 bp, Homo sapiens
tcccctacttcctctcattttcttctaaaaccacacttttagggtrtccaagtcttaactgcgattaaaacctaacttatattttccctccttccttgcaatcttttctgattccctggagagaatcatactctcccttccctgaatttaagaatgctttatctaaggcactcagatgtggactatagtttatagacacacagccttcccagtaagctggtaacacttttgcagttaagtctctcaatatggagctaaaatttgcctttctataacttcaaccaactgattttcattcattagatcctttagatctgcacagtagctgtcttttagatctaacctacataagcttatcccctcattggttcaatacatttttactgagtgcccattctacatagtgcattggcttccaaatgatagacttccaaac

SEQ ID NO: 192102 - DNA, 436 bp, Homo sapiens
tcccctacttcctctcattttcttctaaaaccacacttttagggtatccaagtcttaactgcgattaaaacctaacttatattttccctccttccttgcaatcttttctgattccctggagagaatcatactctcccttccctgaatttaagaatgctttatctawggcactcagatgtggactatagtttatagacacacagccttcccagtaagctggtaacacttttgcagttaagtctctcaatatggagctaaaatttgcctttctataacttcaaccaactgattttcattcattagatcctttagatctgcacagtagctgtcttttagatctaacctacataagcttatcccctcattggttcaatacatttttactgagtgcccattctacatagtgcattggcttccaaatgatagacttccaaac

SEQ ID NO: 192103 - DNA, 496 bp, Homo sapiens
agttagaaaagcagccttgaaatacattttctcttttctgatagctttggcaaaaagtttgaaagctactaataagaaaaaaatttccttacctatcaagtagatataccttgaaatatacttgttaacatgacttgtatttcttcctttggctttaaaaaaatggctataattttaaatgttctcataatttgaaatctaagtgataaatctgctttctggaaaatattaaattttgagattctctgacatcattcttgactactttgaaaatatcattaactgaaaagagtctgtatgttcagatcaggcacttacatattcaagtttttctgtgtatttatttctataaacacatgattaatgaccactgtatagttcaacttctggtrtttatctaggcagatacttacgacagttctcactttagcagtttgtttctatgttgtattgaatctctgattttgcttgtacttaggacttctaggaactgtgt

SEQ ID NO: 192104 - DNA, 496 bp, Homo sapiens
agttagaaaagcagccttgaaatacattttctcttttctgatagctttggcaaaaagtttgaaagctactaataagaaaaaaatttccttacctatcaagtagatataccttgaaatatacttgttaacatgacttgtatttcttcctttggctttaaaaaaatggctataattttaaatgttctcataatttgaaatctaagtgataaatctgctttctggaaaatattaaattttgagattctctgacatcattcttgactactttgaaaatatcattaactgaaaagagtctgtatgttcagatcaggcacttacatattcaagtttttctgtgtatttatttctataaacacatgattaatgaccactgtatagttcaacttctggtatttatctaggcagatacttaygacagttctcactttagcagtttgtttctatgttgtattgaatctctgattttgcttgtacttaggacttctaggaactgtgt

SEQ ID NO: 192105 - DNA, 494 bp, Homo sapiens
tcatgtagatcataaaacagcaggggtgttgagtgactttatggcgaactgaaatgttcaaggaagtttcacagataggcagagtgaaacayatataagaaaagggaaaagtgaagggaattatggctggggataccaattagacaaagaagggtgagaaacatgtcaaagaaaaaagtgattttactcagttttccggaggactgttatatacgtcttccagggctgccataatataatcccacaaactggatggcttaaagtacagaaattgattttctcacagttctggaggctagaagtccaagatcagagtgctggcagggttggtttctggtgatacctctgtccttggcttggatttctgagttcttacatggcctttccattgtgcatacccactcctggtgtctcttcttcttagatggacaccagtcctattggattaggaccccacacttttgaccttgttgttttaattccctcagtaaaga

SEQ ID NO: 192106 - DNA, 495 bp, Homo sapiens
gctaatgttgtgtgtagaatttcttttcacttatgtttatgttaaagattttcctttcttgttctgttcttttaaagtttttgtgttaaggtttcattggcattgtgaacaattacaaagtgttgcttttccttctattcaatgaagatagagagttaactgttttgaagaaatgactgctaaagcaatctgggccaaaagttttctttttgaagggtttgaattacggatttaatttatttaataatattggactactragattttatatcaatatgcttttgtttctattaataccatgcaaccctttgggaatccctaccgaaagacttctgtttatcagagcgtttccttgttggcatacctagatccccaatttttcttcgcccgctcctctgtgattgttaagtgctctgctcaacttctaaactcctcaagagccattttaggatctgtaaaggcctttggttaaagtttcctcaaatgttagtttca

SEQ ID NO: 192107 - DNA, 419 bp, Homo sapiens
aggtatgttgtgaataatagtaagatagctagtataataatgtctgaataagaaacatatagaacacactgggtaattatagaagtgtttaataaacccactattcacaaatgtttttgcatgggcaggatgtatagaaaccataggaattaacacaattcacaaaggatgacatcagcagggtacatttaccatacctaaacatgaagagataggtggaggaaataattatcagagtcaggaatggacacttacattggaagggcctcctgataatttagagcaaccttgtatgaagggtgcagggggaataagtgcccttatttcattctttatcctcactctaatctgctgattccccatgtgtgagccaaactgraagccagacagcaagggggctcatcactaatgggtccatt

SEQ ID NO: 192108 - DNA, 500 bp, Homo sapiens
ccatgattagtgtattttgtcagtaaacagataacatggggataatatttcctgtactaaggtggaaaaaaacctcatggaaacattaagacctaaagattaagaaaattttaaaattaggtgtctctggaacaccttctctaggaatagatgtttctccaagactcaaaaaggaaaagaatcacactcaaaaaataatttggtcttgatcagtagatcagtagaaaggtggggaaaaaaatctagtcaatgatctacaggaaggataatcttctcaaaagacaagttaataaaatgaatrtctaggaagatatgactatgactggagcaggaagaaatctaatagaaggaaaggaggctctcagagagtgcaacgcatagctactcccaacagaaatgcattcaggaaactcaccccactgcagcaagaaaggaggatgcagaagaaaatattgttgcttccttgcagtagcacaggttattatctaagcctggggaat

SEQ ID NO: 192109 - DNA, 405 bp, Homo sapiens
gaaacaacccaaatgtccatcaaaacatgaatgaataaacaaaatgtggtgtacacatacaatgaaacattatcgaaccataaaaaggaatgaagttttgacacatgctacaacatgggtaaaccttcaaaacatgctaaatgcccaatgttacacctgctgtgccaccaccactgccagtgcatagtacatgggcaccagcaaycctgcccctgctacatcactgctgcaggtgcaaccatgtgcagaggcactggggcaaccccaccaacaccctgtccctactaccactcctaccccaaatactagcgcaaatgctagcaattccacctctgcagatgctccttcccagacaatgcacatgcaccttatcacactgctacagctgttggcatgcatgagcaa

SEQ ID NO: 192110 - DNA, 512 bp, Homo sapiens
attattatgcttgcttgtttttagatttagggcacatttgttgtgagagacrgtgtgtgtgtgtgtgtgtgtgtgtgtgtgtgtgtgtgtgtgtgtgacgatagctcagaattgatcttgatgtatatcttatggccagacatgtggtagcaatgcctggtgatatagtggcctttccttttgccttcttcaatcaattcaactggccatgataaccctataacctagctaaccccttattatttcagagaaaattctgacttagttttaatattcaactagtggttgtgaataataattttatgtatcaacttgactgggccatggagtactcagatatttgctcaaacattatttcagatgttagtgttatttcaagtatttttggatgagaaaaacattttaatttgtagactaagtaaagcagattatccttcctaatgtggtggacctcattcaatcacttgaaggcctcaatagaatttaaaaggttaaccttcctccgagagaga

SEQ ID NO: 192111 - DNA, 543 bp, Homo sapiens
ttgtcactcataggtgggaatggaacaatkagaacacatggacacaggaaggggaacatcacacacatgggcgtgttgtggggtgggggagggcggaggggtagcattgggagatatacctaatgttaaatgactagttaatgggtgcagcacaccaacatggcacatgtatacatatgtaactaacctgcaggttgtgcacatgtaccctaaaacttaaagtataataaaaaataaaaaaataaaaataaaaataaaaaaagaaagatcagataaaagctgtatcaaccatgctcttgaacggaagagcctatcttcattttaccagattagtgccaccggtaccagcagttagtactttcaggggcagtgaaaaggaaaactgttttacccttccctttagcagatctggctactagataactagtgtgttttgctttttctttcctctgtcttttttttaggtcctgagcacactagtgaaaaatcaatttcccaaactatgtatgagacatactcctgcccagacccagccagggtccg

SEQ ID NO: 192112 - DNA, 621 bp, Homo sapiens
aggcttgaaatagtgtttctcaaaccttggcatacattggaattgcctgttggggatgtcaaaaatctctttctttctctctctctgaatgcctgatttagcagatctgaagtgaggcctgaggattttcatttttagcaagttcccaagagatattgatgctgctgactgggggacccaacttttagtaccactggcatggagtgtgatgtttgggctgaagaggccaggcaatggccattgtattagtctgttctcacattgctataaaacactatctgagaatgggtaatttattaagaaaagaggtttaattctctcatagttccacaggctgtacaggaagcatggctgcggatgccttaggaaatttacaataatgacagaaggcaaagggaaagcaggcacatcccacatatctggagcaggaggaagacagaggaaaggaggaagggctacacacttgtaaacaaccagatcttgtggaaactcactcactatcatgggaacagcaaggaggaagtctgcccccatgattsaatcacctcccactgggcccctcctccaacaatggggatcgctattgaacatgagatttgggtgggggtgcagggccaaacc

SEQ ID NO: 192113 - DNA, 614 bp, Homo sapiens
ataagcagtgtaacattgaaccaacacactgtttcaggggttatgaagcattgcaaatacagtagtcatccgtgttggtaatagggcattacatgtgatattcctatattgcagaagaaaataatattcaagggacagtttgatgggacttgatataggtttattttctattcctagaatattataaaatatttatttgaccttcagaaaactattaaatgaaaattatcaaagataccttgtagtcagtatatttggctggtaaagagtcatagctattcttctgagttcctaacaaagatgatctgyttttagtacagcattcttaattttctatcctagacaatttcctcatgtatgtattttattaccctttaaattgctgaggtctggctttctttctgattcctttaatttctgtttctaacactgagcagacaatattaaatgaatgtacaaatgaatgcatggattaattaatgaataaacacttgtccacatcacaagcttttttcaatctctgtctctgtaattccgagtctagttctttctgctttcctcattaaacatttgcatctaaaataaacataaatccagtacttgtgttatttcac

SEQ ID NO: 192114 - DNA, 386 bp, Homo sapiens
attccataatttctgcccttcattatttctattgagaaggcaaccatcattcttatagctgttctgctgtatataatgtgtctttttttctctggttgtttttatgatgttctctttcctttttagaattcagaaatcttacaacatggtacytaggtgtaattttctttggatttatcttccttgggattcactgactttcctgggcctaagggtttgttttgtttgtttttaaaatcaaacttggaaggatgatggtcattatttcttgataatttttagtcctatttcctctcttttatttttctaagattctgagcaataaccaaatgctattgctattgatattgtctgataggtcattgagaccctattcattttctttc

SEQ ID NO: 192115 - DNA, 386 bp, Homo sapiens
attccataatttctgcccttcattatttctattgagaaggcaaccatcattcttatagctgttctgctgtatataatgtgtctttttttctctggttgtttttatgatgttctctttcctttttagaattcagaaatcttacaacatggtacctaggtgtaattttctttggatttatcttccttgggattcactgactttcctgggcytaagggtttgttttgtttgtttttaaaatcaaacttggaaggatgatggtcattatttcttgataatttttagtcctatttcctctcttttatttttctaagattctgagcaataaccaaatgctattgctattgatattgtctgataggtcattgagaccctattcattttctttc

SEQ ID NO: 192116 - DNA, 512 bp, Homo sapiens
tctgtctcctcattagatggtgaggtcctgagagtagaaactacccaactgaacctatgcctatcatagaatatgaccacataaatatttactgaattctactttctggtagaagtttataggatagacttccaaatttagaaaaaccataaaaattcattaaataatttgttttcttttttcattataatatttaccattaagaccttactttccaaaatcagattttatttttaattcctcacttcctttttcctaataactcagtgctcctgccatagtgttcagcggggataggactatcctgagacatactaggctagattattcacacaagagctcaaaagtgttccatttcatgtggtaagcaaaattctctttgamattcacagtagtcatttagcacaaaccaaagctctttcatcagcatatattgtactgattttcaaattataaggatggtttttgaacacaccagctgagaagggatttagttttgtgtatgcgtttag

SEQ ID NO: 192117 - DNA, 423 bp, Homo sapiens
tctaaaaatggtgaatttatgaagactttctcctccacttctgttgtgaagagcgatgacttgtaaagcatctttgcttactgagaggctagagacattcatctcatgtactcgcttctgatcttattgaagtggaaaatcaaagcctcacatttttttgtcagaggttgctgaaaatgattacttactaacatattttcaccaacatgaaatattagtagccaraaaggatgcctaagccacccttatgaaccaaagttcatatatatatatatatatatacatatatatatatatatttgagatttttaaacccctgtttactgaaaaggtgtaaatttttaggatgcttccattgatccattcattgttcaaaaatttgtgtcaaagtcctattatgtatccagaccttatggatactag

SEQ ID NO: 192118 - DNA, 524 bp, Homo sapiens
gattaatttagaaagtttattttgccaagattgaagatgcacatctgtgacacagcctcaggaattcctgacatcatgtgcccaaggtggtcgggacacagtttgattctcagcttgaattttcccagcttagtaattttgggggcagaagatattttcctttcacaatacatttttgttttgggaaatagttattttcacagaaattaccatttacrttaacatatggtaagtttattactgttgtttaaataaattaacaagtattttaaattcttttcttttagtttttaatatggtaaatgttgatagatgtgaagcccataaataaaatctacttgaagttcttactaaccttaaaaattttttaagtgtccagaataaaaaatttgagaactacagccttaaaactttaaagcctttaaaactttaaattttttaagctttaaaatggactaattttagaatgttgagtcagtgtatttatctccttctttttaataatttaaggccttataatgcat

SEQ ID NO: 192119 - DNA, 561 bp, Homo sapiens
ttttgcagcccttgccctactccctccaaccattcttttggagtccccagtgactatgttcccttccttatgtctgtctgaacccaaggtttacctcccacttataagtgagaacatgtgctatttggtttttttctgagttaggtctcttaggataacggtctccagctgagtccatgttgttgcaaaggacatgatttcattcttcttttatggctgtgtagtattccatagtgtgtatgtaccacattttctttatccaacccaccattgataggcacctaggttgaatccatgtttcagctattgtgaatagtgctgccatgtgcatatgtgtgcatgtgtctttttggtaaaatgatttactttcctttgagtatacacccagtaatgggattagttcatcctctaattttattctaccaacgcctctmatttcccattatttttcaacagagggccttattctttaagatcagtatcttcctgttggaaacatgcctgcttccctctcaccatgtgaactttacatatactgtgctttgtgcctgaaggactcac

SEQ ID NO: 192120 - DNA, 614 bp, Homo sapiens
tgttgtatttttttccttgttatattggctaagacctcaagaaaaatgttgaacaggactagtaagagtgaatattatgcttgttcccaatctccttgggagaaagcagtgtcaatcttttaccaycaagtataattttagctatagattttgtacaaataacttttatgagtctactcctagtttgttaaggttctaaaaatcatgattaagttttgaatttcttcaaatgctatttctgcgtctattgagatgattattattttccctttttattatgtttatgtagttaaaatcaataattagttgatttttaaatgttgaaacaactttgccttcctgtacaaaacttcacttggttatgatatatttccttttttatacattgctagatttaaattccttatatttagtaagggttcttttgtgcctatgttcataagcgctaatggtatgtgaaaaaaaaattttgtactgttcttaccaatgttaagattatcttagtctcataaaatgaattggaaagtgttctctttttctcctcctctgttacctgggaggaaacaaagtatagaattagtcttacttcttccttaattgcttgtgggattcct

SEQ ID NO: 192121 - DNA, 614 bp, Homo sapiens
tgttgtatttttttccttgttatattggctaagacctcaagaaaaatgttgaacaggactagtaagagtgaatattatgcttgttcccaatctccttgggagaaagcagtgtcaatcttttaccaccaagtataattttagctatagattttgtacaaataacttttatgagtctactcctagtttgttaaggttctaaaaatcatgattaagttttgaatttcttcaaatgctatttctgcgtctattgagatgattattattttccctttttattatgtttatgtagttaaaatcaataattagttgatttttaaatgttgaaacaactttgccttcctgtacaaaacttcacttggttatgatatatttccttttttatacattgctagatttaaattccttatatttagtaagggttcttttgtgcctatgttcataagcgctaatggtatgygaaaaaaaaattttgtactgttcttaccaatgttaagattatcttagtctcataaaatgaattggaaagtgttctctttttctcctcctctgttacctgggaggaaacaaagtatagaattagtcttacttcttccttaattgcttgtgggattcct

SEQ ID NO: 192122 - DNA, 580 bp, Homo sapiens
attgtatgtgtatggctttatttctgggttctttattctgttccatttgtctatatgtctgtttttgtactagtaccatgctgttttagtaactgtgactttgtagtacagtttgaagttgggtaatgtgatacctccctctaagggaactaattctatgtatgaacaaatcacctctagaagggccccaccttctaataccatcatcttagagttagggtttcaacatgtacattttgaaagacacaaacttcagaacaagcacctatctattattaccttgactcaaaaccccccaacagatttttttaaataagggaggggtttctgattgttgtactgacagtgtagtaccctatcagacagctctcctcatggaaaataactgtaaaraccagacatactgcaaaaggcaatttcctgaagacactagagaattaatagtaggcagactcttgtgctatgtgaatacgtcaaagaggacagacgaggagttgtacaaagaatatttctgttttcatggcttttagcctgaggctaagtgctgttagcatgtcacactcaaggcaggtgtcagtga

SEQ ID NO: 192123 - DNA, 580 bp, Homo sapiens
attgtatgtgtatggctttatttctgggttctttattctgttccatttgtctatatgtctgtttttgtactagtaccatgctgttttagtaactgtgactttgtagtacagtttgaagttgggtaatgtgatacctccctctaagggaactaattctatgtatgaacaaatcacctctagaagggccccaccttctaataccatcatcttagagttagggtttcaacatgtacattttgaaagacacaaacttcagaacaagcacctatctattattaccttgactcaaaaccccccaacagatttttttaaataagggaggggtttctgattgttgtactgacagtgtagtaccctatcagacagctctcctcatggaaaataactgtaaagaccagacatactgcaaaaggcaatttcctgaagacactagagaattaatagtaggcagmctcttgtgctatgtgaatacgtcaaagaggacagacgaggagttgtacaaagaatatttctgttttcatggcttttagcctgaggctaagtgctgttagcatgtcacactcaaggcaggtgtcagtga

SEQ ID NO: 192124 - DNA, 402 bp, Homo sapiens
ggagttgtacaaagaatatttctgttttcatggcttttagcctgaggctaagtgctgttagcatgtcacactcaaggcaggtgtcagtgaaaatatcatagtctttctggctcaggggagaagaaaactgaagtcagataaaacatggatgctgtaaaaagtaaaaatatggaaatatttgaaagaaacaagcccattgaagagaggatcctcaaatgccatctacccacatctttcattggccccttatcttagtcaattctgtactgmtataacaagttgccatagactgtataatttataaagaacaaatatgtatttctaatagttctggatgctgggaagttcaaatataaaggtcctgacaactttgcgtctggtctctctgcttccaagatggca

SEQ ID NO: 192125 - DNA, 553 bp, Homo sapiens
gcagtgaaggcttaaatgaccacctttttgactgatgtgaacagccttcattcttccattcttggcactgaaaatcagtcatgtctgcagcacctcgcagagcactacaggcaaatctttgaagcccgaggattcctcagtagtcaggatcactcaccattatgatgtcaaggttctaaggctcatccgacaactgacaaactgacatactcctttctcagatattctcccatcttttaacttctaaaatctcacctttatatttttagatcatcgtagatycacaggtggttgtgagaaataatacagaaagattccatcaacctttcatccagtttgccttagtggtaatatttccctaacctatagtacaataacataaccaggatattaacatggatgcaatcaagatactgggcatttcatttaccccaaggattgtctatatttcccttttacagccacaccaacttccttcccatctccaccaccttgttaatccctgacaaccactaatctgttctccatttctataattttgtcttttcgagaa

SEQ ID NO: 192126 - DNA, 553 bp, Homo sapiens
gcagtgaaggcttaaatgaccacctttttgactgatgtgaacagccttcattcttccattcttggcactgaaaatcagtcatgtctgcagcacctcgcagagcactacaggcaaatctttgaagcccgaggattcctcagtagtcaggatcactcaccattatgatgtcaaggttctaaggctcatccgacaactgacaaactgacatactcctttctcagatattctcccatcttttaacttctaaaatctcacctttatatttttagatcatcgtagattcacaggtggttgtgagaaataatacagaaagattccatcaacctttcatccagtttgccttagtggtaatatttccctaacctatagtacaataacataaccaggatattaacatggatgcaatcaagatactgggcatttcatttaccccaaggattgtctatatttcccttttacagccacaccaacttccttyccatctccaccaccttgttaatccctgacaaccactaatctgttctccatttctataattttgtcttttcgagaa

SEQ ID NO: 192127 - DNA, 553 bp, Homo sapiens
gcagtgaaggcttaaatgaccacctttttgactgatgtgaacagccttcattcttccattcttggcactgaaaatcagtcatgtctgcagcacctcgcagagcactacaggcaaatctttgaagcccgaggattcctcagtagtcaggatcactcaccattatgatgtcaaggttctaaggctcatccgacaactgacaaactgacatactcctttctcagatattctcccatcttttaacttctaaaatctcacctttatatttttagatcatcgtagattcacaggtggttgtgagaaataatacagaaagattccatcaacctttcatccagtttgccttagtggtaatatttccctaacctatagtacaataacataaccaggatattaacatggatgcaatcaagatactgggcatttcatttaccccaaggattgtctatatttcccttttacagccacaccaacttccttcccatctccaccaccttkttaatccctgacaaccactaatctgttctccatttctataattttgtcttttcgagaa

SEQ ID NO: 192128 - DNA, 619 bp, Homo sapiens
cagtgatcagttttaaggtgagcagcacaggaaccaggtctgactactgagatgccgataagtctagaggctgctgggaaatacttttatctttaataatgaaaagcccccattccttcctgattttagatgcaatccttaaaagcagcagcaataatcccacaacatgaatgcaaatgtaagagaataacagaatttaatccagagctctgacaccgttgtagaatcaaccaaccctggaactgcatctgcctgatattgctttttttttttttttgagacagaatctcgctctgtygcccaggctggagtgtagtggtgtgatcttggctcactgcaacttccgcctcctgggttcaagcaattctctgcctcagcctcccaagtagctgggattacaggcgcctgccaccacacccggcgattttttttgtatttttaggagagatgaggtttcaccatctaggcatggctggtcttgaactcctgacctcacgatccacccacctcggcctcccaaagtgctgggattacaggcatgagccaccgtgcccagcctgcctttggacattgtatatgagacactaaaccccttaagctattttcagtagggtactct

SEQ ID NO: 192129 - DNA, 619 bp, Homo sapiens
cagtgatcagttttaaggtgagcagcacaggaaccaggtctgactactgagatgccgataagtctagaggctgctgggaaatacttttatctttaataatgaaaagcccccattccttcctgattttagatgcaatccttaaaagcagcagcaataatcccacaacatgaatgcaaatgtaagagaataacagaatttaatccagagctctgacaccgttgtagaatcaaccaaccctggaactgcatctgcctgatattgctttttttttttttttgagacagaatctcgctctgtcgcccargctggagtgtagtggtgtgatcttggctcactgcaacttccgcctcctgggttcaagcaattctctgcctcagcctcccaagtagctgggattacaggcgcctgccaccacacccggcgattttttttgtatttttaggagagatgaggtttcaccatctaggcatggctggtcttgaactcctgacctcacgatccacccacctcggcctcccaaagtgctgggattacaggcatgagccaccgtgcccagcctgcctttggacattgtatatgagacactaaaccccttaagctattttcagtagggtactct

SEQ ID NO: 192130 - DNA, 251 bp, Homo sapiens
tgtaagcttcccaaaggactagaaaaaaaatccaagacatatattcaaatgtattcttaaggatcactctataaaaatagagagttgtgaatctgcatctgccagtgatacrcagtgggtagcaagtcatttaactgacttggttatagaccttcgtattttaacgtatctgctacatcataatatcacaatatggaatagttcttgcataaagtgctctgtaaagcctgtctgcataaatgtttaatgca

SEQ ID NO: 192131 - DNA, 516 bp, Homo sapiens
tttgggaggctgaggtgggcggattgcctgagctcaggagttcaagaccagcctgcgcaacatggtgaaaccccatctctactaaaaatacagaaagttagcagggcatgctgatgcacatgtgtggtcccagctacttgaaaggctgaggcatgacaatcacttgaacacaggagacagaggctacagtgagccaagattgcaccactgcactccagcctgggcagcaaagtgagactctgtctcaaaaaaaaaaaaaaaaaaaaaaaaaagggaagaaaatgtaattttagtgtttatagtagcaactaagtaaaaaccattaaaatatgtaagcactttgtaraaaaattacaaaagtttattgaaagatatcttaaaatacctaaataagtaaagtgatacgccatctttttaaaaagactcaatatagttttttaaatatcaattataatctcgacttaaagtttggataaaattaaaatttcggcataattttttttcatggaacttagc

SEQ ID NO: 192132 - DNA, 460 bp, Homo sapiens
aataaattgtacatggagaggtaaaagaccaagaatggccaatacaatattgaagaagaatgaagtcagaaaactcacactaccaacttcaagacattataaaactgtagtaatcaagacaacatgatattttatcaattggccaaagaacagacaaatagatggaacagaatagagaatccagaaatagacccacataaatacagtcaactggtcttatttatttatttattttacaaatgaggtctcgctatgttgcctaggctggactcaaattcctaggctcaagcaattcttctacctcagcctcctaaagaaaactattgaactctactgagcagctgggactacaagtgtgtaccastgcacaccaggctatagttaactcatctttgacaaaggagcaaaggcaatgtgatggagcaaagacagtcttttcaacaaatggtgctggaacaaa

SEQ ID NO: 192133 - DNA, 410 bp, Homo sapiens
cctgtaccacctcttccacagtgaattgactagcctatctctgtaattaatagtatgctgaattaatgaagaaatgtgacatctgaggccagggcacagatgacactgtggcttctgcctcgttttcccgtcttgctcactctggcggaagccagccaccataccctgaggacactcttctaagactgctctctatttttgactacaaatgatcccccattgaaactgaagctggccttgggctgacttgagattgaacttggctgtttawcttaatgtactcagggtagaatttggtactatgattgttaactactgcacaagaagcaaaagagggtagagcaggaggtgtatgttcaagacatatttaattcaaatcgctttagtttatttcactgaaatcatataaa

SEQ ID NO: 192134 - DNA, 536 bp, Homo sapiens
gaacaagtgataaaatagtaatgcttaccactcaacaagttctacacataaataccagttatctaattagcttttaaatccttgatttgcaaatatgaatggacaattcagacagagacaaaagaaaccaaaaaaaggaacaatgcaagaacagaggaaaactttagaacactataaccgatataagaagacatgcaaacatgaaacaagaacaggatactattaaaaaattatcgttgaaatttaaaagaagagcagaaataactcatcccataaaggaattagaaaataaagctgaagaaatcacactcacaaagtagaaaaataatgagaaaaagataaaaattagagataaataataagaaaattagaagactgatcaagatggtccaatacacatattgtaggagctccagaaatrtcaaacagaaaaccaaggtattcatcagacaatattccagaaaatacactagaactgaagtacatgaatcaccaagatagaaaggattcactaagtattttacacaatggataaa

SEQ ID NO: 192135 - DNA, 625 bp, Homo sapiens
acagaataattacttactttgagagatgctaggaagttattggtcacatagggcaatcataatattctattgtgtatttgttgttttcttttagcatttattattgagcaatgaatcttgaaacaccaaaatactgcatatttattaagacaggagktcaaagccacaaaagaaaggagtaaacaaaagtgaagcatcactaagactattcacatcatattttttaacagaagacattaatgagaagaaatacatttttttgcctatctaaataacagttggtaaagacttttttgtactaaaatttaaatagcatttttaaatgtctttaggaagagatacaagaatgagactgtttcttaaataacgaatatattctgccaacgcatacaaatctacacagaaaaccagaatgggtcatccgcatgccatatttaccagtgcagggcaaataaatatgcttcatctatccaccatcatctgtctagattgagcttacaacttacatccctgacaccccactttttctaagtactcttatattatcatgttctgctcatgcctccataatatttgatgattgcatttgcctgtgttcttctctgccacccaaatgtaagtaagg

SEQ ID NO: 192136 - DNA, 625 bp, Homo sapiens
acagaataattacttactttgagagatgctaggaagttattggtcacatagggcaatcataatattctattgtgtatttgttgttttcttttagcatttattattgagcaatgaatcttgaaacaccaaaatactgcatatttattaagacaggagttcaaagccacaaaagaaaggagtaaacaaaagtgaagcatcactaagactattcacatcatattttttaacagaagacattaatgagaagaaatacatttttttgcctatctaaataacagttggtaaagacttttttgtactaaaatttaaatagcatttttaaatgtctttaggaagagatacaagaatgagactgtttcttaaataacgaatatattctgccaacgcatacaaatctacacagaaaaccagaatgggtcatccgcatgccatatttaccagtgcagggcaaataaatatgcttcatctatccaccatcatctgtctagattgagcttacaacttacatccctkacaccccactttttctaagtactcttatattatcatgttctgctcatgcctccataatatttgatgattgcatttgcctgtgttcttctctgccacccaaatgtaagtaagg

SEQ ID NO: 192137 - DNA, 602 bp, Homo sapiens
ggtcatccgcatgccatatttaccagtgcagggcaaataaatatgcttcatctatccaccatcatctgtctagattgagcttacaacttacatccctgacaccccactttttctaagtactcttatattatcatgttctgctcatgcctccataatatttgatgattgcatttgcctgtgttcttctctgccacccaaatgtaagtaaggggctacatcctgtttcagataatattcccaacactaacatagtgcttaagcacagagtagcctccaaaaagtacggattcaaaggacaaggattcaaaacatgacatttgactccctctctactgacaaagcatcttcctggattttagggagaatggcttgattattcctgatgacactctttaattcagagaagcaagrgcagaggcgaggattgactaaggggctaaaagggccacagacgacttgcactttcttctgaggattagcagcattttgatccattcagaattaggagaaagctctgtgttttgcccatagtgcaaactcttatacaacaaaggagccactgcagtgaggtaagaggatattttaagcattctctgctgagc

SEQ ID NO: 192138 - DNA, 530 bp, Homo sapiens
aatacacacacttacgcatgcatgcacataaacaatctagactagaaatyacaatcaaaatgattgctaataactgtaccctggtcactggcagagaaggctacgacaattatctaaacaaccttttaaaaagatgacatgttggaagcacttcatgttcaatcatttactgatgcttcattgatttatgtagtctaagtgcagaataacaattttttttttttttttaccacttttcagctcaacaagggattgaaaatactcattgcattaagtataccagtccatgtttggctacctaccagctactttcctctcctcactactaagatagcttgatcctctcttctagcccaattctgtattcctcacacagatgagattaaagaagatacttgtcaatactcagggtacttagcagcaagtgaaatatgctggcaattgtactcagacagaccttatgcctggctctaccagttggattaccatcgtattccttagaaccttaaaacaaattcccaccttaaatc

SEQ ID NO: 192139 - DNA, 530 bp, Homo sapiens
aatacacacacttacgcatgcatgcacataaacaatctagactagaaatcacaakcaaaatgattgctaataactgtaccctggtcactggcagagaaggctacgacaattatctaaacaaccttttaaaaagatgacatgttggaagcacttcatgttcaatcatttactgatgcttcattgatttatgtagtctaagtgcagaataacaattttttttttttttttaccacttttcagctcaacaagggattgaaaatactcattgcattaagtataccagtccatgtttggctacctaccagctactttcctctcctcactactaagatagcttgatcctctcttctagcccaattctgtattcctcacacagatgagattaaagaagatacttgtcaatactcagggtacttagcagcaagtgaaatatgctggcaattgtactcagacagaccttatgcctggctctaccagttggattaccatcgtattccttagaaccttaaaacaaattcccaccttaaatc

SEQ ID NO: 192140 - DNA, 530 bp, Homo sapiens
aatacacacacttacgcatgcatgcacataaacaatctagactagaaatcacaatcaaaatgattgctaataactgtaccctggtcactggcagagaaggctacgacaattatctaaacaaccttttaaaaagatgacatgttggaagcacttcatgttcaatyatttactgatgcttcattgatttatgtagtctaagtgcagaataacaattttttttttttttttaccacttttcagctcaacaagggattgaaaatactcattgcattaagtataccagtccatgtttggctacctaccagctactttcctctcctcactactaagatagcttgatcctctcttctagcccaattctgtattcctcacacagatgagattaaagaagatacttgtcaatactcagggtacttagcagcaagtgaaatatgctggcaattgtactcagacagaccttatgcctggctctaccagttggattaccatcgtattccttagaaccttaaaacaaattcccaccttaaatc

SEQ ID NO: 192141 - DNA, 425 bp, Homo sapiens
agcagtgaaaaatataattaaccagaatgccaaaagtggcaatttctgattggtaacaataggtcatattcattatatacttttttaacttttccaaacaataacaaaggtaaactttattataaaatgtatttctccttgatgtcataaatggccycagacactggaagtataaagcagctatacttttaacttcacaatatttctgtgcaagagatgtttcctttgagtcaatttaattcaaccaaagccccctcccatccaggctgatggaaaaattaagtcttagaaaaccatgtaactgtctcttatgataaagtcctgcaaaggctctgattgttgtataagcaacatagcacatgaagccccatctttcattgatacacagtggttactgctcaactgactggtgttcagaaagatct

SEQ ID NO: 192142 - DNA, 507 bp, Homo sapiens
tgtagacaagaaaactcaacattgtcaagatgtcagttcttcccagtttgatccatagagtcaatgcagtcccaatcaaaatctcagcaaatcattttgtatatatcaacaaactgattctcaaacttatatggaggggcataggacccaaactagccaacttaatattgaaggagaggaacaaagttagaacactgctactgcctgacttcaagacttaytgttaatctacataaccaagacagtgtggtattggtgaaaaaacagaaaaatagatcaatggaactgaacagaaagttaagagacagacccacataaatatagtcaactgatctttgccaaagccataaaggcaatacaatggcaaagagggtcttttaaataaatggtaatgaaacaactgggcatccatatgcaaaaataatgaatctagatgtagattcagatttaatttgaaccagatcttatatccttcacaaaaattagattataatggatcatagttct

SEQ ID NO: 192143 - DNA, 604 bp, Homo sapiens
gacacctaaccaaagaagatatgcaaatggaaaacaagcacttgaaaagatgatccacatcatatgttatttttgatttggaaactaaaacagcaatgagatactaattcacagctattcaaatggctaaaattgaaagcactgacaataccaaacattggtgaggatgtgaagcaacagaaactatcattaatttcagatgggaatgtacaatggtacaggtactttggaagacaatttggcagtttcttacaaaactaaacatagtcttaccataccatttagcaactgttctcctttgtatttacctgaatttgttaaaaacatatgcccactcaaaaacagcacatgaatgtttatagcagctttattcataattgccraaacttggaagcaatcaagatgtccttcagtaggtgaatggataaactgtggcatatctatacaatggaatattattcagtgataaaaaaagatatgaactatcaagtcatgaaaagtcatggaggaaactcaaatggatattgtgaagtgaaagaagacaattggaaaaggctacataccatatgatttcaactatatgacacctgaaaaaggtgaaagt

SEQ ID NO: 192144 - DNA, 471 bp, Homo sapiens
tacataatctggataacaggtaagctactgaacaccagcatgttggatagattctgtttactgctccagatcatcttgccatggttcttcacaatactctgtgcttctgagacagacctgatgacctatatcaatgggctcatttgtcctccagcttgtggctaagatactaggatgaaattacagggtggaaggagagtgagatgtaggmttttacccctttgatttcttctcaccattctattggttggcaatacccaagttcctcagccaaaggctgtctcaccagtcagccttctccttcacctgtggttcccaaagttcctgctcctgtctcttgcctcttcagacccagagttgtaaagactcccagcgctgatagtccttgggtgctttaccatccatttagtgtcaactttaacctttcttatgttttaataagcagttcatttattaaacttcttaagttgc

SEQ ID NO: 192145 - DNA, 471 bp, Homo sapiens
tacataatctggataacaggtaagctactgaacaccagcatgttggatagattctgtttactgctccagatcatcttgccatggttcttcacaatactctgtgcttctgagacagacctgatgacctatatcaatgggctcatttgtcctccagcttgtggctaagatactaggatgaaattacagggtggaaggagagtgagatgtaggcttttacccctttgatttcttctcaccattctattggttggcaatacccaagttcctcagccaaaggctgtctcaccagkcagccttctccttcacctgtggttcccaaagttcctgctcctgtctcttgcctcttcagacccagagttgtaaagactcccagcgctgatagtccttgggtgctttaccatccatttagtgtcaactttaacctttcttatgttttaataagcagttcatttattaaacttcttaagttgc

SEQ ID NO: 192146 - DNA, 471 bp, Homo sapiens
tacataatctggataacaggtaagctactgaacaccagcatgttggatagattctgtttactgctccagatcatcttgccatggttcttcacaatactctgtgcttctgagacagacctgatgacctatatcaatgggctcatttgtcctccagcttgtggctaagatactaggatgaaattacagggtggaaggagagtgagatgtaggcttttacccctttgatttcttctcaccattctattggttggcaatacccaagttcctcagccaaaggctgtctcaccagtcagccttctccttcacctgtggttcccaaagttcctgctcctgtctcttgcctcttcagacccagagttgtaaagactcccagcgctgatagtccttgggtgctttaccatccatttagtgtcaactttaaccttkcttatgttttaataagcagttcatttattaaacttcttaagttgc

SEQ ID NO: 192147 - DNA, 475 bp, Homo sapiens
attactttcaccagatgtgggaacaagatactcaaaactacatatgatataaaacagctggatatcagtaatatatgtctctccagcagtatgtacctaaatatctctatattataatgttatgttttatttagatacttagagttatggtcatgttatcaggaaatacatttcatgcagcatttagataattatttaggtaattagataatagcctattgcacaattggttacctttatatttgtcagccaacatacaaaatgtccacagaacatcacaaagcacttcaaactacrtatcagaaaaagatatgttgtctgtcctaccaaaggaatttcaagtattaagagaggcagaaagaaaattatgcttaaagacaattaagcattgtaattatgattcatatgaattaaggggaaatagaaaaggtagtgatttttttgggaaagtggacaaaaagtaagattccccaga

SEQ ID NO: 192148 - DNA, 475 bp, Homo sapiens
attactttcaccagatgtgggaacaagatactcaaaactacatatgatataaaacagctggatatcagtaatatatgtctctccagcagtatgtacctaaatatctctatattataatgttatgttttatttagatacttagagttatggtcatgttatcaggaaatacatttcatgcagcatttagataattatttaggtaattagataatagcctattgcacaattggttacctttatatttgtcagccaacatacaaaatgtccacagaacatcacaaagcacttcaaactacatatcagaaaaagatatgttgtctgtcctaccaaaggaatttcaagtattaagagaggcagaaagaaaattatgcttaaagayaattaagcattgtaattatgattcatatgaattaaggggaaatagaaaaggtagtgatttttttgggaaagtggacaaaaagtaagattccccaga

SEQ ID NO: 192149 - DNA, 564 bp, Homo sapiens
ttgttgattcttaatactgtttttggtctcaatttcatttagttctcctctgatcttcattattccctattttcttttttataactttgtgttcggattgtcctcattattctagtttctcgaggtgcaacgttggtttcttgtgatcttttcaaattttttgatgtaggcatttaatgytataaatttcctgcttaggaatgtatctgctatatctcagaagtttgggcatgttgtgtttccatttttacttagttcagaactttttcaattttcatcttaatttcatcactgtctcaaagatcattcaggaggatgttgtttaattttcatgtatttgtgtagcttcaaaagtctttcggattgatttctagtttcattacaatgcagtctgagaacatacttcatatgattttgagacttgttttatggcctaatatatgctctatctttgagaatgttccatttactgatgaagagaatgtatattctgtagttgttggacagaatgctctgtaaatatctagttatgtccatttgatatagaagtcaacttaagcccaa

SEQ ID NO: 192150 - DNA, 580 bp, Homo sapiens
gtagttgtgtagtattacttagtttccttctgtcttcttttatcaaaatgatagtattcaataaccaagtatctgaattttttgtacactatattttgccaattttctcaatgcctcttagctggaaattaaaggccatctgcccactatatttctaaatagagttttcttcaatttgtatgtccctatatacaaaaaagaagttcacatttttttctgtgtctgaacaatgttgacctgatttcagaataaataattccacaaaatctaatgatagaacacagaatactacatacaaaaatgaagattaaagtttaaaaactataatttcaaactattgatcartggtaatttgggcacctctaggttacttcacgggcatgtggaaaacaagcaaaccctttagagtgaatagaaatgattaataataacataatttaattcaattatttttcacaggtttactaagccaatattttctcttttaatcccctatggttggtctatacttctaatctgtcccttttgtttgatttgctcatttagaaattggtattacctctagttaagacagaattag

SEQ ID NO: 192151 - DNA, 507 bp, Homo sapiens
tgcttaacagttccatggcatgtagtcatttattacagaagttaatgcaggtaacgttaaagaatcaaagcatttacttrcttttattaaagactccaacttgttaactttagtatttgttaccttgtggcatctttttctagaaataggctcaaattcatttgttattttaattctaataacatgttaatttgatttcaaaatggcttaatcttaagcattctagcgtatttgtactgttgtattttatgacctaccttgtgtgaaatgaatctttacctgttttaaaaaaatgtttttagagacagggtctcactatgatgcccaggctggtttcaaactcctaaactcgagggatccacagccctcagcctcccaaagtgctgggattataggcataagccacaacaccaagccaaatctttatctttgcatgttcctcactatctaaggaaaaaaaaaaaaaggccgtataaagtggcccatgttattttccacataaagttc

SEQ ID NO: 192152 - DNA, 507 bp, Homo sapiens
tgcttaacagttccatggcatgtagtcatttattacagaagttaatgcaggtaacgttaaagaatcaaagcatttacttgcttttattaaagactccaacttgttaactttagtatttgttaccttgtggcatctttttctagaaataggctcaaattcatttgttattttaattctaataacatgttaatttgatttcaaaatggctyaatcttaagcattctagcgtatttgtactgttgtattttatgacctaccttgtgtgaaatgaatctttacctgttttaaaaaaatgtttttagagacagggtctcactatgatgcccaggctggtttcaaactcctaaactcgagggatccacagccctcagcctcccaaagtgctgggattataggcataagccacaacaccaagccaaatctttatctttgcatgttcctcactatctaaggaaaaaaaaaaaaaggccgtataaagtggcccatgttattttccacataaagttc

SEQ ID NO: 192153 - DNA, 507 bp, Homo sapiens
tgcttaacagttccatggcatgtagtcatttattacagaagttaatgcaggtaacgttaaagaatcaaagcatttacttgcttttattaaagactccaacttgttaactttagtatttgttaccttgtggcatctttttctagaaataggctcaaattcatttgttattttaattctaataacatgttaatttgatttcaaaatggcttaatcttaagcattctagcgtatttgtactgttgtattttatgacctaccttgtgtgaaatgaatctttacctgttttaaaaaaatgtttttagagacagggtctcactatgatgcccaggctggtttcaaactcctaamctcgagggatccacagccctcagcctcccaaagtgctgggattataggcataagccacaacaccaagccaaatctttatctttgcatgttcctcactatctaaggaaaaaaaaaaaaaggccgtataaagtggcccatgttattttccacataaagttc

SEQ ID NO: 192154 - DNA, 596 bp, Homo sapiens
ggcccatgttattttccacataaagttctcacttccttcatctctgtttcattattcttaaaatccctttaaaaagcctgtaattgattatttgaaataatcatatgtaaacttttctcacaccactaagcttactgagtacataaattagggtaggcattttgacattagtgtagattggccgtaatcaccatcatctcactgatgcccaagtttgatgtatcttttttggattaacatgaatttccttctttttgttatcttttttgaaatttwcactcactgtagaagaatgatttctttttaattgaaaggactactttttattcaaagacattaaagtgtacatagatagaactatttttttctttaagattcagcattatgaatttcttttttcaaaaaaaagtaagaattcacacttccagttggctctcaattatgtttaacaaattataacttgattattccatagtaagatatcatcatataatcacaattattctcattataatcactaccatgaccaccatgatcaccatcatcttcctcctcctcatgatcatctaataataattatataaaactgaaaaaga

SEQ ID NO: 192155 - DNA, 453 bp, Homo sapiens
tcatttccttcagtctctgtgtacatgtttacaatttgtaaaaaatttaggtcatgcattatttataattggttatgctattttatctaaaaaaatgctgccattaactattcctacaacattattttaatgccagtgtaatatttcactttatgggtgatgatttatttttaccaatcttctacttttcaaatttagactgtttcaatcatcttttattcttatgtaaaatgaccctttctctgcatatgtttygtgtgttttgttatttttttctttaaagtaggattactatatcagaaattgtaagaattttaatacattatgtatatagaaaattagcctttaaaaatattgcagtaacttacattcccatagcactgtatggaaagccagagctctaaatattaaccaattttatgtctaacagttactacatgacattagaattaa

SEQ ID NO: 192156 - DNA, 453 bp, Homo sapiens
tcatttccttcagtctctgtgtacatgtttacaatttgtaaaaaatttaggtcatgcattatttataattggttatgctattttatctaaaaaaatgctgccattaactattcctacaacattattttaatgccagtgtaatatttcactttatgggtgatgatttatttttaccaatcttctacttttcaaatttagactgtttcaatcatcttttattcttatgtaaaatgaccctttctctgcatatgtttcgtgtgttttgttatttttttctttaaagtaggattactatatcagaaattgtaagaattttaatacattatgtatatagaaaattagcctttaaaaatrttgcagtaacttacattcccatagcactgtatggaaagccagagctctaaatattaaccaattttatgtctaacagttactacatgacattagaattaa

SEQ ID NO: 192157 - DNA, 609 bp, Homo sapiens
taataataagggagcaagtaagtaatagatttacacttaaatacatgagtttgtgccattttccccagtaataattgggccattattactttctcttgtgtgtcatcattctgataatctcttcctatcttcctttctcttccataatttatttttaacaagaaaaagttaacgttcaactttcataaaagctctttatactttttcattctgcaaatattccttctccatcagtgtcacacatactcattatactattccaagaggcagtaattgttgggtaattatatacaaatcctacataatattttaatgctttataatttaaagacatgtttatgctttcttttttcttgactcctgtaacagtacaaggactgctttagttgattaagaaatagtttttatcgcaaacttgtgacaaattcaacaagtagtaagtagaagatcatgaatttgaataaacttgggataaaaaggagaaggtaaaaacgtgaatctttgcttccaacatagaaaaattcttctcaataaaaggycaaataaaatggatacataagaaaatagcatatgctgcctaatgctttttgtcataagaaccagaacgct

SEQ ID NO: 192158 - DNA, 548 bp, Homo sapiens
aactagggggctgaatttttaaatgacctctacaggctctttgaattcaaaaattatgtaatctgatttcatgtaattcatcaattttattytcacaagtaaactactactctcacttatctatcatttttttctgattaagctaacaactttgttgagaacacaaaatcttggtgcagttatataaattcatgcaaaatacttgagattaagggtaatacattccctttgagaaacctgaggtgataaaatagagtagctctgcttatctaacagggatacattccaggacccccagtggatgcctgaagctgcagatagtatcaaacctatatacatatattgactttcatatacctcacacctctgataaagataattgataaattaggcacagtaagaacttaacaacaatagttaataataaactagaactattataacaatatattgtaataaaagtaatgtgaatgtactctctctctctctcaagatgtcttattgtatgtaatattttcagaacacagtaaccatgggtaattaaaacc

SEQ ID NO: 192159 - DNA, 564 bp, Homo sapiens
gggtaaaagagggagaccttgtctctaaacaataatacaataataaataataaaaccatttccttttctctccttgaaaccaacaacttcagtatatttatgtgtacatcagtagttatctctcattgagatgacattcagaaagttcttctaayggttcaaacattgtatttatatctcccatagctacaaatttacttatactgatgctaagaaatattgttaaagattagcataactatctttatggcttgccttgctacaatttttatccaactgcaatacattattaagcattgttaattgaaaggaattttatttaaaaaccttggaagtttaaattttgctcagcagcaaatatggctcacaatttccaaaggctttcattgttttaatgtcaggctaagttcttagcaaggcctaccatgtatacacagaaataaagtagattagaatgctgtgtttgccttccatattaacagaatgaccacccattagagtgaataacttgtttgagaaattctgtaaaacatgggagaacactttttgttctagcttctttga

SEQ ID NO: 192160 - DNA, 540 bp, Homo sapiens
taaaatatttttatttccctcagaatctgctattgatcatgtgatgccatactaaggtcaggctgaaacttgctttcttaaggcatttttcctacaaaaatgtcttwaaaatatctgttttaatgttaatgctggtcagctgtgcctgagttccaaaggaaggagggcataaaggtgcatgtttgacttcctcttcctatcatgacctgaactagtttttcaggttaactttggaatgcactttgcagaaagaatgtgtccattcagatggttgggggagcttgtgattttattttttagtttacaattcatttgataaaggtctaatatccagaacatatgaagaataattataagtcaacaacataggatcaacatcccaattagaaaatagccataatacttaatggacatttccccaaagaaggtatacagatgggctaaagacaataaagagattctcaacattattactcattagggaaatgcaaatcaaaactaatgagacaatattttatatccactagcattgcaataaca

SEQ ID NO: 192161 - DNA, 531 bp, Homo sapiens
gcttgtgattttattttttagtttacaattcatttgataaaggtctaatatccagaacatatgaagaataattataagtcaacaacataggatcaacatcccaattagaaaatagccataatacttaatggacatttccccaaagaaggtatacagatgggctaaagacaataaagagattctcaacattattactcattagggaaatgcaaatcaaaactaatgagacaatattttatatccactagcattgcaataacaataatactactgaaaataactcatgttggtaaggatgtggagaatttggaagcctcrtgatttcctggtcagaatatagaatggtttagcctctatgaaaaaaagcctggtagttgctctaatagttaaacataaaataaacctatgacccaaaactgccactcctaggcctataccccacataattaaaaagaggtactcaaatacatacatcttcacacatgtcacataagtacttttacaatagctgaaaggtggaaacaacttaag

SEQ ID NO: 192162 - DNA, 472 bp, Homo sapiens
actgcactccagcctgggtgacagagcgagactccatctcttaaaaaaaaattaaaagagtggttataagaaatgggagacataaaagaagaaagaagatgaagacaaaagagatattacctatacagcacactaatatayattagtttagtgaatctgcaaaataactaactcagtttctacagaagaagtttacgttaagttaaataacggctgcatgtggtaaacagtaagcaatttcaagagtaactcagatatagactaaatcccaattgtcctactattgattttatggtttggcaaactatttgattctctgagttttgacctcatcagatatacaatgagataaataatgtttgcattaaaattatattagagaagaaaataacaagtataaaatgcttaatacaatgtgtagctcatagtaaatgatcgtatacatgcatttgtctctctttgcaatgccaca

SEQ ID NO: 192163 - DNA, 430 bp, Homo sapiens
gaattattattattaattttggtgacatttggttgcagaaagtttgaagggcttgttatatatccaggtagatctggcagttggttatacaaggttaaagaaataatttggaaatgaagatttaatttgggagccattgacttattgattgcactcacctgaaaagtgagtaccaaaatgcaggagcygaggtttggaatgttcccacatttggaggttaagaaaaaagttaagggaaaattgcaaagatactgaaaatgtacagagaatgagatagaaagaaaatcaagaaagcaggtaccaaaccccagtgtcccagaatttaaccttatttagagataggatctttaccgattttaattactaaatataaggtcacactgaagaatgataagcccctaataagatacagttattatttttatacaaa

SEQ ID NO: 192164 - DNA, 644 bp, Homo sapiens
actcacacactcaatttgtatgttttcaagcaaatccagtattcgtgggccttaggctaataaaatgctggactctgtaagaattataaaacaaaataaagatatttacattatgtagaattagaaaagtaattgcagcaaattgtaaacacatttttactaacataaattttacaaacatatgycaatccatgtacacattgtgagaaccctttccagggtcacagaaaaagctctgtctggaaggcctgaagtttaatacatttgctcatggcaaatcctcctttatccgtaaaggatgtccactaaagtgtctaataacactctccggttcttgagatcaaatgagaattaggacttgatagagcagaaattgaatactacaaatctgactaatattcctaagctagggcataattttcatgtggatatggaatgctatctatatggacccccacactaaaaaaaaaaagagttagggaagatataacaaaaggtgaaaatattagctttgccgtgaatacatgacatatttattagatatgttatattcattgcatgtgttatataaccatgtgcttaaacaaacaaacaaaaaagcatggtatttgggcagttttctaaagctaaattcctggcactaa

SEQ ID NO: 192165 - DNA, 570 bp, Homo sapiens
agttaaatggcttaaaattgggaatgtaaatttgtacagcctctatgaaaaatagcacagagattatttaaagaactaaaagtagatctacaatttgatccagcaatctcactactttcttgtcccaaaggaaaakaaatcattatatttaaaagtcacatgaacatgtatttttattgcaaaccaattcacaattgcaaatatataaaaccaaactaagtgcccatcaaccaatgaatggatagagaaaatgtggtatatatacaccatggaatactactcagccataaaaaaaatgaaataatttcttttgcagtaacttggatagagatcaaggtcattattctaagtgaagtaactcaggaatggaaaaccaaataccatatgttctcacttataagtgagagctaagctatgaatatgcaaaggcacatagagtgatttaatggactttggagactcagaagcaggtggctgagaggggggtgtgggctacaaaagtatatattaggtacaacatacactatttgagtgatggtacactaaaatctctgaatttatcactatata

SEQ ID NO: 192166 - DNA, 589 bp, Homo sapiens
gagatctcaaccaaccctctggatttcacatctggccttcaactctcaagcagttaggyttaggaaatgctaggtgctccaccctgatgggtagccaggtggaaatcgtgctcccgtaggccttcctgtcttaatcaggagaccaggtgtctgtcccttcagggtagggtgagaacagagaagaaagcaaggtgggtgtgaatgacaaatgaggcatctggaggcccaggaccgtggctccctgctccggtgggaaaggcttcccagagagtcgggtctgagtggggccttgtgtgagggccagcatttgactgaaggaggagagggctcaggcagggaatgaggagggagcagtccggacttggaaagctgggagaggcatctgacgggagaaggcagatgtgctggctggaagccgtcttctgggccctggccctgggtttagaggcctggagttaatctgaaaggcagtgggaggccgctccaggggcctggacagttgtggtaagagatgacttgtaagatttgcagggggagggtgtgcagagacagaaggagctgggagcggaatggcaggcctgctaggggc

SEQ ID NO: 192167 - DNA, 594 bp, Homo sapiens
cccatttttaaattgaattgtttgttttttgctgttgagatgtttgagtttcttgtatattctggacattaatcttctgttgtatgaatagtttgcaaatattttatttcattttataggttgccttttcactttgttggttatttaatactacccaaagcaatctacagattcagtgaaatctctatcaaaataccgatgatattcttcacaggattttttttaatcataaaatttgtatggaaccacaaaagaccccaaatagccaaaacgattctgagcaaaacaaacaaagctgaaggcatcacactaccagacttcaaaatatattacaaagctgtagtaactaaaatagcatgatgttgttataaaaacagacacayagaccaatggaacagatgacagggtccagaaattaatccacatatctacagccaacatttaatttttgacaaaggcgccaggaacagtcattgtgggaaggacaatatcttcaataattagtgctgggaaaacaggataactatatgcagaagaatggaactaggtccctgcttctcttcctacacaaaaatcaactcaaaatgaatcaaa

SEQ ID NO: 192168 - DNA, 594 bp, Homo sapiens
cccatttttaaattgaattgtttgttttttgctgttgagatgtttgagtttcttgtatattctggacattaatcttctgttgtatgaatagtttgcaaatattttatttcattttataggttgccttttcactttgttggttatttaatactacccaaagcaatctacagattcagtgaaatctctatcaaaataccgatgatattcttcacaggattttttttaatcataaaatttgtatggaaccacaaaagaccccaaatagccaaaacgattctgagcaaaacaaacaaagctgaaggcatcacactaccagacttcaaaatatattacaaagctgtagtaactaaaatagcatgatgttgttataaaaacagacacacagaccaatggaacagatgacagggtccagaaattaatccacatatctacagccaacatttaatttttgacaaaggcgccaggaacagtcattgtgggaaggacaatwtcttcaataattagtgctgggaaaacaggataactatatgcagaagaatggaactaggtccctgcttctcttcctacacaaaaatcaactcaaaatgaatcaaa

SEQ ID NO: 192169 - DNA, 604 bp, Homo sapiens
acattcatagaattaaggtgaattttttcaaggtatcatagctggtcaatgacagaatgaagatttgtttgactccagcatttatccactttctacacactatcttcctctttgcaaagttttaaattccagaaagtttagcagcctccttgctatctgatgctgattaattgggtggaatagagtctattttttaaatctcactcaaagtattcactgcaaagctgccgtgtgtaaataattgtgtgtgtgtaaaatagatgctttctgtaayttgtgagtaatgtattatgggtccaattgcattttaagaatcttttagcttatcctaaatcctcatggcacttttaatctagttttcattgtgtgtcagtaaataatcctggtgagcaagactaaagatcaagtgctagccctggctttgccatatatttgctttgtgtcctaggaaaagacatgtcaagcctctaaaacttagcttatttatctgtaaagtagagtaatacacataccctattcacctcacaggattgttgtatatgttgaatgagataatgaatatgaaaagcttaggaaaccacagtcatacatagaaatgtatcat

SEQ ID NO: 192170 - DNA, 604 bp, Homo sapiens
acattcatagaattaaggtgaattttttcaaggtatcatagctggtcaatgacagaatgaagatttgtttgactccagcatttatccactttctacacactatcttcctctttgcaaagttttaaattccagaaagtttagcagcctccttgctatctgatgctgattaattgggtggaatagagtctattttttaaatctcactcaaagtattcactgcaaagctgccgtgtgtaaataattgtgtgtgtgtaaaatagatgctttctgtaacttgtgagtaatgtattatgggtccaattgcattttaagaatcttttagcttatcctaaatcctcatggcayttttaatctagttttcattgtgtgtcagtaaataatcctggtgagcaagactaaagatcaagtgctagccctggctttgccatatatttgctttgtgtcctaggaaaagacatgtcaagcctctaaaacttagcttatttatctgtaaagtagagtaatacacataccctattcacctcacaggattgttgtatatgttgaatgagataatgaatatgaaaagcttaggaaaccacagtcatacatagaaatgtatcat

SEQ ID NO: 192171 - DNA, 554 bp, Homo sapiens
aaaatataaaacacgaatcagaaatatttcttaaatttcaaattcaatattagaattgatataaatttcagacattacacagttcaatgccttcattgtacaaatggaaaaaactgaggcatagggaaatgaatcactcagaaaaactcacaacataattactcaacttggagcagacttcaagccttttcacttctaaatcccttttccagaggattttgctagattgattcttatcaactgtgtggctatcacctgtattttcagtgacactacaatggctcatctaccgtgtctaagatggggttaactaattaatcaaggtatgtattagccagattctgaacattattattaattccagtgatagctattctctaataatgccaccattgtgtttcagagcagatagactcaaagacaatcatgtatttacccagttgtagtgttatatcccttctaacacatttactgatatttttattcatctcaccaayaacaacacacagcattaaaaaaaacctggcaatattaacctaaaaaatggaaaggaa

SEQ ID NO: 192172 - DNA, 500 bp, Homo sapiens
atgatactgtcagcaaagagatataatttaacttcttattttcctatttggatgcctttgatttctttctcttgccygactgctctggctaggacttccagcactatattgaataggagtggtgagagtggacatcatgtcttgttccagttttcaaggggaatgcttccaacttttacctattcagtatgatgttgcctatagatttgtcatataaggtcttattattttgagatatgttcctttgatgcctagtttcctgtgggtttttatcatgaggggatgttaaattttattgaaagcttttcctgtgtttattgagatggtcatatggtttttgttaattctatttatagagagaatcacatttattgattttcatatgttgaaccaaccttgcctcctaggaaagaagcttacttgatcatagtaaattgactttttgtgtgctgctggatttggtttgctagtattttgatgaggatttttgcatttatctt

SEQ ID NO: 192173 - DNA, 572 bp, Homo sapiens
attactcaagtgagtactttaagataaaccatggaaaatgctgcaataaatacaaactaaagttgtcacttttgaaagagaaagtgatcatatccagttgaaaaatatcagagaaaatctcttaaagtgagtgatatttgaattaaacaatattataaaaattttcctttctaggccgggcgcggtggctcacgcctgtaatcccagcactttgggaggccgaggcgggcggatcacgaggtcaggagatcgagacyatcccggctaaaacggtgaaaccccgtctctactaaaaatacaaaaaattagccgggcgtagtggcgggcgcctgtagtcccagctacttgggaggctgaggcaggagaatgacgtgaacctggaaggcggagcttgcagtgagccgagatcccgccactgcactccagcctgggcgacagagcgagactccatctcaaaaaaaaaaaaaaaaaatttcctttctatcattttgtgtataaagcattaaagatataaaatattttattaagaacccgctgaaaatagaggtcacatgataaatttcacagtaaac

SEQ ID NO: 192174 - DNA, 618 bp, Homo sapiens
tattgactagtcacttctttatttatcactttgtcttattttaaggatcttaatataataatttcctcattttgaatgctacttactataaaaatttgatggaaatattttaaatttgaggctggtgaatttaattgacatgaacatgcacttcattatatgaagttgcaacaagaagtcaacttttggaatgtgaaaaaaaaaaggggtctaattaggaaaccaaagtcaaaacaaagagccaaaatcagagtaccaggttagatcaacagcaaggagtctaagactaagtagggtcaaatcatgaaaagtggaacaaatattggagcaccatgaaccaggagtatcaggagtgttaactttagcttataagtgaaattgttctcctctgtaaaattgggcaggtttgcttgccttrtcttctaagcaataagtgtgtatatgagtgagttcatattggagacagagtcatccagttaatcaccaacaatggcaccagtttgacagagctacctttgctgtctctgctttctcaaaaaaaaaaaaaaaaaaaaaaaaaaaattttttttatatatatatatacacacacatcctactatagtttacacaataggtaa

SEQ ID NO: 192175 - DNA, 622 bp, Homo sapiens
ttttaggtatacaacacagtattattgaccttaggcatgatttaatacagtagatttctagaaccacgtataatttgtacaggcattgaatagcagctccctatttctcccctcccctcaactcctggcaaccaccattctattctctgcctctgtaagtctgactattttagactcctcatataagtgaaatactgcagtacttgtttttctttgcatggattatttcacttagcataatggcttccaggttcatccatgttgttscatatgacaggattttccttaaaggctgaataatattccattctatatttatacctcatgttttagctattatgaatcatgctaccacaaacaggggagcgcaaacaatctctgagaccctgttttcaaatcttttggatacatatccagaagtagaattgttaaaccatatggtagtcccatatttacattttgaagaacctctatgctattttccatagctgctacagaattttacattcccaacagtgtacaggattctaatttctccacattcttaccaatgcttgttttcttattatccagcaatccccccactgggtatataaccaaaggaaatgaatcagtatgttat

SEQ ID NO: 192176 - DNA, 607 bp, Homo sapiens
gtcttctgtctttcctgaatttatgtctctctatgctttttcctgaatattttcttctctggtgttttgcaattttgcattctttctttatctacatgtactttgttttaaagtccatccagtgggcccttaaatttggttcagagaatagaaactctttttgtcagggtcatcagacttttacctttgctaaatccaatgctcactctctatttatcatcatattggacctataatcagcaagttctrtgcttgatcacccaatcccaatagaaaatatttttttttcacataacctccttgatatcctatttttcttgttttttaaaaatggaattctagtaaaacttgacagagtttagcggcaatttccattctgctagaaccctgcgaataagatattattttcactacctccaattgcactgaaatctgatttgactgtaaaaaagttcaaatccatggggcatttctactatatttatatattttttaaaaaaccaaaatatttatgttaaaaggttatggagttgacttctgtgtatttcatgaagagccaaatttcctaccaaattctcatgatatgaactcaaagtttaaaaactac

SEQ ID NO: 192177 - DNA, 558 bp, Homo sapiens
aagtcctagctagagcaatcagataagagaaagaaataaaggacattcaaatcagaaaggaagaaatcaaattgtcactgtttgtagataataagatcttatatttggaaaaacataatgactccaacaagaaaactgctataactgataaacaaattcagtaaagttgcaggatataatactaacatacaaaaatcagtagcatttttatattccaacatgtaacaatttgaaaaagaaaaaagtaatccaatttaaaatagctacaaataaaatcaagtacctagaaattaatttaaccaaagaagtgaaagatctytacaatgaaaactataaaacattgctgaaagaaactgaagataacacagaataatggaaagtcattccatgttcatggattggaagaatcagttttgtttaaaatgtttgtactacccaaagcaatctacggattcaactcaatatctatcaaaatgccagtggcatttttcacaaacatagaaagaacaatcctacaagttatatggagccacaaaagacctggaataccaaagctat

SEQ ID NO: 192178 - DNA, 628 bp, Homo sapiens
taattaatgggtacaaaaatataattatgtagaataaataatatatagtatttgatagcatgacggtgaatacagtcaacaataaattattgtacattttaaaataaagagtataattgaattgtttataacacaaagaaaggataaatgcttgaggtgatggatacgccatgaactatggtgtgattaatatgcattgtatgcctgtattaaaatatttcacataccccataaatatgaacacctactatgtacccacaaaaattgaaaatcaaaaaaaaattaaaaaatcaaaaaagtaaaaaactataaaaaagttactaaatagcaagtaactaaaaaaagttactaaacagcamgttccttgctatttagcaaggatataggtgactgagtactataaaaatatgtagacaataacagaaaaaagagaaattaagagaaatatatcaatatggtaagagtatgcagcatggcatggttgaaatagtcctggtatttgtagttgtaagatgtttcatttttcctatagcctgttaatatgtgtttgtatgatcatgactaaatcatttaaattcactcatatccagacctgaaaattaataatgataataataaaatccctatt

SEQ ID NO: 192179 - DNA, 594 bp, Homo sapiens
agataatttacattaagattaaccatccaagcaaagatcaattaaaaaagcaaaaagaaacaaggctgggcaccatggctcttgcctgtaatcccaacactttgggaggccaaagtggtaggattccttgaagtaaggagttggagaccagcctgggcaaaaaaagaaaaaaaaaaaaaaagaaaagaaagggaagaaagaaaatggggagaccctgattctacaaaaactacaaaaataaaaattggctgagtatggtggcacatacttgtagtcstagcttctcaggaggctaaggcggaaagactcttgagtccaggctgcaactatgtcaactatgattgtgccactgtactgcagcctgggtaacagagcaagaccctctctcaaaaaagcaaacaaaaaagaaacaaacattgagggtgagtaggactagatacctgttccttcaggattcagaacaataaaactaagcataacaatgagaagttgcctttagattagggaggctgaacaacagaatgttaacaagatgagagatgctgcagattatttgagacgaatagcctgagcaacaagaaattgcattttaaa

SEQ ID NO: 192180 - DNA, 399 bp, Homo sapiens
cagatagacttttaaattacaattataccatgtagagaaaatattagtatttttaagtttaatttacagtcacagaaaatgctacctcattaatccaagaagaccaagagtccaaagawaacttaaattagtaagtctttttcttagtcaacagtgtctttaaccaaattttacattttgttccaattttctttgtctcctttgttgcaatttaatatgttttatgagcatcattcatctagaaaattgctgttagagtagaaaataatataacctggagtaacattgctgtttaccacaattatataaaaaataaagtttttaaacaatttttgatactgtgatcatctggcctagaaaatgaaaagttattttgcttttctcaaaacttacagaatt

SEQ ID NO: 192181 - DNA, 489 bp, Homo sapiens
gttaatgtcaatattagcttttcaatgtttaatgtgactccatatctaattgctctcacaaaagagtaaggaatatatatatatatatatatatatatatatatatgtagttatccatcctccctttttaatgttatgttagctggtatttagttatccataaattgtacacccataaaatttattctatcatttcatactatcagcatttagatgtttgaaaccttctaacactttttttgtacttcactaatttttgtcttttaaccctttaatcaaaggccacattttcttctatgttaatttgctaaaatgatgttaatttgttatgcagcaaaagataactctacctttttattataatatgataatcaccaatttttaaacaastgatatttattataatatatttggattttactattataattcgttgttttatttgttccacttttatcttccttttattctcccttcctgtattctatt

SEQ ID NO: 192182 - DNA, 596 bp, Homo sapiens
tgttgttgttgttgttgttgttgttgttgttgttggttgggagtcaattttttattcttaacagtagtctttgccagttattaaagatgtatgtaatttatccatatctgtcattttgttgatattctgctctataattctaaaatggctgtgtacttatatttatcaatattttctttcttttcattgttggtggcagtataaattaattcatccattgtggaagattccttaaaaacttagaggcagaaatacaattcaacccaccaatcccattactgggtatatgagcaaaggaatataaagtgttttttaataaagaaacatgcgcacatatgttcaytgcagcactattcataatagcaaatacttggaatcaacctaaatgcccatcagtgataaactggataaagaaattgtggtacatatacaccatggaatactatgcagccataaaaaagaatgaaatcatgtcctttgcagggacatggatggatctggaggtcattatgctcataaactaaggcaggaacagaaaaccaaatgctgcatattctcacttacaagcggaagctaaattatgagaacacatggac

SEQ ID NO: 192183 - DNA, 562 bp, Homo sapiens
ggtagccaggcagtattcatcatgagccttgggtgagactcagagacatgttggcttcaggtgtgacccagaatatttccagctgtggtggctatggggagaaactcctgcttgagaaaagtggagaggagagtaaaagggatttcatcttgcagcttaggtaccagcttgacaacagtggggtagagcaccaagggggctcttggtatccctgattccaagcctgggctcttggatagcacttttgaacctgccctaggctagaagtgagcccactgccctgaagggagagtcccaggccaggaagcattcaccgcaagctgactgcagagcccttgatccatgagtgaatattagcagtaaccaggcaatactcactgcgcgcctgggatggtgatggccagagggaaagactcatctgtgcatggaaaggggaggaaatagtgggaaggactttttcttgtggcttgaktgccaactcagccacagtagaatagggtaccaggtagattcctaaggtttctgactccaagccctgcctgactccagaacagtatctctg

SEQ ID NO: 192184 - DNA, 607 bp, Homo sapiens
ggagaggagtgcctggagaggaagcaaagaggggkttagcaagtcaatgtaagttaagaaggctaatccaggccgggcgcagtggttcacgcctgtaatcccagcactttgggagaccaaggccggtggatcacctgaggtctggagtttgagaccagcctggccaacatggtgaaaccccacctgtactaaaaatacaaaaaattagccgggtgtggtggcaggcgcttgtaatctcagctacctgggaggctgaggcaggagaatcgtttgaacctagggagcagtgagccaaaatcacaccattgcattccagcctgggcaacaagagtgaaactccatctcaaagaaaaaaaaaagaaggctaatccagaggcagaagcccaccccaaatggcaatggaatggattccaaggggatagttttgatgaattatgttacattatttaaagattcagagtaaaggatgcctcaggactttgtaaatcattagagaggcaacaagaaagtgtgtatctttccactgattcacatgacaccaacttccaggaattaataaaagaaagtttaaatatcttggtaataactcacaaatttcacacacaca

SEQ ID NO: 192185 - DNA, 539 bp, Homo sapiens
aaatatttatgactttttcctcctcctcccacttttatttttctaccacttgtgagaaatcatgaaactcaaagatttgtttctcctaatacatagattcaaaattaatattctcaatagaatcagcttcacaatttaggatttaaaaattattatgagttaaaagtatcaatttcattayattcatcaccacttttatcttttaataaaaattttgaagactttttaacaataagacatttaacaataacgtaattaatgtgaaatattattcaaaacaaactatactttgttaagtgaatgttattttagggaaaatgactaaacacttgtgggacattatggcagttctaaacttgtttgcagattctttgacattcctcctattgagaagaggggacatttctcctattttccctccctttgaacgtgtgcttaccttgttgacttacttctaacccatatagtgcaggagaagcaatagtgtgacttataaaagctgggtcataaaagaataatacagcttcaaccttgtttac

SEQ ID NO: 192186 - DNA, 536 bp, Homo sapiens
cacagtgtgggagtgggcccgagcataagggctcaaagrctgcattacaaaatttgggggagtttaaatagccccccagaggattcaattggttactttgggtatgccctatgtaaatggagaggatgaagtaaagtgacaaactcatttacggtttacatcctatgaagaggatatttcctgttatagctgaagtgtgaattggccttatgttttatgcctccagaccctatttcctgcctcatctcccccctgagagatgttatttacaatgaatctttatgggaggcagatggacctattgtcctttttctgtagcttcttcatgctggctcgggacatagtccctacctaccggggatcaccgaactgctctatccagtggaggcagggtagcttcttgatggccagggatgatgtcttcgcctgtacctggctggaacctttgttgaatgatcatctgaaacttgacagtatctagtgagaggaaataaatttggttaaaagatttaatgggaacttcagagggtggatac

SEQ ID NO: 192187 - DNA, 536 bp, Homo sapiens
cacagtgtgggagtgggcccgagcataagggctcaaaggctgcattacaaaatttgggggagtttaaatagccccccagaggattcaattggttactttgggtatgccctatgtaaatggagaggatgaagtaaagtgacaaactcatttacggtttacatcctatgaagaggatatttcctgttatagctgaagtgtgaatyggccttatgttttatgcctccagaccctatttcctgcctcatctcccccctgagagatgttatttacaatgaatctttatgggaggcagatggacctattgtcctttttctgtagcttcttcatgctggctcgggacatagtccctacctaccggggatcaccgaactgctctatccagtggaggcagggtagcttcttgatggccagggatgatgtcttcgcctgtacctggctggaacctttgttgaatgatcatctgaaacttgacagtatctagtgagaggaaataaatttggttaaaagatttaatgggaacttcagagggtggatac

SEQ ID NO: 192188 - DNA, 536 bp, Homo sapiens
cacagtgtgggagtgggcccgagcataagggctcaaaggctgcattacaaaatttgggggagtttaaatagccccccagaggattcaattggttactttgggtatgccctatgtaaatggagaggatgaagtaaagtgacaaactcatttacggtttacatcctatgaagaggatatttcctgttatagctgaagtgtgaattggccttatgttttatgcctccagaccctatttcctgcctcatctcccccctgagagatgttatttacaatgaatctttatgggaggcagatggacctattgtcctttttctgtagcttcttcatgctggctcgggacatagtccctacctaccggggatcaccgaactgctctatcyagtggaggcagggtagcttcttgatggccagggatgatgtcttcgcctgtacctggctggaacctttgttgaatgatcatctgaaacttgacagtatctagtgagaggaaataaatttggttaaaagatttaatgggaacttcagagggtggatac

SEQ ID NO: 192189 - DNA, 599 bp, Homo sapiens
tgttgaaaagaagtctgcattttcatgttcattgcagcattgttcgtaatagccaagttatagaataaaccttagtgtctatcaacagatgaatgttggcatggatgtggagaaacagggatgcttatgcactgttggtgggaataaagaaagatatgaagatgaatgaagaaagataaagtggtatatawaggcatgttttatttaattccacttcacagttattgccttttttttttttttgcaaattgaaggtttgtggcaatcctgcatcaaccaaatttatcagtgccatttttccaacaacatgtgttcacataatgtttttgtcatattttggtaattctcataatattttaagtcttttcattttattatatttttcatggtggtctgtgattagtgatcttactattgaaattgttttgagaggctaattatgcccatataagacagtgaccttaatgaatatacatgcatattttgactgatctactttctggctattcctctatctctctccctctcctcaggcctccttatttcctgagacataacaatattaaaattaggttaattataagccaaaagaacaaagc

SEQ ID NO: 192190 - DNA, 599 bp, Homo sapiens
tgttgaaaagaagtctgcattttcatgttcattgcagcattgttcgtaatagccaagttatagaataaaccttagtgtctatcaacagatgaatgttggcatggatgtggagaaacagggatgcttatgcactgttggtgggaataaagaaagatatgaagatgaatgaagaaagataaagtggtatatataggcatgttttatttaattccacttcacagttattgccttttttttttttttgcaaattgaaggtttgtggcaatcctgcatcaaccaaatttatcagtgycatttttccaacaacatgtgttcacataatgtttttgtcatattttggtaattctcataatattttaagtcttttcattttattatatttttcatggtggtctgtgattagtgatcttactattgaaattgttttgagaggctaattatgcccatataagacagtgaccttaatgaatatacatgcatattttgactgatctactttctggctattcctctatctctctccctctcctcaggcctccttatttcctgagacataacaatattaaaattaggttaattataagccaaaagaacaaagc

SEQ ID NO: 192191 - DNA, 339 bp, Homo sapiens
ggttcataaggttgaaggaaagaagccatctccacaacatagaaggatatgtgaaccagcaaatattgatgcaaaagttgcagcaaattatttagaagatttaactaagataattgacaaaggtggctgcagtaaayattttatttttaatgcaggttaaacagccttatattggaagaagatgacatatataatagaatattcataacagagagaagttaatatctggcttcaaagcttcaaaggacaggctgattctcttgttagaggctaatccagcttgtgacttaaaggtaaagacaatgcttatttacctgtctgaaaatcctagagccttta

SEQ ID NO: 192192 - DNA, 523 bp, Homo sapiens
agtttcatacagcagagacacaattgcagtgctgagtgcagcagggaatgtctgcaccactactccagtcaggaagacttcatgccaataaaggatcttggagacaagattcttgttccacatcccccttgtctaccaccgcagacacaactgaggcttctcccatgagacttcagcatgaatgcacctatagacagcctttctgaaatgattaagaatgattgcaggctgggcgcagtggctcatacctgtaatgttaacactttgggaggccgagtgggcagatcacttcaggtcaggagttcgagaccaacctggccaacatggtgaaaccccgtttctgttaaaaayacaaaacttagccaggcatggtggtggatgcctgtaatctcagctacttgggaggctgatgcaggagaatcacttgaacctgggaggtgaaggttgcagtgagctgagatcgtaccactgcacaccttcctgggggacaagagcaaaactcagtctcaaaaaaaaattgcat

SEQ ID NO: 192193 - DNA, 609 bp, Homo sapiens
aaaagcaatctaaaaattcaatgcaattcccatcaaaataccacgataattgttcacagaactagaaagaacaatcctaaaattcatgtggaaccaaaaaagatgccacatagccaaagcaagactaagcaaaaagaacaaagctggaggcatcacattcctcaactttaaaataactacaagtctacagtcaccaaaacaaagtagtactggtattaaaataggcacatagaccaatggaatggaatagagaacccagaaataaagccaaatgcttacarccaacagatctttgacaaagcaaacaaaaagacaaagtggggaaaggatactttattcagtgaatggtgctgagataattggcaagctacatgtagaagaatgaaactaaatcctcatttctcatcttatacaaaaataaactcaaagtgaatcaaatacttaaatctaagacctgaaaccataaagattttagaaaatagcatcagaaaaattcttctagacattggcttaggcaaagtcttcatgaccaagaatttaaaagcaaatgcaacaaaaacaaagataaatagattggatttaaactaaaaagtttctgcacagcaaaag

SEQ ID NO: 192194 - DNA, 586 bp, Homo sapiens
tcagtggcataatcttggctcagtgcaacctctgccttttgagttcaagtgattctcctcccttagtctctagagtacctggggtttcaggcacgcaccaccatgccaggttattttattttattttatttcgatttttagtagggatggggtttcaccatgttgaccaggctggtcttgaccttctggcctcaagtgatccactggactcagcctcccaaagtgctgggactacaggcatgatccaccatgcctggctccatataaactttagaattgtttattctaaagttgtgaaaaatgtcattagtaaattgatattaactgcattgaatccatagaytgctttgggcagtgtggtcattttaataatatttattcttctaattgatgagtatgggacatttttccatttgtatcatctacaatttccttcatcaatgatttctagttctccttgtagagactttaccttcttacttaaatgtattctggctttcttaaggccattgtaaataaaatttcattctcagtttggttctcagcttgattgttattggtgtatgaaaatgctactaatttgtgt

SEQ ID NO: 192195 - DNA, 606 bp, Homo sapiens
tacatagtaggtgtatatatttgtgaagtaaattagatgttttggtacaggcacataatgcataataatcacattatagaaaatggagcatccattccctgaaatatatatcttttgtgttacaaacaatccaattataactctttttagttattctaaaatgtgcaattaaattattgtgttagactgttctcacatggttataaagaaatacctgagactgggtaatttataaagaaggttttgacagagctgacattgtctcctccacacgctgttacagcactttccagagccttctctctcctgtgcaaaatagcaactcttaaggaaaaactcattgtaccagttgcggaagaagaggcaacagtccaaaacaataagatcactgtagtgagtgttggacaagttggtatggcgtgtgctatcagcattctgggaaaatctctggctgatgaatttgcttttgtggatgttttggaagataagcttaaaggagaaatgatggatctgcagcatgggagcttatttctcaagamgcttaaaattgtggcagataaagattattctgtgactgccagttataagattgtagtggtaacttca

SEQ ID NO: 192196 - DNA, 605 bp, Homo sapiens
aaagttattcaggaacaagttgtttagcttcagtgtacttgtatagttttgagagttccactcggaattgtttcttattttattttattgtggtccaagatgatacttgatagaattttgctttttattgaatttattgacttgttttatggccaaggataggaccaattttggaggatgttccatgtgcagatgagaaaaagtgtattctgcagttgctgggtagaatgttctgtaaatgaygtaaatgtctattagttccaattggtcaacagtctagtttaactataattttttgttaattttctgccttgatgctctgcctagtgttgtcagtgtggtgctaaagtcccccactattattttattgctgttcatttctttttttaagcctagtggtagttgttttatgaatctgagtgctattgtatttaatgcatacatatttagaatacttgttctattgaccactttatcattatacaaggctctcctttgtccttttttttactgttgttgatttagagtttgttttatgttttatgtgatatatgaacagctgctcctagttactttttttcatgtatgtgatatatcttttctca

SEQ ID NO: 192197 - DNA, 478 bp, Homo sapiens
aacctgggatgctacaagttggtgggaggagggatgtctgccataactgaggcttcagtaggcagttttcccctcacggtgtaaacaaaccctctaataagattgaactgggcagagcccacctcagctctgcaaagccactgtagccagactgcctctctagattctttctctctgggcaggacatctctggaagaaaggcagcagccccagtcaggggcttataaataaaactgtcatctccctagtatagagcacctggggcaagggctggatgtaggtgcrgcttcagcagacttaaactttcctcttgccagctctgaagagagcagtaaatctcccaggacagtgctgaagctctgctaaggtacagactgcctcctcaagtgcgaccctgaaacccgtgcatcctgactgaaagacacctcccagtaggggtcgacagacacctcatacaggagagctctagttggcatct

SEQ ID NO: 192198 - DNA, 538 bp, Homo sapiens
agagaaaaaaggtattagactgctcactaatacagaaaaggggacaaaagtgccatataactctatattttttctttctctagacaaaaaataaatcaatccgttatattcagatcaccaacaaagcttatgccattgagaggttacccacmcccatcgggggtaaattaattaagaatacacatgtgtggccaggcacggtggctcatatttgtaatccccgcactttaagaggccgaggtgggtggaccatttgaggtcagaagtttgagaccagcctggccaacatgataaaacccaatctctactaaaaaataaaaaaataaaaaatagcctggcgtggtggcaggtgcctataatccctgctacttgggaggctgaggcaagataatcacttgaacccaggaagcagaggttgcagtgagccaagatcatgtcactgcactccactccagcctggtcaacagagcgagactctgtctcaaaaaaaaaaaaaaaaagaaaacaaaagaaaagaaaaagaatatacatgcttttc

SEQ ID NO: 192199 - DNA, 538 bp, Homo sapiens
agagaaaaaaggtattagactgctcactaatacagaaaaggggacaaaagtgccatataactctatattttttctttctctagacaaaaaataaatcaatccgttatattcagatcaccaacaaagcttatgccattgagaggttacccacacccatcgggggtaaattaattaagaatacacatgtgtggccaggcacggtggctcatatttgtaatccccgcactttaagaggccgaggtgggtggaccatttgaggtcagaagtttgagaccagcctggccaacatgataaaacccaatctctactaaaaaataaaaaaataaaaaatagcctggcgtggtggcaggtgcctataatccctgctacttgggaggctgaggcaagataatcacttgaacccaggaagcagaggttgcagtgagccaagatcatgtcactgcactccactccagcctggtcaacagagcgagactctgtctcaaaaaaaaaaaaaaaaaraaaacaaaagaaaagaaaaagaatatacatgcttttc

SEQ ID NO: 192200 - DNA, 566 bp, Homo sapiens
aacaatcaccgcagtttagcacacaggaagccacatccacaggaaatgaggggagagtactacatcaagggaacatcctgtgggacaaaaaaatctgaacaaaagccttcagccttagaccctccctctgacagagcctacccaaatgagaaggaatgagaaaaccatccctggtaatatgacaaaacaaggctcatcaacaacccccaaaagtcacagtagttcaccagcaatggatccgaaccaagaagaaatcgctgatttacctgagaaagaattgagtatgttagttattaacttaatcagggaggcaccagagaaagtcaaagcccaaagcaaggaaacccaaaaaataatacaagaagtgaatggagaaatattaaaggaaatagatagcctaaagcaaaaacaacaaaaaattcaggaaactttggacacacttttagaaatgcgaaatgctctgaaaagtctcagcaatagaattgaacatgtagaaraaagaaatttagagctcaaagagaaggtcttcaaattaacccaagctaacaaagaccaaaaaaaaaaaa

SEQ ID NO: 192201 - DNA, 634 bp, Homo sapiens
aacacagacactgttaagtgggagtctaaattagttcaactattgtggaaagcagtgtgacattttcttaaagacctaaaaatagaactaccattttacccagcaatcctattactgggtatctacccaaagagatataaattattttatcataaagatgcatgcacacatgctcactgcagcactattcacaatagcaaaaacatggaatcaacytaaatgcccatcaatggtagactggataaagacaatgtggtacatatacacaactgaatatgatgcagccataaaaaagaataagataattaagatggcagataggaggcagcactagcttgcagctcccacttggacagacagagaggtgaggaggctcacatcatgatcttttgctccaagaagtaccacagcaacattccagggaagctgagataatccacagaccctttgaaggaactggagcactgctgcatgctccctgagatgctgaaaaactgtgagtctccttgctttttagctgggaggctggtggtctggggcaagttctcagccttgatcaccagatgcccagaaatagactcggtgctgttgagggggcacagtgggagtaagactggcctttaggactgcaggc

SEQ ID NO: 192202 - DNA, 634 bp, Homo sapiens
aacacagacactgttaagtgggagtctaaattagttcaactattgtggaaagcagtgtgacattttcttaaagacctaaaaatagaactaccattttacccagcaatcctattactgggtatctacccaaagagatataaattattttatcataaagatgcatgcacacatgctcactgcagcactattcacaatagcaaaaacatggaatcaacctaaatgcccatcaatggtagactggataaagacaatgtggtacatatacacaactgaatatgatgcagccataaaaaagaataagataattaagatggcagataggaggcagcactagcttgcagctcccacttggacagacagagaggtgwggaggctcacatcatgatcttttgctccaagaagtaccacagcaacattccagggaagctgagataatccacagaccctttgaaggaactggagcactgctgcatgctccctgagatgctgaaaaactgtgagtctccttgctttttagctgggaggctggtggtctggggcaagttctcagccttgatcaccagatgcccagaaatagactcggtgctgttgagggggcacagtgggagtaagactggcctttaggactgcaggc

SEQ ID NO: 192203 - DNA, 634 bp, Homo sapiens
aacacagacactgttaagtgggagtctaaattagttcaactattgtggaaagcagtgtgacattttcttaaagacctaaaaatagaactaccattttacccagcaatcctattactgggtatctacccaaagagatataaattattttatcataaagatgcatgcacacatgctcactgcagcactattcacaatagcaaaaacatggaatcaacctaaatgcccatcaatggtagactggataaagacaatgtggtacatatacacaactgaatatgatgcagccataaaaaagaataagataattaagatggcagataggaggcagcactagcttgcagctcccacttggacagacagagaggtgaggaggctcacatcatgatcttttgctccaagaagtaccacagcaacattccagggaagctgagataatccacagaccctttgaaggaactggagcactgctgcatgctccctgagatgctgaaaaactgtgagtctccttgctttttagctgggaggctggtggtctggggcaagttctcagccttgatcaccagatkcccagaaatagactcggtgctgttgagggggcacagtgggagtaagactggcctttaggactgcaggc

SEQ ID NO: 192204 - DNA, 466 bp, Homo sapiens
tctacttgcagccttcccaatcacagctgatgacatctccatccttccagttgctcagsccaaaagccttgcagtcctccttaatacatctttctttcactccacatacaattcatgagcaaatgcaatggcctttattttcagaatgcatcctaactttttcctaatccattttctttcacctgggtcactgcagtagcctcctacctgggctccctgcttctgcccttgctccctacagtgttcttcacactgcagccagagtgattggcttacagtttaagtcaaatcaagcaacttcattgcaattgcccccacttctcccagagcaaaagccaagatcctccatgcttcctctctgcttccatctcctgacactcctgccttgcttagttctttctaggcacagggctactcggtatatattcttgaagtaaggcaggaacaacccatgtttgtattaaag

SEQ ID NO: 192205 - DNA, 515 bp, Homo sapiens
atatatatatgtatatgtctggtatatgttacacacataatttgttcagtgaatattcattgggtaagtaaatgagtaagtgaagaaagagggtccaccaataaactcaagtgcatataaaatttcaaagcagaaaaagtgttttcmatcagtagaaaaaatgatggctgatatagtttagatatttctccttgcccaaatctcatgttaaattttaattcccaattctggaggtggggcatggtggaaagtgtttggatcatgagggcaaacctctcatggcttagtgctgccctcatgatagtgagtgagttctcatgagatctggttgttgtaaagtgtggcatctcatcccccactctctctctctctctctcactcctgctttcgccatgtgaagtgtctgctcccagttcaatttctgctatgagtaaaatttccctgaggcctccccagaagctgagcagatgctggtgccatgtttgtacagccagcagaactgtgagccaattaaa

SEQ ID NO: 192206 - DNA, 211 bp, Homo sapiens
tggcacttttcttatagaaacagaaaaaacgatcctaaaattcacatggaaccacaactaaccccaaatcgccaaagcaatcttgaaaaagagtaagactagaggcatcatgcttcstgatttcaaaatatattacaaagctacagtaattaaaacagtatagtattagcagaaagatacccgttaaatgaatggaacagaagagagagcc

SEQ ID NO: 192207 - DNA, 211 bp, Homo sapiens
tggcacttttcttatagaaacagaaaaaacgatcctaaaattcacatggaaccacaactaaccccaaatcgccaaagcaatcttgaaaaagagtaagactagaggcatcatgcttcgtgatttcaaaatatattacaaagctacagtaattaaaacagtatagtattagcagaaagataccygttaaatgaatggaacagaagagagagcc

SEQ ID NO: 192208 - DNA, 577 bp, Homo sapiens
tgtgtccaaatttttggcttctcataaggacactactcgctgaatgagggcccatcctaatccagtatgaactgatcttaacttgattatgtctgcaaagaccctatttccaataagatcacatatacaagttccaggtgaacatgaattaggggaggatactattcaaataagaycatgaagtggctacattatctgggatatatacccctggggttcgttgttgcatgccagaaaaatttaggacatggacacacaggaggcatttaggagcaaaggtttaataggtaaaaaagaagagaaagagaaacagcttcctctttggaggaaggggtctccgagaggaaaggaccagttggtggggaatcccccaagttttatagtccagtttgaggaggcagtgtctgatttacatagggctcatagattggttcgatcaggtatgacgtttacatagtgcacggggaaggctgttcgccccaccctaatcttcttatgcaaaggagatttccagttaaccagcatgatcttgtctcctcctttatagtacacgtggctggcagagaagggaagatgg

SEQ ID NO: 192209 - DNA, 581 bp, Homo sapiens
tcagtaagtactaaaactttgtaggagatgaatcaataggcaggacttttgagaaaagagctattaattggggaagcaatctttcaaaggtagccacatgtctgtgatggcctgaaataatataataaatctgatatacagtatgtgaccattacaaatgacttccttccttttcaatcagtctgttttargtcaatgatgtatatcatataatgccttcactccccatgagcaggctgcatgtgcccccgtcaagtctattgataacataaggatttaaaactgtggctttaaaaagagagaaacttaagttcaagtccaaatactgttaacttattgttaaccctgagctaattgtttaaccctgctaaacccagtagtatcatatgtaaaatgaagctagtaacagttccaagctcacagagctgcagaggggattaaatgaacaaaaataacagctcatatttattgagccctgatttgtgccaggtactgtgctaagtgctttaaattaatgattctaaacctagtgtgattttgtcctccagggacatttacaaatgtttggaaatatttattac

SEQ ID NO: 192210 - DNA, 582 bp, Homo sapiens
aaataatatgtgaattaatggatctttatttttttttttaagtgttgtttggaccagtccatgtgctggagattcagagagaatgttgtgaggcagttgccctgcaggtactcatattatatcagaactagatgtgaaaacacagcactttagcgaagtgataaggactaaaagagaggtgagaacctggccatatagccgcacggagtatgaggtgacatttgagctattgccctcagaagacacagaatcaggatgagacagatgtacacatgcttataagagtaacagaaaaaaaaatccaatcgaaaaagaaaggtcgtaacctacaatatgtagcatacaatggagcaacataagtgggagaaaaataattacctactaggattcattgtaacattggttccaatayggttttgcctctttaagtgggattttcggctactcacttatctttactgaagtcagtttctttatctgtaaaatgaaaaagataatataatcctcattagactggtttaaacatcgagaatttctagaaggtaattaatgtagattactgatggagatttaaattcatat

SEQ ID NO: 192211 - DNA, 596 bp, Homo sapiens
tcaggtaattgtgagtattccacaccacaacccagccacaaggccagtctttgtctgaatacctggcaaatgcctcacctgatgaaaaaagtttttctgaaatatttttcaaggtctctggacttgaaaaattgtggctgaatctgatggagagggataagtaaggtggggcaaaagcagaaggtcaactcttgaaggccccctcctacttctgggtcatcagttttttagctcctaccccaggtctgtgtgtactaatgtggtcattagataactgcccctccccgtgctcagcaatggatgattacacatttagtgatgtgttagcyccactgtcaacaactgacccagaaattgtttctttactgaagcacatcaaaccaatttctggcaccaggcatgttaatttatctagtaaatgtagtttttctgttccaagaaacaggactccagaggtaatttgtttttatctttcagtgatggtagtaaaactccactgtattactttattatgttatttatctggtttaatttgttctgcaggaacctcagtcaattcaccattacatgggatgtcatgtgggcccaatttattg

SEQ ID NO: 192212 - DNA, 590 bp, Homo sapiens
tctgttagtctacttctgtgtgattgcctcaaagatcagaaatttgtcagtcatcaaaatacataataattacctttctgccatgtgtattaccttatatttgccttttcgaatttatatattgttcctcaaaatggaaattttttgtgtgttttatctgatstttaagtaactgaaaacattattttatattaaaataaatatattatgttccagtatgcaaaatttgtatgaagatcaatgttaagcaggaaacatcaatccactttccagttagaaccaactgcttttactttgctctggagcctttggccatatgttggactgtccctgcctttacattgcaagagggaagttgaggtccattagcaaatatttgtgtctagcatcatttattttgttttgtttcttcagataatatatgctaaataaatacttcaatatacttgctttgaaaagcgagatttcctatttaaagaaagtcatttggctttatgtataagtactgccatctattcattgaatcaagtttccttttttgtgtaaatctgagttttatttttcattccttcagaatatattggtggcag

SEQ ID NO: 192213 - DNA, 493 bp, Homo sapiens
ttcatcacagtgctatttataatagcaaagacataaaatcaatgcaggtgcttataaacagtggattgaataaagaaaacatggtacatatacactatggaatactacacagccctaaaaagaatgaaatcatgtcttttgcagcaacatggatgcagctggaggccatgatcctaagcaaattaatgcaggaagagaaaactgaacaccacaatattctgacttataagtgggagctaaaytttgggtacttatgaacatagagatggggaaaatagaaactgtggactactagggggaggaatggaggaagacatgggttgaaatactacctcttaggtactatgcccactacctggcaaatggaatctgtatgccaaaccttagcatcacacagcatacccatgtaacaaacctacacatgtactccctgtgtctaaaataaaagttaaaattattaaagaaaaaaggagaaggtgatgataattaagtg

SEQ ID NO: 192214 - DNA, 498 bp, Homo sapiens
tttcagaaacattgactcctgataggatactctcctttctcrgttttccccttgtgggtgtgccataagaaatggttttatatctcttgtcatttttatatggtctcctcggaatatcttctttacttccatgggctcagttgccctctatatgctcaagattcccaatttcatattgatgggtcattacctttggcctggaccattgaaataacctggtatttgatctattcaaatttgcttttagtctcatacaagtaattcaattcctttggggaaaaaagtgttcaaatataaattctgagtatgttaattcatgcttaaaatctttaaataggttttcattgatcttagataagtatctaaattctctagcccctgggaacctcacaatctcaaacacccgattaagttcctcctgaaacatatagtatagattacgttgtttctttctgttgcttgaatagcacatgtaccctttggcctttggacatttgt

SEQ ID NO: 192215 - DNA, 597 bp, Homo sapiens
atcgctccttttgttgtctcctggattatcttgaaaccatgtgatcctattgattcatctcttattcttaaaacatacttttctctaggtttcagaaacattgactcctgataggatactctcctttctcggttttccccttgtgggtgtgccataagaaatggttttatatctcttgtcatttttatatggtctcctcggaatatcttctttacttccatgggctcagttgccctctatatgctcaagattcccaatttcatattgatgggtcattacctttggcctggaccattgaaataacctggtatttgatctattcaaatttgcttttagtctcatacaagtaattcaattcctttgggkaaaaaagtgttcaaatataaattctgagtatgttaattcatgcttaaaatctttaaataggttttcattgatcttagataagtatctaaattctctagcccctgggaacctcacaatctcaaacacccgattaagttcctcctgaaacatatagtatagattacgttgtttctttctgttgcttgaatagcacatgtaccctttggcctttggacatttgtacatgttagt

SEQ ID NO: 192216 - DNA, 597 bp, Homo sapiens
atcgctccttttgttgtctcctggattatcttgaaaccatgtgatcctattgattcatctcttattcttaaaacatacttttctctaggtttcagaaacattgactcctgataggatactctcctttctcggttttccccttgtgggtgtgccataagaaatggttttatatctcttgtcatttttatatggtctcctcggaatatcttctttacttccatgggctcagttgccctctatatgctcaagattcccaatttcatattgatgggtcattacctttggcctggaccattgaaataacctggtatttgatctattcaaatttgcttttagtctcatacaagtaattcaattcctttggggaaaaaagtgttcaaatataaattctgagtatgttaattcatgcttaaaatctttaaataggttttcattgatcttagataagtatctaaattctctagcccctgggaacctcacaatctcaaacacccgattaagttcctcctgaaacatatagtatagattacgttgtttctttctgttgcttgaatagcrcatgtaccctttggcctttggacatttgtacatgttagt

SEQ ID NO: 192217 - DNA, 443 bp, Homo sapiens
aagttaaataagacagttatgtgatctgatacattatatggtcatctgaattaagtagaaccactgtcaccacaacttaacaactatgatgtgccaagaggtttcatagactttatagtctgattaggcctaagagctggcttttagtatttactatctgttattgaaactgcttccttgactggtatatctaacagtttggtcagataacttcatcctaaaattacagaagtgagaaggggttaaagcagcagtccccaaactttttgacacctttttgaccagttttgtggaagacaattttccgtggactggggaaaggtccagggttgtttsaggatgactcaatgattcaagtgtataacatttattgtgcactttatttctattactattacactgtaataaataatgaaataattatacagctcaccataatgtag

SEQ ID NO: 192218 - DNA, 576 bp, Homo sapiens
gtcaacataatgaattcaacagagtgtggtgagaaggaataaagggttttttttccatatacttaaatcttactaagcccaattcatttagtaaaatagttatccttcttgaacacatttatgtttatactaaacatatttgtacctatatatatttcacttatctactaaaatgagattgtattatatgcagatatttccttttcactttatttataatattttatggccttttcaggcaaattcacacagacttgctgaattattttaaatggttaactgcatgactctatcagaattcatgcaaacattttcttattgataatttaaattgttgccagaattttgtccatataatgttgctataagcattcctgaatatatatcccatacatgragatatacttatataaatgtttatagcaataaagtgttatttttgttgctgtttttactaattgatatactttgaattcccaaatttagattgctttatcaaaatttgtgttgggtgattaaaatgggctcagatacagtgtttgagtacgcttcttacagaattcactcatatattat

SEQ ID NO: 192219 - DNA, 576 bp, Homo sapiens
gtcaacataatgaattcaacagagtgtggtgagaaggaataaagggttttttttccatatacttaaatcttactaagcccaattcatttagtaaaatagttatccttcttgaacacatttatgtttatactaaacatatttgtacctatatatatttcacttatctactaaaatgagattgtattatatgcagatatttccttttcactttatttataatattttatggccttttcaggcaaattcacacagacttgctgaattattttaaatggttaactgcatgactctatcagaattcatgcaaacattttcttattgataatttaaattgttgccagaattttgtccatataatgttgctataagcattcctgaatatatatcccatacatggagatatayttatataaatgtttatagcaataaagtgttatttttgttgctgtttttactaattgatatactttgaattcccaaatttagattgctttatcaaaatttgtgttgggtgattaaaatgggctcagatacagtgtttgagtacgcttcttacagaattcactcatatattat

SEQ ID NO: 192220 - DNA, 416 bp, Homo sapiens
ggggggagatcgcattaggagatatacctaatgtaaatgatgagttaaygtgtgcagcacaccaacatggcacatgtatacatatgtaacaaacttgcacgttgtgcacatgtatgctagaacttaaagtataataacaaaaaaaaaaatgaaaaaaaaaaaagactcactgacccccaaccacccagtaacaagctctgcaggcaagaccagccacataatttgcaaagcccaatgcaaatggaaattcaggacctttttttcaaaagtcaggaaaaaagtgtcagtaaaagtactaaaatattaatttttttcctttcttccaaaaaaaaaaaagtcatcctgagtgacctggcccatgcctgttcctccaatagcatcatatatgaaataacttctgctctatataaacatgg

SEQ ID NO: 192221 - DNA, 440 bp, Homo sapiens
gattaaaattaaatgtttgagagatctgtttgaccttacacatttccatatttggaaaataaatgctttatggaaagagaaaatttaggtttgtttaatgcatgtgagctctcccctaccaaaaaaagaaaaagaaaaaggaaaagaaaaagtaaacttgtatcatatctaacaattaatatgctgagacaaaacaaagcagaacgcatttttcaagttttaatatgatcagaagttatgctatcataaaaaccaaataacratagaaaactgaaagcctaatccaaaatctactgtgtgaaataatgttcttgaggaaatttgactgacttatcattgaattgtttacaatctgtccccaatccttatccacaattctgataagctgacaaaaattctgtttttaagtttgcagaaatctcatttgtcagcaaacttat

SEQ ID NO: 192222 - DNA, 370 bp, Homo sapiens
ttgaactagccacatttctagtgctccatagccatatgtgacaagtggctatcaagttgaatagtgcatttctagagtatctaaaactgaaatgaagattccacttttggggtgaagaaaactgacaaccttggaaaaactaggaacaaatcaactattattctgctcgttgttgattgttattgctattataataattgttggaaaagtcaagtgctcatatttacaaaattaagatgagatcgaaatatggtatgtatgttagttactggagctgccataataaagtatcgcaaattgggtggcttaaaacaacagaaatatattgttccacagctctggaarctagaagtctgtgatcaaggtgttg

SEQ ID NO: 192223 - DNA, 487 bp, Homo sapiens
attatgcttcaatgctccaccctttgggggctaaaggaaataaagcaagttggccagacctgaggagttgatgatacacattttcctcccccagaagcatcttgtaacttgtcccacaccagcagtgacttcccagtatggcgtttctccccgctgctcccatcagcaagagcgtgctgacacatgggctgatgagcagtgccgagacttatggagtgtgtccttcctgcttcgaacctcacagcctgtcatcctctgttgtcacacgctcttgctcattcgctcgctgctcacactaatctagaagatgatcaaagaaaaactccactgactcacccctgcctggaccagygcagggattggtcaagcgtgcgcattaaatattaccagattctaatctattattttcacccgcttgcttgctctctcactcgtactctctcacttcctctctctcattttttttcaaaaaataaataaatgaatt

SEQ ID NO: 192224 - DNA, 541 bp, Homo sapiens
agcaatgtgagtgctgtgcagatggatcctgctgaagctggtgctggctctctagggagtagcatgaaatgctggttttcaaaacctgagcagcgtgtaaatggcagctaaaaaggaaatgcagattggtgctgagtgttaattgtctcttcctctcttcttcacacacttcagagactgtgtggtggcaggagacaggaaagcaggcctgccccctcgtggggtgggctttttttttttttttttctcaagctggactgagagaataacaacacctagagtccaagtcaaaacatggaatgggttttttttttctttcaagttttcatctgatgaaagtccgggaggtggcmccgagcttgtaatgaaagtaagagtctgctgagaatgagtcgatgaggtgtgacacagaaaggggaagcaggatgtctttgttttgaaatgacaggcgataagctatgggggtgcctggtgagattttagtccataactaggtagcaacttgtcaaatgcaggccccttaaatgcatcacaagaattc

SEQ ID NO: 192225 - DNA, 621 bp, Homo sapiens
agcaccactttcttcctttctacaagagaatggcaggaaataacagaaggaggcttctcaatcaatcagatttgtaccaaatcactcattataggtagcagagtaatagtaaggaaggaaataaataaatgatagtggttttttatatctgcatctacccttctgtgtgcttgcatgttacctcccttttctacttctatcttaacttttcgacctattttcttcctgttttttactaccctccatcatcatctaattttttctttttttctttttctkttttttgagacagagtctccgtctgtcacccaggctgcagtgcagtggtgcaatctcggctccctgcaacctcagcctaccaggtttaagcgattctctaagtacctcatataagtggaatcctactatatttgtctttttcagactggcttatttcacttagcataatgttctcaaaattcattgatattgaagtatatgtcagaattttctttcttttcaaggctgaataatattcaattgtaccacattttgcttttctgttcatctatggatgacacttaaattactttcacattttagctattgtgcatgacactgctatgaacataggtgttcaga

SEQ ID NO: 192226 - DNA, 593 bp, Homo sapiens
ttttctttttctcttttttattatttttgtgtgtgtctttggatctaaagttagtttcttgtagacagtatatccagcaatcatgtgtttyttatccattctgctgatctctgttttttgattgggtagtttaatccatttacatttaaagaaattactgataaagaaggacttacttctgttgtttgctatttgttttctatatgccttatagctttcccacatctcactctgcatgactcttttttgtgtgtgtttagttgatgttttgtggtgaaatgtttaatctcctttcttatttccttttgtttatattccttaactatttctttttggttgcagtggagattacatttaacatcctaaagttataatactctaactggagtttataccagtctaacttcaataacataaaatatctggtcctctactattctttcttcactctttttggttgttaatgtcataaaattatacctttatatattgtgtaacaccaaacataaactaataattattttaaatgcgttagtctcttaaattatataaaaaacaaaacatggagccacaaaccaaagttacaataatgt

SEQ ID NO: 192227 - DNA, 593 bp, Homo sapiens
ttttctttttctcttttttattatttttgtgtgtgtctttggatctaaagttagtttcttgtagacagtatatccagcaatcatgtgttttttatccattctgctgatctctgttttttgattgggtagtttaatccatttacatttaaagaaattactgataaagaaggacttrcttctgttgtttgctatttgttttctatatgccttatagctttcccacatctcactctgcatgactcttttttgtgtgtgtttagttgatgttttgtggtgaaatgtttaatctcctttcttatttccttttgtttatattccttaactatttctttttggttgcagtggagattacatttaacatcctaaagttataatactctaactggagtttataccagtctaacttcaataacataaaatatctggtcctctactattctttcttcactctttttggttgttaatgtcataaaattatacctttatatattgtgtaacaccaaacataaactaataattattttaaatgcgttagtctcttaaattatataaaaaacaaaacatggagccacaaaccaaagttacaataatgt

SEQ ID NO: 192228 - DNA, 593 bp, Homo sapiens
ttttctttttctcttttttattatttttgtgtgtgtctttggatctaaagttagtttcttgtagacagtatatccagcaatcatgtgttttttatccattctgctgatctctgttttttgattgggtagtttaatccatttacatttaaagaaattactgataaagaaggacttacttctgttgtttgctatttgttttctatatgccttatagctttcccacatctcactctgcatgactcttttttgtgtgtgtttagttgatgttttgtggtgaaatgtttaatctcctttcttatttccttttgtttatattccttaactatttctttttggttgcagtggagattacatttaacatcctraagttataatactctaactggagtttataccagtctaacttcaataacataaaatatctggtcctctactattctttcttcactctttttggttgttaatgtcataaaattatacctttatatattgtgtaacaccaaacataaactaataattattttaaatgcgttagtctcttaaattatataaaaaacaaaacatggagccacaaaccaaagttacaataatgt

SEQ ID NO: 192229 - DNA, 406 bp, Homo sapiens
tgctgttggtgtatagcagtgctactgatttgtgtacattgattttatattgtgaaaytttactgaattcacttatcagatttaggagctttttggataagtctttaagattttctagatatatgattacatcattgacaaacagcaacagtttgacttcccctttaccaatctggatgccctttatttctttgtcttatctgattgctctggttaggacttccagtactatgttgaatagaagtgctgaaagggggcatccttgtcttgttccagttctcagggggaatgctttcaacttttccctgatcagtataatgttggttttccatttgtcatagacggcttttattattttaaggtatgtcccttttatgccaattttgctgagggtgataatcataaa

SEQ ID NO: 192230 - DNA, 580 bp, Homo sapiens
ccgccagccgaactacaagtctcagaggcctcagtttcattttttaattcctgggaatttaaccctcaattattctaaatggaagttgatgccggttgggtcggggsgacctgcaagcttgcgcacaaacgtgcacataagaacatacatgtaaggaacctgttcatgcagggcgtggagagagtgtgtcccacttatcacttaattttacccgctgaccccacgataaactgtaccaaggggctggccattaaagtcaatccagtcaaaatactcagtgtggagaagacatggaaattcaggatctcttttatgttgtggatggttctgtaattagtaaaatcactttggaaaagtttggtcctatgtcctaaaggtctttccaaaacaaagctttcccacatgtaccaggaaatgtgttccagaatgctcacattagcaaacacctggagagagttcaggaaagaggatggccgctacacagaatacaacattgttcagccgcctgggactgctgccgtccagtacttctcccaggggagccagggaagcatcacagtttatgttgcagaatcctcaa

SEQ ID NO: 192231 - DNA, 565 bp, Homo sapiens
atatcactatcagcattttggtcacaacaacttaacaggtctctagaaagttccaaattttttcttatcttcctgtcttctgagccctccacactcctccaacctctgcccattacccagatccaaagtcgcttccaaattttcaggtatctttatagcaatgccccacttctcaataccaattttctatatcagtccattcttatcctgctatacagaaatacctgagactgggtaatttatacacaaaagaggttaaattggctcatggttccacaggctgtacaggaagcatggcagcatctgcttctgggggaggtatcaaggagcttttactcatggtggaaggcaaagctgaagcatacatcttcacgtggccagagcaggggaaagaaagagcgagaggggaggtgccacacacttctaaacaagtagatctcatgagaactctatcaggagaacagcaccaaaaaggrtagtgctaagccattcatgaaggatctacccccatgatcaaatcatctcctactaggccccatctccaacactggggattactaatgaa

SEQ ID NO: 192232 - DNA, 543 bp, Homo sapiens
cacccctccactcaatgttaatgaagatcccagagctgaataggatgtttgccaaatgtgaggtgaagacaattaagcactcaattatgaagtgctctggaggttatagaagagaaaacccaatatgctcagtgatatggtttggctgtgtccccacccaaatctcatcttgaattgtagctcccacaattcccatgtgtcatgggagggacccagtgggaggtaactgaatgatgggggtgggtctttcccttgctgttctcatgatagtgaataagtctcacgagatctgatggttttatgagggggagtttccctgcacaaattttctcttgtctgctgccatgyaagacgtgcctttcaccttccaccatgattgtgaggcctccccagccacatggaactgtgaatccattaaacttctttttctttataaattacccagtctcaggtatgtctttattagcagcatgaaaacaggctaatacactcaggaaagggctccatagacagagtaagaattgagtttgatcttgaagacag

SEQ ID NO: 192233 - DNA, 551 bp, Homo sapiens
ttgactttatgctgttgttggctctgccctgaacagcttagcaatagttatactaattttacctgatatgcatttaaaaatttattcaacacaactagttactgagtttccactatgtcatggtactgttttataggaagtacaaagcaatgtgtttgggagggtagaacatgcacatctgcctaagttaagaagcaaggaaagagtttaacaggactagaagggagaccccaaagtaggatatgatcaaatccaaatgaatcttttgaacagtcagagctgtgtgtatggaaaaggaaaaggcagatcatctgagtagaaaaggaagactctccagagaagcgggggattgatttgggccttatagggtatgggagttacgttcaagctagggcatgataaaagagaatagttttacctaccagagtccaaagtctctggcagttcartgagtcatttattcatgaacccctttgttcatttgttcaacaaatacttattgagaattaattctatgacaggcctgttttgggcctagagaatacagtgaa

SEQ ID NO: 192234 - DNA, 616 bp, Homo sapiens
agcaatttatgcttagctccctttctagattataatctttttaaaggaagcacatatttctgagtaagaattataatgcctaaatggtgcaaaaccaaacatgtttataaatgactaaattaacaactggaaagaagatcacataggtgggactcaatgaagagagtatgatggcrtcagaaacgggcaaacagcagctggtaaagggtgtgacaataattaggagatgattattaagctgtaaaaccggtcctgaaatacccagaaatgctataatattgaccaatactaggaactatcttaaactgccaccatcaaatttacatgtaatacaaattccacgtaattaattcatttattaaacaatatccaattcaaaagttacatttgtttttgttactgtacgtttgtagagaaatatttgctgaggttatcacgtgtttatccatttgtgatacatcaaaaaaccttcatataaaagaaatagtacatctgctcctaatttctcatgtttgtttcctctccttacatctttattttcataactgtatttggaatatttatgaataattccatcttttaagcctgacagcattaattttatcagaccagagag

SEQ ID NO: 192235 - DNA, 590 bp, Homo sapiens
tctcattctagggctgttggattagcaagcttgcatttccacagaccttgtttgacattagtactgtaaatgtagsaagttgctctataaatatctaactccaacatccatttctacgttggttgcaggttcaagaaggggctggccatggtggctcacgcctgtaatcccagcactttgggaggccgaggcaggtggatcacctgaggtcaggagttcgataccagcctggccaagatggtgaaaccccatctaaactaaaaatacaaaaattagccaggcatggtggtgtgcacctgtagtcccagctactcaagaggctgaggcaggagaattgcttgaacccaggaggcggaggttgcattgagccaagatcgcgccactgcactccagcctgggtgacagagtgagactccgtccccccaaaacaaacaaacaaacaaacaaataaataaataaataaattcagtgagggaagatacagatgttatgtattagcaccctgaaactccaacagtattatttataacatttttattcttaacgaatctaccttcttttagggtgctttacattttgatacagccaaa

SEQ ID NO: 192236 - DNA, 628 bp, Homo sapiens
tttttttgaatgagggtatctatgtttgaaataagaggagagttgcccagggcagtaagtgagacactgagcactgtrgaggagttctgagaagacatgtgtgtcttctctcagaaacatgagagatcagaattgtcagatgacacagcgctaaagatggcttgtgctgagtgtgcaatgttcttcagtaaatgtgcagaatattgaataaaagtctcagttgtcattcccctactagcatacttacatacccacaccattttcatggccttgtggtaggattgcgtttacagttggcccttgaacgatatgtgtttgaactgcacaggtctacctatatatggattttttttttcaattaaagtcatacctagtatgcctgcctctcttgattccctttccaccccctctacttctcgtgcctctgccacccctgagataggaagatcaacaccccctcctctaccttcctctcctcagcctactcaatgtgaagttgatgagaataaagacttttataatgatccacttccacttaataaatagtaaatatattttctcttccttgcgattttcttaaatacattttctattccctatcttactttattgtaggaatacagtatag

SEQ ID NO: 192237 - DNA, 586 bp, Homo sapiens
cctctggggaaatttagacaggcataattcctgcttagtattatagtcctttatatstgtaaaaatgtagcacatccttcttcaaaatcattcatttcctgatatgaccttttaagaggccaacgcatctttcacaatttctgctgtgtgtcaaatgttttcttttctccccttattgcctttttcctccctcacagtcagctattcctaagaatacagtcccgtaccacataacaatgattcagtcaactacagattgcatactacagtggtcccataaaattataccatacttatactgttccttgtctatgtttagatatgtttagagacacaaatacttcccactgtgttacaattgcctacagtattcagtacagtaacatgctgtacaggtttttagcctagaagcaataggctgtgccatatagcctacatttgcaataggccatatcatctgggtttatgtacagtctatgatatttacacaatgacaaaactgtctaataacacttttttcagaatgtatccctgttgttaagcaaagcatgactgtatctgaaatacagtataggaaacgcttgtt

SEQ ID NO: 192238 - DNA, 586 bp, Homo sapiens
cctctggggaaatttagacaggcataattcctgcttagtattatagtcctttatatgtgtaaaaatgtagcacatccttcttcaaaatcattcatttcctgatatgaccttttaagaggccaacgcatctttcacaatttctgctgtgtgtcaaatgttttcttttctccccttattgcctttttcctccctcacagtcagctattcctaagaatacagtcccgtaccacataacaatgmttcagtcaactacagattgcatactacagtggtcccataaaattataccatacttatactgttccttgtctatgtttagatatgtttagagacacaaatacttcccactgtgttacaattgcctacagtattcagtacagtaacatgctgtacaggtttttagcctagaagcaataggctgtgccatatagcctacatttgcaataggccatatcatctgggtttatgtacagtctatgatatttacacaatgacaaaactgtctaataacacttttttcagaatgtatccctgttgttaagcaaagcatgactgtatctgaaatacagtataggaaacgcttgtt

SEQ ID NO: 192239 - DNA, 575 bp, Homo sapiens
tctccacagcatataaagcatatattctaagcatttgatatgcttcaatctgtaagggaaaaacagttctgggagtttttaaaaacggtgtttataaaattgcatgagtagtatagttcactaattttccaaaaagcagaagccctggagcctgggtggttttcctaataaattaccggtccatcacttgcataagaatatatttgtttattcagaagcgtgttttgcaaattatctctctagacaggaatacataaattgagagcttcctctattctgaaggatgaaaaaatttaagtaagatttggaaaaatagaagaagtcaaggaactcgaggcaacagacacytagagagttttcatgggttaatattagtattaggaaatgatccaagtacaaatctacagaacttttcatatgactgtcacatggcgaagactccctgaatcctatttgaggacatcctctaggataccatgagccccaggttaagagtcattgaattggggtccctaagttccatccattccatgaaggcataaacatttttggcaattgtttttttttaaccagtt

SEQ ID NO: 192240 - DNA, 440 bp, Homo sapiens
gagagcttcctctattctgaaggatgaaaaaatttaagtaagatttggaaaaatagaagaagtcaaggaactcgaggcaacagacacctagagagttttcatgggttaatattagtattaggaaakgatccaagtacaaatctacagaacttttcatatgactgtcacatggcgaagactccctgaatcctatttgaggacatcctctaggataccatgagccccaggttaagagtcattgaattggggtccctaagttccatccattccatgaaggcataaacatttttggcaattgtttttttttaaccagtttcctgtttctctgttaacctgagttatgtcagtacacaattctgtgattccttatctttttacgccacagtctttccctaaggaattataccaatcgcatgtttccaatgttggcttttcccaaa

SEQ ID NO: 192241 - DNA, 440 bp, Homo sapiens
gagagcttcctctattctgaaggatgaaaaaatttaagtaagatttggaaaaatagaagaagtcaaggaactcgaggcaacagacacctagagagttttcatgggttaatattagtattaggaaatgatccaagtacaaatctacagaacttttcatatgactgtcacatggcgaagactccctgaatcctatttgaggacatcctctaggataccatgagccccaggttaagagtcattgaattggggtccctaagttccatccattccatgaaggcataaacatttttggcaattgtttttttttaaccagtttcctgtttctctgttaacctgagttatgtcagtacacaattctgtgattccttatcttkttacgccacagtctttccctaaggaattataccaatcgcatgtttccaatgttggcttttcccaaa

SEQ ID NO: 192242 - DNA, 495 bp, Homo sapiens
atgtgtcagtttcacatggtacctagaaaagtatttcttggaaatgttttcaaagtatgaagacgataagatggaaagaatatatcattcgccaagcataacacaccaatgtatgccttctcgtaaaatctttgagtgaataatatgtgaaaagacaattcattccaatccatagaattcactgcctgatacaaagtgccaaatcactgatcaaaaaaagttttaattgacattgtgcaaattatctatacagcacaagcagcaaatgaagacttcttgcataaatgaaaaatgaacattttaggctctagatctggaactcacaatcgggaacytctgagttccagtagacacaaatagactaaacagcctagcttcagtgaatttttttcaaacaagatatatatgtctctgtctatatctatgtctatatgtctatatccatgtctaaggcatctatattcatttacatatatatgtagatatatacaacca

SEQ ID NO: 192243 - DNA, 513 bp, Homo sapiens
tcctactttctctgaattatttcagtttagagagtatcttgtttctggacttcattatcttttggctataatgcatggaccgaaacacagaattcagccattttccacaatttctgctrtgaaaacctgctcacatcaggattccatatgtgaagcaggctttctaacatacaggtgtgaaggacttgtattcaagtcaaagtgagaagtacaaatttagttgaggcttctgatgttcatcatgctgtttggccatacttctttcattatttttctcccctcctctgcttgaccctccccataggtgacattttttgttcaagtctgacttagctaacaaaattctaacgacctttttttgttgtcttggtttctccaaacatatgcctgcctcaccctcctccaacaggcagcctctcagggtatgtttttctgaccacatatgtctttgcttctacctaacagacatttatgtgccattatgctttttgttttggtttccataataactgt

SEQ ID NO: 192244 - DNA, 575 bp, Homo sapiens
tgtctaatcttcaacttccattttaaactttccccctgtttcagatgggataatagggtatttgtatattcatttatgtgtttgttttcttgatcagctttggaagttattcggtcatttacaaaatttattaaattaaattataactaaaatggatggcagaaattcaaacacaatagaaatgaatttgttcwtataagacatccccaaacagctgtgctgtaggggtttatgtccttaagggataattttttattttaaacaattgtttaatgtcacaagggactataatattcatttttcccagacagttggtatttgaattgcaaaaattctgcaaatacacaattatgctatctctgacaaaaatgcttagaatactgcttaatttagtcctcacttaattgatagccctccagtgcttcaaatcattagttaccgcaatgtggtttgtaggtttcattgacatttattttttaaatcactgtgctgagaagtagacagaaaaatcattggtagagcctgttcaattagttgaagaagctaaatgtaataatggtttcccaaaatatcaa

SEQ ID NO: 192245 - DNA, 481 bp, Homo sapiens
gtgtatagcagtgctactgatttgtgtacattgattttgtatcctgaaattttactgaatttatttgtcagttctaggagctttttgaatgactctttatggacttctaggtatacaatcatatctttggcaaacagctacagtttgacttccattttattgatgtggatggctttgtttctttctcttgtctgattgctgtggctaggactttcagtactatgttgaatagaagtggtgaaagtgggaatccttgtcttgttccagttctcagggagaatgctttcaacttttccccattcagtataatgttggccatgggtttgtcttagatggcttttattaccttgagrtatgtcctttctatgctaattttgccaaaggttttaatcataaaggaaaactggagatttcaaatgttttctctgtgtttattaagataattatacaatttctgtttttaattctgtttatgtgatgt

SEQ ID NO: 192246 - DNA, 602 bp, Homo sapiens
tccatggagcacataattaaggtttagatggacttcctgaagatatctaaaaatttaacttctgtaatatttatgtttaattagtcagttttagtcatggagtgtttcaatggctggacagtatttaaagcctgaagggaaaaacaactgtagcttctaaacagaataaattaaaattcaatttaaaataactgttaactgagcacaaccacataataagattaaattaagatccaaatcaagatgttatcatagtcccagtgaaaactctaaaaagaaatctcaagttcatttttttcattgttggaaccatctgagaagatgaaaaagaagtatttttaaaattgtattcctttattcattatttaacctaataatttattatttttaacaatattcattaaacaagtaaattttgacatattcagacaatgaaaagtgtcygaaaacccatcaaaattataatgatatgggcacaaaaatgtgtaaaaacatgaaattcattttaggataaatgtcaaaaaatatatataatatgacaaagatttgtcagtaatttccatgggagtgtagtaagatagatgttttgcttataattcaca

SEQ ID NO: 192247 - DNA, 641 bp, Homo sapiens
ctcaataatatttatagtaatacaaaatatttttcacctttgaaggtaaaatcacaatgtctgataccaaataaaaattgacaaccatacacttcaaaactcattttatgaggccagcgctaccctgatgtcaargatgggcaaagacaccacaagaaagaaaaactataggccaatatctctgatgaacatagatgcaagaatcctgagtaaaataccagcaaactaacttcaacagaacattaaaatgatcatacaccataatcaagctggacttatccctgggatgcaagggtggttcaatatatgaaaattaatgaatgtgatgcactatattaacaaaataaaatcataaaaccacatgatcatctcaatagatgcagagaaagtatttgacgaaatagacacatttttaagttaaagactctcacaaactagaaataaaagaaaattaattcaacttaatacatgccatatataaaaagcccacagctaatattatatgcaattatgaaaaattgaaagcttttcctctaagatcaggaacaagacaaagatacttaattttgagactcctattcaacataggattatcaatcctagctagaacaattcaatataaaaaagaaagttttgttgtt

SEQ ID NO: 192248 - DNA, 314 bp, Homo sapiens
aaagttgcagcattttccccgactggagttgaaagcaggatgccatttttaatccaggagcatacagagtcagtcactcttcggcaacccaacagtgtgactacacaggtattttagtctcrggccagcgattggagtgcttgctctggagtttggtaggagcctccagagccagaattgagcaggaaatgtagaaagtgccccaggagtaggcactggaattgtaccctccccttgccacaggtctagggcaagagaagaactactgtagccatgatttctcctgggtgagaagaaaccaacttggtgacctg

SEQ ID NO: 192249 - DNA, 549 bp, Homo sapiens
caactctttaaaaatcagattaagtaggatagataaatttgaaaatacaggaagatataggaattctgttggattcctttaggaagtttttttgtttgttttacactttaaatttacttttagaaatacatcccaatttcatttctgttcagtatttgcactatttaccacctttgcactattaactttttcagatactctacaagatcctttggccaaaagcactaaactttaacaagacttaatcaaatattaytcccttatattttacatcctccaggtcaatagaacagctatacatgaacaaaaatacaagaaagccaatattttagacatgtcattagcatgagccacttgctgattacttagaattcatatttacaacaaatataagtatatagtaattgttaaattctgtaatagtgggtttcatatcaataaagtaaaatactaaaatattagataatcacagaataatgctaactattaccaagtgatttagaaaaatctgcttaaataagattgacctagttctcaaaatgctttaaa

SEQ ID NO: 192250 - DNA, 431 bp, Homo sapiens
acattgtcttttaaaaacttgataattttggctgggcccagtggctcacatctgcaatcccagcacaccgggtggcagcagagggaggatcgcttgagcccaggaatttgaaagcagcctgggaaacatagcgagacctcatctctccaaaaaaaaaaaaaaaaaaattcatccgggcatggtgacatgtgcctgtggtctcaactacatggagctgaggcaggaagatcacttgagcctggaattcraggctgcagtgagctatccagcctgggctggagactctgtctctaaataaataaataaataaataaataaataagcaagcttgataattttacattttacatttgggtcttagatccacctagtcttcatttttacataatgtgaggtagggatccaatatttatttagtttttattcactta

SEQ ID NO: 192251 - DNA, 371 bp, Homo sapiens
acactctgctttagtcactgataaatcccaagtacctaaacagtgccagacacatattaggtactcaattaatattggttatatgaatgagggcttccttctacttgaatataatgtccctcagaactgctatttcttttggcttaccactgtatctctagtgcaggagcaggcattcaataaatacatgttgagtgggcagccgaatggtggattgaataaaattacatcagcactaaamtactggtgctagaaggggaatatggtataaatatccccttccctatgtctctagacaacatatctgacttaccaatcatccattttacatgttaggttgtgatactcctgaagaaaaagaagtttgttca

SEQ ID NO: 192252 - DNA, 445 bp, Homo sapiens
aacctgcatcaaaaagaagaaaaacttcaaataaatatccaataatatacctttaaaaattagaaaaccaagagcaaaccaaactcaaaattaggagaagaaaagaaataatgatggtcagagcagaaataaatgaatttgaaatgaagaaaacaatacaaaagatcaatgaaacaaaaagtttttttgcaaagataaagaaaatcamcaaacccttagccaaactaactacaaaaaagagagaagatgcaaataaatattaataaaatcagtgatgaaaaaggaaacattacaactaataccacagaaattcaaaggattgttagtgactactatgaacaactatatgccaatgaattggaaaatttagaagaaatggatacattcctagaaacatacaacctaccaaggttgaaccatgaagaaattcaatacctgaacagac

SEQ ID NO: 192253 - DNA, 605 bp, Homo sapiens
aaatctgtacattgcttcgggcggtatggccattytaacactactgattcttcctattagtaagcatgttttttcatttgtttgggtcatccttgatttctttcagcagtgttttgtaattctcattgtagagatctttcacctccctggttaggtgtatttgtaggtatttcattcctttggtgtctattgtgaatggaattgtgttcctgattaggctgtcagcttggacattggtgaatagaaatactactgactttggttcattgattttgtatcctgaaactttgctgaagtttatcagatcacggaacctttaggcagaggctatggggttttctaggtttagaatcatttcatctgtgaagagagatagtttgacctctcttgctatttagataccttttatatctttatattctcttgcctgattgttctggctaagactcctagattctgattttttaaatcaagttaatatataatgcattttagggaactctctttaacctaaacatgtaggaaactccattttattgtacctacatgttttaccggtaggatactgaaaaatattaccattgaggtcaactgaaataactagg

SEQ ID NO: 192254 - DNA, 544 bp, Homo sapiens
tttgaaataatatttcccaagaatcacacagaatactcatgaataagaaagtattacctgggaaatactacaggatctccacaagctttcctgamaaagagttttggaaagttctgagaggagcatgctttttctgaaggataattatctttttttttttttttttgtcccaagacaagaaaaaaaaagagactgaatcatttctttttatcactagaggactatgtgggggcatatactacctctttacaattttttcctacactactaattttaaaggaaagtatgaaagattttcctttcatgtttcttagcttagtatgggcatgtggccttcaatctgctgtggctggtgacaccatctcttccctcctttctacaaacaaggttctattttatgaactgggtattagcagtgaacatgcaaggtatggcccctgccacactggaaatcaacaggctagtagagggagatggaccataaacaaatacagagaaacatgtgtaatataatctcaagtagtaataagtggaatgaaagaaa

SEQ ID NO: 192255 - DNA, 570 bp, Homo sapiens
gctttaataggctttacacagctattgctagggtgaaagcaggcattaacagagttaaataatgtaagatgagaccatatgtcaagaaccatctttaaaaagtgctagggaagagagcaggcagaattgtaggaacagctgcctagattaggtagctaaagcaaggtgatgataagacaaatctttcagggttgctctttgcccttagagtttggtttcttgtttatccaaaggtattcagctctagggaaaagggtttaaaaagcttctactgacaatattgatttatttccaaaatctaatttgcattgtatatttgaaaacatccatttacagtaggcagatgataggtaaataacaaactgaaaacaatagaatcccatggggaaaagcaatcacaattcactagacctaaataaatgatcagacgtattttagtcagcagttttagtagcatggctccctctccaggtayccaccccacagacacagactttcccctattcactgttaccagctatcctggaaattctaatctgctttgcacattatctctcttctatgtgttaa

SEQ ID NO: 192256 - DNA, 561 bp, Homo sapiens
ctccagcaataattcatttatttcttgtatctagcacatagtaggtgctcagtttgctcaacaaaggaatagcactctgctatacactgagtgtctgggagttgtaaaagggacatgtcttcatgtcctcatgtcttcatggggtttaaagtttattgaggaaggtggtcgtaaatacatgaacagtcatatgttctaccaaggggtgctgggaagggcattctcacaggatgtcaggcaatgaaatacttactgcagagtctgggtgccaggtaggagttgggcttcccccacaacattctgcctttgggatcaggtagtttggggtaaatcctgcattgagtgaatgagccatatctatagctcctctgaacctgactcatcttacagccttcatctcccttggaagattgcayaaactgccagtgcggcaaatgcaacacagcagtctctcttgaataaaggttacaacaaggttacatctaataaacgtatcatacattgttgggtttttcaggatgtaaccccaccataagttgagaagcatactgaatgtttatc

SEQ ID NO: 192257 - DNA, 457 bp, Homo sapiens
ccatctcccctgacccttcccttcccttcgcagcctctggaaactatctttctactctctatctccatgagttcaattatttgatttttagatcccacaactaagtaagaacatgtgatctttgcctttttggcctggcttatttcacttagcataatgacctccagtcccatccatgttgttgcaaatgacaggatctcattctttattatggctgaatactaaacacattcggcttattccttcattaatggacacttagccaaattttggctattgtgaacagtgctgcaacaaacatgaaagtgtrgatatctcttcaatatagtgatttcctttttggtggggggcatatacccagcagtgggattgctagatcgtatggtagctttatttttagtttttttgaggaacttctactttgttctccatagtggttgtactaatttacattacc

SEQ ID NO: 192258 - DNA, 609 bp, Homo sapiens
tttgctgaggatgctggtgcctgaaagccctagggcttttctattatttgtcctgagagaccttcttaggcccagtccttccctgaggctcctcctcctcccagaaagcccaggatccagctgaggaggtgggagctggggtcactcagagcattctttgaaagactgactaggaaatgggctagactctcctgccccatacattaaagaaaggagagacagagggmgaaattccatgaaggctttctgaatgcttctctctcttcctccagcagagctgaactttctttcccacctgcaactatcatgccactctatcacttaaaatattttattacacttatttgtttttgtgccctccaatagacagcattttaggagcaaataccttgtcttattttgccattcatatttcagacaccaaaggaggccttggcatgcctcatggcttaagtatttgatgaataaagggattaatgaatattgaatgaaaggaattataaaaataataaaatgagcaaattagtgagcttacaaattttattagcttcttattgatgctatagcaagttactacaaacataatggcttaaaacaacaagtgtttac

SEQ ID NO: 192259 - DNA, 576 bp, Homo sapiens
tggcctcttcctcattcttcaaagccagcttcatatctcttcctctctgatttctgctttcatcttttcctctcctctgactctgactctcctgcctctctcttataaagacccttgagattttattggactcacccacataatcctgaataatcttccaatatcaaaatacttcacttcattacatctgcaaagcctcttttttccatgtaaggtaatgtgttcacagatttcaggattgagatgtggatatctttggggtactattattctgtctaccatagatccttgcaggattcttataactcatgtaatgcctggctcatattaagtataaatgagaattatattgggttgggctaaaaattgttattcctagagctagaatttgcaaatattcccatttcacycccatactctcctactcctccaccctctcaagtctgactctctttttagagaagactttattgcacatttctcaaagatgcccacttccccgtacaaaggccaataaatggaaactgcccagttgcagaatatcattgacctgatccatttgcttaatctcatgca

SEQ ID NO: 192260 - DNA, 576 bp, Homo sapiens
tttttacgtctccttgattacaccttttccatccttagagcaacgcttctcagtgcattctccaatgtaaaatcaaatgtcctacctattttgaaagtgctgctttgcatcaattctaaaacttctactgtatgttaagtatgaaattctaaaaattattcagactttctctgttcatagcttagaatattacatagttgcctgcctggcttagaaatgtaattacttcctgcctgccttagaaatacaattacttccaacaaattttctcattattttagatttttttaactgtgttcctctaatcaagtgaaacatgcaaacaggaaatttattcttcctaggttaaaaaaaaatacgtattttgaaatgggaaagctatccacaatgtggcaagcaaggggcatgtttcagccctgtttgtgttacagcacttcttttagmcttgccattcagtgggtcctgagttactgtcctgtaaccaggaagaatgaggtatgcagacaaatggagaatgagcaagatgaagaggagctttattgagcaatagaacagctcagagaagacccacagtgg

SEQ ID NO: 192261 - DNA, 616 bp, Homo sapiens
ggctttccttgggcagtcacattgattccaatgtccaattatgctgagcattgcctaatgaatatatttttacaagctccaaataccatcattttaattcattataattttctccaatgtcacaaagctaacatttcacaattgaattattaataaccctacacccaaatgtgttcctctccaagtacttttccttgcaagcgaatggttccatagtccacttgcttgatgaaaaataaaactgtcatttttctttcattttcttcatatttcttttacagtccatcaacaastcacaaatatgtcttatctagcatcctcaattccacctctaccaagcaacctgtggagtctttgtatttaaaacaacaacaaaaaacaaaaactctatataatttttctttgcataaaacccttcaatatcttcctcaatgttcttggaataaaatgagaaaatgttttaagaattacaagtcctacatggtctatcctagcctaatttccaattgttttgcatcccactttttccttctttcatggatcattttagtctccggactatatcaagatcttcctggaatatgctttccaggactgtatcctgggatattctttc

SEQ ID NO: 192262 - DNA, 616 bp, Homo sapiens
ggctttccttgggcagtcacattgattccaatgtccaattatgctgagcattgcctaatgaatatatttttacaagctccaaataccatcattttaattcattataattttctccaatgtcacaaagctaacatttcacaattgaattattaataaccctacacccaaatgtgttcctctccaagtacttttccttgcaagcgaatggttccatagtccacttgcttgatgaaaaataaaactgtcatttttctttcattttcttcatatttcttttacagtccatcaacaagtcamaaatatgtcttatctagcatcctcaattccacctctaccaagcaacctgtggagtctttgtatttaaaacaacaacaaaaaacaaaaactctatataatttttctttgcataaaacccttcaatatcttcctcaatgttcttggaataaaatgagaaaatgttttaagaattacaagtcctacatggtctatcctagcctaatttccaattgttttgcatcccactttttccttctttcatggatcattttagtctccggactatatcaagatcttcctggaatatgctttccaggactgtatcctgggatattctttc

SEQ ID NO: 192263 - DNA, 408 bp, Homo sapiens
tttgctatttttggatatattcaaaagaagaaaaccattaagataatctttgaaaggtaccattatacaaatagttcatctacaagatactcattgaagctaaactttttctagtatagtaaaagctaaaatggctacacatagtttattttttatttttattttatttttctctgtgaactctgcagagaagtatacacatagtttaacattctttttcgtaggtttttgtcattgtttcctttacacatgggtgtgaacatgtcttaaagttttaaaattattaatatattagtgccttattaacattgttacaaaaggtacaagttaactatctccttaggtgagctaaaccatgtgctattttttttctctacaaagtccacaractttttcattacaaagcat

SEQ ID NO: 192264 - DNA, 664 bp, Homo sapiens
aacatgcagtctcctcaattagtgaaaacacacctgcctgttcaacttctcccttcttcattttggaagaataactgtaagatagcaaattttaaagagatataattcttatttgtgttgtaaattttttttaccaattatgcagaaacacaaggtgaggggttgcaacctctagataagtaattgcaaaataataatgtggctcctatatcccacagatcaaagtaacaccagtggacaccaatgttgtagctaggggttacactcaatgcccaagcactgagaacctatcaacttttctcaacatgcctgtcattctctaaatcctttgagtcattgtcagttgcttttaaacaatggatattcaaataactcctgaactgcttcttcattatttagcataattgtagtttacaaatatgcatttataattgggtacaggctacaagtaatataagattttatatttaaaaatttattttaaatttttaaaataaatattttaattcaagtgtagtatttagatagaaaagtccataaatcctatgtatgcagcttgatgtattttaacaaagtgagtgtacccatgaaatcagcaccmagataaaaaatatagaacattgctagcaccccaaaagctttgttcctgcatacttctagtcag

SEQ ID NO: 192265 - DNA, 672 bp, Homo sapiens
ctcagtgtgggggcttccaccccacatttcccttcctcactgccctagcagaggttctccatgagggaccttcccctgcagcaaacttatttctggacccactcaagcatttccatacatcctctgaaacccaggcgaaggtttccaaaactcaattcttgacttttgtgcatccacaggctcaataccacatggaggctgccaaagcttggggcttgcacccactgaagctacagcccaagctgtaccttgaccctttttagctatggctagagcagctaggatgcagggcaccaagtccctagcctgcacacagtaggggggcctggcctggcccatgaaaccattttttcctcctatgcatctgggyctatgatggaagggacttccacaaaagtctctgacatgctctggagacatttttcccattgtcttgatgattaacatttggctcctcattacttatgcaaatttctgcatctggcttgaatttctccttagaaaatgtgtttttcttttttctagtgcatcatcaggctgcaaatttttcaaacttttatgctgtgtttgcttttaaaactaaatgcttttaacagcatccaagtcacttcttgatgctttactgcttagaaatttcttcccccagataccctaaatcatctttctgaagtt

SEQ ID NO: 192266 - DNA, 397 bp, Homo sapiens
tgtagttggctggtggtgataaagactgaagattaagtctacctcacaggggatacaggttccaacctggtgtgggggcaggtctggaggctcagtctgcaggcactggcctggagtctgagcccctagggttctacctagtgctttattttactgtgacatccaagacaaagtcctatacttacttgcttctctttcacccaagtacactgtatctctctccattttgtgttgcctggagggggaaaaggaatgacacggataatgcaaaacttttatttctactctcgtcaatgtatcttttattattattgtgctataattaggtaatgtgrtctctcacctgactttattagctcttgtggaggtacttttgtgtgtaaagagttgttcaaat

SEQ ID NO: 192267 - DNA, 463 bp, Homo sapiens
tgaggtttggtttgattagacctcatctcataaatattttaatgtagaaaatgtctaaccataaaagcaaagaaaacgagcagaattgcagtagtttgtttgctttacttaggttattttcttctaataatataatcagtggccagtagcaaatgggaagtgagggaaaagcagaaaatagagataaaaataaataaagaaaacgtataataaagaactctccaaggtataaagctctaaatcagatactgttggattgaagatttaaagtcttgtaaagacccctgaagatctagattacctaagtaatttctrtacagaataataattgtttgttttatttctttttattacaactttgaaaggaagttttgttttaaagaatctctatgctagtacttctcaaactgcttaagattgaataatctcagtttcttcttcccccagacgtgtatattatata

SEQ ID NO: 192268 - DNA, 565 bp, Homo sapiens
ttaggaatattgagcatttttaaatatatttgttggctgcatgtatgtcttcttttgagaagtgtctatttatgtccttttcctatttttttagtggagttgttyttttgctcattgaattgtttaagttccttttagattctggatattagacctttataaaatacataatttgcaaatattttttcccattccgtaggttgtctgtgtactctgttaataatttcttttactgtgcaggagctctttagtttaattgatcctatttgtaaattttggggggttttgcaattgctttaacaatgtaattataaatttgttgtcaaggctaatttccagaattgtatttcctaggttttcttctaagatttttatagttttagttcttacctttaagtctccaattcatcaagttaatttttgtatatggtgaaagataggggtccagttttaatattttacatatggctagtcagttatcccagcaccacttactgaatagggattcctttcttgattgcttcttattattgagcttgtcaaagaccagatgatcgtatttgtg

SEQ ID NO: 192269 - DNA, 565 bp, Homo sapiens
ttaggaatattgagcatttttaaatatatttgttggctgcatgtatgtcttcttttgagaagtgtctatttatgtccttttcctatttttttagtggagttgtttttttgctcrttgaattgtttaagttccttttagattctggatattagacctttataaaatacataatttgcaaatattttttcccattccgtaggttgtctgtgtactctgttaataatttcttttactgtgcaggagctctttagtttaattgatcctatttgtaaattttggggggttttgcaattgctttaacaatgtaattataaatttgttgtcaaggctaatttccagaattgtatttcctaggttttcttctaagatttttatagttttagttcttacctttaagtctccaattcatcaagttaatttttgtatatggtgaaagataggggtccagttttaatattttacatatggctagtcagttatcccagcaccacttactgaatagggattcctttcttgattgcttcttattattgagcttgtcaaagaccagatgatcgtatttgtg

SEQ ID NO: 192270 - DNA, 555 bp, Homo sapiens
aactataataaaaatttaaatggaagacttcaaactataaaaatatttgaagaaaacctaggatataatttcttgtcaagggcctaggtaaaatatttttggataggtctccaaaagcaattgcaacaaaaacaaaaattggcatgtgggacataattaaattaaagaacttctgcaccataagagaaactatcaagagattacacagacaatgtatgccaagtatatacactgctgaattgacagacttttcaatgaatggtgcttggaaaactgtatatctgtatgcagaaaaatgaaactagacccctatctcttgccatatataaaaattaaataaaggaggattaaatatttaaatgtaatacctcaaccatgaaaatacaayaagaaaatgttgaggaaacactctaggacagtgttctgggaaaatatttcttgagtaagacctcaaaaatacaggtaaccaaagcaaaaacggacaatgaaatagcatcaacctaaaaagctcctgtacagtgaagtaaacaaacaacaaagtgaagagacagccca

SEQ ID NO: 192271 - DNA, 555 bp, Homo sapiens
aactataataaaaatttaaatggaagacttcaaactataaaaatatttgaagaaaacctaggatataatttcttgtcaagggcctaggtaaaatatttttggataggtctccaaaagcaattgcaacaaaaacaaaaattggcatgtgggacataattaaattaaagaacttctgcaccataagagaaactatcaagagattacacagacaatgtatgccaagtatatacactgctgaattgacagacttttcaatgaatggtgcttggaaaactgtatatctgtatgcagaaaaatgaaactagacccctatctcttgccatatataaaaattaaataaaggaggattaaatatttaaatgtaatacctcaaccatgaaaatacaataagaaaatgttgaggaaacactctaggacagtgttctgggaaaatatttcttgagtaagacctcaaaaatacaggtaaccaaagcaaaaayggacaatgaaatagcatcaacctaaaaagctcctgtacagtgaagtaaacaaacaacaaagtgaagagacagccca

SEQ ID NO: 192272 - DNA, 559 bp, Homo sapiens
tcttatcagagaacataaccttcatgagaggaagacaggaagaaaagaaggaaggaagagaaggccataaaacaatcagaaaatgaataacaaaatggcaggaataagcacatacttatcaattaagaatcatattgaacataaatgaatgaaactcttcaatcaaaagatgtagttggcaaaatcatagacttgttgaatggatgaaaaaacaaggtccattkatatgttgcctataagaaacacaattcacctataaagacatacatagtctgaaaataaagggatagaaaaagatattacatgctaatggaaacaaaaatagagcagaagtcactaaccttatatcagacaaaatagatttcaagacaaaaactataaaaatagacatacaaggtcactatataatgattaaagggtcaattcagcaagataatataacaattttaaatatatatgcactcaacactggagcacacagatatacaaaagaaatattattagagctaaagagagagatagaccccaatacagaaatagctggagacttcaacacccc

SEQ ID NO: 192273 - DNA, 541 bp, Homo sapiens
tcatgtaaacatttataaaagaccagtggaataaaatagtccagatacagacccacatttataaggacaactgatgtaatacaaatgtgactgcagtaaagtgaggaatgaatggcctttttagtaaattgtgctaagtcaactggatatctctaggtggggaaaaccactggagtcctaccatataaatattcattccagatatattttagatttacatgtgaaagacaaacaataaatcctgtagaaaaaaagagcatctttattacctcgttgcaaacaaatatttcttatgtgggatacaaaatgcttastctgcagaaaaaattataaattgaacaatattaagactaataataccaaaagacactgttaagtgactaaaaactcaagtcatagaataagcagatgaaatagcagatgtaatatcaaaaaagccaacagttttgtgtttcttaagagtaagaaaattgacgaccacatggcaagacatattaaaaaagagagagagaatactcatcaatattgaggatgaaatagg

SEQ ID NO: 192274 - DNA, 498 bp, Homo sapiens
agctgttaaatctgtctatctatctattacttgcaaaatgagtagttcatcttcgtcacttggaaattgcaatatataatatggctattgagtcacctctggtgttttatagaatgtgtaaattagagtcccactccaggctttcttaatcagaatctctagagagagctacaagaatctttcttttacaaaaacttctactatgcacaacaatgttgatactcttgccaatagttctagaggaagggagggaggggatatagaggatgcaagttgtgagaaaatagtttgttccctctccttttttcccatattcgaagttacaggagaagctttttcataagatttgtgacatcwtgttctctttctctcaatagaagagaacaggacagggtacatttagtgcccttcttatgaataggctgcattatcttattaatcatttgttgggactctatgcattttaccagagacattcctttctaatgagtaagtttt

SEQ ID NO: 192275 - DNA, 545 bp, Homo sapiens
tactagagatgctttctatgcctgaaaacaattttcatgctaagatgttgagtgtacaccatgcagccacatgaaactaggtattttacatattattacattttaatcctcatatcaacaatgttgactggtatcatatccctcatctaaaayatcataatatgttttagatgaggaaaccaagtatcatgcctagggttccatataaattgcagaaccataatttgtacttaggcacatatagtgaggcaggatattaaagaaagaaaagcaaaataaaaattaaaagaaaaaaataaaacaagctgcctgtgttaggcagactcatttcaaaggcagtaacaggcaaagttttgataacgttatctaagggccagagctcaaagggatgtgccctgaagactttcccagcactccctcaatatagagatgtgaggagataagttctcctatctctcctttagtgtaagtaaacttccccctcgaatcccatgccgtctgctatgtaactatatcttgctccttgctctgtaagtgttatgagt

SEQ ID NO: 192276 - DNA, 558 bp, Homo sapiens
tgtgtctgagtgcactcaataaagattctcctgctttactccgaggtctctcttgccctcctgatttttctgcaacatttctggtgcgccagccaggagggagagatgacagattggctgtctcctttgcctgtgggtctggggctcccagccatgggagatcagttaccccaagcatgccactgggagaacctcaacctgaaggggagatcggctctcctgcttctccggcgcccctcccctaacagtgcaacagaacctggaaggggttacaggacaatcccagaagcagctctactgaactgtggtaaggttttggggctcaaggcaggacctgtcccgtaaggacagaagaggagcttgatcacctcccgaggtataaccactaatttgacccagagaggctggaggtgagagtggctctscaattcagatgaaacttataccccaactgacatggtatgtgagagaggattgctaagtcagttagaaaagggaactgggagaggggaagtgtgtgaaactgcgtgagagatggttctgggagggactaacgca

SEQ ID NO: 192277 - DNA, 408 bp, Homo sapiens
aatttaaaccagattcaggaaatattaaaacatgtttatttgatttttccccttcaaagtgtgctccataatcacatatattcacaaatcacatatttcagaagttacaaagaactgtatattaatcaagttaaaatgtatttcataatggttttcacacatgaaataaggttcaaaatgtataatttctcccatcagaaatgattgcaaattaaattttacaytttatataattaggtaaaatatgtgagtactaaaggacaaatattattaaaacaaattggtagtgtgattcagcttttctaagttatttaatatgctctttagtatatacctcacatatgagtatacactctcatatatttataatgtacttcattgtatgagatattgagccaaatatgatac

SEQ ID NO: 192278 - DNA, 502 bp, Homo sapiens
ataacttttatgactttcaaaatacttatttttccaatctagtgaaaagtatgttcaaatattatctaaaaaactaaatctaatgcatctaatatttttactatgaccttcaatttataaaactagtattaatcattggcatacaaaagtattctataatctgttctcagttgctagaagtccattatcagtctctcctcacaatagacattgtttaacttgcttaagcaattagttagatctgttaatgcatatgtcatatttatagtacttaggtaaatagttgatatgagtactttgtaagataatagttttcttctttatgagactaagtataactttttggaggtcagtgtatttttgtctgaaatgctttctttgtacttgacattaaaaaatayctgatgtttatatatccataaatagctaattttactttttaagattgtcctcatattcttacttcctttggttactaaattcaaaatgttttcacaatttg

SEQ ID NO: 192279 - DNA, 502 bp, Homo sapiens
ataacttttatgactttcaaaatacttatttttccaatctagtgaaaagtatgttcaaatattatctaaaaaactaaatctaatgcatctaatatttttactatgaccttcaatttataaaactagtattaatcattggcatacaaaagtattctataatctgttctcagttgctagaagtccattatcagtctctcctcacaatagacattgtttaacttgcttaagcaattagttagatctgttaatgcatatgtcatatttatagtacttaggtaaatagttgatatgagtactttgtaagataatagttttcttctttatgagactaagtataactttttggaggtcagtgtatttttgtctgaaatgctttctttgtacttgacattaaaaaatatctgatgtttrtatatccataaatagctaattttactttttaagattgtcctcatattcttacttcctttggttactaaattcaaaatgttttcacaatttg

SEQ ID NO: 192280 - DNA, 555 bp, Homo sapiens
gagtggtaatatccaaaactttaatggcattaatcctactttatataacacagaaatttggccccatgtgaaatattacttgctttargtagttttgggaaactcccaggggtttctcgtatcttagcacaaagaatcctctgagattttattcactgcccaagtattcattctccatcacagttgtccacatcccataaagaatctgtgatctatgtcttatcattgtccctttacacagggtttgagagtattaatgttaatttgctcataccacacagctgcaaaaccttgcatggtttatgaaactactgtaacaaagtgatatgtctcttgagagtttgtttagccggaggtaagttataaattcctcataagagagaaaattattccagctctctaacaaataactctcttcatgttttggacagcagagcaccacttaaaagctttatgaaaagaacaattttagcttctggcaatagtcccttttctccataagactaagaaatacattctctctgtttggctgttattcaaattccaaatcaacca

SEQ ID NO: 192281 - DNA, 582 bp, Homo sapiens
ttatgcatattaacagatgaaacaaaaccgccaattttgagtaatatgattaattttttgaaaagttgtttgttaacttattaaggtagcaaatagtcctagtgttttcaaattgtgctctttcttttctaaaaacaatatatttaacctattaaaaataacttctagagtaagaaagcaggtatatttttcatcaaaaattgtatgcattataagtttgagcaaagaagactgatgtgtrtatatcttatctgtatgcttatacacagatgtaaatgtatgtgtatggacagtcatcccttgctatatgtgggggattggttccaggaactctgcctctgaatatactagaacctgcctatatgaaaattggcactcaaaacatgtgggtgggtttctcatcatgcaaatactgtattttttattgcttttagttggaaaaaaactgcatataagtgaacctggccagcgcaagtctgtattgttcaagggtcagttgtgtacatgtacatatatattctttttcctggtagaagaatcagaaaataaatctttattaaacaaggcaaattctcattgtga

SEQ ID NO: 192282 - DNA, 573 bp, Homo sapiens
aactaacataacccactaatacagtataaaacactttgatgtcttgccaagaaacacacttccttcaagagagaagtcaacatttgtttttcacattaaatggcatgtagttgccagtggaaaaaaaattctaaggactactttttaattcgatggatagcaaccgcaggggtctaaaagaaaataacgacgatagctatagacacaaataactaaattaccaaaacgttagtatatctccaggcttcattaatatgtaacagactccccagttaatctccaaaagctagtgttccccctgtaaaatagcactctgggacgaattgtacatgagatcaatcactgctaacgcaggaagktttactgcaggaaagaaaaaaaaagctatttacaccttcagatagaagcttttcagatttaggagtaagagccatacatcaccaagaataaatgattatgaattggtaaatgcgccctccagcgattagctatgcgatgctatttatcatttcttgggtggtgatgatggtaaagggtttttttcttcctctctttttccttcttttaaaacca

SEQ ID NO: 192283 - DNA, 626 bp, Homo sapiens
caactttcttttctttcttcccccttcccccctcccttcaagagcagcaaaagaggcttttgttatttgctccttttgaagtttgtttccctcttgctttgtccccctcctgtttataatttaagatcttgggagcacacgggcactatgctctctttacaaaaaaatgtaatttctcagtgtaaccggyagcctctgtatttctcgcttttatctaatcagacttccggcaccaccgcacccccctccccgaaaacacacacacacacacactcacacacacaggtggatgaaagcgcttaagttcccaggttattgaggtttgaattttttaatggcaaatttgaaacgttgttgccagtttcctttactttttctctctcttgcgttatttttctgttttctgcctttccgttgtctccttcgactgcccccgctaaccctgtctctcctcactcctgttccctacttgggcccctttcattcaggtaaaactgtaaatttcccaacgcgctattgttcccttgggctgcccaaagctccctagagatccccgaatactttttcggtatttaaatccccaatagataggaccaatgtaaattttgtgacattcaaaccttttc

SEQ ID NO: 192284 - DNA, 500 bp, Homo sapiens
cccacttctcctactgcccggtgccttgccttactcgcccctattcttgctggaacatcgacaattgttggagtcaaagaacttcctaaggctagttgttctaacgcctatcttctccccaaactctcccttyccggggaaggtccatggcccggacactggcacatgcggagaccagaccaaagtccacttggagcctggcactttatttctaaagcttgtctggaagtgtacggtttccctgagttcttttcagggtttcccacaatgtcgcatggatctcaccccctcaccagaggttttagcttcgggaaggggcggtaggtcacactggaatcctggccccaggcctgctactccgggagctggcggcggacacccggaaggtagactcgcagtcctgagctggagaaggaactcatctttaatgacagggtttttttttttttttttaaacaaacaaacttttacagctctttgccggcccactgtttgaattc

SEQ ID NO: 192285 - DNA, 500 bp, Homo sapiens
cccacttctcctactgcccggtgccttgccttactcgcccctattcttgctggaacatcgacaattgttggagtcaaagaacttcctaaggctagttgttctaacgcctatcttctccccaaactctcccttcccggggaaggtccatggcccggacactggcacatgcggagaccagaccaaagtccacttggagcctggcactttatttytaaagcttgtctggaagtgtacggtttccctgagttcttttcagggtttcccacaatgtcgcatggatctcaccccctcaccagaggttttagcttcgggaaggggcggtaggtcacactggaatcctggccccaggcctgctactccgggagctggcggcggacacccggaaggtagactcgcagtcctgagctggagaaggaactcatctttaatgacagggtttttttttttttttttaaacaaacaaacttttacagctctttgccggcccactgtttgaattc

SEQ ID NO: 192286 - DNA, 448 bp, Homo sapiens
cacttctcctactgcccggtgccttgccttactcgcccctattcttgctggaacatcgacaattgttggagtcaaagaacttcctaaggctagttgttctaacgcctatcttctccccaaactctcccttcccggggaaggtccatggcccggacactggcacatgcggagaccagaccaaagtccacttggagcctggcactttatttctaaagcttgtctggaagtgtacggtttccctgagttyttttcagggtttcccacaatgtcgcatggatctcaccccctcaccagaggttttagcttcgggaaggggcggtaggtcacactggaatcctggccccaggcctgctactccgggagctggcggcggacacccggaaggtagactcgcagtcctgagctggagaaggaactcatctttaatgacagggtttttttttttttt

SEQ ID NO: 192287 - DNA, 440 bp, Homo sapiens
cctagggtggaggtaaactactaattgccgttttggttttcctcatgccatctttatgttacctcctttttactcttacccttttctaaccttttcaaattccgttctcttttcwtgcatccttgatacagaaagataatgtatgaatttatgccttcatcaatttaaagtcttacagacaaatatgtaggcttggttttgaacaatctcaacagccactctgcagttaagctagaatccctgctaagtagcttactaatgctttaaacaaaatcatgaaatcatagatacgtcattttatatagagatgtatataagagacacagagatgtcatttatgtttcttgatttattatcattttccatgaagtaagaagaaattgatggagaaggtgttcttgtgaggtcttcatttaaaataatataaaaaataagaattc

SEQ ID NO: 192288 - DNA, 429 bp, Homo sapiens
gaattctccttatctatttcaccttcctagggtggaggtaaactactaattgccgttttggttttcctcatgccatctttatgttacctcctttttactcttacccttttctaaccttttcaaattccgttctcttttcttgcatccttgatacagaaagataatgtatgaatttatgccttcatcaatttaaagtcttacagacaaatatgtaggcttggttttgarcaatctcaacagccactctgcagttaagctagaatccctgctaagtagcttactaatgctttaaacaaaatcatgaaatcatagatacgtcattttatatagagatgtatataagagacacagagatgtcatttatgtttcttgatttattatcattttccatgaagtaagaagaaattgatggagaaggtgttcttgtga

SEQ ID NO: 192289 - DNA, 526 bp, Homo sapiens
gctaagtaaccaccagttattacaatttttttaaaaaaagtaatgtacgttttctctctagaatacatatggcaaagagtgatacaaattttatgaaccagtagacttgtttgtgtccctaaatataattttgaatctatcccaaatctaaggagaattattcattattatgttctaactcatagcgaaacgaaagtcattctcaaatttaatgtactggaacagtattctagtgttctaaaacgtactttaaaccaatgaggatctctgttgtctttggatggctgagctttgaaggagctccaaattttcctgtgtagtccatagatgagtttatagtttagatatatgaaggcaataacagttgggatcacagaatatctcttatttgctgaaggaggaaaatactttttgtcattcctggytactttgcaagaggtaaaatatttcattgccttaaagttggaattaatttatagcaactattcgaagaatctattcaattacacaccaatgggtatgaaaa

SEQ ID NO: 192290 - DNA, 421 bp, Homo sapiens
ctcttagtctttttccaaattattgtataaccttgagcaagttgcttttcttcttagcatctcagtatgccttataaaactgatctagccttagctgcttggaaaaacttttattttcatgaagaactataagctttcagaagaaaggtggcatttaaagtgcccaacattattcttagataataaattatcctattgccagttatatcctrtagcaattgagtactttcctgcttcttccaaagatgtccccaagtgtctgtgtcattttcagcaggtcctcacagatgtgttctatggatgaagacaaaaaatgccggagagtggttatggctaagtgattcagctctgatttcttgtatgggttagtagtgaaatattggactactgctactccctccactttcctctctgaccaaag

SEQ ID NO: 192291 - DNA, 482 bp, Homo sapiens
ttgcaggcctcatcaggtgtctctcaagcctaggccactaggacctccctcccagcttttgtcctagtcacccttctctgataagtataagcccccttccacttttcctctactaagtcaacaaggacctttaggttattttctggattttctttctaactgacttctgtcaagtctcctggtgtctctgaccaaatcatcagatctgctagcaccaaacaataggaataagaaaagagaaaggagagcaggtaaagaaaaccaaacagaacaagttccaatgagggccaatataacaggacaaatattaggcatctaaaatgtgcaaaggtatacagtcattgctctgtatatgaaggatcgattccaagacccctgtagatgtcaaaatctgcagatgctcaagtcccttatgtaaaatgccatagtatttgcatataacctatgcacaccctyccatatagtttaaatcatctctagat

SEQ ID NO: 192292 - DNA, 633 bp, Homo sapiens
ctggcatgtgcccctctgggacggagcttccagaggaaggagcaggcagcaatcttagctgttctgcagcctctgctggtgatacccaggcaaacagggccaggagtggacctccagcaaactccagcaggcctgcagaagaggggcctgactgttaaaaggaaaactaacaaacagaaaggaagagcatcaacatcgacaaaaaggacaaccacacaaaaaccctatctgaaggtcaccaacagcaaagaggaaaggtagataaatccatgaagatgagaaaaccagcacaaaaagtctaaaaattccaaaaaccagaacacctcttctcctccaaaggatcacaactcctccccagcaagggaacaaaacyggacagagaatgaatttaacaaattgacagaagtaggcttcagaaggcgggtaataacaaactccttggagctaaaggagcatgttctaacccaatgcaaggaagctaagaaccttgataaaaggttacaggaattgctaactagtataaccagtttagagaagaacataaatgacctgatggagctgaaaaacacagcacaagaacttcgtgaagcatacacaagtatcagtagccgaattaatcaagcagaagaaagg

SEQ ID NO: 192293 - DNA, 620 bp, Homo sapiens
tactgcttttcccagtgccatgtacacctcatgagtactggaaattcctctgaaacttggctggtcacactggtgagatacgcacgtttccctgacacttgcattttaagccagcaatcctgccccttgttgtcatttaatgtgctgatgcagctgtttcgacttccccctttgtaactagaattagctttygacagaggagttaaattcccaaagtagcattttcttccttgctgggctctttgttgattagtccctgatttcccctgtccacaagtgccacccatcacctgtggaccgtggagaaactatatgcgctctagtagcgctaatggccttgctggggccagaaagcagatcttgacatatcaaggtattgtcacagcatacccttacagtcaggccatgagattactgagcagaacaaggcctgagactgttcataaaggagcagagaaaggcagccaaggtcagaaagcagcaatttcacatagatcctgaaatggctccaatgaagtcatgtggacattgacttccagctggcagtcctgagcccttgttgtcatttgaggcactgaggtagctgttctgattttctaccatcactaaaaagtggccct

SEQ ID NO: 192294 - DNA, 577 bp, Homo sapiens
ctcatctacaccattatcctagggcttccagaatgttctgttcactagcacaagcactcacataacattgtgtcagacgaagggaccccactttacagccaaggcagggggggcaggaatgagcctgatgctgaggtatgctggtttatcatgtactgtatcacccagagctgtcagcctgagggatctgtggaatagcctacccaagagctcatagaaacccttcagaaatcatgacattatgagaatagagcaacatcctccagaatgcagggtatgtttaaatcaaagccctttatacgtggctgtgtccccagcaggaagaacataaggaccctggagccaaggagagaaggaagtggcctctctggccatcactcccagtgaccacatggagaacatgcgcttcctgtctgtacatctctactctgcasagatggtggccctggctcccaaagggagaagactacttctaaggcacacaacaggagtcatatggaactataagctagtgcccctcatgctcagggaccatcttacggggttatggactttgatagctaggagatgaagtgtt

SEQ ID NO: 192295 - DNA, 388 bp, Homo sapiens
tcagtgacaagtcatgttgatagcatgtattcttgagaccgtgttttgggaagatactgtgtctttctcccaaaaccccatcaccctagtctaagcaggagagaacatcagacagatccaaactgagggacattctacaaacatttgattaaaactctttaaaattgtcaaagccataaaaaaaaaaacagcaaaaaaatctaagaaattatcacagccataggtgtctaagcagacatgaagacyaaacatgatgtggtatcctgagtgggattctgaaacagataaaagatattggatttgggaccagtctagacaacatggcgagaccccatctaaaatacaaaaattagccagacgtgttggcaggtgcctgtaatcccagcta

SEQ ID NO: 192296 - DNA, 633 bp, Homo sapiens
gtgccaatactgaaggtgttgaagctcttaagaaagggctgcagagggtaattgtgaattagaaatatttgctgaaacaaatatttaatgtcaataaaacaagcttgttctggaagcatatgctggagagtacatacactcatcaaaagtccaaacaatgccaggatcaaggcattcaagaactgtgtaatgctgctttgggatggaagtattgcaaggtgcaaataaaagactttcctaatctaccatggggaaccctagagcattcacaaacgtgagcaagtatgcatttccstttattagctctataacaagaaaccctgggtgacatctgcattgtttgaagactggttttgaacagttttattccacaggcaagagaatattgtaggcaaaacaacatctcattcgagattcttctgatcttagacaatactccagggcatccacagcatattggggacatgcatcctgctgtgaaagttgtgcatttgccaccacacatacacaaccgcactgattcaaccaacaaaccaaggcacaatagctgtgtttaaagcacactacttatgccaaacgtttgtgcaggctgttgaagtgactgaatctggctgtatctgaagtttactgaat

SEQ ID NO: 192297 - DNA, 633 bp, Homo sapiens
gtgccaatactgaaggtgttgaagctcttaagaaagggctgcagagggtaattgtgaattagaaatatttgctgaaacaaatatttaatgtcaataaaacaagcttgttctggaagcatatgctggagagtacatacactcatcaaaagtccaaacaatgccaggatcaaggcattcaagaactgtgtaatgctgctttgggatggaagtattgcaaggtgcaaataaaagactttcctaatctaccatggggaaccctagagcattcacaaacgtgagcaagtatgcatttccctttattagctctataacaagaaaccctgggtgacatctgcattgtttgaagactggttttgaacagttttattccacagscaagagaatattgtaggcaaaacaacatctcattcgagattcttctgatcttagacaatactccagggcatccacagcatattggggacatgcatcctgctgtgaaagttgtgcatttgccaccacacatacacaaccgcactgattcaaccaacaaaccaaggcacaatagctgtgtttaaagcacactacttatgccaaacgtttgtgcaggctgttgaagtgactgaatctggctgtatctgaagtttactgaat

SEQ ID NO: 192298 - DNA, 178 bp, Homo sapiens
tctgtttttcactgtcagtattcaataaattacatgagatattccacaccctattataaaataaaccttgtrttagatgattttgcctaactgtagggtaaggtaagtgtttggagcatgtttgaggtaggctaatattcagtaggttaggtgtattaaatgcattttcaacttatga

SEQ ID NO: 192299 - DNA, 617 bp, Homo sapiens
ttggcgctgaactattaatctttttttttttccctaggcctccgtttcctatgctattaaaaaaaagtgttttttagtggccaagagcataaattctggattcagattgttgtattctcaccccagctctgccatttataagatgtgtgatatcattaaattcatcatttttgtgtgtctcagtgggttcatcaggaaaatgggcatgttaataggacctaacatataagactcttggagatattaaatgagttaatagacacaaatctctcagacagaactgtgtacatagagtgctagcaatcatcatcattattaatgtcattgttatcagaagttggtaactagattcatccaaaccaggttgtattcacaaatgaccaagatagaataattttataagatacagcttataattgtatagaccaatttgtacatgaaacactccctacatacacctcacacatcatctatagaaactcttccctccaagtaggaaagtgatgcatctacatttcctcatggactccrtactcatagataggtatctgccctgtggaagtttatgctttcagctcaggcagaagatacttgtccttgtaactgctttggataat

SEQ ID NO: 192300 - DNA, 577 bp, Homo sapiens
ttgctcaccctgtttcctcttcctggaaaggcctcctgatatccttggctctttctggctggtacctcttcacactgtagcagatgctgctggcgcctggtctcagctcgccctggccacttccaggttcccctgcagcagccacctagcgtccagcytccacctcctcatgcctctgctcctctgcctaaggtcttcatttggcagaagccagctgatatgctttggctgtgtccccaaccaaatctcatctcgaattgtggctcccataattcccacatgctgtggcaggggcctggtgggaggtaattgaatcacggggacaagtcttttccttgctgttctggtgatagtgagtaagtctcatgagatctgaaggttttataaaggggagttcccctgcacaagctgtcttgcctgttgccatgtaagacatgactttgcttctccttcaccttctgccatgattgtggggcctccccagccacacggaactgtgagtccattaaacctcttttctttataaattacccagtctcgggtatgtcttaattagcagtgtgagaacagaccaata

SEQ ID NO: 192301 - DNA, 562 bp, Homo sapiens
tgtgttcaccacaaaaacataagtatatgagatgatggatttgttaattagcatgatccgatcatcccacagtgtgagtatatatcaaaacatacaatcattatttgtcaattaaaaataaaattaaaagaagatactcattaaggtccactcacaccttatctggtgaccccatcccaggtgagagctggtgagggtctcctcctcagagggcccaggaatctgtggtttcccctgtcccagcacagagcaggatggagtgcaatggtctcttcacttctctgtctcccccagtaggccatgggttcctggagggcaggagctctgtcttgtgagctttagactccagtgcctagcagataggagattctcagtgtttacttttcagctcagtaattcaccatgtggctcagtttctccatttatgagcttgtctctagggccctggaccttgtgagtcttcatgaggacaggatgtggggtgggccagttrtcacgtggggctcctgccaccaggcaaggtcctgatataactacggttatagttgcggtgtggggcaag

SEQ ID NO: 192302 - DNA, 599 bp, Homo sapiens
ccactaactgtcactccccattcttacctctaccctaggtaaacactaatttactttctctctgcagatttgccttttctgaacatttcatagcaaagaaatcacayagtatgtgttattttgtgcttggcttcttccacttagcatcatgtttttgaggtttatccatgttgtagggcacagtagtactttgttccttttttattgctgaattatagacccagggccaattgtttgaagtggtagcgtgtgtgtgtgtgcgtgtgtgtgcatatgagcatgtgtgtgcatgtgtgtgtgtgtgcatgtagaagagacactaggagttgaggtcctgtggggaggactggctgggtttctatatgacaacctgttttagtgtctatccatttttaatggtgagatgacccatatgcaggggctccaagttagctggagaggacagggcgagtatctggtggttctttctactttagaggcaagggctggccaagtctgcctttttcctccttaccgagtccttggcacatttcttctgaaaacaacggggatttttggttgtttaatgtattagtccattctcacattgctataaagag

SEQ ID NO: 192303 - DNA, 593 bp, Homo sapiens
ggggaaaccacccccatgatccaatcacttccccccctcaacacctggggattacaagtccctcccttgacatgtrgggattataattcgagatgagatttgggtggggacacagcttaaccatatcaatgattatattaatatcggacaaaatatattttggggaaaataatattaccagggataaagaaggcaatttcttaatgatgaagaagtcaactcattaggaggacatacaatcccaaatgtgtatgcacctaataacagaattctaaaatacatgaaaaaaaaaatactgatcgagcaacaagaagaagcagataaactcacaaagaattcagaacaaccaaaattagtaaggattaggaagttttaaacaacacaatcaatcaacttgaccaaattgacaattataaaatgctacaaacaataacagaatacacattcttttcaaatgcacattgatctcctaccaggatagatcacattctaggccataaagatgtcccaattaatatataaggatccaagcaatacaagtatgttctttgaccataatggaattgaattagaaattaataatggaaagatct

SEQ ID NO: 192304 - DNA, 593 bp, Homo sapiens
ggggaaaccacccccatgatccaatcacttccccccctcaacacctggggattacaagtccctcccttgacatgtggggattataattcgagatgagatttgggtggggacacagcytaaccatatcaatgattatattaatatcggacaaaatatattttggggaaaataatattaccagggataaagaaggcaatttcttaatgatgaagaagtcaactcattaggaggacatacaatcccaaatgtgtatgcacctaataacagaattctaaaatacatgaaaaaaaaaatactgatcgagcaacaagaagaagcagataaactcacaaagaattcagaacaaccaaaattagtaaggattaggaagttttaaacaacacaatcaatcaacttgaccaaattgacaattataaaatgctacaaacaataacagaatacacattcttttcaaatgcacattgatctcctaccaggatagatcacattctaggccataaagatgtcccaattaatatataaggatccaagcaatacaagtatgttctttgaccataatggaattgaattagaaattaataatggaaagatct

SEQ ID NO: 192305 - DNA, 593 bp, Homo sapiens
ggggaaaccacccccatgatccaatcacttccccccctcaacacctggggattacaagtccctcccttgacatgtggggattataattcgagatgagatttgggtggggacacagcttaaccatatcaatgattatattaatatcggacaaaatatattttggggaaaataatattaccagggataaagaaggcaatttcttaatgatgaagaagtcaactcattaggaggacatacaatcccaaatgtgtatgcacctmataacagaattctaaaatacatgaaaaaaaaaatactgatcgagcaacaagaagaagcagataaactcacaaagaattcagaacaaccaaaattagtaaggattaggaagttttaaacaacacaatcaatcaacttgaccaaattgacaattataaaatgctacaaacaataacagaatacacattcttttcaaatgcacattgatctcctaccaggatagatcacattctaggccataaagatgtcccaattaatatataaggatccaagcaatacaagtatgttctttgaccataatggaattgaattagaaattaataatggaaagatct

SEQ ID NO: 192306 - DNA, 478 bp, Homo sapiens
gtaaacacactcagaatcacacagaaagcaagtgaaggaggcagaattcagacccaggttccctgactctgaagcctcctctggacatggacacacctgctctgttgtccccatagaggatggcrggttcccatcacccactgagaacactttgtccttagggagaggcgtgaggtggggctgatcagccagtctgttgtgtctcctggttacaggcttgaatcctgactctgctgttttctagctgtgtgataaaagcaagttactcccctctctgggcctcagttttctcagctgtaaaatgggttcatatgaggactttctcacaaatacatggtttggaggactgagtgaggtaggtcttttaaaggggctccagactcctcacaccccagccctctcaacacacctggtgtcaggatctccctggccatgtagggtcctgacctgaacacatttatacttttcttaagcatcc

SEQ ID NO: 192307 - DNA, 455 bp, Homo sapiens
gatagctgtgggaatgacaaccccctccttcactgtctaaaaggtccagacttcactgtctaaaaggccccagcagatcccccagctcggggtgatacccactgcctttgatcaggcgtgttctgtaccaggccctgtgcgaggcacttgatgaggattatcaccctgagtcctccccgcaagttggaggaaggtgctattagcatccccgttttgagaagaaactgaggctcagggaaggagagggacttgtcccaggtcacatagccagcaggcagtggagcaggacacaaatcccacatgtgcaactgcggagcccacagtcctgacccctgggtagtcctggcygggggatggggagggagcccgtctatcaggcgctgggctgagcatgttacccatttatgcctagtgatccattattggaatgctaagctcgtgggcgttatttatat

SEQ ID NO: 192308 - DNA, 427 bp, Homo sapiens
tcaaggcatttgggagttattgcagcaccaaagtagggatgagaattcttcctaatacggaactacataccatttctctaataatggtttcccttctgggaacagactggattycatggtatagaaaacctcaaaacttgtcctgctcagacagctttacagagctagtaatacaaacctgagttcaaatttgggttgcatgactttctgcaggtcactccctctctgagcctcagtttcctcatttataacatgagaataattacatcgcagggctgatagagtgtgtgaaaactcataatctggtccaactgaggcctttgttagcatttgtgtccttcctgaagaacctgggaggaactatagtttttctactttttaagatccctcccccgtgccccccaccccacctagaacagcctaggtt

SEQ ID NO: 192309 - DNA, 608 bp, Homo sapiens
ttcatgccttctcctgtggccctggctggcctggcagccctgtccactgtctcactgcccctctcacctgagcactgctgggggttccacactaggccttccctttgcctccactgaacacggccctgcattcaccccagaaccctctgcctctgcctgcagacccagacccctcccctagtgcctgcacctgtgctcagctcctaccaccaaccctggagagaggcgaacacccctgcttcaggccttcccaatccaggactcatggccagagtgataggcaggtcccatcgcctgccctctctgggggtaatggcctcattaatataggagaggatctctggctgtggttatagaatttcataccctgcttctctcaccaaacagcatctattactttaagcaaataaaaatagacacagctaaagcaagttggaaaaatcaatamgtaataaaagttaacatgaaagcaaatacatgagctcaatcacagaagatcctgagagggtgtctagtaaattgagtccagctacgcacccaaggggccaagattcctagcagaggtatggccttgattgggagttgggggctccccacttcatccctgc

SEQ ID NO: 192310 - DNA, 531 bp, Homo sapiens
taaaagtgctcatcattgcatttgaatcatcttggaaatgctcctggggtgctttccaggagccayttattcgaatttcttcctctgtataagtaggttcagagtcatctgtcttccataatcagtaaacaccgggcttctgacagtattagtgacttctcacttctcagagggctcttggcccatcagagctgggaagcccattagggatcactagtgcatgctggggaaactgaggctgggagagaagggacattctcaaggtcaccttgcaggtgaggagctgaagcagaacctgaacccgggtgtctgggctcctggattctgctctttcaccacagcttgattgcacctgccaagcctcaaatgtggctttgagacccaatttccaggtggggtcatgatgtcaaggtcaccttgtttctgtctctgagcaccaggccatgattatttttttaaaatagcttcataaaacaaatgattcacactgtttgtgaaacattccattgataccaaaatataaagaaacag

SEQ ID NO: 192311 - DNA, 418 bp, Homo sapiens
cagaagaaatttctaagcagccaagcattgaatatgtggcctggctgctcctaaaagcctatgcttatttgcataaaaagacagatggtctgaaattggagcttatatttaaaagggaagcagagtgtaaaagtttggaaaatttgcagcctgaccatgtggaagaaaagaaaaactcattttctgtgtaggaattccatgtggtgttaggcctgtgggtgcatggaagacaagagttgaggtttgggaacctccacctgaatttcagaggatgtatggaaatgcctggatgttcaggcagaagtctgcagcaggggtggggccctcatggagaatccctactagggcagtgtggaggggaaatgtggggttggaatccccacacagartccccactggggcaccaccaaatagaact

SEQ ID NO: 192312 - DNA, 558 bp, Homo sapiens
gaggacagtggagctggaagacccactgggacccattcatggaacaggtggaaaaactgaagtctagaagaagtcactcaggagaaagtgaatggtagaccacagtgtcacagccacttactctctctaccacacccaggcaacacagtgacccaygggccaggggagctgaaagagcacctagcaaatattttgagctaaaagagaaagaaaatataacatgtgaaaatgtggggatgcaacaaaacagtacttggggggaaatgtatagtactaaatgcctgtgttagaaaggaaaacattttcaaattagtgacctcagttttaagaaaccagaaaaagaatagcaaattaaacccaaagtaagcatcagaaaaaaagtgaagacaatagcagtcattaatgaaattgaagacagataagcaatagaaaccaaaagctggtgctttgagaagacaaatgaaatgagagtgtagatagccagaaagatcaggaaaaaggatagagaaaatccaaacaattaatattagtaatgagagaggtaacatcactgtagag

SEQ ID NO: 192313 - DNA, 592 bp, Homo sapiens
tagcaacagtcttcacaccccaaccatgggggacctgggtgggggtggtcagcacacctctgatgatgggtttctccctgtctagttccagggggtccacaggggggttcacatgcctgcatgggtgagctccattctccagcaatagcttcatcagtaataaacgggaggttcattttcatctaacatgacctgaatcctctggattggttcagaaacaggcagggaaactgattgctttaattggttttccaaaatattgtcacaaccactgtgataagtatggggaaaccaatcatacagcagccaacatttggtctcagtttccagaacatcccttcatgatggcaagtaccctgactttttttcaccactgtaactccagcccctaacacagcgcccagaacataaacattttgaataaattaacttttccacaatacagtgtattaagygccctaataaggatatgcatagagggctatagcagcccagttgtggcatggacattagacactggggctttagggtagttactaatatggttggtgagaaaagcagacggaaaggagcaagactagaagcaggtgat

SEQ ID NO: 192314 - DNA, 597 bp, Homo sapiens
tgatagcagtggccgcactagatggcccactgctgccaacactgctgtcacccattttacagacgaggacactgcagtgcgggaggcggcttggctctgctcttcaccacttccaggctcctggcccctccctctggtgtctctaccacagtgaatctgcctcccgcttctccttccttccctgtcaatatcatcatcattatcatcatcatcatcatctycatctcctcctcctcctcctcctccccctccttctccttctcctgtcactcttggtctttacttttccacttggccaccctacatcccggcttggtgcctctgatctcatgtccagaactccagcctctgtctgttgtcccctctgtctcgggctttctctgtctccctctgtctctgactgtgtgtggatgcagatgtgttttttattattattttattaaatagagacagggtctctctatgttgcccagatcatcctcaaactcctgggttcaagtgatcctcctgccttggcctctcaaactgtggggattacaggcgtgagcctctgtgcctgaccaggtgtgtgtgtttctgtctagctctgtctgcatg

SEQ ID NO: 192315 - DNA, 555 bp, Homo sapiens
tccagaggagggacttctggggcaaggagagctcggggtgactcaggacttcagatacattttcaatggaaagaccaggaagaaacgatgtcagagaaaagcccacatggctttgcctgtgtgctgagaatgatattatcactaactactgactcttgccaagcccttggtccgtgcaagccactgtgctgtgaacacttggtgtgtactatcccccatgagagcccattgagawagactcaatgtttatgcccatttaacagatgaggaggctgaggcctgcccaagggctcaaacccggggccagaaggaggtgaagctgggattgaaacccaggcccattgtcctgaggatgaactgtcactttcttacttaagcacccagtatagagatgccagttggaacttcctcacagtgagtagcagcaaattgaatctagagtccactggggaggacacccattttctggagagctcctgagtccctaggatgatcagaggtgagctcagaagggcataaaggagtcaggggtccaccactcattccctcccctac

SEQ ID NO: 192316 - DNA, 636 bp, Homo sapiens
tttttgtatattcatgctgtttccaagttatggatttgataaacctgatacttacttttatttcctgatccagatagtttggtatgcaaatggtgtttgctttcacatcattcttggtacttgtcatccctgaagaacaggagccaggagtagagcatgcctttggaggtgatggtggtcttttggccttaatttcttcctaaatcaaaagtataatataaccaatatacatttgcatccacctatattttctatgaaaattcaatgtaaaatgaatgagaaatattgtgcctaataagagagatacatgaaagtaaaaaaaggttagttttatcttaagctatcaaatatttatatttggagacaaaacaaatagtgatatcttattaacttttgatgaaatcattttaaactcttggctaaataacaagataacaaatttgtaatatgcaatgtatraccttttatattgcagtttcagataacagccaactcatgacacatgagatttgctgttaagttgggaagatttctcttttatggccaggaaaagacagctgagaggttttatgctttgtctgtgaagcaactgcatgatgcaaattgctacttccttgctgcaagtaacagctaaca

SEQ ID NO: 192317 - DNA, 501 bp, Homo sapiens
ggtgattagaccatgagggctctgccttcatgaatggattaatgccattattgtggatgtaggttagttactatgtgggtggtctcctgataaattcagccccccttttctctgttctgtgcttgcttctgccttctacctttggatgaccctctttagatgttggcaccatgcttttggacttcccagcctccagaactgtgagccaagtaaacttttattgttcataaattacctagttggtggtattctgttatagcagcagaaaatggactaagacacaaggtgttgctgtgaaagtattttgtagatgtggtttacatctgccatcagttgactttaagtaaaggagatgatcttcaacaaagtaggtgggactcatctaccctgttgaaaggcyttaagagtaaaactgaagtttccccagtgaaaaagtaattctacctgcagatcatagcattggctcctgctctagagttgctagcatgccagtctgcctta

SEQ ID NO: 192318 - DNA, 385 bp, Homo sapiens
gaaatgatatgctacatgggtgataggaaacctattggtggattgtggaaaatatttataaaatagttgaacaaagggtataaataagtaggaaaaggcaaaaaaaagaggaaaggaaatgagctggaagccagcaagtggtctgagtcctaacaccaagttctaagttgggccatcatcatttaatcaaggaaygggctatcccttgattgtaagtattagttttaaatacttaaaattttaattatttaaaagtaaattgtaagtattagatttaaatacttacaattctaagtatttaaaagttctgcctggtagaactttcatttactaagtagtttacatttaggtatcagtatagtcagtattatcagcctgaagcccc

SEQ ID NO: 192319 - DNA, 617 bp, Homo sapiens
accttcttcacaggctgcaggaaggagaagtgtcgagcaaagcgggaagagccccttacaaaaccatcagatcttgtgaaaactcactcactatcatgagaacagcatgagggaaactgccccatgattcaattacctccacctggtctctcccttgacatgtagggattatagggattataattcaagatgagatttgggtggggacacaaagtctaaccatatcaccaayttagtatgccattgtactatattaatcaattttttaaaatcttttggattttgtttacctagttgatttcattgtggctatttttatttcatcataaagctgctatttatttcaagtaggccacaaaatttccttattttacagttttcaaagtgctttctcaaatgtgcattattcagatccctgtaagccaggtattatttttaccatttttagatgaagaccaatgttgtgaaagcaaataaataactggtcaaacctcctggggtagtgccaggatataaactaattgcaaaacttgtgctcttttgaccatataacaaacttctctgacagagcttggcaagctttgggtaaacatgggtgtgatgattactactcttgt

SEQ ID NO: 192320 - DNA, 466 bp, Homo sapiens
tatttgggaggtgtcagagggggcggtggaatgatayggtttggctctatgtccccacccaaatctcaccttgaattgtaattatcataatccccacatgtcaagggtgtgatcacacagagataatcggatcatggaggcagtttccccatgctgttgttatgatagtgagtgagtctcatgagatctgatcgttttataagtgtctggcatttcctctgcttgcactcactctgttctgcccccccgtgaagaaagtgcccacttctcctttgccttctgccatgattgtaagtttcctgaaacctccccagcaatgcagaactgtgagtcagttaaacctcttttctttataaattacccagtcttgggcagttctttatagcagcatgagaacggactaaaacactcaaatactgttagtgggaatgtaaatttgtacaaccactgggatgaacaatttggt

SEQ ID NO: 192321 - DNA, 632 bp, Homo sapiens
ttttcaagaataccgtatatcatcattaactataatcaccttgttatacaatagatgtcttgaaatgtattcctcctyataattatgtctcttaacaatgtatgttaatagacaatgtatattattatatttcactatgtattatttgctttaacactaatactactaacactaatgaactaatcattaactaacagttattgaattagtatgtgtcaaatattacgcaaaacactcagattgattatcatatttaatccacacaattgagatcagtattactgctctcacactattgagagtgtagctgagttagaaagttaagtaacttggatatactcatgtcaccaagccagtaaatcttgcagttggaatttgaacttacgtctctcttaatctcaagcaatttccaactgctaagcgatttagtttttcaaaaattaatagtgatataacggaattcttggaaaatatgtaaatatgtatccattttcctcatgaaactccaataaacaaaaataaataactttagaagtatacatttggataaattgataaacatttttaaaagagaatagcaatgttaaaatataagactaaagacaaagatatgaaaaatacgggaggaaaaa

SEQ ID NO: 192322 - DNA, 632 bp, Homo sapiens
ttttcaagaataccgtatatcatcattaactataatcaccttgttatacaatagatgtcttgaaatgtattcctccttataattatgtctcttaacawtgtatgttaatagacaatgtatattattatatttcactatgtattatttgctttaacactaatactactaacactaatgaactaatcattaactaacagttattgaattagtatgtgtcaaatattacgcaaaacactcagattgattatcatatttaatccacacaattgagatcagtattactgctctcacactattgagagtgtagctgagttagaaagttaagtaacttggatatactcatgtcaccaagccagtaaatcttgcagttggaatttgaacttacgtctctcttaatctcaagcaatttccaactgctaagcgatttagtttttcaaaaattaatagtgatataacggaattcttggaaaatatgtaaatatgtatccattttcctcatgaaactccaataaacaaaaataaataactttagaagtatacatttggataaattgataaacatttttaaaagagaatagcaatgttaaaatataagactaaagacaaagatatgaaaaatacgggaggaaaaa

SEQ ID NO: 192323 - DNA, 632 bp, Homo sapiens
ttttcaagaataccgtatatcatcattaactataatcaccttgttatacaatagatgtcttgaaatgtattcctccttataattatgtctcttaacaatgtatgttaatagacaatgtatattattatatttcactatgtattatttgctttaacactaatactactaacactaatgaactaatcattaactaacagttattgaattagtatgtgtcaaatattacgcaaaacactcagattgattatcatatttaatccacacaattgagatcagtattactgctctcacactattgagagtgtagctgagttagaaagttaagtaacttggatatactcatgtcaccaagccagtaaatcttgcagttggaatttgaacttacgtctctcttaatctcaagcaatttccaactgctaagcsatttagtttttcaaaaattaatagtgatataacggaattcttggaaaatatgtaaatatgtatccattttcctcatgaaactccaataaacaaaaataaataactttagaagtatacatttggataaattgataaacatttttaaaagagaatagcaatgttaaaatataagactaaagacaaagatatgaaaaatacgggaggaaaaa

SEQ ID NO: 192324 - DNA, 530 bp, Homo sapiens
attttgtcttttcttacatgcacttaatgaggtaatgtatgcaatgtttcaattgaatgagtaatttatttcagaaaataaagatacctgctaatcattttttgtcttcctttcctcctcattcttttttatattgttactttctaccatttgttttattattataaccatctatttctgctataaaactggtattatttaaattttwaatttttatttcctactcaatcatcttctcctctgaacattcatgaatagattaattcaacagatttgagttcttacatgtggaaaaatttcttataatgcatttagtgacctagagatgattaacatgaatgaatactatccacaaatttttaataaagatagtgatatgacacatacacatacactgtctgcctggaagagatattaggacacatggaaaatatatgggactagagagaaattagggaaactaattctaaaactaagttctagacttagttgtggaagcaactttctgtgtgattgtagcatatataatt

SEQ ID NO: 192325 - DNA, 530 bp, Homo sapiens
attttgtcttttcttacatgcacttaatgaggtaatgtatgcaatgtttcaattgaatgagtaatttatttcagaaaataaagatacctgctaatcattttttgtcttcctttcctcctcattcttttttatattgttactttctaccatttgttttattattataaccatctatttctgctataaaactggtattatttaaattttaaatttttatttcctactcaatcatcttctcctctgaacattcatgaatagattaattcaacagatttgagttcttacatgtggaaaaatttcttataatgcatttagtgacctagagatgattaacatgaatgaatactatccacaaatttttaataaagatagtgatatgacacatacacatacactgtctgcctggaagagatattaggacacatggaaaatatatgggactagagagaarttagggaaactaattctaaaactaagttctagacttagttgtggaagcaactttctgtgtgattgtagcatatataatt

SEQ ID NO: 192326 - DNA, 560 bp, Homo sapiens
actgctgggtgcggtggctcatgcctgtaatcccagcactttgggaggccaaggcgggcggatcacctggccaggagttcaagaccagcctggccagcatggtgaaacctgtctctagtaaaaatacaaaaagtagccgcacatggtggtgcrcacctgtagtcccagctactgggaggctgaggcaggagaattgcttgaacctggcaggtggaggttacagtgagcggagattgtgccattgcactccagtctggatgacagagtgagactctgcctcaaaaaaaaaaaaaaaaaaaaagaaagaaagaaagaaatagggagaaacaaagcagtctcaggaaattgactacaggctgctttgactgtatcagaatgaggtggaaaaaatcagaatgtattaatattttataaattttactataataaaggtttttatccatccagattttacatatcagaacagatggcagagtaggcattcttaatgttcctcagtgctattaaaaaatgcttcagccttttaggcgtggctcgtgtcatcaagcgatttctcttat

SEQ ID NO: 192327 - DNA, 560 bp, Homo sapiens
actgctgggtgcggtggctcatgcctgtaatcccagcactttgggaggccaaggcgggcggatcacctggccaggagttcaagaccagcctggccagcatggtgaaacctgtctctagtaaaaatacaaaaagtagccgcacatggtggtgcgcacctgtagtcccagctactgggaggctgaggcaggagaattgcttgaacctggcaggtggaggttacagtgagcggagattgtgccattgcactccagtctggatgacagagtgagactctgcctcaaaaaaaaaaaaaaaaaaaaagaaagaaagaaagaaatagggagaaacaaagcagtctcaggaaattgactacaggctgctttgactgtatcagaatgaggtggaaaaaatcagaatgtattaatattttataaattttactataataaaggtttttatccatccagattttacatatcagaacagatggcagagtaggcattcttaatgttcctcagtgctattaaaaaatgcttcagccttttaggcgtggctcrtgtcatcaagcgatttctcttat

SEQ ID NO: 192328 - DNA, 534 bp, Homo sapiens
aattcagctcaattcagttcatcagaatttttgttcacatcacataaaagagaaatgttttctttcttaaaatctcatcatgcgccacggaatccttgctgattctattatcagttgtctattcttattgtattatacactagaattaaatattgcaaaaaatgaagctgaaaatagaggttaaaatgaaaaacaytatttcttagaaacatgtttggctaacagaaataattagctggtccaagcatatttatgtaagcttttcaaatcagttattttggacagcgtattaaaaggaaaccctctctaagagttcctttttctctgcatccttaccagcacttgttatttttttgcctttttgataatgctactaactggcttgagatgataacctattgttgtattgattttcagttccctgatgattagtgatgttaaacatgtttttcatctgcttggtggccacttgtatgtcttcttttgagaagtaaatgttgagataatttgcccatttttataatcagatatttt

SEQ ID NO: 192329 - DNA, 510 bp, Homo sapiens
ttgtgggtagttccctggacactgcaacagggctgcatagagttttgctyctgccggtgcccaaaagtacttcctccggccctgaacccactcacctgtgtgtttcccctcccacaaggggctgagatatgtgggctgagtaagtgagaaacctctgtcatgaggcccatgaggagttcaaggaaaatttcccctttcaatattattattcttaaggggcataatacatttttaactattgctatgttacaaagtaccccaaaacttagtggagtaaattaagacattaattatctcaagagtttctgtgggtgaggaactgggtctttcttagctgggtcctctgcttcacagtctcatatggctggagtctaagtgttagcccagggtccacagtctcccaaagactcaacccaggaaagatccccttctaagctcactcagtgcttgacagcagtcttcagggctgtaggctggttggctgaaggcctaattctagattagcttttg

SEQ ID NO: 192330 - DNA, 604 bp, Homo sapiens
aaaatacacactatacttatttagcatatatacactatcttgtttgtaagatgtcagtacatcagtattacacacttatgagaaagattaaaagatgcatcgcatttatgttgtggcatatatagttcaaggtatattcgataatttgaatgataaggtaaatattttgcttgttaggacattttcttctgtaagttacaaagtgaatcactaaattggtagagatcaaataatatttacattatttgtaaagatggttgttttttgtaatctcagtataatagtgaggagtgaaaccattttttgaagtttaaggtactgtactgtaatttaagatagttctgtcttgccctttttttttcctcactccctcttctggattctagtataatttattttgtatttctgtgatttattcattcttttgctttggaactataatcatattttactttatttgtttacaaatctgctttccttattaaattgtgacattttayatgagcatatggcatggtagttttttatatacctatgttccaaaaatgtccacaattttgatcctatgtatgtggaaagcactgttcgcttttcatttttgtaa

SEQ ID NO: 192331 - DNA, 497 bp, Homo sapiens
agtaaaataatttgtaatcccttttatgtgatgtaaacaaaactaaataaaaataaaatattgcaggcagtgaaggctcatttggaaacaagatctgtgtttccaagtgtttggcagcacttaaaagaagcaaaccaatttaaatcaaataacttaaggagtattatcaaatgaaaaataaccatctcatatttatgcatggaacataatgaactgaaaagcacaataaagcaaatacattagattagcataattttatttcactgtttaaatttttargttagaaactgattttgtttcaattactgcagtctccatgcgttttgcacattttatttcaaatatatgcttgtgtttcaatttggtacagtttattatttttaacatggatatttactgttattaatatatgccaactttaattttgcacttattgaaagattactaataatcgttaggccaatgtaaacaactaatagatataatagatttagtcg

SEQ ID NO: 192332 - DNA, 603 bp, Homo sapiens
aataaatattcaggtgttttgcccatytttaatcaggttgttcagtttgtttttgctattcagttattagagtcccttatatattctggttgttaatcttttgtcagaagggtagtttgcaaatattttctcccattcaatggacagactcttcactctgtttcctttgccattaagaaatgttgtactttgatacaattctatttgtctatttttacttttgttgcccgtgtttttgaggtctttcccaaaaatatccttacccataccgatttcctggagcattttccccttgtttttgtctagtaatctcatagtttcaaagtttcaaacttacatgtcagtctttaatccctttttgtatagtgagagataatgatctagtttcattcttctgcttatggaatatttagctttcctagcaccgtttattaaagaaactatcttttccccaatatatgtttttggtgcctttgttgagaatgaattggctgtaaatgtgtggatttatgtctgggttctttattctgttccattggtctaagtatctgtttatatgctagtactatactcttttgattactatatttttgtggtttattt

SEQ ID NO: 192333 - DNA, 607 bp, Homo sapiens
ggaaataaaaacaatttacaagacaaatgaaaacagagacacaatatatacaaccctctggattacagcaaaagcaagttctaagagaaaaaaattatagaattaaatgcctatattaaaaaagataggaatatcttaagtgaacaacctaatgtcatatctgaaggaactagaatatcaagaataatccaaaccctaagctagccgaagaaaataacagaggggaggagarctaaatgagagtgagatgacaaaatgcatgcgaagcatcgatgaaacaaaaagttggttcctagaaaggataaacaaaattgacagacttctagttagattaaataagaaaaaaagagagaagattcaaatacatataatcagaaatgacaaaggtgacattacaacggataccacagaaatacaaaagatcatcagcatctactatgaacctctatgcacacaagctaaaattctagaggaaattaataaattcctgaaaacatacaccttcctaaaactgaaccaggaagaaataggaatctcaaacagaccaataaagagtaatgaaattgaatcagtagccaaaaagaaaaaggacatctaggaccagtga

SEQ ID NO: 192334 - DNA, 566 bp, Homo sapiens
ttccgtttcccttgccagcaactggtttaggaatagccgtatggaactctttggccaatgatggtgagtgcaatgggaaagaggccttaagaagcatttcactgctcttaaaaagggacataaggtcaagtgctctcttttggcctttgaattttttttttaaatgaggatatgatgtcgggagccgttgatggcattttaacacctgaaacagactctagagcctgctgatgcggagcagaaaggtgggaagaaccctgacgatgctgttaagctgctgaattaacaactcttcacattttttatgtgggataaaagattgctttactatttaagacattctgccttgggtattctcttagttaatgctgaacttatcacaagtgacacagactaaccaaatatggrtgtcttctagtttgtattttgttttgttgttatattacaaaacacatgcctgtcatttcttctctcataaaaaaaaatgtacctaccagaaataattttatctattttagctctttgggatatagaataaacgaagttcgatgcaccaatgaagggag

SEQ ID NO: 192335 - DNA, 340 bp, Homo sapiens
aacataaagttcctgtattttaatatgtggtttggcatgaaatcagtccctgatcagacccactaaaagtatgcttgacttagcctgcaggaagactatgttcttcctaacaagagacaatctcaattcttcakgttaaggacctgagaaatgacagaaggaacatgattaagacctaaaatgacaagcaaaggatgaaattcaagtttttatggtagtcaaaagttgtgactctgggccaagtgcggtggctcacacctgtaatcccagcactttgggaggctgaggcaggcggatcacgaggtcaggagatggagaccatctggctaacatggtgaaa

SEQ ID NO: 192336 - DNA, 382 bp, Homo sapiens
gaattcctggactcctaggtctctgccctggggcacagtggcatggggggagctggcccttctgtccccaccccggctctatcccgcaccacaactggtgtagcacacctgcctggacagagtggaactttacataactgcggttcaaggaccatctttgggacacttctgttgatcagatctcttttctccctcatggctgtagctgcatttgactttaagacaccttacacagccttgtagaaatgccatataaagtgarctcctgtattgatttgggcatgaagctcccttctgggacaagtgctatgtctgattgatgccttctgggagtccatataagcgcctacttcattgcctacaaattgaaggataatcactt

SEQ ID NO: 192337 - DNA, 539 bp, Homo sapiens
ttcagtatatatattcttggtggacacacacattccatccataacacccagaartgagcatgaatagcccatgtgcttgccatccaccccttactcctactcctagtggtgggctggtttccctatgttggctatctgtcccttccacaatgaagtccctgtcctaaactgcccaggacccaaagccctcccttctacctgctggttctcctcctctgactgcagcccaaccctcaattgggagcagacatcactcacaggcacatgtctaacttgctagctcacagctttgagtttaatggtaggctcctcatcattgagctctatgcaagcatcagggctagatgaagtctgaacatgtctggatgcacaagcaccatgccccacgcctgtcctgcagcgcctcctgagtgagcatctcgagttctgtcaacgtttagttttcatcacctgtctgcttcgggaggcaggaagtattcctgaacccagcatctcctctggccttgtcttccctgaagctgaccacatgcctcatgtcc

SEQ ID NO: 192338 - DNA, 608 bp, Homo sapiens
aatccatgaatactttggattgactaactgtactgtgtgttcagactttttgtcaaagcagttatcttcatttcaatttaatatgaacakcttactgtgcagctgtttaaaaaaaaaacaagggctggggagtgaggaggggagagcatcaggaaaaatagctaatgcatacgggcttaatacttaggtgatgggttgatagatgctgcaaaccaccatggtaaatgtttacctatgtaacaaacctgcacatcttcacatgtaccctgaactttaataagtaaaattaaattggaaggccaaggtgggcagatcacgaggtcaggagatcaagaccatcctggctaaaatggtgaaaccccgtctctactaaacatacaaaaaattagctgggtgtggtggcgggtgcctgtagtcccagctacttgggaggctgaggcaggagaatgacgtgaagctgggaggcggagcttgcagtgagccgagattgcaccactacactctagcctgggtgacacagtgagactccatctcaaaaaataaataaataaataaaataaaacaagggatgtctcaatagaccatagataacatatgacaatgaattc

SEQ ID NO: 192339 - DNA, 583 bp, Homo sapiens
agggtggtgatggtgcctacccatgtgacctccaacactctacagcctcctaggctttatgccaggggagtcttccagggcttgtcttggataaagaggagaatttcatttgctcctgtgtggttgtacttaaacccgtgtgtcttgtggataaaggtctcagaaatctgtcagtggctttaagccccagctttagacgacagatttctaaagacacaccttccatttatgagcattgagcagggacagagaccacacagaggtgtgaatgaaggcccctcccatattacagtgtggtccattagacttcacaaggagtgtcccctacgttggcagcctckcctgtagccttgtctaagctcgttttctcctttgatttccaataggaatgaataccttccttctaatattttatccttggtagtgtccgaatttcctattgatgctattccgtgtccttcttcctatcctacccagtagtttctggagtcttggtgaaaagtgtaaaagaaaacaaaaatatgctgtaaaaataagtactgtaattgcccatagttcattatacacagtaaatgggtgccca

SEQ ID NO: 192340 - DNA, 583 bp, Homo sapiens
agggtggtgatggtgcctacccatgtgacctccaacactctacagcctcctaggctttatgccaggggagtcttccagggcttgtcttggataaagaggagaatttcatttgctcctgtgtggttgtacttaaacccgtgtgtcttgtggataaaggtctcagaaatctgtcagtggctttaagccccagctttagacgacagatttctaaagacacaccttccatttatgagcattgagcagggacagagaccacacagaggtgtgaatgaaggcccctcccatattacagtgtggtccattagacttcacaaggagtgtcccctacgttggcagcctcgcctgtagccttgtctaagctcgttttctcctttgatttccaataggaatgaatascttccttctaatattttatccttggtagtgtccgaatttcctattgatgctattccgtgtccttcttcctatcctacccagtagtttctggagtcttggtgaaaagtgtaaaagaaaacaaaaatatgctgtaaaaataagtactgtaattgcccatagttcattatacacagtaaatgggtgccca

SEQ ID NO: 192341 - DNA, 591 bp, Homo sapiens
ttaactggctgggccaaagttatttaactactacgtgacagaaccaaaatttaaatctagggtttgtgcatgcaagtccagagctctttccactataacacactggcctaagtgcaggcagcaaaagctctccaaggttgtgacgggacccatggccattctctgcattttgtctgtccggggaagaatggagggagagggtttgtgcaaagtgtcactcagcaaaccctgatgtggaatggggaacatctgtggtctcccttgccccactcatctgactctctgtttaccaatttcttcttgaatcaaaaaaggaactgagagcatggcccaaatgtcacgaaccggttcctgccccagcatttctcagaaggacagataaacaatgtgatggatgtgctaatgttgggttgggtggggagggtcggaagtygggcaggaagagttatttgctcagttggccaagttattcctacgcagtgagagggcttcaactaccaatccattatcgctggtcctagggttctgtagagctgaagttattgcctcagaatcttgataataggtgctacagaaggaggacacatcttt

SEQ ID NO: 192342 - DNA, 566 bp, Homo sapiens
agaatgctgtatctacaggtttaaatgtcttcaaagggaaatataatatgggaagcaatatggtgtcatggttaagatgctagctttatttgccctgttgggcagagttcaaattataactctacctcttactttgtgggctcaagcagattacatgcaattgaagttttctcatctacaaaatgctggctgcacagagttgatataatggttaaattagataatatatttagagcacttagcayggtacataagtgccccccaaaatggtaaatgataatgatgtgatgtcattgacaacagtatcactgaagtgaaatttgaggatctcagcttctatctgtagctctaccacacatttgcagttcacttatatgaatttaacatttacttagaatatactgtgtgccagtgttctaggcactgagaaaaaaatatagatagatagatagatagtaaaaatgaagtcaaaagctattttattcattatactaataactgagaattcctattaaatgacaatgagcagcatatcagcaatcatgaatgtttaaaatcctgagatt

SEQ ID NO: 192343 - DNA, 566 bp, Homo sapiens
agaatgctgtatctacaggtttaaatgtcttcaaagggaaatataatatgggaagcaatatggtgtcatggttaagatgctagctttatttgccctgttgggcagagttcaaattataactctacctcttactttgtgggctcaagcagattacatgcaattgaagttttctcatctacaaaatgctggctgcacagagttgatataatggttaaattagataatatatttagagcacttagcatggtacataagtgccccccaaaatggtaaatgrtaatgatgtgatgtcattgacaacagtatcactgaagtgaaatttgaggatctcagcttctatctgtagctctaccacacatttgcagttcacttatatgaatttaacatttacttagaatatactgtgtgccagtgttctaggcactgagaaaaaaatatagatagatagatagatagtaaaaatgaagtcaaaagctattttattcattatactaataactgagaattcctattaaatgacaatgagcagcatatcagcaatcatgaatgtttaaaatcctgagatt

SEQ ID NO: 192344 - DNA, 594 bp, Homo sapiens
atcacggtaaacataaatctgtgattcaaaatagtctgtagatgataccagccctttccctcttcccccaaaaatggccttcaattcttttctgagtattcagaggtatcattattttaaatttatgctaatctgacgagaattattagaggttgaacatccttaatccaaaaacccaaaatccaaaatgctccaaaatccaaaactttttgagtgctgacacaacttcacaagtggaaaactccacacttctggtcctaagtattttggataagggatactcaatctataataatgacaatgaagatgatgctgttaacgctgcagaaaaagtgcctatagatgacatggtaaaaatgtgtgatgggcctagtgaaggactaaagcagcatacagtcataacagaaaaagaaatcatgtcagtttacaaaatcaaaaagagacttctaaracaaaaacttgttaatgaggcagatgactccatagaaaacatttttagaagtcatccagcagaatgcctcctcatccctagaggacccacttccagtctctcaactgcttctgatgtttcttctcacctgaagacataaaata

SEQ ID NO: 192345 - DNA, 595 bp, Homo sapiens
agtggtggtttaaatcaaggaataaatgttttcaaagtgaaaggagcacatcctaccacacagttcaaaaacaatcacaaatatggcaggcttgctgagagctttcatacatcatttattgtcatgcacttgtatgattattgtatactgtacacatttttattttacaatgatttgtattttccaatgcrtttattgcagttcagtgtggtagatggctggagcctatcctggtagctcggcgcacaagtcaagaattaaccctggacagggtgccatccctttgaagggtgcactcacgcatgttccgcacactcattcagactggagccatttagacgtgccagttaacttaacatgcacatctttgagatgtgggaggaaactggagtacccacaggaaactcatgcagacttggggagagtatgcaaactccacacagacagtgaccttggctgggaattgactttttttttgtcatcagtgttatcacaaaatgacattgcatgaaccagcattgtttgaagacttgctgtattctgattttttttatctttcatctttgagtcattagcaccaaatatagttcttgga

SEQ ID NO: 192346 - DNA, 595 bp, Homo sapiens
agtggtggtttaaatcaaggaataaatgttttcaaagtgaaaggagcacatcctaccacacagttcaaaaacaatcacaaatatggcaggcttgctgagagctttcatacatcatttattgtcatgcacttgtatgattattgtatactgtacacatttttattttacaatgatttgtattttccaatgcgtttattgcagttcagtgtggtagatggctggagcctatcctggtagctcggcgcacaagtcaagaattaaccctggacagggtgccatccctttgaagggtgcactcacgcatgttcygcacactcattcagactggagccatttagacgtgccagttaacttaacatgcacatctttgagatgtgggaggaaactggagtacccacaggaaactcatgcagacttggggagagtatgcaaactccacacagacagtgaccttggctgggaattgactttttttttgtcatcagtgttatcacaaaatgacattgcatgaaccagcattgtttgaagacttgctgtattctgattttttttatctttcatctttgagtcattagcaccaaatatagttcttgga

SEQ ID NO: 192347 - DNA, 517 bp, Homo sapiens
agtagaacaacagtgtctagaacaaatggaggaattatccttttccattctgtagtggtcatactacctaagaagtactgtggccaattctggacattacctctgagaagcatgttkataggacagtgatcaaatatgctaaaggaacttcagactatgctgtaaagaggagcatgtgaaagaatcaagaaactataatcttgaaaaagaaagcctggggtaagggggatgttagatgtctttggacattagaagaaggcttacttagacttgttctggatagccacagaatccagaactagtatcaaaaggtggaagtttttttgttttttgttttttaaaaaggaagcacatttctagttaaaacaaggggaaactcttaataattagggtggtagagatactggagggatcagggagtgagtacttccaccaaacaggaacattagtatatggatatttcactaataacaatagcggggtcagtaggggttgaattaattgagattctctaaac

SEQ ID NO: 192348 - DNA, 176 bp, Homo sapiens
tataattacaatatggtgtgatggttgtgatgaacaaggtaaatatagggtgtcataagagcacacattaaccaatcttggaggggctgtcctatgcaaggaggtcttcatggagacctaacmgctaagctaagacctgcctgttctgcaagtaccttacttaaagctattacata

SEQ ID NO: 192349 - DNA, 541 bp, Homo sapiens
agcccatgtaccagttcaaacctggaaaggatgggacctagtaaaccctctaggagggtggttctctaattcaggaggatttaaagcgctggtagggacagtaatctttatcaytgggctcctcctgtttctcctttgtgttatcccactaataacaaaagccattaaaactcttgttgaaactacagttagccaccagacaatccaaacaatgctcctgctatgacactatggataccaacccatctttcaagaatacccccaaaattaaggttttctttttccaaagtgcccacgccaccccatacatcacgtctgaagtagttactgagaaagttgcccctttccccttttttctataaccaaatagacaggaatgaaagattctccctggggcctgaaagcttgaagggatgagtaactgttcccttatcaggtccagtcccaaggcgcaaggccacttgggccagcagtgtgcatcagcaagatagcagaaacaggaagagagccagctggaagacacccaccctggctggaagac

SEQ ID NO: 192350 - DNA, 541 bp, Homo sapiens
agcccatgtaccagttcaaacctggaaaggatgggacctagtaaaccctctaggagggtggttctctaattcaggaggatttaaagcgctggtagggacagtaatctttatcactgggctcctcctgtttctcctttgtgttatcccactaataayaaaagccattaaaactcttgttgaaactacagttagccaccagacaatccaaacaatgctcctgctatgacactatggataccaacccatctttcaagaatacccccaaaattaaggttttctttttccaaagtgcccacgccaccccatacatcacgtctgaagtagttactgagaaagttgcccctttccccttttttctataaccaaatagacaggaatgaaagattctccctggggcctgaaagcttgaagggatgagtaactgttcccttatcaggtccagtcccaaggcgcaaggccacttgggccagcagtgtgcatcagcaagatagcagaaacaggaagagagccagctggaagacacccaccctggctggaagac

SEQ ID NO: 192351 - DNA, 541 bp, Homo sapiens
agcccatgtaccagttcaaacctggaaaggatgggacctagtaaaccctctaggagggtggttctctaattcaggaggatttaaagcgctggtagggacagtaatctttatcactgggctcctcctgtttctcctttgtgttatcccactaataacaaaagccattaaaactcttgttgaaactacagttagccaccagacaatccaracaatgctcctgctatgacactatggataccaacccatctttcaagaatacccccaaaattaaggttttctttttccaaagtgcccacgccaccccatacatcacgtctgaagtagttactgagaaagttgcccctttccccttttttctataaccaaatagacaggaatgaaagattctccctggggcctgaaagcttgaagggatgagtaactgttcccttatcaggtccagtcccaaggcgcaaggccacttgggccagcagtgtgcatcagcaagatagcagaaacaggaagagagccagctggaagacacccaccctggctggaagac

SEQ ID NO: 192352 - DNA, 563 bp, Homo sapiens
tgctgaggagtgctttacttccaactatgtggtcaattttggaatgagtgyagtgaggtgctgagaagaatgtatattctgttgatttggggtggagagttctgtagatgtctattaggtctgcttgttgcagagctgagttgaggtgctcaatatccttgttaaccttctgtctcattgagaacacatggactcatagaggggaacaacacacactgaggcctactactggggggtggagggtggaaggagggagaggatcatgaaaaaataattaatgcatactaggcttaatacctgagtgacaaaataatctgtacaacaaacccctgttgtatgaattttccatatgccacaaacctgcacatgtacccctgaacttaaaataaaagttaaaaaaattaaaaggataatcaaaaaaagaaactatatatttcataatacaatacaataatagtggcggatttaaacaccccactgacagcaccagggagctgatcaaagtagaaaataaacaagaaaactatgaacttaaatggcactctaaaccaaattgattaata

SEQ ID NO: 192353 - DNA, 563 bp, Homo sapiens
tgctgaggagtgctttacttccaactatgtggtcaattttggaatgagtgcrgtgaggtgctgagaagaatgtatattctgttgatttggggtggagagttctgtagatgtctattaggtctgcttgttgcagagctgagttgaggtgctcaatatccttgttaaccttctgtctcattgagaacacatggactcatagaggggaacaacacacactgaggcctactactggggggtggagggtggaaggagggagaggatcatgaaaaaataattaatgcatactaggcttaatacctgagtgacaaaataatctgtacaacaaacccctgttgtatgaattttccatatgccacaaacctgcacatgtacccctgaacttaaaataaaagttaaaaaaattaaaaggataatcaaaaaaagaaactatatatttcataatacaatacaataatagtggcggatttaaacaccccactgacagcaccagggagctgatcaaagtagaaaataaacaagaaaactatgaacttaaatggcactctaaaccaaattgattaata

SEQ ID NO: 192354 - DNA, 375 bp, Homo sapiens
gtgtgcatcaataatttctaacagagccttaaaacagaaacagtctttccataacctatgattagcaagatattaatcagcagtaacagttgcagcaaaagctgtttacaaacaatccatagaaacaggacgtgaagctagacaatgcgttaraccagaaattctcagaagggagtatgtcttaaccccaaagaggcctagaagagctgtggcaagatgatgagggtgtttatagctctatcttatccatatgaacaggtgcccctcatgcgtccgtttataggctctccacaagggtcgcattccattcccagagctatgaacatctgcttttctgggataggaatcttggtgatgtgaaacctccctgactgc

SEQ ID NO: 192355 - DNA, 601 bp, Homo sapiens
ttatccctggaattaaaggataattcaatatataaaaatctatcaatatgrtataccatattaacagaataaaggaataaaaaaaacacaatcacacaatcatttcagtagatgcctaaatacatttgaaataattctaaacacattcatgataaaaactctaaacaaactgagacaaaaaggaaattacctcaagacaacaaagtctgtatacagacagcccacagataacagcatactcaatggcgaaaagggcattagagaagaaattaatagaataaaaagaagagtgaagtaaaggcctttgaaaacctggattaaagaaatgattatctaggaaaaatacaagtcaccaaactaaacacttgagagttaaaaattctcagtagataaatttcccggaaagaatttgtgggatttatcagagatctaccctaccgtatcctatctatcctatccaccaacataccctgcccccttcagctttttcacacttcccaaactggaatctgtttctctgtcatcacctctgctgaaaactgagcttcctccagagagaagaaaggattttgagtagtgagagaggggcaagctacaagtt

SEQ ID NO: 192356 - DNA, 514 bp, Homo sapiens
agtggggtgggttcaagaaaaaacatgagagtagagaaagtgaagaaatcaagaacaggtaatgatttttgaggaacttctgtgtacagggcaaatagatgatgcagtagatggagtgggttgtgcagttaaggtgggrtgttttgtttctttcttgttgttgtttttttttggtgttttgtctttattttttgcatgggagactttgtggaatgtttatgtactgatgggaatcatccagtagagaagggtaaattggtgatgtaggaaagagcacaggaagcattgctgggatcatgcactgaatagtcaagaaggggtataatctagtggccaactgtaggaatgggttttgataggagtgtagtgagtttatccattgtggcaagaggcaaagaagagtatctagttacagatgcagggaggtgagaagttttttaaggcttttctttactttcatgttctcaatgtcatcagttgagactgtgggtattccagtagtagaaggagattt

SEQ ID NO: 192357 - DNA, 559 bp, Homo sapiens
tgtgactggagttcatggccctggatcaccatgccagagctctctctatgaccccaacttgcctccaggtggagccaaggatgatcaagtgcctcattttacagatgaagacatgaatctcagagaggtgaatcaaactgcctgggtcatacatttttttctgggatgagaacacagttctcctcgcttttaatgtagatcaggtaaatggccagtcagtcaagaattaggtcagagacagtggaaacagacaaaggagcaccttactctacagggattctgcacaatttgtaagccagggtaggaaagattctcagtgattctaagtgatgygaagggatggctgccattaacagaaagagagggaaaggaacaaagaagaaaaaaagacacacacaaaaaaattcccttatttatgactgtgattttctttggaaacagtcccttccttgagcagtagctggaaataagattcagaggtttttctcccagaatatcttgctagagagcctaggggagtgtgatgctaatttgcaggtgtctgagagcacccctcacc

SEQ ID NO: 192358 - DNA, 617 bp, Homo sapiens
tcttttgtaatacatgcattaatgctctatattttcatttcagcactacactttagccacatatcacaaattttgatatattgtattttactttttgttttgttgaaaatattcttcaattttcctggagactttctctttcacgtaaatgttctgcttaatttcaaaatatgtgggtttttaaaatctccatgctattgattttagattaattatgttatttcctggtaacatactttgtataatttctattcttctaaatttttcaaggtttattttacagcccagaatatgatgtatttttgtgaatgttttatatgcacttgtgaagaatgtgtattctgttgttggaaggttggtttttaaaggtcagttgggtcacattggaagacttttgaaggacattttcactgggaatggaatactaagttgataatgtttttatttcaacacttaaaaratgtattcttgtttttgtggtttctaaagagaagtctgctatgattcttatgcttctttctctgtaaacaatgtgcccctatccctggctgactgcaaaattttctccttgcttatagtttttagcagtgtgaatataatatgcctatgggtgtgtg

SEQ ID NO: 192359 - DNA, 556 bp, Homo sapiens
taaaacaagtccagagtttggcaggtaactaaaagagggttatcacttaggttatatagcaaaagtgttgatgtatattatatatagtagtataaataataaaaagtattatttaaattagatcacagtgctgcattatgtgcataacagtgtttgatatagtattggtgggctgggacctacgacactaaggacttaactgtcaacattgggaagtcacaatcaagaggaaacacagagttccaatgttttcttttggtagcaaaaaaaaaataaaataaaaaycctgaagatgaaagaaaaatacttctctacagaaacataaaaatcagttgcaacatctggacagctgtgatccaccagaaagaaatgactcccaacctgaattaaaaggaaagataaatcacatggaatttaatccaatctcatctagaaaagtttcccatttaggtcacttgtacgtaactccaattccttctccaagagcccttccaggagaggcgcaaggcccctcgtcacagagtggaatgagtggaacttgcgtcagtagcccttg

SEQ ID NO: 192360 - DNA, 471 bp, Homo sapiens
ccactctggtaacaaaatctgtattagtcagggttctgtagagaaatagaactaaggggatatatatatatatatatatatatatatatatatatcaccacaaggtcctacaataggctgtctgcaggctgaggggaaaggagaaccaatccgagttccaaaactgaagaatttggtgtctgatgttcgagggcaggaagaatccagcatgggagaaagatgtaagctgggaggctaagacagtctctgttttcacatttttctgcctgcttatattctagccatgctggcagcagattagattgtgcccaycagattaagggtgggtccgcctttcccagcccactaactcaattgctaatctcctttggcaacaccctcacagacacatccaggatcaatactttgtatctttcagtccaatcgagttgacactcagtattaaccattgcacctctattccaggcccta

SEQ ID NO: 192361 - DNA, 578 bp, Homo sapiens
attacatctgctgatataataggtatattacctgatacttggtggatatatcagtggaagagtagactaagtctagaagtaactaaaggcaatatctgtctattctactgtttgatgcttttagacatactgcaatagaaaaggtatgattctgtaggacttctcaaatcaggccatgcaatagaaacatatgtggagtttcaggagcctcatccttgaaaattctgactckctagttttgggaacagcaactccgtttctcaagaggaaaagatggaatggcctagagatagctgtagaaaggggaaggatgccacaccaccaaatcttgccagaagaggttttggttttgttttcacttttaagttgctgtagctatagcctctggatgatcctcactcagggaatataccctaattttaatgccattagtgcagacagctgcatgctgcttttagatcttaaaaagttatatgtgtctgtcgtgcataaatgtatggaggactctttgagcttttgtactgttgcacttggttgcagagatgctgtttaccataaaatagcaaagaaatattcca

SEQ ID NO: 192362 - DNA, 459 bp, Homo sapiens
ccaaggggacggtgttaagccattcatgagggatctgaccccgtgatccaaacaccttctaccaggccccacttccaacactgggaattacatttcaacatgagatttaccggggacasagatccaaaccatatcagaggggaaaggggatgtatgctgagtgcagaggaaacagctggaacaaaaagggagtgagaggctgtgggccgcacagggaattagaatcagtcctccattacccagggcagggggcgttgcttgggtagtggctgtagaaaagtgaaggagataggcctaagtgcaaatcacaaagttttgaagctttaacagggaaataggcagtttctggcaacctgttgaaggtgttaagaataggaattataaaaagttaacaggctgggcagacacctgagggaggccagataggagactcttgcagtaatgcaggtgagaaatggg

SEQ ID NO: 192363 - DNA, 562 bp, Homo sapiens
ccagttattttgtagaatcttcttcaacgtgggcttgtctattgtttcttcatgattatatgcaggtaatacaccttgggtacaaatattacaggagtgatgctgtgttctcactgcatcctgtcaggtggtacatgatttctgtttgtcccattactgatgatgttaactttgatgatttaattaaagtgatatctacctgacctctcctctataagttattcttttttccctttgtaattaataagcattttgtgaggaggtacttagtcattatgtacatacctcttttttatcaatttattcctttatttatttatatcagtagtgactcatggtttctattttattcacagggttataatgttactaatatcatttattttcatgatttctccaccagatttaaccattggaatccccttcaagctggcttttgggtcttttttgatacatctttatcattctttgaagattttcttrcttttgggcaaaacaggatgtcataggctcattctgtactttccctgccccagtcatgtgctatggacagcattgtgtc

SEQ ID NO: 192364 - DNA, 555 bp, Homo sapiens
atttttcaataattagactttgaaactatccattacagttcaaataacaatcatcacaccctttacatgcatatgtatgcatattcccctttgcaacatagtacagtgatcattcatgtaataggactttatcttctggaaattggaaataattaaaaggtttcaaagttttgcccttcttcagtgggtcacagtgaaaagtttgggacttctatcctagaagaaggacccacaaatatctcatgttaagcccctaaagatgccctgattcttgccctttcagacagcttagtcaagctctttytgattccatgggtatatacaataaattgttcttttgactttaaagagcttgagttgattttggatattcatatcaaaagaaccttaactaataaagttcttatattttaggtaaggacaaaaatatgaatgtctttagtcttttcccttccctctgcattctaaagaaaattcctcgactctctatttttgggattaggctatgggtgaaatggagagggtaaaagctaatcaggttaacgttacaagaca

SEQ ID NO: 192365 - DNA, 478 bp, Homo sapiens
ttaccctaaagtaatccttattaacataagcacatattctttgattttttaaaatgcatttaaattgaccttttcccatgcatttttccacttaaaactgagtattttcttgaaaatacagatctaaattataattttaatagttatatgatactcaagagaacttccttttaactaagagtatcataagacactgaaatgtttaaactttaaaataaacmatcccataaaccagaagtcatgccccttaaagatcaaattttccacattttagtttccttgtaaatcagagaaaatgaggggtttattccacagacttttagaaatagaacaaggaagtctaggtctttaaaaactaggtaaccaagggttctttttaaaagttactgtttccatgacctttgttcccagtataataaatacactgtattttctttccctggtttctcatttacaagatagagaaaatccaaacaaa

SEQ ID NO: 192366 - DNA, 367 bp, Homo sapiens
tgaagtgatttttattgtttaaattctaaaaatgtctgtttctattcttttataatgaagactgtcacccaaaccaaggaagattattttataatatcaaagaataatttttaaaatacgacaaaaacctaattagttccctttgggattgctacccaaagtccaagcctgagtatttaggcaaatggctagtaataaccacragattattgaggggcttaggagacaaaatatcacacaaagtaattttcaaatcagtttctttcaaacagtaattttgagttagaggcctgcccagggctaatttacaaatcccaaaagatcatttgtggtctcaatagcctcatagccaatgccactccaggaa

SEQ ID NO: 192367 - DNA, 473 bp, Homo sapiens
gccaaaaaaaaaaaaaaaaaacccaaaaagtagcttgtatatgtggcatgctgaaaatggagcttaagtgtacrtaactgtgaaataaaaagacatggagacaattccagcaatcagacttggccaaagcacagggcttttggcaatggcctggaacgaatgtggaatgcactgcccatttgaatcaaagtccagatggctatgatttctttttttccattttcagttcactgtagttctatgggcttttttgttttgttttgttttcaggcctcttagcaaaaatttaatctctggaaaatatttcatgtgaaaataccccatgtgtgtgtgatttctgtaggtgacaaaggtgtttttgtatcaacaatctctcattgcaaatgacaatgacaaaggcatgtgccaccatgcccagctaatttttgtatttttagtagagacagggtttctccatgttggtcaggctggtc

SEQ ID NO: 192368 - DNA, 240 bp, Homo sapiens
tgttattataataggaaactaaaatctracgttaaaaatagcagacaaaattatatgagaagaagctctcagctttggatttgagtataaagcatagaacaaaagtagaaaacaaatggggagaagaaaccatgaaaacttgaatgttgaactataaaagatgaaaaatactaaaaattaagagacttgggcatgaatcatggtcagtaaaaaatgtttaaggtaaaggagatatgaagt

SEQ ID NO: 192369 - DNA, 429 bp, Homo sapiens
aaatgatacttgcatattctaccctattgcaagatcagcagggactaagtttacttcggacaggaatctttcctttactgaatgaatagaaataaattctgggctgaaatctttgcwccatttgggctctttcagaagagagcccaggatgatagaggcacaaaggtcacacaaatgcctgcatccaccttatttttcaaagctcctaccgcacacacactcatccagaaatgcctgggcaggtgccctatatttcaagatgaaaccaatcttcaacttgaggtccattctcacttcactgtcatatctaagaaggaagtaaaaatataaacctgacttcaaagcttcaaaaaaatacatagatttttaatgaagtttacttaaggacaaaaacagtatgctatagttaacattttatggcaaaaccct

SEQ ID NO: 192370 - DNA, 259 bp, Homo sapiens
cacaaatgcctgcatccaccttatttttcaaagctcctrccgcacacacactcatccagaaatgcctgggcaggtgccctatatttcaagatgaaaccaatcttcaacttgaggtccattctcacttcactgtcatatctaagaaggaagtaaaaatataaacctgacttcaaagcttcaaaaaaatacatagatttttaatgaagtttacttaaggacaaaaacagtatgctatagttaacattttatggcaaaaccc

SEQ ID NO: 192371 - DNA, 439 bp, Homo sapiens
tgattgttacagcgggtggtgtgtgctggctgagaagccactgtgaattgattcttcttctgaagtttatgtttctactttttggaaatgaataaattacagccagtccatcaaggaaattgcamttttgtcttgtgtttcctaaaggatttataacacagtaatatggcatgatgtgtttcctggccttatgtctccatgccatagttatgaaatgctgaaggaggcagatttgatcagataggatgtgaggttgtccctttcctggaggtggacaagggttagcttggcatccccttcaccaaaggtcaggaaccaccctccacatggagaactgtgttgaaaggattgtttaatttttgtcactgccagagtaattcccttccctgaactctgccaaattccccttgtggacaaaatctagagcagggtttctcaa

SEQ ID NO: 192372 - DNA, 569 bp, Homo sapiens
ttcgtgccattcaagtctgtatctgtcctgtatgacctctttccagttgtctctacctcaagttcctattagatatatattgtatgctctcatttctcctttttagtaattgtttcaggaaaaaaaaaaaacaactaaaagtaacctggaaaagcccctaaaagtctagcagatactaagttcctaagccttgtctctagactagaagataaaggtattcactaaccctaagtmcctgataggacagccaagaatctataaattttttgagtatttagagctatgttgtagttaagtcaaagaaaaagcccctcctaatatagttctctataaattttttaacaataggaacagtcttgaatctatttgtattgtgcaatattttatacagataaaagaacatatataaaatatatgttaagacataaagaatagttttcttaaaaatcagggtacccactaatcctgtttaagaaatagaatgctatctatagctcttaaggctactatgtgcccctcttcaatcaaatttctacagaaatattaattcctataataacccaccccaa

SEQ ID NO: 192373 - DNA, 569 bp, Homo sapiens
ttcgtgccattcaagtctgtatctgtcctgtatgacctctttccagttgtctctacctcaagttcctattagatatatattgtatgctctcatttctcctttttagtaattgtttcaggaaaaaaaaaaaacaactaaaagtaacctggaaaagcccctaaaagtctagcagatactaagttcctaagccttgtctctagactagaagataaaggtattcactaaccctaagtccctgataggacagccaagaatctataaattttttgagtatttagagctatgttgtagttaagtcaaagaaaargcccctcctaatatagttctctataaattttttaacaataggaacagtcttgaatctatttgtattgtgcaatattttatacagataaaagaacatatataaaatatatgttaagacataaagaatagttttcttaaaaatcagggtacccactaatcctgtttaagaaatagaatgctatctatagctcttaaggctactatgtgcccctcttcaatcaaatttctacagaaatattaattcctataataacccaccccaa

SEQ ID NO: 192374 - DNA, 569 bp, Homo sapiens
ttcgtgccattcaagtctgtatctgtcctgtatgacctctttccagttgtctctacctcaagttcctattagatatatattgtatgctctcatttctcctttttagtaattgtttcaggaaaaaaaaaaaacaactaaaagtaacctggaaaagcccctaaaagtctagcagatactaagttcctaagccttgtctctagactagaagataaaggtattcactaaccctaagtccctgataggacagccaagaatctataaattttttgagtatttagagctatgttgtagttaagtcaaagaaaaagcccctcctaatatagttctctataaattttttaacaataggaacagtcttgaatctatttgtattgtgcaatattttatacagataaaagaacatatataaaatatatgttaagacataaagaatagttttcttaaaaatcagggtacccactaatcctgtttaagaaatagaaygctatctatagctcttaaggctactatgtgcccctcttcaatcaaatttctacagaaatattaattcctataataacccaccccaa

SEQ ID NO: 192375 - DNA, 558 bp, Homo sapiens
atgcaatatcttacctttcattttagcagattgtcataaggtgttgattgtgtctgtgtgtgtgtgtgcacctaattctacacacttatacaaccatagcaagctcttatgcttttttcttttcttctcagtttttaaaaataagattttttaattttataaatatacaacataattttattcagccttaaaaagagagaaaattctgatacatgttacaacataraagaactttgcaaacattatgctaagtaaaatatgccaaccacaaaaaagacaaatactgtgtgactccactgacacaaggtaactggagtagtccaattcacagaaacatatagaagaatgatggttactaggagctgaaagaagggaagcttggggagttattattgggtatagagtttcaccttttcttttatatttatatagtttcaatttttattttaaattcagaggatacagatacaggcttgttacctgtatacattgtgtgataatgaggtttgagatatgggtcctattacccagttactaagcatagtacccaatagtttt

SEQ ID NO: 192376 - DNA, 563 bp, Homo sapiens
cattgtcccttccattgaatggctccttcccccgtggtgtccttctctcctttagttacagatgtaagcacatgatccacttggccaatcaaggttcttcatccctccattcacagtgagggatccacaggatgggcaaataactcaaacaagactggaaatcctctgttatatttaataaaggaacagtgagatcaatagtgtctgccatgaactgcagtaactgtgaaagtctggagctgccatggcatggaagaagctgacaatgaagccaacacagagaaaagtgcagtcaagctacagagtgaggagcagtttctagtaacatcctgtgagcccctggacatagtctgaaggacaactcaaccctcaacttttcagttaaatgagccaattagttttatgcatatatagaaagtatatatatgtacatatatrtgcatctatacccttatttttaaaacaaatgagagcatactctgtacactgttctgcctattgactttctcacttaatatatcttttagaattagcacatatagatctaccttattagaacatat

SEQ ID NO: 192377 - DNA, 469 bp, Homo sapiens
cattctggtcttctctccaaagttcttctattgaaatctgaatgtgaaagattaacacatttaattaatagacaagactcatttgttcctaaggctgactattcaaatgggagatactcattttataagatataattctaattgtgggctaggaattttactgatatttctttataatgtatataagcatggtatggcaatttgagatgttattattcctcaaaagcaattacatatggaggtatttttgaatgaatcaaatagtctctgactttctctgctttttgttttacacacatttaacacatgtacatgccttaaattatgacacatgtgtacacacactcatacccacacatgcactcacacaatgctrttgacccaaattcaatagagtaggtgatttttcctacccctgctaatagatttttactgatttatccatatcattttttctggtagctgtaat

SEQ ID NO: 192378 - DNA, 406 bp, Homo sapiens
cagtgtagtactgatgtaaggaaagacatacagatcaacgaaatagaattaagagtccagaaataaacccttacatttatgatcaactgatttttgacaagggtgccaagactattgaatgggaaaagaatagtcatttcaacaaatggtgctgggacaactagatatccacacacaaaagaatgaaggtgtacccttcatgccatttataaaacttaattcaaaattaagatgtatataatttttcaaatgatggactgaatagtgtaataaatatggctgaaaataaatatgttagttggaaatgtaagtcaacttacactcccagaacactgtataaaaggacaaagaggaatgtattttcaaaacttcaggaaatacwtcaactggattcagaagtttagaa

SEQ ID NO: 192379 - DNA, 423 bp, Homo sapiens
gatatattccctgaaccagaattccttagaatcyacttggtaaaatattggtctataccagtttagacaaataatatttgtcctatctcactctggtggattatttgcaatagtagctccagtttgttcacactccactgtatccctgcccttggtagccaaccctccctctacctcatcctccgaccccaccccaaacacaccaactctgaactttaccatggaacttgcattgcccgctaggacaacgctaaacacaatgcaagcaaagacttgaaaaggcttgccctgtcttgatgttcttggggctcctgttaccatctccacttgaggaagccaaagctaaacttcttcatgtgaaagaagcacctcttcatgtgcttgttccatgtgaaagcacatgaagcaaagaccagccatccc

SEQ ID NO: 192380 - DNA, 427 bp, Homo sapiens
gtaacatatagatatattccctgaaccagaattccttagaatccacttgrtaaaatattggtctataccagtttagacaaataatatttgtcctatctcactctggtggattatttgcaatagtagctccagtttgttcacactccactgtatccctgcccttggtagccaaccctccctctacctcatcctccgaccccaccccaaacacaccaactctgaactttaccatggaacttgcattgcccgctaggacaacgctaaacacaatgcaagcaaagacttgaaaaggcttgccctgtcttgatgttcttggggctcctgttaccatctccacttgaggaagccaaagctaaacttcttcatgtgaaagaagcacctcttcatgtgcttgttccatgtgaaagcacatgaagcaaagaccagc

SEQ ID NO: 192381 - DNA, 423 bp, Homo sapiens
gatatattccctgaaccagaattccttagaatccacttggtaraatattggtctataccagtttagacaaataatatttgtcctatctcactctggtggattatttgcaatagtagctccagtttgttcacactccactgtatccctgcccttggtagccaaccctccctctacctcatcctccgaccccaccccaaacacaccaactctgaactttaccatggaacttgcattgcccgctaggacaacgctaaacacaatgcaagcaaagacttgaaaaggcttgccctgtcttgatgttcttggggctcctgttaccatctccacttgaggaagccaaagctaaacttcttcatgtgaaagaagcacctcttcatgtgcttgttccatgtgaaagcacatgaagcaaagaccagccatccc

SEQ ID NO: 192382 - DNA, 423 bp, Homo sapiens
gatatattccctgaaccagaattccttagaatccacttggtaaaatattggtctataccagtttagacaaataatatttgtcctatctcactctggtggattatttgcaatagtagctccagtttgttcacactycactgtatccctgcccttggtagccaaccctccctctacctcatcctccgaccccaccccaaacacaccaactctgaactttaccatggaacttgcattgcccgctaggacaacgctaaacacaatgcaagcaaagacttgaaaaggcttgccctgtcttgatgttcttggggctcctgttaccatctccacttgaggaagccaaagctaaacttcttcatgtgaaagaagcacctcttcatgtgcttgttccatgtgaaagcacatgaagcaaagaccagccatccc

SEQ ID NO: 192383 - DNA, 568 bp, Homo sapiens
acaatacaccttgctacatgggtctgtgccatctttaagagctgtgacagttaccgcgaaggtccgcggctccattcttgaagtcagagagagtcatgaacccaccagcaggaaccaactccakacacaaggtgacccatcatgtcagagtgccccactattagtggtgctaaggttggtcacttggtatgctatatctctgcaaggtaactttattttaattgaagttaagatcaatggcctcagtaatcccaaataaatttgaaaagaaatggttctctaaaatttttcaaattgttctcatttaagtgggcaatattgtggcatttagagtcattctgaaaaatatgagaaaatgcaatgatcatcacatactttcctttctcattcagtagcctaaatatggtaattgatcatagcattagtatctactccatttcagacccattaaattttagctcatttaatcctcatggtaacctcatgaggttatcattattcttattattttaaagagggagaactgaggatcagagatgtcaagtcacaaggtcaaacaataagtgaa

SEQ ID NO: 192384 - DNA, 508 bp, Homo sapiens
aagtgacaaatagtgggccaggcaccatggttcatgactgtaatcccagcactttaggaggccgaggtgggtgtatcacttgaggtcaagagttcgagagcagcctggccaacgtggcgaaaccctgtctctactaaaaatacaaaaattagctgggtgtgatggcatgcgcctgtaggcctagctacttgggagactgaagcagaattgcttaaatccgagaggcagaggttgcagtgagcggagattgcaccacggccctccagcctgggggagagagtaagactccatctcaaaaacatttaaatgaaaawttttaagtgacaaatagatgataataaaaatcatgaaactaccatttatgagcatcatgtgtatgtaaccacactgcatgcagtatctcttaatcctcaaacatcctctgaagtgggtgttatggttgtccccatttgaaagataagaattctaaggcttagagatgttacttttctaaattcaaacagttagt

SEQ ID NO: 192385 - DNA, 594 bp, Homo sapiens
attggaacttgtcagaaggctccagagtaattttctcaggaagatgaaattgattacgtatgatgcatctgaacatcttgaaatttagacaatttaggtaarctctgccaaataactggcagaatgtaagatggaattagtaataggtacatagaaaattttgaaaattaaaaatcaagagaatgagttactccagttcaagcaaaaatagcgcaaaaaaggaaaatgattcatattgtactatatgacctagctctgggtagcatttgtatagtcattatgtaaatagtgatctacattatgataatgtaattaaattgtaatataactacgttgaaaggataagaataggtatctactgtagtaagaattgtagggaagaaacaaacagcaaattcttattctctatgggggaagtaatagattctgctataactgaaaaacagcaaagtaataataaaatagtttatttagatatgaggcattaattgccaaaataaacaggtaaaagagttgaaaggggctgcttcttgggaggggcaaatataaagggttgaagcatgggattgctgtttttcaaaacaaaccttgtag

SEQ ID NO: 192386 - DNA, 549 bp, Homo sapiens
tagcatgacttcctatacctcccaaactgcccagttctcttgctagaaagagacctcctccaaaaactgcaagcacagattacatatgggccacaagggaatgtaactttaaacctagctcacctggagactatggtattaacccttactgtcccacaggctgaggaatggaggctatatgcaaaaagactctggaaccaggggtaaatgaaatgcatggggtgcttactaaaattcctggagtttgggctgaaagtaayccacttggactggctgtaaatcaggcaccagttgtggtagagttaaaaccgggagcaactccagttcaggttcaccaatacccactactccccgatgccatacggggtgtccacaagcacttagagtggcttcataagcatggaatcatagtcaaatgtgagtgatcctggaacacccctctcttgccagtgcagaaggcgtctggagaatataggccagtgcaggacttgcatgctgtaaaccaggccaaagtgaccatgcacccagtggtgccaaacctgtattctt

SEQ ID NO: 192387 - DNA, 581 bp, Homo sapiens
agaattcgcttctacataatccaagcccgagaaattggggagagtgtccagggaagtgagaggaaaaggaatgtgggtagagctatcaatgaaataggattaatcatgaattaataataactaaagctagaaatcaccactaaagaacttacccatgtaaccaaaaaccacctgttccccaaaaactactgaaatgytaataatagtaataataactgaagctattataaatatgtggagattatgtaattctttgtacttgtgtacatatttaaatttttccgtaataaaatgtttttttaatctgaaaaagattttaattctgagcaactataataagtaaatctaaaatgtaaaaccaacaaaggtttcaacgcttttagaaagacattgccattagattataggctgctaaacacttgcttttcaaccatttagcttgctttttttctaaagtagtaaataagatacccaggtggatattaggtgagttagagtgccaaaggacaggaaaaggagatacttactactagctgattccttaacaaactgaaatatttattatccccttctattgttac

SEQ ID NO: 192388 - DNA, 393 bp, Homo sapiens
cccttgcctacctctcaggtcttggcaatgtccaccttgctttttttactttaaatagcatcatttcgtgctcccccaggacactgtgcagcttcgcacctccaagcctttgcttctgcatcgcctgacacttggagcacccttcyccactttcagattgagacttcggaacactttatcatcagcctatctgtaaagacttccttgctggtccctcccatcgcagaataaacagcctgctccgtaggattgtactgtacgtacctacttgtacctacacatgtattggacggtattgtatttgcctacttacttgtctgtgaactccttgtgggctttgtctccccagtgcctagtgatcagaataagtgttggtgagctgctgtgactcct

SEQ ID NO: 192389 - DNA, 529 bp, Homo sapiens
gtattgaagaaattggagtatggatgaaaatgtatagtgatgccttcctaaatgacagttacctaaaatatgttggctggactcttcatgacagggtaagttactctgttctaagctttgatggaagttatgtttgtctcagtactaaaatgctrggaatcaaaatgacagtagttgatttttcaggagttgtaatcatgtggaaattttaagatgatgcagctgaataactatttacttgatgattgtgatgaaactggaagcatttgcccaggggtgaagaccctatcttgtttagttacaatattgtcttgaaccaagtttgacaacctggtatatataaagttttcagagaaagaaaatcattatattctttttctaattcagaatcaaaggagatttcttttttcttaatatataaaaactaagcttttttttaaaaaaaattttctaggaccatatcatagtagagtgctttatcagacttgaatagatttgttggattttagaatatttgatctaaaaatct

SEQ ID NO: 192390 - DNA, 529 bp, Homo sapiens
gtattgaagaaattggagtatggatgaaaatgtatagtgatgccttcctaaatgacagttacctaaaatatgttggctggactcttcatgacagggtaagttactctgttctaagctttgatggaagttatgtttgtctcagtactaaaatgctgggaatcaaaatgacagtagttgatttttcaggagttgtaatcatgtggaaattttaagatgatgcagctgaataactatttacttgatgattgtgatgaaactggaagcatttgcccaggggtgaagaccctatcttgtttagttacaatattgtcttgaaccaagtttgacaacctggtatatataaagttttcagagaaagaaaatcattatattctttttctaattcagaatcaaaggagatttcttttttcttaatatataaaaactaagcttttttwtaaaaaaaattttctaggaccatatcatagtagagtgctttatcagacttgaatagatttgttggattttagaatatttgatctaaaaatct

SEQ ID NO: 192391 - DNA, 529 bp, Homo sapiens
gtattgaagaaattggagtatggatgaaaatgtatagtgatgccttcctaaatgacagttacctaaaatatgttggctggactcttcatgacagggtaagttactctgttctaagctttgatggaagttatgtttgtctcagtactaaaatgctgggaatcaaaatgacagtagttgatttttcaggagttgtaatcatgtggaaattttaagatgatgcagctgaataactatttacttgatgattgtgatgaaactggaagcatttgcccaggggtgaagaccctatcttgtttagttacaatattgtcttgaaccaagtttgacaacctggtatatataaagttttcagagaaagaaaatcattatattctttttctaattcagaatcaaaggagatttcttttttcttaatatataaaaactaagctttttttwaaaaaaaattttctaggaccatatcatagtagagtgctttatcagacttgaatagatttgttggattttagaatatttgatctaaaaatct

SEQ ID NO: 192392 - DNA, 201 bp, Homo sapiens
tctcaacggctcgggaaactcagtttccccaccgcagcttccagaaggtgtctgtagcgcacagcgccgcaaaaatgcctcaagcgaaaatcaggtcttcccctaaattcttttttggcgcttcagtgatccaacttccgctcaaagaagcggcaagacgagaggggcggggcgkagtgcagccaatcaaggagtttggcc

SEQ ID NO: 192393 - DNA, 584 bp, Homo sapiens
caccttaccttgtttacaaatacgtagcctacatatgggacatgatttttctcatctaattactaaatttattaaaagtctaacattaaaaatgatgacattttacctatttgktgtttttttttttaattatggtggttagaacgttttaatctgtgattctaactctctgggatctgaagttggcttagcaacaagaattggcttccattaggcccatatctcactggagtattcaacagagagataaaaaactagtagcctgagggccaagcttggctgtcactaaagtgagttatgtttggctcttactggttggttgtcttaaacatttgaattcaaacgcctttagttgaagtttgaccacactctgtctccaccactctttacggtctcacatccagcccagtgcccacagtttatcatctaggtggcccttgaaaacctttgcttctgctatcgctgaagggaatgctttgttggactatttttcccatacttgcagaaatatttgttattttgattatgcttctaattcctacagaaggcatattagttattcatacttcagggtgaaatagttc

SEQ ID NO: 192394 - DNA, 584 bp, Homo sapiens
caccttaccttgtttacaaatacgtagcctacatatgggacatgatttttctcatctaattactaaatttattaaaagtctaacattaaaaatgatgacattttacctatttgttktttttttttttaattatggtggttagaacgttttaatctgtgattctaactctctgggatctgaagttggcttagcaacaagaattggcttccattaggcccatatctcactggagtattcaacagagagataaaaaactagtagcctgagggccaagcttggctgtcactaaagtgagttatgtttggctcttactggttggttgtcttaaacatttgaattcaaacgcctttagttgaagtttgaccacactctgtctccaccactctttacggtctcacatccagcccagtgcccacagtttatcatctaggtggcccttgaaaacctttgcttctgctatcgctgaagggaatgctttgttggactatttttcccatacttgcagaaatatttgttattttgattatgcttctaattcctacagaaggcatattagttattcatacttcagggtgaaatagttc

SEQ ID NO: 192395 - DNA, 555 bp, Homo sapiens
gaattcttcatcactcactgcagggccaggaccaagacaaagtgttaaatgggttccattttgctctggcttccatctggcttgattaccagtcccggccttcccttctcgctgttctgggcttattcttgcctttaatatacagtcaataagcaactcaagaggggccgtatttcaatccagcattcctgaagaccagggggccttgtgaacacatttgttcttcaccttatttgattgcagatcttttttttttctttttcattttctttgagacaaagttttgctctgttacccaggttagagtatagtggcgtgatcataactcactgcagctttgaactcctgggctctagcagacctacctcagcctcccaggtagctgggacttgagatgagtaccaccatgcctggctaattttttwaaaaaattcttttgtagagacaaggtctcactatgttgcccaggctggtcttgaactcctggcctcaagtgatccttccgtctcagcctcccaaagcattgggattataggcatgagccaccaagcccag

SEQ ID NO: 192396 - DNA, 496 bp, Homo sapiens
cagcagaactgccagaactttgatcttggattttccagcctccagaactgtgagaaataaatacttattgtctaagctatctaatgtatggtattttgttacagcagcctgtgcgggctaagacagactccatcagtcagctaagacatattccacttcagatatgcaatgtcccttcatccatagcccctctttcttctctttcttgacctcctggttatcttggtcttttgatattagcccttctgattttcycaggcatgtgattccaataatcctgttttttgttgttgttgtttgtttgtttttcctctaggtttctggccaagacttgcagagatttttctgttaatgaaactgagattttaatgggtttagatgtatcttcatgtgattctgaccccaaaactgggaggaaaggataaagagcagcatcaatgtggctctatctgtagaataaattatctatatgatgaaaaaaatacgttttgtgtta

SEQ ID NO: 192397 - DNA, 496 bp, Homo sapiens
cagcagaactgccagaactttgatcttggattttccagcctccagaactgtgagaaataaatacttattgtctaagctatctaatgtatggtattttgttacagcagcctgtgcgggctaagacagactccatcagtcagctaagacatattccacttcagatatgcaatgtcccttcatccatagcccctctttcttctctttcttgacctcctggttatcttggtcttttgatattagcccttctgattttctcaggcatgtgattccaataatcctgttttttgttgttgttgtttgtttgtttttcctctaggtttctggccaagacttgcagrgatttttctgttaatgaaactgagattttaatgggtttagatgtatcttcatgtgattctgaccccaaaactgggaggaaaggataaagagcagcatcaatgtggctctatctgtagaataaattatctatatgatgaaaaaaatacgttttgtgtta

SEQ ID NO: 192398 - DNA, 496 bp, Homo sapiens
cagcagaactgccagaactttgatcttggattttccagcctccagaactgtgagaaataaatacttattgtctaagctatctaatgtatggtattttgttacagcagcctgtgcgggctaagacagactccatcagtcagctaagacatattccacttcagatatgcaatgtcccttcatccatagcccctctttcttctctttcttgacctcctggttatcttggtcttttgatattagcccttctgattttctcaggcatgtgattccaataatcctgttttttgttgttgttgtttgtttgtttttcctctaggtttctggccaagacttgcagagatttttctgttaatgaaactgagattttaatrggtttagatgtatcttcatgtgattctgaccccaaaactgggaggaaaggataaagagcagcatcaatgtggctctatctgtagaataaattatctatatgatgaaaaaaatacgttttgtgtta

SEQ ID NO: 192399 - DNA, 496 bp, Homo sapiens
cagcagaactgccagaactttgatcttggattttccagcctccagaactgtgagaaataaatacttattgtctaagctatctaatgtatggtattttgttacagcagcctgtgcgggctaagacagactccatcagtcagctaagacatattccacttcagatatgcaatgtcccttcatccatagcccctctttcttctctttcttgacctcctggttatcttggtcttttgatattagcccttctgattttctcaggcatgtgattccaataatcctgttttttgttgttgttgtttgtttgtttttcctctaggtttctggccaagacttgcagagatttttctgttaatgaaactgagattttaatgggtttagatktatcttcatgtgattctgaccccaaaactgggaggaaaggataaagagcagcatcaatgtggctctatctgtagaataaattatctatatgatgaaaaaaatacgttttgtgtta

SEQ ID NO: 192400 - DNA, 401 bp, Homo sapiens
agatctggtgtctagtgaaggcactcttcctgccttgcagatagtcatcatctcattgtttcctcaactggtagagagcagagagagcaagctaggtctcatttctctttttatmagggcactaattccattcatgagggctccacattaatgaactaatcacctccctacagccccacctccaaacaccatcacattggtgggcaggatttcaacatatacattttagggagacacaaatattcagtccattacagcatgagactcttactagttgatatggtttggctttgcgtccccacccaaatctcatcttgaattggaataattcccatgtgtgaaaggtgtgaccaggtcgaggtaattggatcatggaagcagtttctcccatgctgttttca

SEQ ID NO: 192401 - DNA, 560 bp, Homo sapiens
tcgtttgttgcaatattaaatcacttttgtaagcccttctaccaatttagtaaggtatagtacacatatttttgatatttgttatgagaggggtttgctggtaagatagcatggctaagaggctaaatttcttgtgtaggctggcacagagtaaagaaaatggaaattaaaaaaatatgggccaatgtcattgagatttctctgtaaacattaaagaaaatgacagtaaggataaacttccccaagactttgccgacttttagaaacagtgacaaatttcaacatatgataattcaaaatttccctctattttaaagtcagatgattagcaaccttagttatacccacaatgttagctcttctttgatatgtaacatattcataggttctgaagactaggacgtagacatctttgggagaccattattgtgcctattgaagagtcagaaaccatattttattatagatamgtttttttgtagtcatttcataaatattctctggaatatcacattttcatgagtgagtcagcatgactaattcaatgagttagtgaaatt

SEQ ID NO: 192402 - DNA, 589 bp, Homo sapiens
ccaatgaagaattgtcaaaatatmtacagtgttctgatttcaagctttctttctatttcataagtggtttcattctaagaacggaagtgtactaagtgaaaaatgctacaaatggaataaaagcagcaaaagtttataacttgatgaattaattatgcagaaattaccaattttaatgctaactgcaggactgatttttattttttttaaataagcaatatgaaaacagaattcttacctaaactcaaagctgacagtgctaatagagtaaaagaggaaaaaaaaatgaaaagggcaaaaaagcttttcttctacaaagcttctgcacagcaaaagaaacaatttaaagaatgaaaaggtaatctacacagtctgagaaaatatttgcaaaccatgtatttgataagggattaatatcctaaatatgaaaggaactcaaataacttaacagaagaaaacaaatcaattaaaaatggacaaaggaagtgaatacgtttttgcaaaacaagacattcaaatgttcaagaattataaaaaaatttgctcaacatcactaatcgccagagaaatacaaattaaacccacatga

SEQ ID NO: 192403 - DNA, 589 bp, Homo sapiens
ccaatgaagaattgtcaaaatatctacagtgttctgatttcaagctttctttctatttcataagtggtttcattctaagaacggaagtgtactaagtgaaaaatgctacaaatggaataaaagcagcaaaagtttataacttgatgaattaattatgcagaaattaccaattttaatgctaactgcaggactgatttttattttttttaaataagcaatatgaaaacagaattcttacctaaactcaaagctgacagtgctaatagagtaaaagaggaaaaaaaaatgaaaagggcaaaaaagcttttcttctacaaagcttctgcacagcaaaagaaacaatttaaagaatgaaaaggtaatctacacagtctgagaaaatatttgcaaaccatgtatttgataagggattaatatcctaaatatgwaaggaactcaaataacttaacagaagaaaacaaatcaattaaaaatggacaaaggaagtgaatacgtttttgcaaaacaagacattcaaatgttcaagaattataaaaaaatttgctcaacatcactaatcgccagagaaatacaaattaaacccacatga

SEQ ID NO: 192404 - DNA, 589 bp, Homo sapiens
ccaatgaagaattgtcaaaatatctacagtgttctgatttcaagctttctttctatttcataagtggtttcattctaagaacggaagtgtactaagtgaaaaatgctacaaatggaataaaagcagcaaaagtttataacttgatgaattaattatgcagaaattaccaattttaatgctaactgcaggactgatttttattttttttaaataagcaatatgaaaacagaattcttacctaaactcaaagctgacagtgctaatagagtaaaagaggaaaaaaaaatgaaaagggcaaaaaagcttttcttctacaaagcttctgcacagcaaaagaaacaatttaaagaatgaaaaggtaatctacacagtctgagaaaatatttgcaaaccatgtatttgataagggattaatatcctaaatatgaaaggaactcaaataacttaacagaagaaaacaartcaattaaaaatggacaaaggaagtgaatacgtttttgcaaaacaagacattcaaatgttcaagaattataaaaaaatttgctcaacatcactaatcgccagagaaatacaaattaaacccacatga

SEQ ID NO: 192405 - DNA, 589 bp, Homo sapiens
ccaatgaagaattgtcaaaatatctacagtgttctgatttcaagctttctttctatttcataagtggtttcattctaagaacggaagtgtactaagtgaaaaatgctacaaatggaataaaagcagcaaaagtttataacttgatgaattaattatgcagaaattaccaattttaatgctaactgcaggactgatttttattttttttaaataagcaatatgaaaacagaattcttacctaaactcaaagctgacagtgctaatagagtaaaagaggaaaaaaaaatgaaaagggcaaaaaagcttttcttctacaaagcttctgcacagcaaaagaaacaatttaaagaatgaaaaggtaatctacacagtctgagaaaatatttgcaaaccatgtatttgataagggattaatatcctaaatatgaaaggaactcaaataacttaacagaagaaaacaaatcaattaaaaatggacaaaggaagtgaatacgtttttgcaaaacaagacaytcaaatgttcaagaattataaaaaaatttgctcaacatcactaatcgccagagaaatacaaattaaacccacatga

SEQ ID NO: 192406 - DNA, 560 bp, Homo sapiens
gggaattcaagttcagaccactgggatcagtggtcttcctctggtcagtgctggtttaaatcctctctccatgggtgggcatcaattgagtttggttcagttttcttttctgtgataacaggacaacactgagtttagtgcctcacaattgtgctctctctcctctagtacacagaaatgctctccataccttgccactgctgctgggaaggaacaggggaggagtgacattgagattcaagactatttttcctacctcttcagtgcctctttcagccatatgaagttaaaaccaggtaatgtgagtgctgatctgatttctgattcatttgaaggtgctttttctatgtgtagatttgttaaattgatatctttggggggtgacaagsagtaaagccttctattctgccatctggctctactcctgtctctcaataattgcttatggattaggagctgaggcacagctttggtggatcatttcctcaaaatcttaaacagttataattaagctgttggtgagaattgtagggtcatgtaaggctcagcatcctctccca

SEQ ID NO: 192407 - DNA, 461 bp, Homo sapiens
acttttcctcacactccaagatctcaactatatgtaaattgtgctatcactttttttcttttctttttttttgtttgtttgttccagttcatcttccattatatttgaccaattttggttcatcttctattagatttgactgaaacccctgcagctgcaaaaagtctaattccagrttgttatacattctccttttttaagttcagacacaactgacaggaattaacattgaaatagagattataagactaacaaaattgagtcttcgtggaaataagataccagattttaacctcactctgttatagcattgcatgacagatagcaggccctgagggaaatacaaatattttaccccaaaatatatactttaacatattctgaaatggctctgcaaagttttctcttgtgggagaaatttgcatctgtagagaatttccatttgcatctgtagagaattt

SEQ ID NO: 192408 - DNA, 487 bp, Homo sapiens
cttggggtatgtttgagaaatgaaaggaggccactgtggttagagtggaaagaacgacttggagggtggtaagaagtgaacacagagagcagccaagagccagggcatgtagggccctgttagccaaactaagaaatttggaatttaagtgagataataatttatttgacagtattgagaaggggaatgacattacatgagttaaaattttaacagagtcacttataactgtccttttagagaataacactttatttctgaatggagcaatggraggacagtaagtgtaatttactgatcaaaaagcacaagagtaagagcaaggttaggaggaaagaattgcagggaattcacaagctcaggtctttgtaactgactaggatttgagtattgtacagaaataaaagccagatatatttatgtattatactcatatattttggtctactttaaattgaggaatgtgctgtgatgagaacaaaaactg

SEQ ID NO: 192409 - DNA, 506 bp, Homo sapiens
taatcatttgtattcactagtgtcatttatgccaaaagaataaacataaccattttacatgaattttcaaaatacatcaatcaaaggttgtttcaaaactacaaagacaatccattaaattctaaagtattttaagagggctaaaatgagaattggtctcaacaaaaaaagtaaaattatcagttgacgttagtaagtactaaatgatcatgaatattggcccaacttaacrcatgcacacaaaaatacacacacacacacacacacacacacacacacacacgcttaacaatttgtgttgcatgcaattggaatgctgccttataagtaattatgaagttttctaatacctaaaatgttcaaagagaagaatataattgcccattacagagcattatggataagatgattgtatctagtttggtctaactgaaggtctccatcagcactaatattttattattcaagaccaagtagacaggaataatttttcatttcttctcttt

SEQ ID NO: 192410 - DNA, 506 bp, Homo sapiens
taatcatttgtattcactagtgtcatttatgccaaaagaataaacataaccattttacatgaattttcaaaatacatcaatcaaaggttgtttcaaaactacaaagacaatccattaaattctaaagtattttaagagggctaaaatgagaattggtctcaacaaaaaaagtaaaattatcagttgacgttagtaagtactaaatgatcatgaatattggcccaacttaacgcatgcacacaaaaatacacacacacacacacacacacacacacacacacaygcttaacaatttgtgttgcatgcaattggaatgctgccttataagtaattatgaagttttctaatacctaaaatgttcaaagagaagaatataattgcccattacagagcattatggataagatgattgtatctagtttggtctaactgaaggtctccatcagcactaatattttattattcaagaccaagtagacaggaataatttttcatttcttctcttt

SEQ ID NO: 192411 - DNA, 569 bp, Homo sapiens
ctgagaagggtaagtgggaatggggtggagaatgaagagatgtgggttaaagggtacaaacatatagtttgatagaaggaataaatttaatgtttgatagcagagtcggggtactacagttaaccccaaatgtattgtattcaagagatgaacatcctaaataccctgacttgatcactatccattatataaatgtaacaaaatttcatatttacccccaaaacttgtacaaataaaaaataaatgattaaatagaagacaatgcaccccaacaaaacaacaacaaaaactcatttagaataagagttggaaaattaaggccaatggtcaaatctggcctgaggcttgtgtttatacagcttgagtgctatgaayggttttacattttaaaaggatatattcatataatctgtatacacaacccctatatgcacacacatacacacacacacacgcatacacacacaccctcatatatcatacacacacacacacataaatgataaatatcagtatgtggccagcaaagattaacatacttatacaactttttacagaaaaaaaagatt

SEQ ID NO: 192412 - DNA, 625 bp, Homo sapiens
aactattcatatttttctgcaatttgcttcctcttcccccgttgcagagtagaattgctgaaaccctcaaaattgagagttacatatttaaatttctcttttatcagttttagtttttcttaaggggctatttctagattaggagggsgttttgttttcttttttttttgacacaaccacaatgtggcaatcaacattctctctctccatttgtctatatacatatatgtttctatatctcgttatagatatctgtatctgtctatccatccatctacccacttatctgtaatcaattttctccatagcaaatgttcacagaaatggaacttctgaatcaaataataggtatatttaagtttttaattattcaaaactatgttctcattatctcttgtcttcaatttttagaagttctttgtatattattaatattttatcagtgcatgttcttttcaccaggaacagaagctaagtgttccagttatctattgttgtgtatcaaataaacacaaatcttagtgatttaaaacaactattttattattcttcatagcatttgactaacctcagctgcgcagtttgtttgttgtttgttttttgttttgagaatctctctcatgca

SEQ ID NO: 192413 - DNA, 625 bp, Homo sapiens
aactattcatatttttctgcaatttgcttcctcttcccccgttgcagagtagaattgctgaaaccctcaaaattgagagttacatatttaaatttctcttttatcagttttagtttttcttaaggggctatttctagattaggagggcgttttgttttcttttttttttgacacaaccacaatgtggcaatcaacattctctctctccatttgtctatatacatatatgtttctatatctcgttatagatatctgtatctgtctatccatccatctacccacttatctgtaatcaattttctccatagcaaatgttcacagaaatggaacttctgaatcaaataataggtatatttaagtttttaattattcaaaamtatgttctcattatctcttgtcttcaatttttagaagttctttgtatattattaatattttatcagtgcatgttcttttcaccaggaacagaagctaagtgttccagttatctattgttgtgtatcaaataaacacaaatcttagtgatttaaaacaactattttattattcttcatagcatttgactaacctcagctgcgcagtttgtttgttgtttgttttttgttttgagaatctctctcatgca

SEQ ID NO: 192414 - DNA, 565 bp, Homo sapiens
ttatttgaccttgactatatataaatattcatgtacagtaatataaaagaagactataacagtgtgttaataaatcttaaattattttcatttcctgtacttaaatagttgagtgtayacatttttgcattcagttaaatttaacatgtgctttcgtaatatggaaagtgaaatattaccatgctgtgtgggccatctgtactgggaaatatatttacctctgagtaaattttagtagcaagtattttgacttctgtgctattgagaaatttagacttcaccttataactctgaagttaagagatttctattaatatatcatattccaacataatttattatattagtatgtttcatacattgcataagatagaatcaggataaaagtaaataaatacaacctttttgagtcgtgactttatttcactttaaaaatttattttcataccaaaaaaatcattcaaagacagtattaaaaaggatgacaaaatacataaaattggcagatgtcttacactaaaataaagttggttttcccagatctgaatggttttatactacttga

SEQ ID NO: 192415 - DNA, 465 bp, Homo sapiens
atcactatcagcattttggtcacaaccatttaaccatttaaccagtctgtaagaagttcctaactttccctcaccttcctgtcttcttctgagctctcagcacacttacctactctacctgttacctaattccaaagctgcttccacattttcaggtgtctttatagcagtgcatcactccttggtaccaattttctatattagtcatttctggcattgctataawgaaatactggaggctgtgtaacttataaaggaaagaagtttaattggctcgtggttctgcagtctatatggaaaacatgatgctggcatctgctgcatttctgaggaggcttcagtaaacttacaatcatagtggaaggcaaagggggagcaggcatgtcgtatggccagagcacgagcaagagaagaagggaggctaccacaacacacacttttaaacaacaagatctcatgagaatt

SEQ ID NO: 192416 - DNA, 465 bp, Homo sapiens
atcactatcagcattttggtcacaaccatttaaccatttaaccagtctgtaagaagttcctaactttccctcaccttcctgtcttcttctgagctctcagcacacttacctactctacctgttacctaattccaaagctgcttccacattttcaggtgtctttatagcagtgcatcactccttggtaccaattttctatattagtcatttctggcattgctataaagaaatactggaggctgtgtaacttataaaggaaagaagtttaattggctcgtggttctgcagtctatatggaaaacatgatgctggcatctgctgcatttctgaggaggcytcagtaaacttacaatcatagtggaaggcaaagggggagcaggcatgtcgtatggccagagcacgagcaagagaagaagggaggctaccacaacacacacttttaaacaacaagatctcatgagaatt

SEQ ID NO: 192417 - DNA, 465 bp, Homo sapiens
atcactatcagcattttggtcacaaccatttaaccatttaaccagtctgtaagaagttcctaactttccctcaccttcctgtcttcttctgagctctcagcacacttacctactctacctgttacctaattccaaagctgcttccacattttcaggtgtctttatagcagtgcatcactccttggtaccaattttctatattagtcatttctggcattgctataaagaaatactggaggctgtgtaacttataaaggaaagaagtttaattggctcgtggttctgcagtctatatggaaaacatgatgctggcatctgctgcatttctgaggaggcttcagtaaacttacaatcayagtggaaggcaaagggggagcaggcatgtcgtatggccagagcacgagcaagagaagaagggaggctaccacaacacacacttttaaacaacaagatctcatgagaatt

SEQ ID NO: 192418 - DNA, 516 bp, Homo sapiens
gaattcactcactatatcgaggacagcaccaaagggatggtgataaattattcataggaaatctgcccccatgattcaatcacttcccaccaggccccaactctgacactagggattgcatttcaacatgagatttgggtgaagacactcatccaaaccatatcattgaggtaatgataatagtctaaattatagatacaaaaaatataatggttgttcccaagacatggggagtgggagacattgggaattatttttttaatgactatagagtttcagctttacaagatcaaaagagttrtggagatatatggtaattggatattacaaatgtatttaatacaactgggctgtacgcttaataataatgacagtggtaaatttatattacaacaacaaagtaaaaagaaaaaatatacctgatgattttttaaagtttacatatatacatactatatgtgatatttttagccctatacctagtaccttttccgtaactagtaaaattatataatt

SEQ ID NO: 192419 - DNA, 516 bp, Homo sapiens
gaattcactcactatatcgaggacagcaccaaagggatggtgataaattattcataggaaatctgcccccatgattcaatcacttcccaccaggccccaactctgacactagggattgcatttcaacatgagatttgggtgaagacactcatccaaaccatatcattgaggtaatgataatagtctaaattatagatacaaaaaatataatggttgttcccaagacatggggagtgggagacattgggaattatttttttaatgactatagagtttcagctttacaagatcaaaagagttgtggagatatatggtaattggatattacaaatgtatttaatacaactgggctgtacgcttaataataatgacagtggtaaatttatattacaacaacaaagtaaaaagaaaaaatatacctgatgattttttaaagtttacrtatatacatactatatgtgatatttttagccctatacctagtaccttttccgtaactagtaaaattatataatt

SEQ ID NO: 192420 - DNA, 600 bp, Homo sapiens
tagtaaataatatcaaatcagatgtaactgcagggactatatctttaacatgctatcctcggcacctgacacattatcagctgtgactgaatttttctagtttatttttgagactcaaaggataaattaaatcgttttccagataacaaacwcccttaaatgaagtatggtgatcacagatcctcaaagaatggtttcctccagtgattgactctcctttttgtttgttttaattctattcactatttagatttcatctcatttgagctgagaaagtcattgggcaagacaggcctggactgcctgcctttggtcacttatcaattacaaatagtgttttcgatgtctatttttatctcatggtttcctgtcgagcattttaaaaaagaattggaatggcaattcagtgaaattatagaacatgggaaaggtcaaaggtatatagtttaatgttatctttcagagaacatgtgaggttataaaattctaaaccctagttcctgtgacaaagcttgtaaaaaggagaaagaaatagcaaatcataaatctggccctctcccactgtctgaagcagaaggaaccataccagcctaatctgtt

SEQ ID NO: 192421 - DNA, 600 bp, Homo sapiens
tagtaaataatatcaaatcagatgtaactgcagggactatatctttaacatgctatcctcggcacctgacacattatcagctgtgactgaatttttctagtttatttttgagactcaaaggataaattaaatcgttttccagataacaaacacccttaaatgaagtatggtgatcacagatcctcaaagaatggtttcctccagtgattgactctcctttttgtttgttttaattctattcactatttagatttcatctcatttgagctgagaaagtcattgggcaagacaggcctggactgcctgcctttggtcacttatcaattacaaatagtgttttcgatgtctatttttatctcatggtttcctrtcgagcattttaaaaaagaattggaatggcaattcagtgaaattatagaacatgggaaaggtcaaaggtatatagtttaatgttatctttcagagaacatgtgaggttataaaattctaaaccctagttcctgtgacaaagcttgtaaaaaggagaaagaaatagcaaatcataaatctggccctctcccactgtctgaagcagaaggaaccataccagcctaatctgtt

SEQ ID NO: 192422 - DNA, 552 bp, Homo sapiens
cagtgaggtcagcatagcctggatactaaaacaaggtaaggaaactaacaaaaaagaaaataacagatcaaaaaccctgatgaacatagatgcaaaatcatcaacaaaatactaccatatctaacccaayagcccatcaaaaagagtatacaccatgattaagtgagatttattccaggaatataaggatggttcaacatacacaaataatcaatgcgatacctcacattaacagaatgaaagataagtttatgtaattataggaatagatgcaggaaaataatttgataaaattcaacaatgccttatgataaaaaaaactctaaacaagtgaagaatagaagaaatgtacctcaatgcaatataagccatatatgacaaacccacagctagcattattctgaatgatgaaaagctgaaaaaaaaaacaggaataatacacagatactcattcacactactgttattcaacatagtagtggaagttttagccagagcaattagaaaaatgaaagaagtaaatggcattcaagttgaaagcaaggaaggcaa

SEQ ID NO: 192423 - DNA, 438 bp, Homo sapiens
gtcacactaccagatttcaaaatatactacaaagctgtagtgactaaaacagcgtggtactcacyttaaaactgatacatagactaatggaacagaatagagaaaccatgtataaatccaggtatttacagccaactaatttttcacagaggagccaagaacctgcattgagaaaatggcagtctcttccatgaatggtgttgggaaaactggatatttctatgcagaaaaatgaaactagatccctgtctctcaccatacacaaaaaccaaatcaaagtggcttaaagatttaaacttaggacccaaaactctaatactactagaagaaaactggaaaaacatttttagaaaattggtctgggaaacaattttatcatagataagacctcaaaagcagatgcactaaaacaaaaacaaacaattgtggttataaacg

SEQ ID NO: 192424 - DNA, 613 bp, Homo sapiens
atattgtgtcaataacatacaataattgtaaactgaaaatamatattattttacttcaaatcaaaaaggaataataatattttagcttatttaatttattttgatatttggcatactccatgcagaatctatcatgataaataaatgatttttggcaggctgactacataatctttgtgactagagaaagaatcaactttgatcctctgtctcaattaggactctattgaagtggtactgaacagttgagaaagaaacattaaagtaatattctttactcccaaagatagatgcttgagccaggctgtatttataagtgtgtagctccaaccataaaaccattttctgcatccatgcaaactataatggatttacctttatcaccattgttaaggaaattattttgtttctcccccttctagttcttctaagctccttttagggtaactctttcaagcttttcaaactactctgtttgacagtcggtgaggttataaagataaaaccggtattggtattcattcacattttctagattagtgttttgcaaatgtagtatataatttcacttcagcagaggaatcctctgagatgcttattaaaaatgaaggtt

SEQ ID NO: 192425 - DNA, 589 bp, Homo sapiens
tatttttcccagtctaattggacccttaagagagtcacaaaatgacattattttctagcaatttctcacttaattactaatcacacccaacgtataaccaagactggtcttaaatagaggatagagaaaaagaatactgtatgctgacatatgaatttatatagrgggcagtaataaactccaagggacagtattttgggaaataaaaatcacagaaaggtggtgtcaggctgagggacattgaaatgggggtccaggcccctttgttctgatcgtgactgtcagtatatggtagtagacaggagagacttggcttccagctccactttgtcacttaaaatctatataacaggtagtcagaagctctcagtcaagatagagtaacagggactagattgagtctcctacctgaaacaatcattaaaaccagacaaaacatgtgaagtaaatgttcttcaagacactgacatcaggctacaaaagacagaagttgaacaaggtaagccctacttttgccctgctataggcagtaagacaacaagggaaataaagttgaatcaaaataaaattccagggcatgcatgtcaat

SEQ ID NO: 192426 - DNA, 445 bp, Homo sapiens
agcctgcaagaaccacagcattactgggcttggggtggtaaccaatgcagatataactcagatcacaacaaccaagtccctttgaatagcaagaatgccttcctgagaaggagaagtacagacaagcccagactgaaaagactaccttaattcccagaaacgaacaaatatctataagcatcaagaccgtccaacaaatcatgacctcaccacacagaataaataaggtgccagggaccawttctggagaaacagagatatgtactctttcagacggagaactcaaaaatagctgttttgaggaaactcaaagaaattcaagataacacagggaaggaatttagaattctgtcagatatatttaatgaggagattgaaataattaaaaagaatcaagcagaaattctagagttgaaaatgcaattgacatactgaagaatgcctc

SEQ ID NO: 192427 - DNA, 494 bp, Homo sapiens
atataaagttgttcagatgctgtgaaaagcagtctggcaattcctctaaaagctaaacatagagttaccatatgacccagcagtttcactcctaggtatacactcaaaataattagacatagggactcaaacattaaggtttattgcatcattattcacattagccaaaagatggcaacaacctttgtttctactcacaggtgaatagataaattaaatatggtatatacatacaatggaatataattcaaccatatgtaaaggaaaaataaaatcytaagctccccaaccaactgaactgatcccctcttggccaaaggcaccccagagaaatcttaaaaaccgagttccctgccatgaagggatgggaggttggccatgcctcgttatacacccccgccttgtgcaatttagacacaactgaccagcattcacgtgaaaatggagctcataagactgacagaatggactctctgtggtataaggaaccaaat

SEQ ID NO: 192428 - DNA, 521 bp, Homo sapiens
taatgtgtagcttacctggggttagaatctgggagttacagcttagtctgaaggttagccctggtgcttgctatttcagacttcagagagcattgtggggcctstaagtgtattattaggtacttaagtactagtaaatggcctttgcttggagccagtgttattcacattccatgcaaggaaggatcttgttctgcaaagtgagcaactataaaatgagcagcgctgtagaaagagatgatcacttactttgcaggagttctctccattatcctaagaacttggtaagtcacacccaacctagagccgcagattgcactgaggactctatgtatgtggatgtagtatgcattctcattatgcattctcagcagatgacccagaaagagcagggaggcccaaactgctggagacggcacgtggggcagaatttcctaatggttgtctgggagaatggaagacctgggcttggtgatgtagggctgttttctgtgtggaaggagcaagatgagttgtgtgag

SEQ ID NO: 192429 - DNA, 358 bp, Homo sapiens
agcagcaacattatcattagtgtgggccaaagtgttccagccccacttcctcttaggaccgaggtctgggtctctccggctatagccctggcccgacccttcccaatttgcgcaggcagcagaacctacccccgtctcctttgtgccccatcagatgtaatgccccagaaaggtgcttctggccatgctctgaagccgacagaatggggcagggttggaggggatctgtgaggacagtccctgtggggctgggggaagctacgggctcrgattaggtcaagaaagacacagagattccctcttctggccactaagccttctctggaaggggactggggactgagatatactcactagg

SEQ ID NO: 192430 - DNA, 597 bp, Homo sapiens
ttacgcaaagacattgaaaattatagatcaaaaacgatcatgaaaattgatacaaaaatccttacaaaatattagcaaattgcacacagcaatatgtaaaatgtataatatattacagccaattggaatttatcccaggaawgaaagcttgatttaatatttaaaagttaatcaattgtattgattattaacagaataaagtaaaaaaatcaatacaatcaactcatttataataaataaaatacattcgcagcatattacctacggggagaacttcctcaatctgatcaaatgtatctacaacaaacctacagttatcaacacagtaacctgccagtacaaggaagtaagacaaataaataaaaggaattaagattggaggggaagaaatgaagctacctttattcctagataacatgacagtatacattgaaaagcccaatgaatcaacaaatcagaagtgaatttaacaagctgtggaatacaaggtcgagtcaaaaattaattgtatttctacatataaggagaaaaattggaaagtgaaatatagaagtcatttaaaatagaataaaaataatacacttatgaattaacaca

SEQ ID NO: 192431 - DNA, 581 bp, Homo sapiens
tttttgtgtgtgtttttttttttaagaaggcagggggctaggaaacagggggctatttttttttaagatggatttttttaagaaggcagggtggggaatgctgattggcagggatgagctcaattggttcctgggtggaagctgtaagaacagacaagcctgcttaccagtctgggtggtgccagctgacccaccagaatgcagggtccgaaaaatatctcaaacaccaatcttaggttttacaaaagtaatattacccagatgagcaattgggaagattaagaatcttgtagcctctggttgcatggctgctaatccataatttctaatattgtggctaatttgttagttttacaaaagcagtcttcctccctccaggtaagaaggagtttatttcarggagagactgttaacatctttgtttcaaagttaacctgtaaactaaattcctcccaaagttacttcggcctacacccagaaatgaccaagggcagcttggaagttaaaggcaagatggagtcagtaaggtcagatctctttcactgtcataataatttttgcaaaggctgtttcaattcaag

SEQ ID NO: 192432 - DNA, 518 bp, Homo sapiens
ggtacaattcctactgaaactattcaaaaaagttgaggagaagagactcctcctcaactcattctatgaagccagaatcaccctcataccaaaacctggcagagacacaacaacaacaaaaagaaaagttcaggtcaatatcctcgatgaacattgattcaaaaatcctcaacaaaatactagcaaaacaaatccagcagcacatgaaaaagctaatctatcacaaacaagtaggcatcatctctgggayacaagtttggtttaacatctgcaaattagtaaacgtgattcctcacgtaaagagaactgaagacaaaaaccacatgatcatctcagtagatgcagaaaaggctttcaaaaaaaatcaatacccctcttgttaagaactcttaacaaactagatattgaaggaaatacctcataataagagccatctatgaaaaacccacagccaacatcatagtgaatgaacaaaagctggaagctttccccttgaaaacaggcacaagacaagaatt

SEQ ID NO: 192433 - DNA, 557 bp, Homo sapiens
gtaaaatcagctctttggagtgacaagtaaacctcttgaaagccacaactctaaatccagtttgccaccatttgctgatttcattctttttgtgggaaaaatgcccaagggaggaacatgcagactaaaaatgtatagtcaaatgacataccctgtaaatcaaaacgacattgactgacccctcttcataaagcacgggcttttgtgctgcccccagtggctaaggtgaaagagtcggtgaaccacccacaccctccctctcccayaatcccaccaccatcagaggcacacactgtggatggcccagtggcccgggttacagaaacatctgtggccagagtgaggctgcctgcctcacctgggaattgaacctgttcaccttggcctcaacaaatgccaagccaaacgacaacagacgatttgggaatggaatgatcttggatatgtcccatggtcaatttggtgatattattaacacaaacccccagatcacttaagataatattaagatatgttggcacctcttcaaagtgtttctctctgagaagtggaaaggc

SEQ ID NO: 192434 - DNA, 490 bp, Homo sapiens
aaattttctggaacactattattatttaacatcattatagaagttctggttgacataatgagatacaaaacataagtaagttgtatagttattggaaaggaagagaaaaactatcattatttatagtcaatatggttttgtatccaagaaactcaagagaatctattgaacacacatagaattaataagaattcaataaggtgattcattacagagtaaacatgcaaaaatcaataactttttaatatactaacagtaattatttaaagaatataagagaaaagaatcccacacacagtaacagcaaagacttaaatgcctagaagagaaaataaaagagaaagagaaagtgcaaggcctagataatgaaaatcacaatgtttcattgaggatataaaagaagttaactaaatataaatgtgtmaataccttatatggagaaactcaataacataaagatgttaattttcccaaatgaacttataatatt

SEQ ID NO: 192435 - DNA, 431 bp, Homo sapiens
tctgtcatccactactattttttagacccagaggcttttgtcatagtttgcattattgaatcatcaaagtttaaatgttaattggtaatttttttactctcttcctgatcaatacaaggaacttagagtactttaatgcaattttctcaccattttacttttaattttatgtatctttcaaacacaataagactttatttttgtcattttatatagtcratatccgtgtagacttagctatgttatttacccttttcattgttcttcattcctctttgggtcttcaatcttctgtctgcaattattttcctttgtctgatgaatgtactttagaattccctttaattccttttaagggtctacaagtaactaattgtctcagttttgtttctctgaaagtgcctttataatatcttcatttctgaggaata

SEQ ID NO: 192436 - DNA, 436 bp, Homo sapiens
tggactctgtcatccactactattttttagacccagaggcttttgtcatagtttgcattattgaatcatcaaagtttaaatgttaattggtaatttttttactctcttcctgatcaatacaaggaacttagagtactttaatgcaattttctcaccattttacttttaattttatgtatctttcaaacacaataagactttatttttgtcattttatatagtcgatatccgtgtagacttagctatgttatttacccttttcattgttcttcattcctctttgggtcttcaatcttctgtctgcaattattttcctttgtctgatgaatgtmctttagaattccctttaattccttttaagggtctacaagtaactaattgtctcagttttgtttctctgaaagtgcctttataatatcttcatttctgaggaata

SEQ ID NO: 192437 - DNA, 487 bp, Homo sapiens
aatcttcatgacagcggacttggcaatgattttttggatataacaaaagcacaggcaacaaaggaaaaaataggtcaattggattagccccaaattaaaagctgtgtatcaaagaacccagtgaaaaggcaacccatggartaggagaaaaatttgcaaatcttatatctaattaggggttattatccagaatatataaagataccctacaactcaataacagaaaaacaacctgattttaaaatgggcaaaggtcttgaacagacatttccccaaagaagatatacaaatggccaataatcacattcaaagatgcttggcatcactaattattagagaaatgcaaatcaaaaccacaatgagataccacctcaacccattaggattggtagcatcataaaaacagaaaataaaaagtattggcaaggatgtggagaaattgggactcctgtacactgttagtgggaatgtaaaatagtgcagccac

SEQ ID NO: 192438 - DNA, 503 bp, Homo sapiens
caagatcgaagctgttcttgcaatatacatagaactaagaagagtgtaatagttcaaattaaagtcggggggcagttggcagagtgmaactctgatcatcctatctaaatagcaacccccattactccttccctctagactacttttgtttttcttcctagcccttctgaacaaatgatggaagggataaggcctctcactactcccttccctggtgaggcaggcctggtactgtcactagccggatggtgctgccccaggtgtggcaagatagggtagcacttataatcgtggactctggaggcaggcagatctgagtgctagttctggccctggcatgtattagctgtgtgacactggggattctactcttggcttcttggtttcctcatccatggaatgtggatgacctcttggggttgtttggaggattaaatgagattctaatgtgtgtaaagcattcagcagggtgcttggtggcatatggtaagctcttgttatta

SEQ ID NO: 192439 - DNA, 515 bp, Homo sapiens
ataacaacatgtatgctatgagaaggacccagtggagaggggaaattgatgataaaggagggaaactgaaggatttctggggtcatgtcctagagaatacaagagtggattggatgtgtatacaagtggaaagttcagctttatctaaaaacacagacaataaaatcatattaataggcacttgcaacaacatgggtggaattggggatgattatgttaagtgatcttcagccacagaaggacaaacatctcatgttctcactgatttgtgggatatraaaatcaaaacaattgaactcatgcacacagagagtagaaggatggttaccagaggctgggaagtgtagtggggtgtgtgtggagcgaggaaggtggggatggttaatgggtacgaaaaagtagctggaaagaataaataagacctactatttgatagcccaacagggtgactatactcaataataacttaattgtacatttaaacataactaaaagagtgcaactggattgtttgt

SEQ ID NO: 192440 - DNA, 374 bp, Homo sapiens
tggactccaaaaaccaccttcttaatcgactccrtgttttccatgtagtcactgagcaggcatttattatgccagaccctgtgctaggcttagaatttcctagtggactgtaagatagtctatgtccccagagaactggaagtccatgtgaaataaggtgttttgggtgctatgagacaagtcactcatggacttccagggtgtgattccttctcagtagaggaatgttgggtcagagggttctggattcaggtaatgatcgatgggcaatggttttcagttactcaattactttggcttcttgttttgttcttcatcctgaaatgagcttgggatttaggccctggttatgggctttaggcaatactgaattc

SEQ ID NO: 192441 - DNA, 568 bp, Homo sapiens
  misc_feature (1)...(568): n = A,T,C or G
nnnnnnnnnnnnnnnnnnnnnnnnnnnnnnnnnnnnnnnnnnnnnngttatcatcactttacatataaggtaaactgaggccttgaaaggttaagaaacttgttcatggtcacatgtctggtgagaggttgagccatgatttgacacagggctttgtggctccagagccyacactttcagccagagatctcagtactggtggttgaaagtctggaagtcattatataaatagcttttatacaatgtgactcttataaaccaacatgagggctctaggtggggaagctgattgccaaataagtccaggttttgggttctctgggatgatgttagggagaatcttgtattctcaggtccagggctgctctctccccatcctcaatgaggcagtccatcacccagcggtccacgtcagagttgctggttgaggtacttacgtgggccaggcaggtaacagatgagtgcagtgggctgggtggggctggtggggaaccctagagggtgtgccccatctaaagaagaaaccacttctttccagctgatcattaacaagcaggaatacaggtcc

SEQ ID NO: 192442 - DNA, 568 bp, Homo sapiens
  misc_feature (1)...(568): n = A,T,C or G
nnnnnnnnnnnnnnnnnnnnnnnnnnnnnnnnnnnnnnnnnnnnnngttatcatcactttacatataaggtaaactgaggccttgaaaggttaagaaacttgttcatggtcacatgtctggtgagaggttgagccatgatttgacacagggctttgtggctccagagcctacactttcagccagagatctcagtactggtggttgaaagtctggaagtcattatataaatagcttttatacaatgtgactcttataaaccaacatgagggctctaggtggggaagctgattgccaaataagtccaggttttgggttctctgggatgatgttagggagaatcttgtattctcaggtccagggctgctctctccccatcctcaatgaggcagtccatcacccagyggtccacgtcagagttgctggttgaggtacttacgtgggccaggcaggtaacagatgagtgcagtgggctgggtggggctggtggggaaccctagagggtgtgccccatctaaagaagaaaccacttctttccagctgatcattaacaagcaggaatacaggtcc

SEQ ID NO: 192443 - DNA, 366 bp, Homo sapiens
caaaaagcagggagcagaaagaacctgaacaatctacaagctagatcaccagatcaccaatctcacaacaaacactagtacagagcaccgttctaagtacattatagaaattaacttatttaatgcctgtaacaacctgttaygtattgttttattcctaaaaagtctgtgaggattcaatacttccaaaattcacatttaacatgcaaattatatccatattacagaagctagatcagaccagaccaaagtaaaattaaatacacaccccagaactggctgccagaaagaactgtgcctactgagctatggaaaacacaggacacttccaatcctctccttcaaagagcaaaggcaactgaattc

SEQ ID NO: 192444 - DNA, 605 bp, Homo sapiens
atccttttgcttttaacttgtgtctttatacttaatgtatatttcttgcagatagcatatcacattaatttttatccaattttacaatctctatcttaactgggtgacttagactttttacaggttgctctagagtttctagcatacacttttgacttattacagtttcccttcaagtgatgacgtactgcttgacattcagcataagaaccttacagtggggtatttccctcgctaccctcccaatctttgtattttcttattatacattttgcttttatgtatgttgtaagtcccataytatgttgttatgatatttcattaaatggtcaattatttcttaaggagatttaaataatacgagaaagatcttacacatttacccacatagttgtcatttctggtgctcttcctccctttatgtaaatccatatttccatctgatattgtccttttgcctgaaggacttcctttaacatttactttagtgaggttctggtgatgataaattctttcaactgtcatatgcctggaaaatctctattttgccttcatttttttctaaatagttactgattttttatggttttgagatacaatcacgt

SEQ ID NO: 192445 - DNA, 605 bp, Homo sapiens
atccttttgcttttaacttgtgtctttatacttaatgtatatttcttgcagatagcatatcacattaatttttatccaattttacaatctctatcttaactgggtgacttagactttttacaggttgctctagagtttctagcatacacttttgacttattacagtttcccttcaagtgatgacgtactgcttgacattcagcataagaaccttacagtggggtatttccctcgctaccctcccaatctttgtattttcttattatacattttgcttttatgtatgttgtaagtcccatattatgttgttatgatatttcattaaatggtcarttatttcttaaggagatttaaataatacgagaaagatcttacacatttacccacatagttgtcatttctggtgctcttcctccctttatgtaaatccatatttccatctgatattgtccttttgcctgaaggacttcctttaacatttactttagtgaggttctggtgatgataaattctttcaactgtcatatgcctggaaaatctctattttgccttcatttttttctaaatagttactgattttttatggttttgagatacaatcacgt

SEQ ID NO: 192446 - DNA, 648 bp, Homo sapiens
cgagatatatatagtgctcttgattcatctcttggaacttttcacccatcaagtttaggctcccagtggggcacacatgggaaagacaatgcccatgtcttcaactagtttccccatcagaagtggtcattgcaccaagcaccctcctccattaaaacyggacaggccaagggccgctttcctaatggatgagtcttcttggtctgtctcatgttcccaacagagctccctccatgggatgggaaggtgccatcccagggccgccgttttgacccagcctccagccaaagctggtccccctgccaagcaggccctagagttacactggagagtgacaagcctcatctgaagatttcttgctgaaaattgtcagtttcctgcacaagtacatcctggcagtttacacatttatgcttagcgttccattactggaacgctaagcttgtggagttatttatatcctactgctcagtgtcatcgccaaggtctgatttttcacagaaaaacatttgcaacctctgacataatgagttaattcaaattaaacccagaaggagactgctgcttcagtctcaactgcttggaaattgtgctatgtagagctttcgtttactgaaaattgtgccttcagactctgtgcagattaac

SEQ ID NO: 192447 - DNA, 447 bp, Homo sapiens
caaccctaagaattacaaaacaaaaaacagttcaaataaaaagttagagatttttttttttaactaaactcaaaaatgaactagtatgacagctaaaatagagcacctagggcaagttccagaaagagaaggtctaaagctgctctgtatcaccaggaaaaatagaggtcaccataggttccagctccttgggaataaatgtccaaaagagaccataatactctaaatctaatctagtaarggagttcagagtttgcagtcactctaaaggaaaatagtcacatgaatataattttctcaagaactcaaaaaaagtttaggaaagcatattaaacttacattattagccaaagggttcaaggagaaaagtttgccatggtcagaactatgaaaacttaaatcactaaaaaaacctgtatttgtctacaactgtcctatatatacagg

SEQ ID NO: 192448 - DNA, 447 bp, Homo sapiens
caaccctaagaattacaaaacaaaaaacagttcaaataaaaagttagagatttttttttttaactaaactcaaaaatgaactagtatgacagctaaaatagagcacctagggcaagttccagaaagagaaggtctaaagctgctctgtatcaccaggaaaaatagaggtcaccataggttccagctccttgggaataaatgtccaaaagagaccataatactctaaatctaatctagtaaaggagttcagagtttgcagtcactctaaaggaaaatagtcacatgwatataattttctcaagaactcaaaaaaagtttaggaaagcatattaaacttacattattagccaaagggttcaaggagaaaagtttgccatggtcagaactatgaaaacttaaatcactaaaaaaacctgtatttgtctacaactgtcctatatatacagg

SEQ ID NO: 192449 - DNA, 548 bp, Homo sapiens
gttacaggcatgagccaccgtgtccggccttcagtattcctatggggctttcagagccacttaatattctaaagtctttctttagctcagcagcacttgtctcttttgtttctttttattccccttcatcctctggatgaatgttagatctctatatcttcaatgtcccttaactgttctcttacttacatctcttctrttttctcccccatctcctttttttctctgttctaaggaaatgtcactgtttgtttttcttaatcataaataccttgttgggtcaagtccatagtactctggcccttctacaggtggttttttgggggtggaggggatcttatttttactttctagaattgtgcttgcatagtaatctgttttttattttgtggatgcagtatcttcccaattactgctaaagatcccaattaggttttaaaattctatttatttccttcattagtaatgcttcagatcaattgtgcttacttgacttggcactttcagattgctaattttcttcagctctctggtgatacctggttatc

SEQ ID NO: 192450 - DNA, 548 bp, Homo sapiens
gttacaggcatgagccaccgtgtccggccttcagtattcctatggggctttcagagccacttaatattctaaagtctttctttagctcagcagcacttgtctcttttgtttctttttattccccttcatcctctggatgaatgttagatctctatatcttcaatgtcccttaactgttctcttacttacatctcttctattttctcccccatctcctttttttctctgttctaaggaaatgtcactgtttgtttttcttaatcataaataccttgttgggtcaagtccatagtactctggcccttctacargtggttttttgggggtggaggggatcttatttttactttctagaattgtgcttgcatagtaatctgttttttattttgtggatgcagtatcttcccaattactgctaaagatcccaattaggttttaaaattctatttatttccttcattagtaatgcttcagatcaattgtgcttacttgacttggcactttcagattgctaattttcttcagctctctggtgatacctggttatc

SEQ ID NO: 192451 - DNA, 557 bp, Homo sapiens
cacaatggctataagtcagagatattatttcccaaacttcggccctaaattaacctactattggcatcttttcaaaattacaaaatgtgaatcttatagaagtggtataaggagaacaacattttgccttakaaaataaaaatagctgaataccataaattaatgctatgctttaaattaagtgcaatgctctgatcaaacttcttggtgggggaaataaacacattattttttcaaatataccttagtatttttccaaagtatgatgtcagttaacaaatactttggagactctactttgatatttttcccttcctgtatatgtggggttcccaaacgatagcaacaacagcttcatacatgcagggagggaagaatgtcagcatgaaaacagtaaaacttctctctcactgcctttagatttgagaattcggtgaggttgagaaaaaaaatggctgaaaatgagtcatccatgaaaccagttttaaattaccattcatgtctcaatgtaaggaaatgttttcatttgtggaaaaacttaagaagggctcatgaat

SEQ ID NO: 192452 - DNA, 428 bp, Homo sapiens
tgacaacatctaggaaatataccaaactgaaatgccttagaaatgagaagaagcctcttaaataattccccaaatcaatgtgagcaaggttaatacaagaacaagttttatacatggatktaaatcaatcattataataaaactgctccgggtttgtgtcatagttcttcttcttacctttaaaatcacttttgctacctggcttgataaggacatggacaagatgtgaaggtaatatggtttggttctgtgtccctacccaaatctcatctcgaattgtaatctccatgtgtctagggagggacctggtgggaggtgactagatcaggggggcagtttcccccatgctgttctcatgatagtgagcaagttttcactcactatctgatgatgatatctgatagttttataagtgtttgacagttcct

SEQ ID NO: 192453 - DNA, 389 bp, Homo sapiens
aaatgaaggtaattctttaaaaagcaggtctgaatcagcaaaattcctctttcaccattgcagttaaaaaaatggaacagtgaatttttccagatgaaaatctaataaaacactctacaaaaagattttcagttccctctgaacaactagaaagatagtctagttgttaaccaacaatttgtatgccaagcctttctacaagaatttggtgtgggccaggagtggagtagggaaacgcatttgtggaaaagtagtagttacctgtcatcttttgcaatggaaggaggttagataaattgatagaaacaaccgtttcttttctgcctaatatgtcttytaattttactgccaaatagaatagggtctggatagaaaggtttcttgaattc

SEQ ID NO: 192454 - DNA, 627 bp, Homo sapiens
tgacatgctcctggttatttagggtgtcttattttgtcatcagaaggactctgagagcctattttgtgtgcatcccacagcatacatggtaaatctgatcgaagagtctgctcctgtgtatgaatacctcataatgagatgtaacaccctcctgatgatctacttacttctgagttttatgccaacttgtttttatgtttctttccagggtgcatctggtagtaaaaatttgtagatctagagagtcagcatgatttaacaggcaggaacgtgaacaggatacactgaacattatcgtatgtctttaactacattctcctaaagggaatagtattgttttacaggaatagtatcttttgggagttgaaatagtatatgccaaatctagaagatgaggtcagtagataccgtttaaaaatcaaaacaactcactctttcccagctttcatcactgctggcatgtgttagatgacaagtctttgactcacaaagtttaataagattatctgaggttccaggcttctcacctgtttttagagattagagaacacctgtttgtacscatttttcatccactctgattctatattaactgtccctattaaagcattcttgagatgtcaagtc

SEQ ID NO: 192455 - DNA, 358 bp, Homo sapiens
ggaggtgtctcccagtcaggaggcacggggatcaaggacccacttgaggaggcactctgtcccttagcagagctcgattactatgctgggatatctgctgctttcttcaaagccaacaggcaggaacatttagctctgctgaactgggcccacagccaccccttcccccagttgctctatcccagggaaatgggagttttatctgtaagcccctgaatggggcttytgcctttctttcagagatggcctgcccagagaggaggaatctagagaggcagtttggctaaagcagctttgttgagctgcagtgggctccccccaattcaaacttcctgtcgaacttcccgaactttgttta

SEQ ID NO: 192456 - DNA, 474 bp, Homo sapiens
atttgcaaaaaaaaaaaaataggatgtttaatgtctacttgtcaaatgtaatgttctctctgtccttcaatagttttctaagaagatgcttgctttcatttatcttttgaaatgattattttttcgtggcagttattctaaacacatgaaaaaaagtcaacacaaatcatggattgttttgaagtgttccctggcccactggagraaaaataattcaagtaacattttcagagccaatatctgttaaaatataattaacttgcagtatttgaagacctctccatgcttactcagtagctaagggaggacatgaccctgctggcagtgtggtgtcctgcaggctgtgacaggtatgaggctgccttttatttatttatatttaaacttttttattttgaaatatgtttagatttataggaaagctgcagtataatacagagagtttatttaaccctctcaccaagtttcctccat

SEQ ID NO: 192457 - DNA, 637 bp, Homo sapiens
aacaattatacaagcaaagatcattttgttttgggctgggtttatggttttgtgatcccatgccaaattttgacaccttatattatttggcagggataagtatgaaattgcttgatcaataaatgcaaacaaatacgtatgttggcaattcttaagacatttctaatattactttaccaataatttcaaggctagctcttttattaaagattctgcttaatcatgtaaacttgaaaaaacatttgactagtctttttttctggtaaagtatttcatttgagggattttatttttcyttaagccaattaattagatttcttttctacatcttcagtagtgaaacattgtgtacacattatatgaatacatagacatattaagcatacctatagaaatacatcttatagatttataagacctccttttttccctatcttaaacttgaaaatgtttgatagcctttttcattacccaggcagctatcagctaagtagccctaaatctgcatattgaaggaaacaactcttaggagaaaaatcagatagcaaaattcacatctcaaggtacagagagaaaatatctggtggtgctagagagggattaaagatggatgccaaatgaagcataaaattataga

SEQ ID NO: 192458 - DNA, 540 bp, Homo sapiens
tttagaatagtttcagtaagattggtgacaattcctctttgaatgtctgatagaattcagctgtgaatccatctggtcctggactttttttgttggcaatttttaaaaattatcatttcagtctcactgcttgttattggtctgttcagagtttctatatcatcttggtttaacctaggaaagttgtatatttccaggaatatacccatctcctttaggttttctagtttgtgtaaaggtgttcatagtagccttgaatgatctttygtatttctgtggtatcagttgtaatatctctcatttcatttctaattgagcttatttggatcctctctttgttctttgcttaatctctctaatggtctatcaattttgtttgtgttttcaaataaccagttttttgtttcatttatcctttgtatttttttgttgttttaattttatttatttcttttctgctctttgttatttcttttcttctgctgggattgtgtctggtttgttcttgtttctctagttcattgggtgtgagcttagatt

SEQ ID NO: 192459 - DNA, 554 bp, Homo sapiens
taaaggatggtatgtacattattttatatatgctctggggaggataagaggctgaaggatatatactttattttacatatgctctatcagtgatgaaaaagaaattgaaaggtaagtccccacaaaatcctcaaaaaacagattttagaataaaaaaattaaagtggctgagctaattataatcaactaaatcgtgtactctctcatcacatatttcaaaatagatatagatgaaatcttttaaaattatgataagcccagagtcttttgcacattagcataaatattttactagaatatgagtaatgcagactaaagcagtaggtctcagttataagttgtttttactgtcaggatgaacttttctgacaccccagtaaaaaagtttttctctagtcaaaatatggtctcattttttttatcagaatcattacattctcatgaaaatattttaagtactataatcaaatcaaacaaactcaccatgtacagtcttagaratagactatcagatcctgaagtcagagctcatgcaactgaaatagaaagttctt

SEQ ID NO: 192460 - DNA, 596 bp, Homo sapiens
tttaagtaattgaagcatttaatatgatacattttacaactaaatttttttttcagtaggcacaacatactactckcttaatataaagcatagtttagggaaaataattatctagaaaacccgtacaagtatactggagaaaacaaatgcaaggaagaagctaattttatatgccagtcttggttcctctaagggtaacctacagatcacagaatttaagattctgcttgttaacattctcccagagagaacaaaaaatgtaatattacatagtcagaatattgttccttatcctgtattctatcctcttggaatgaaacctgtttctctctcccagtaatatatagaataaatgacactatcttctcatcaaagaagatactctactgttatgcatacacggtatattagttttctttcaggcatcacagtcatagtctgtcaaactgttactgaaacaacagaggttctgtctaggtcctgctgcttgacacacagagagctgatcactgagatgcatattgccaaggaagaaggctttaatccggtggcagagaaggagataggagctcagggtcaaatccatctccctgatc

SEQ ID NO: 192461 - DNA, 597 bp, Homo sapiens
tttattttgttttctggactttctcttcataaaacacatagtgtctaaaacacttgattgactcgagtgtttagaaatgcaagacattaacggcattgaaacatactccagagagaagatagtccaagggtacttgtgttcccttaaggtatacgtatgccattaatccatatcaatggcagcaaagaaacaactcaaagggaaaagaagtacatccctttattatggattcatttttcaacacagtcttttcagctggctgttaatttgaaattcaaggcagaaataaaaaatagcatcttgtcatgtagcttcagataaacagatgtgagcctgggcttcattgccmtgggaccttactctccttaatttcagtgaccttctgggataattacagtcaccatttacagagtttattgattaagtaattaataaatgatgataaacccaggcattcgtacgtgtgtgtactgcagcagcagcaaagcaggtgttgaatacaaaacttccacctatgtaatagcagagtcagaataaaatctaggaagcacaagcattctaacagtctctgctatagttgaagaaattaaagaattc

SEQ ID NO: 192462 - DNA, 551 bp, Homo sapiens
aaacttggactctgtgctttggggagatgacttagtccctcctaattgctagttgacacttctttaaaatgagaagaacaataataactatctcataaagttgacataatacatgcattccaatayaccagttgaatagttattaaattagataatcattattattactggaaattagattatttttccagacatatgttaaaagtctgtcatcaccttcagcctaaagcattttgttcttttttccttttccctttttaaaataagcactaaatattaaagtgcctgaattctttagtattttcatcatttttaaaaaattttatcttgaagtaatttagatgtatagaaatattgcaagataatagagttccagtatatcatttacccagattcctctaaagagattacagaaacatggtacattatcaaaaccagagaattaacattgatatactttcattgactaagctagaagcctgatttgaatttcctgtgtcttcacactagtgttctttctctgtatcaacctggatcacatatcgcattta

SEQ ID NO: 192463 - DNA, 576 bp, Homo sapiens
tatttcttgggtcccctctgcccgcttctcctttgtgaagggtgttcaagtaacccaggctcttttttttcctgagttggtatcaaatcttctaggtctcaagttcaagaagtctttgcatagcctccagatcatgttccgaatkcccatttccaagataaatagaaataatttgttgagaagtcccaagaaaaccagaggcatccacctaaattaatataaatataaactgctcttttgcatttcaaacaagatgctggaaactatttgagtcatatccattctccctctctataagctattttcatttaaatgtaaactaatacttatatctaccagcttgttcataatgattgtgcattatttctgctttttttttcccttaaggtatcaaggcaaatgaaaaaaattagctcatatttgtcttcttccccaacctctcccttctttaaaaaatctgctaaattcattatgttctctactctgtgtgcatcagggctccaagcaattcagatctattaaccatcaggtacaagctaaagtgcttttaaaacaaatgcctgcagtttattttaa

SEQ ID NO: 192464 - DNA, 459 bp, Homo sapiens
tcagattctcattctgaaaaaagacataaattaatttaccttgtagatgtgaggtttttatgtatgtatccaagaagaattagtgatcttcattcctatctcagcaaataatcatatccttgtggaaactttccatgaacatattgttttcttaatcatatttctatgctaaatgctgttgttgaaatcttaccgatataatttgctgtgtatttttgtgcctcgctgatcaatgatacatcattgcagtaaggatcttgggcgatgtaacaaggcgccgtgtttgaatcttggttcwactgaaaggaattagcttgccttaggtagatagcaagggaagggtcccagaacagcccctggcccatgggtcaatgcctcatccccacataacataaaaagcagcctgggaagaaattcagactgcaggcaccaataagggaattagcacagggtgttgtg

SEQ ID NO: 192465 - DNA, 626 bp, Homo sapiens
ttgatttgtgatttctcaggtggaagttcattctgcttgtgtatttacaattgtagaatccaaactgactctggatctctgtagatggtaactacattgcaatcttgagttcatggagttgctgtgaaatgaaaggattacaatgtcaaattactcttccaaggttttgtttgattttttttttaaaaccaggacaccgttccttacacaacttagaaggcttttcttttctgatatgtaaaatgaaaaagaaaaagtttatttaaaatttaatgagtaaagcattggggatacattaattagggccacaaccagtaggatatctatctatctatctttctgccagtctatctatctatctatctatctatctatctatctatctatctatcatcatcatcatcacctatctatcatctatcagtctagagatttatttcaaacaattggctcacataattatggaggccaacaagtcaaaaatctgcaggatagtctggcagcttggagacccagggaagagttcaagtytgaaggcagtctccttgcagagtttcttcttgctgaagggtggtcagttttcttctactaaggtcttcaactgttgaatcaggcccatccacaca

SEQ ID NO: 192466 - DNA, 470 bp, Homo sapiens
gagtgcctgggatcatcacggctcatttttaatttgtatatcaagcatatgtcaagtaccagcatgtgctaggacttacrcaccttgaggataacagccggccttgcttctgaagagccagtagtttagcacaagagatatagtcaggcaaaatgaagattgcaactcggcaggattgaggtatgcatggggtattgggtaatcacagtgaaggaacatacctactctcagctcattaaatcatgtttaatagtcagaatttagaattttggaggaggtaaagaagcaggttgaaaggaagtaaaatatccattggggaaatatctttttctaaaaaagcacaaaagaaccatgaattctataatgaatttgaaatgaggtaaagtaagcaatacttacagaggaatccaggctcatgtaacttataataaaccaatatatagcattattatgtaaaatatatctatttt

SEQ ID NO: 192467 - DNA, 470 bp, Homo sapiens
gagtgcctgggatcatcacggctcatttttaatttgtatatcaagcatatgtcaagtaccagcatgtgctaggacttacacaccttgaggataacagccggccttgcttctgaagagccagtagtttagcacaagagatatagtcaggcaaaatgaagattgcaactcggcaggattgaggtatgcatggggtattgggtaatcacagtgaaggaacatacctactctcagctcattaaatcatgtttaatagtmagaatttagaattttggaggaggtaaagaagcaggttgaaaggaagtaaaatatccattggggaaatatctttttctaaaaaagcacaaaagaaccatgaattctataatgaatttgaaatgaggtaaagtaagcaatacttacagaggaatccaggctcatgtaacttataataaaccaatatatagcattattatgtaaaatatatctatttt

SEQ ID NO: 192468 - DNA, 470 bp, Homo sapiens
gagtgcctgggatcatcacggctcatttttaatttgtatatcaagcatatgtcaagtaccagcatgtgctaggacttacacaccttgaggataacagccggccttgcttctgaagagccagtagtttagcacaagagatatagtcaggcaaaatgaagattgcaactcggcaggattgaggtatgcatggggtattgggtaatcacagtgaaggaacatacctactctcagctcattaaatcatgtttaatagtcagaatttagaattttggaggaggtaaagaagcaggttgaaaggaagtaaaatatccattggggaaatatctttttctraaaaagcacaaaagaaccatgaattctataatgaatttgaaatgaggtaaagtaagcaatacttacagaggaatccaggctcatgtaacttataataaaccaatatatagcattattatgtaaaatatatctatttt

SEQ ID NO: 192469 - DNA, 601 bp, Homo sapiens
aaatggaactcagttttagaaatgcacagcaaaataggaaaggtgcagccaatcatgtggagaaacgatctgtcgttcaatgggaaaaaagaacccatatgactcccattatttacatactagttcctttagggattggacatcttggggactcaagaaatttaggcaaagaagggttgtctacacagcttggtaccaccattgatgaagggtttgagtgagwtggggtagttgccactgccccaaagtgcttagtattactatcttagtctgcttgggctgccataacaaaacaccatggcctgagtagcttaaacaacagaaatttatttttggttctagagtctgggaagtccaagatcaatgtgccagcaaggtaggtttcattctgaagcttcttctcttgccttctaggtggctgccatcttgctgtgtgctcacatgacctctttgtgcacacttagggggtgaaaaaaaaacaaaaaaaacaagctctctggtatctgttttttaagggcactaatcccatcatgagaacctgaccattcgtggcctcatctaaccctaattacctcccaaagtcttcatctccacgtaccat

SEQ ID NO: 192470 - DNA, 548 bp, Homo sapiens
atcataaggctaatgtctattgtcacaatggattttttttttttttttgagacaggttcttacttcagttgcccaggctggagtgcagtggcacaattaaggcttactgcagtcttgacttcctaggctcaggtgatactccaaccttagcctcccaagaaactgggactacaggagtgtaccaccacgtctggctaattttttgtattttttatagagatggkgttttgccaggttgtccaggcttgtctcaaaatcctcgactccagctatttgcccgccttggcctcccgaagtgctggaattacaggcgtgagccactgcgcccagcctagaatcgactcttaatttgcacaataaccaggatcaagtgacctatgtagtaatttcttccagcgtataagtttgtgatcctgaacagatgcccatttcagagtaaatctgaatcaaaataacatttccacttagcagatatctaaataaagttggctggcacatccgtgactcctacatcccctttacccattacaatgttttattaatttttt

SEQ ID NO: 192471 - DNA, 677 bp, Homo sapiens
ttaatttttttccctcatgaaacttatttttcattatggtatattaatatctccaagcctcrtagccttccttgcaaagacctcacccccaatatatatcctgtctggccgtcactggcatgattttgtgctttgccagaaccagcccagtaagcagctcgcttacctgctgtcattcattcctgagcatgtcctgagtgtgcaccaacactgggctatacatggacttagagtgaaacacaacacggaactatttcctccaaggaggtcagagtctagaaaaaggaggttttaatttgaaaaattataatattaagttgcaaatgttaatgagggtttaagaagaagcagagtattactgtgtttaagatctgggatgtggctgttgatctctccctttcccaatttaatcactgggtgatactgagccaggcacttattttattttattcatttctaaataataatatatccgtgttgcaatactgaatatttttgacatcttcttccagcaaggaaccagatttacctcccacctgaaacaaatgatgaacaagcaaaaccataaaataactgtttttagacattgagcttcaggcattgaagaacagtgattcttcaatcactgttgattgaacagtgatattgggaagcaagccaacaatttgtgcttcagg

SEQ ID NO: 192472 - DNA, 633 bp, Homo sapiens
tctggaggctggcaagtccaagaccaaggcaccagaagattttgtgtcttttgagggctgctgtctgtttctaagatagtactttcttgctgtgtcctcacatggtgggaggaatgaagactgtgtcctcacatggtggaaagaatgaagattatgtcctcacatggtagaaggacagaagagagaaaggcatactccttcaaacgttgtataagggcacaattcctgttcagaaaggaagagtcctcatgacttaatcatttcttaaaggtcccatgtcttaatactatcacattgggtgtttgatcctaacatgaattttggaggaacacatttagagtatacatggcacrtgtgaccactctatgtgtttcagtattctagagtactaaccaacaaaacatttgagaaataagttatcagattaccataatttttgcactgtgtagtgccaaacatgtagattccccttccctagacagattgagcttatggctagggggaaatagatttcccctcataataatggaagaatctactttcccaaatctacagaaagataattgagaatttatagctatgttcttatgtatgattgacacaaatcaggattgatccatcgattgaagccat

SEQ ID NO: 192473 - DNA, 552 bp, Homo sapiens
gctttgagccagggaagaagaagaaagaagcttttgttattgatgctatttataaccctgaattaytccgttagaataatggggcctgagcaggggaaggtcttttgtttgcttagtacaaatgcgtcttccccctcagtaaaaccttacttaggatcatactaaacagtcactgcaggtaccaggtgtggagctaaaagcgaggaaaggaccaagatatttgtaaagaagaaatggagaggaactgagttccaggcagaagatttggaagcggaaaccatcctccgaggagatggagagccagtggaggatgggttactttctatctgaagcctgtggagattgagaagaaaataagtgtttcaaggggttttgtcaagtgaaacatatgggggtggtggtggtgaatgtgaagtcgtcccacctacaatacctttgataaaatattgttcattgatatggtttggctgtgtccccactcaaatctcatcttgaattgtagctcccataattctcacatgttgtgggagggacctggtgggagataattgc

SEQ ID NO: 192474 - DNA, 552 bp, Homo sapiens
gctttgagccagggaagaagaagaaagaagcttttgttattgatgctatttataaccctgaattactccgttagaataatggggcctgagcaggggaaggtcttttgtttgcttagtacaaatgygtcttccccctcagtaaaaccttacttaggatcatactaaacagtcactgcaggtaccaggtgtggagctaaaagcgaggaaaggaccaagatatttgtaaagaagaaatggagaggaactgagttccaggcagaagatttggaagcggaaaccatcctccgaggagatggagagccagtggaggatgggttactttctatctgaagcctgtggagattgagaagaaaataagtgtttcaaggggttttgtcaagtgaaacatatgggggtggtggtggtgaatgtgaagtcgtcccacctacaatacctttgataaaatattgttcattgatatggtttggctgtgtccccactcaaatctcatcttgaattgtagctcccataattctcacatgttgtgggagggacctggtgggagataattgc

SEQ ID NO: 192475 - DNA, 597 bp, Homo sapiens
cacattgccaaaagaatcaatttcaacatccatgcaattaaaaartgcatttataacccagagactgtcaatttaccccaactaatctccatctcattccatgtatataatcaaaattaatatatatccagctataataagtacttacagtgtcccaaatatgctgttctgcttctggcctcgaccactccaacttaaatcaccatcatgttttttctgcacctctgtaagagactctcctttcccctttctcttcccctaaacatgtcctccacccaaccccctaagtgaattttgataaaataataagatcatgtcagtcctctatttggctctccaatggcttcctgctgcactggatggatgttcatattccatccattggtctataaggtcctctatgatctgattcctgcctaccctctgccccttctctccttccatcctcccactctttcaaatcactccaacccaactgaccttcctgatcctcacatgagccaagctcatttctgctttaggaactttgctctcagaaccttcctgtagcttttcctccatgcttatgcatggctggttcttactccttattcaggt

SEQ ID NO: 192476 - DNA, 597 bp, Homo sapiens
cacattgccaaaagaatcaatttcaacatccatgcaattaaaaagtgcatttataacccagagactgtcaatttrccccaactaatctccatctcattccatgtatataatcaaaattaatatatatccagctataataagtacttacagtgtcccaaatatgctgttctgcttctggcctcgaccactccaacttaaatcaccatcatgttttttctgcacctctgtaagagactctcctttcccctttctcttcccctaaacatgtcctccacccaaccccctaagtgaattttgataaaataataagatcatgtcagtcctctatttggctctccaatggcttcctgctgcactggatggatgttcatattccatccattggtctataaggtcctctatgatctgattcctgcctaccctctgccccttctctccttccatcctcccactctttcaaatcactccaacccaactgaccttcctgatcctcacatgagccaagctcatttctgctttaggaactttgctctcagaaccttcctgtagcttttcctccatgcttatgcatggctggttcttactccttattcaggt

SEQ ID NO: 192477 - DNA, 597 bp, Homo sapiens
cacattgccaaaagaatcaatttcaacatccatgcaattaaaaagtgcatttataacccagagactgtcaatttaccccaactaatctccatctcaytccatgtatataatcaaaattaatatatatccagctataataagtacttacagtgtcccaaatatgctgttctgcttctggcctcgaccactccaacttaaatcaccatcatgttttttctgcacctctgtaagagactctcctttcccctttctcttcccctaaacatgtcctccacccaaccccctaagtgaattttgataaaataataagatcatgtcagtcctctatttggctctccaatggcttcctgctgcactggatggatgttcatattccatccattggtctataaggtcctctatgatctgattcctgcctaccctctgccccttctctccttccatcctcccactctttcaaatcactccaacccaactgaccttcctgatcctcacatgagccaagctcatttctgctttaggaactttgctctcagaaccttcctgtagcttttcctccatgcttatgcatggctggttcttactccttattcaggt

SEQ ID NO: 192478 - DNA, 566 bp, Homo sapiens
ttcataactatttgcttgcatgtccttctcccaaattagacctccttggagtaaaggatgaatcttattcatctcaggatcctctgcatataacacggttctccaggggcagtagatactcaataaatgtatcctgaatgaacaaataaatctgctgctgcccataccagagtgtagataagatgtgagaacagtgatgatcagagtgatggagccttaagactaataaataagctgaactcaagtctctcattgtatgtgtgtgtgttgacttttcacatgtatagaaagatacacacacataagrtatgaataatcctcaagtacaatgattcaaagaaattacatataattaatccttattatattgctcagaatgtattttaaatatatttggtcatttatggctaatgcaacaattgtagctgcaactgtagctgtgggtactcatctttttgatttacgtatgcctgtaactgtacttacctaaattgataggttcagaataaagaaggaagagtatgaagcaattcaaatataatgcttagttcaagggaggtacttta

SEQ ID NO: 192479 - DNA, 486 bp, Homo sapiens
aaatataatgcttagttcaagggaggtactttaaatctcttcttaattaaagaaataaagattcttggaaaccaatcattgaatttgaattttgccatttaaaattttatgaaacactaatgaataagatataatgtccatgtttatatacattcctataaatgttaagtatttgcttgcatctacatatctattcagytttgattattcctttttggcagttttatccaatatattgttttttggaaaaaacaacttttaacaatacttacaagactcatgattatttctctcttctgttgattttgccaaagagctttaaaacatcttttatcactccttcattacatggatgaataaacttatttgagcatttatttactaactttgcagttgctctagttttctaaattttgtgttttgaatcctcttctgtgtctgtaaaatgaccttggagtgaagttgtatctgcaagtcacataaagc

SEQ ID NO: 192480 - DNA, 578 bp, Homo sapiens
gggacaatgccatctggtttgctgtagacgctgtcagaaatagcagactcctgagattctcattttcactcttggcagattggaaaaggctaacaaacactatggcacaaaggtaaataaactttccttggaggctataggcttctcctcaaagtcaatgaggcaaggcaagtacatttttaaagtgagtccttattgaggatcattggatgcttcattcttgtgccttgctctgtcataaagcttctagggygagaccaatatgcccaatctcaaacattctatttttaatattcctttttacaattttttttttgagacggagtctcactctgtcgcccaggctggagtgcagtggcgtgatctcggctcattgcaacctttgtctcccaggttcaagcgattctcctgcctcagcctccagagtagctggtactacaggtgcccgccaccacacccagctaatttttgtatttttagtagagatggggtttcaccatgttggccaggctggtctcgaattcctgacctcaggtgatcgcctacctcggcctcccaaagtgctgggattacaggcg

SEQ ID NO: 192481 - DNA, 626 bp, Homo sapiens
catgtgtacttatatatgtacayatatatatatatatatatatatatatatatatatatatatatatacacacctccatttttgtgcccctacagcactgagtccaggatatcctaactgattacttagactattttatagtaatctggtttcttcttttcgtctctcactattgcattatttccatttccatatgatttgactttcttttatctctattcccagtgctcaccatggcaccaggctcagagtaggagatactcatctgcttctgaatggatgaaaaggtgattagttctaccaggcctgctgtgtctctgaatttaaatattgaggaataatccaagtgatggttgcagaatccttatgtcgtagtgacttattactaattacaaatactatgatatacaaaaaaaataggaacatttacacaattagaaaataaaatcccattcttggctaggtatctgacaatattctctagagacagagtagatttcaattacagttagggtataatgtattgttattgttccttccattaccagctaatttttttagagtacctctgctgtggtctgggatgcctttagtagggtttgggatcacagctccctataagtaaa

SEQ ID NO: 192482 - DNA, 606 bp, Homo sapiens
ctcggtggctgaggagatggctacttaatagataatctgcaatgcaagccaaagaactaatcatggccatctgatcatcatgccccatcaaaagccgaaatgaggagacagggaacagagccagaaactgccaacacattttacaagcagggagagaccacgagtctaaagggagggcaggagggataaaatgaacatcttcctaccctaagcaacataacaaaataataacaataagaacatggctgttttakagtatatttgtgataaaacacatgctccactaaatgtattataactatactcttatttaatctcctttcattggggaagttgatgagaatattgacatcacataaaggtagaatattttccaaaacatatatcctaaaaggtggggtccctgatcttaattctgttcacagaacccaagcttctgatcactatcctacagaagatggcacatcatgcatgctaaataaatgcttgttaattgaatgagcatataacacagagaaatcaagtgtttgtcattaagtgcatttaacagatcaccatgcataaatttttgccccaaatgtgttctgcaaaatattgattattatg

SEQ ID NO: 192483 - DNA, 578 bp, Homo sapiens
gggcaccataacctgtgaataacatgctgagaccagaaaccctaaatgatggtcactgagagtggtgctaaggccctaagttttggtcacactctcacctaagtgagaaaatgaccaaaaggagggagtttttaagcaaaataatgggaagcaattgttttggactgagttcatgcactaggttccaacagaccagaccaaaccaaagtgtagtcacttatrctaaatgtgacataatcaaactaagactttaaggaaatacatagatcctagaacaggccaggttttgttctttgtttgtttgtttgttccatcataaggaggcaccctctactctaactttcacagaaaataacctgaaatcctgtccccaccttacaaaactcactattctgctatttcccagtgggtttcaagactaaataagtacattgacaatggtgacaatgacatcaatgactaaagttctggtcagtctctcaaaattgagaggataaccaaaagcggggaattgttaaatcaagtttagcctaaagctgcctctttacatattttaagttcagcctaaaggcttctct

SEQ ID NO: 192484 - DNA, 645 bp, Homo sapiens
actaagcattctggttccctgaaagtaatagttatctaagtgaaatattggcttttttaaagttgcattcagcacagtgggttggcatgagtgtcaatgatctcatgattcagatccagagcagctatcatgccttcttcatgtagaaaggaactatgagttatgggccatcaaatactgtgccccatggcttccaaaggcagactgtgtattgatatataaaccagtaaagtatttcccaagttgcattgtgattttgagctttcaagttcatttcttcataaagctatgagatcttttaggacatgaaatrcataattcatttttgtgtttaaatatgtgcccagttagtgctctgctatccaccagagtacatacactggaggaaaatatgttaacttctccaaaagcctaccatcatctggggagaaagttgtgtacacaagaatgacaaatgtctgaggctgttataaatactctgtagactacaagtaaaggaagaggggctttccagagatctgtctggggcaaagttcatgggtagaggttattagagagccctgcgcagtgaagtctgtgcactcttttccttgagaacttccaaggtcaagagtggtctttcatcctcaggctaccagaacctaa

SEQ ID NO: 192485 - DNA, 645 bp, Homo sapiens
actaagcattctggttccctgaaagtaatagttatctaagtgaaatattggcttttttaaagttgcattcagcacagtgggttggcatgagtgtcaatgatctcatgattcagatccagagcagctatcatgccttcttcatgtagaaaggaactatgagttatgggccatcaaatactgtgccccatggcttccaaaggcagactgtgtattgatatataaaccagtaaagtatttcccaagttgcattgtgattttgagctttcaagttcatttcttcataaagctatgagatcttttaggacatgaaatgcataattcattyttgtgtttaaatatgtgcccagttagtgctctgctatccaccagagtacatacactggaggaaaatatgttaacttctccaaaagcctaccatcatctggggagaaagttgtgtacacaagaatgacaaatgtctgaggctgttataaatactctgtagactacaagtaaaggaagaggggctttccagagatctgtctggggcaaagttcatgggtagaggttattagagagccctgcgcagtgaagtctgtgcactcttttccttgagaacttccaaggtcaagagtggtctttcatcctcaggctaccagaacctaa

SEQ ID NO: 192486 - DNA, 645 bp, Homo sapiens
actaagcattctggttccctgaaagtaatagttatctaagtgaaatattggcttttttaaagttgcattcagcacagtgggttggcatgagtgtcaatgatctcatgattcagatccagagcagctatcatgccttcttcatgtagaaaggaactatgagttatgggccatcaaatactgtgccccatggcttccaaaggcagactgtgtattgatatataaaccagtaaagtatttcccaagttgcattgtgattttgagctttcaagttcatttcttcataaagctatgagatcttttaggacatgaaatgcataattcatttttgtgtttaaatatgtgcccagttagtgctctgctatccaccagagtacatacactggaggaaaatatgttaacttctccaaaagcctaccatcatctggggagaaagttgtgtacacaagaatgacaaatgtctgaggctgttataaatactctgtagactacaagtaaaggaagaggggctttccagagatctgtctggggcaaagttcrtgggtagaggttattagagagccctgcgcagtgaagtctgtgcactcttttccttgagaacttccaaggtcaagagtggtctttcatcctcaggctaccagaacctaa

SEQ ID NO: 192487 - DNA, 470 bp, Homo sapiens
cagaggtaagtcaattctagaggcttaggtttcttttttgtaacctgaggctattgagctggagggccctaatattcccacttgtttctctaaccttgggtatctgagactgaagacccacatctttamcatctgtcttgtctttggagaggatttggggatcatctgaatcattctgttgttggcatgagaagtgtaaccaagtatttacattttagaagactttttctttgaatgatgcaggctctaaagagggaaacttaggcctcttccctaataattcctgtcttgatgcaggaaagaggccaagaatcacaatccatgataagtatattaaaataaaaagtaagtgagcaaaagatgatatatttttacgtgttaaagaaataagaaggccaagcgtggtagctcacatctgtaatcccagcacttagaacggctgaggtgggaggatcacttcaatccaggaa

SEQ ID NO: 192488 - DNA, 470 bp, Homo sapiens
cagaggtaagtcaattctagaggcttaggtttcttttttgtaacctgaggctattgagctggagggccctaatattcccacttgtttctctaaccttgggtatctgagactgaagacccacatctttaacatctgtcttgtctttggagaggatttggggatcatctgaatcattctgttgttggcatgagaagtgtaaccaagtatttacattttagaagactttttctttgaatgatgcaggctctaaagagggaaacttaggcctcttccctaataattcctgtcttgatgcaggaaagaggccaagaatcacaatccatgataagtatattaaaataaaaagkaagtgagcaaaagatgatatatttttacgtgttaaagaaataagaaggccaagcgtggtagctcacatctgtaatcccagcacttagaacggctgaggtgggaggatcacttcaatccaggaa

SEQ ID NO: 192489 - DNA, 567 bp, Homo sapiens
tgtctaccacagggtagggcagtggggagtgttgaatgtgctgtctgcccaccctgtccaggtgcactccttgtcccaccttctcctcagagcccctttcagactctcagtttcataatacctttcttgctgtgaatttcatatgtatacaacatggcataacttagcatttgagtcattattgtcattaaaatgyagttattgaacatctactgtgtttacagcaaatgatccttcttttcaaagagaagcatcctctctgctctcagaaattacacacctggcatggtcttatctttgtagaactcagagttcacagcagatgccctggccttggccatctcctccgaactttctgctctcctggccaccgtttgacagccacccttcccctttttatctcatttgcccttatggtttgacccttactttttgtttgtttctccatcttgatcactcatcacaattctggtttcccatttggcttttccacttcctttctttcaccacaactccagcctgtggatcccgacactacttccaactaccacagccacagccactgca

SEQ ID NO: 192490 - DNA, 614 bp, Homo sapiens
tcagcagggcagtcattaccttaaagctccaaaataatctcttttgacttcatgtctcacctccagagcacattggtgcaaggggctagctcccaaggctttgggaagctctgcccctccggctttgcaaggtacagcctctgtggctgctttcacagactcacagtgcaagctgttagtggatctactatttgggggtctggaggatggtggccctcttctcatagctctactaggcagtgctccagtaaggactttgtgtgggggctccaactccacatttcccctccacactgccctagtagagcttcttcttgagggctctatccctggagcaggtttttgccyggacatacaggctttccaaataatttttgaaatctagctggagtctcccaagcctcaattcttgtactctgtgaaccctcagacttaacaccacctggaaaccaccaaggcttatggctcgcaccctttgaagcagcagctcaagctatatctgggtccctttaagccacactgaagctgaataggctaagatgcagggagcaatgtctccaggctacacagggcagtggggccctggtcccgacccatgaaaccattctgtcctc

SEQ ID NO: 192491 - DNA, 614 bp, Homo sapiens
tcagcagggcagtcattaccttaaagctccaaaataatctcttttgacttcatgtctcacctccagagcacattggtgcaaggggctagctcccaaggctttgggaagctctgcccctccggctttgcaaggtacagcctctgtggctgctttcacagactcacagtgcaagctgttagtggatctactatttgggggtctggaggatggtggccctcttctcatagctctactaggcagtgctccagtaaggactttgtgtgggggctccaactccacatttcccctccacactgccctagtagagcttcttcttgagggctctatccctggagcaggtttttgcctggacatacaggctttccaaatawtttttgaaatctagctggagtctcccaagcctcaattcttgtactctgtgaaccctcagacttaacaccacctggaaaccaccaaggcttatggctcgcaccctttgaagcagcagctcaagctatatctgggtccctttaagccacactgaagctgaataggctaagatgcagggagcaatgtctccaggctacacagggcagtggggccctggtcccgacccatgaaaccattctgtcctc

SEQ ID NO: 192492 - DNA, 541 bp, Homo sapiens
taaatatactgacattgctgaaacaaggtctcactgtgagagaagttacatatatatgtatcatatatatgtatcatatatatgtattatatatatctcatatatatcatatatatatagaagacagaatgatgagaaaagaatctaatggaactaggtttgttttgtaaataaccttatgaactcataaacacacacacacacatacacgcacacacacacatgcacacacacaattttagttctgcccactgaaagggcccagaaacaatgagcaaacaaacatctaggtcttggtttccaaataccatttgctacaaaaaagaggtaggcttctttaggaaaagagctgagtctggttctagggtagggaaagttctagttgacattgagaatatctttccatgcaagaacacaagaaaatgctccaatattaatagacayatgtaaaaaagaaactggagcagaattaaagggaccatgaattagagtccataacgacacaaggggagatggagtcagggaaagggaaaaaaatctc

SEQ ID NO: 192493 - DNA, 432 bp, Homo sapiens
ggaattcaaaatttttatgggaaagaaatccaataccaataaataaattgcctgcaaataatcaaggtttgcaagattggactataattgttggatactgaagggcaaactgaccctggaaatraaggacttggaggcattcgagacattcagaatactcaatcatgtacaaatttttacacaaccaaaaagcagggagttatataattttgaggtcattctaacagccatattgcaaaaaaaaaaaaaattaatccttgcaaaaataaaaattaatccttgaaattagaaacattaataaatatgtcatgctaatgattaagatctttttcagttgaatgaaatataagaataaaaaagaaacaatgttttaccttggttcttaatcattaaccctccttctgaagagtctaaagaacttcacaaataaaa

SEQ ID NO: 192494 - DNA, 594 bp, Homo sapiens
tgtaaacttctaaggattgctgagtgagacttttctaaccccatatgtttttatgtaaaatattggagtaatttaaaacagacagaaatgagaaaatctgtctcataaaatggtgtaattttgctaagtgcctactctaaatcatctcccaccaccactctgggcttcatatttttactattatctcctcctttacctcatagttacacatttagaagtatttataacactggtcaaaagcaaagtcactgaatacagaaactggatcttgtttaccactgtatatactcaacgtgcctaatgcctggcacatagtaggcactcaataactattagctatatgaattaatgaataagatatttttgtctctatgttattaacaacttgttttgcatccctggctttaaaattcccactttgtcaaatgtgctttttaatgtttactataactaacataatttttaaattccaggccagtttggtttagctaacaaatatcttyggagtatctacagttttctggatcattaagaaaaaaaaatttcaattaaaacttatgaagaacagtactgttcaatagaaatataattata

SEQ ID NO: 192495 - DNA, 557 bp, Homo sapiens
gttggccttgtggccaggtaagccttctctgcttagccagcctcacctctgaatttgcccatagatgtgacgtggttggaaatcatttatcatctttcttargattgccatgtgtttttagcaaaaatatcagatccacctgataaaaatgtatagaccaaaaatacacaatctacaatgtatgttaatagtaacccctattatagcttctacattaagtactgcagattacatattataagtacatcttatagacataaatatttgataaaataacacactatattgcatggcactgaaagtaaatcatgctatgacataatgaaatggtcatgattttttcaatgaccatctttgtatctcatatttatttcaacagcagaaagctcatatagaaaatcagcttccaagctggagacatgggccccctagccttttttttttgtttggctctgctgttctgtttcatcaatttcaaagtatgtgtcagccactaatggcttgtcaatccagttccatctgtgttgtggttcctgaaattcttcccaaggtctggc

SEQ ID NO: 192496 - DNA, 469 bp, Homo sapiens
aggtttcagaatgtgggtaacaacaaattttgccaaagaagcatgttgtaacccaatgaaaagaagctaagaatcatgatcaaataactcaggagctgacagmcaaaataaccaacttagagaggaacataattgacctgttagagctaaaaaaccaccctacaagaacttcacaatgcaatcacaagtattaataggagaatagaccaagcagagaaaagaatctcagagcttgaagactctttccaaaataagagagacagtcaaaaatagagaaacaagaattcaaaggaatgaataaaacctctgagaaatatgagactatgtaaacagaccaactctatgacttattgagatatctgaaagagatggagagaatggaacaaagttggaaaacatacttcaggatatcatccaggagaactcccccaatctagcaagaactgccaatcttcaaattcaggaaatc

SEQ ID NO: 192497 - DNA, 469 bp, Homo sapiens
aggtttcagaatgtgggtaacaacaaattttgccaaagaagcatgttgtaacccaatgaaaagaagctaagaatcatgatcaaataactcaggagctgacagacaaaataaccaacttagagaggaacataattgacctgttagagctaaaaaaccaccctacaagaacttcacaatgcaatcacaagtattaatagsagaatagaccaagcagagaaaagaatctcagagcttgaagactctttccaaaataagagagacagtcaaaaatagagaaacaagaattcaaaggaatgaataaaacctctgagaaatatgagactatgtaaacagaccaactctatgacttattgagatatctgaaagagatggagagaatggaacaaagttggaaaacatacttcaggatatcatccaggagaactcccccaatctagcaagaactgccaatcttcaaattcaggaaatc

SEQ ID NO: 192498 - DNA, 550 bp, Homo sapiens
cttgtattatcttgatagcctctgacactaagatggccactgccacaactacccttaaacagtgaggccagccttttgctactacatcaattttcttacttaggtatgccactggttgggggttcatcccatgagcctgcgtaaggactccaagagctatccctgctgtctctgtgacatatagagataagttttgtcctgtgggaaggcttaaagctggagttgtactagggccygctttaaggttttgaaggctgtttctgaccctggttctcattctactagatgagtatttgccctctggggctccttgattagagtatagagtggtctggccatctcgctgtatccggggatccatagtcggcaaaagcccgtgattccaaggaacccctgcaactgttttaatgtcttagggtgatgataagccagtataggctgtattcattccttgctgagggccctggcccctctggctaagattaagcctagatattcgacctgctgtaggcaaagctgggcctttgacctagatgccttgtacccttga

SEQ ID NO: 192499 - DNA, 565 bp, Homo sapiens
ctccttcccccaccactgcacagtctccccaactatcaacatcccccactagagtgggtacatttgttacaattgataaacatgtattaatacatcagtatcaccaaaagtccatagatgatactaggattcactcttggtgttgcacattttatgggttttgacatatgtataatgacctgtatccaccattatggtatcatatagagtattttcactgcccaaaaattcctttgtgcttaaccaatctctggtgaccactggtcctcttactggctccatagttttgccttttccaggatatcacaaagttggaatcacatagtatgtagtcttttcagattggcttttttcacttattaatatgtatattaagattctaacctgtctgtccatggctccgtagcccataagaaaccagttcttaaatccaatcctaygtgtctatactctcttgctctcacaaacaataacatgaaataatttttggttaaaaaacaatttttgcctcagagacattttctccgccctcaagtcacaaataatgatagaatatcacagaatc

SEQ ID NO: 192500 - DNA, 579 bp, Homo sapiens
cacccctttgtaatcatcattggttcaggtaacccaagcctaagttttcttcagtacatgttattccgctgggcccagggaataatcacaagtgagccaatcagcaagttcagggcttccatttaaagactgcgggaagtgacatattctctcttactacatgtgaaacaagtttacaaacccaattcctgctgaaaatcatcttactctcatgaggacrgccaacctcaagatgaaactgccattgcaaatggcagcacacacaaccaagcactccaagaccttgtctaactgcctccattgcccactgaactactctagtcctgggatgccagttttaggcaatctcaagatattcatctttttccctgggggtatcagtctctatctaaatagagctgtggtgttcccttaaagttgatggatttccatgtttccaacttgctacatctccttagtttctttatttagattatctccatattattattacatcttcatattacgtatgcactttgggccactatcagtatataatttctgactccatcctttactcaataactattcgtaaattat

SEQ ID NO: 192501 - DNA, 567 bp, Homo sapiens
ggcaacattatatatccttagggaattgcaaatttaaacaatatgataccatgtgtaactattaaaatggctaaaatcccaaacatttacaacatcaagtgccaacagtttgcagagcatgaggaattctcattcattgctgatggaaatgcaaratggtacaaaatcccccagtttggaagacaatgtgggggtgccctattaagcaaaatatggtcttaccatagaatcccagcaatcatgctccttggcatttagtcaagtttaagttgaaaacttatgcccacacaaaaacatgtacagaaacatttataagagctatattcataattgtcccaaattggaagcaatcagatgtactttaataggcaaacggataaaccacctttgatacatccatacaatcaaatattattcaatgataaaaagtcacaaaaatacacaaaggaaatttaaatgcatattactaattggaagaagccagtctgaaaaagccacctattatatgattctaaccatatgatattctcgaaaaggcaaaactatagagagagtagacagattagt

SEQ ID NO: 192502 - DNA, 649 bp, Homo sapiens
ctgcccaattcctctgtaaatataaaactcctcgaaaagagtaaagtctattaatgaaaagcaacaagactagaaaaataaagattaggtcatgtcagattttgtagactgcatggaattttgtcttactcttaaatgcaatggaatagtaaaggtttgtcagagacaaggagggaagaatggtccaatctatatttcaaagaggtaatactgcctgctctgcgcagaaaagtttggcaggtgtgtagagtgaaagtgatgataaatcaccaataagatgattgcaatattccaggtgtgaggttagagttcatgaatgacagagatagagaaaagtagayagatatgaaatatatttagaaggcaaaataaagagaactcagtgattcatgctttcatgtagtgtgagatgaacataagcgatgtaaaaatgttggctcctgggacatttactgagataagtctatgttagtgttctagggccgctataacccattaccactaactgggtggctcaaaacaacggaaatttgttttcttgaagttctggaggccagttgtcaaaaatcaaggtataagcagggttccctccgaaagttccgtgggacaattgttccgtgtctcttccagcttctggaagctccagaca

SEQ ID NO: 192503 - DNA, 649 bp, Homo sapiens
ctgcccaattcctctgtaaatataaaactcctcgaaaagagtaaagtctattaatgaaaagcaacaagactagaaaaataaagattaggtcatgtcagattttgtagactgcatggaattttgtcttactcttaaatgcaatggaatagtaaaggtttgtcagagacaaggagggaagaatggtccaatctatatttcaaagaggtaatactgcctgctctgcgcagaaaagtttggcaggtgtgtagagtgaaagtgatgataaatcaccaataagatgattgcaatattccaggtgtgaggttagagttcatgaatgacagagatagagaaaagtagatagatatgaaatatatttagaaggcaaaataaagagaactcastgattcatgctttcatgtagtgtgagatgaacataagcgatgtaaaaatgttggctcctgggacatttactgagataagtctatgttagtgttctagggccgctataacccattaccactaactgggtggctcaaaacaacggaaatttgttttcttgaagttctggaggccagttgtcaaaaatcaaggtataagcagggttccctccgaaagttccgtgggacaattgttccgtgtctcttccagcttctggaagctccagaca

SEQ ID NO: 192504 - DNA, 649 bp, Homo sapiens
ctgcccaattcctctgtaaatataaaactcctcgaaaagagtaaagtctattaatgaaaagcaacaagactagaaaaataaagattaggtcatgtcagattttgtagactgcatggaattttgtcttactcttaaatgcaatggaatagtaaaggtttgtcagagacaaggagggaagaatggtccaatctatatttcaaagaggtaatactgcctgctctgcgcagaaaagtttggcaggtgtgtagagtgaaagtgatgataaatcaccaataagatgattgcaatattccaggtgtgaggttagagttcatgaatgacagagatagagaaaagtagatagatatgaaatatatttagaaggcaaaataaagagaactcagtgattcatgctttcatgtagtgtgagatgaacataagcgatgtaaaaatgttggctcctgggacatttactgagataagtctatgttagtgttctagggccgctataacccattaccactaactgggtggctcaaaacaacggaaatttgttttcttgaagttctggaggccagttgtcaaaaatcaaggtataagcagggttccctccraaagttccgtgggacaattgttccgtgtctcttccagcttctggaagctccagaca

SEQ ID NO: 192505 - DNA, 548 bp, Homo sapiens
tcacctgctaatgcaatgttgagtatttccagaatgtatttattgaagtttgatttatataactgaataggcctttatttgttcaattcttggcaaacattggcaaaaaagcattgcaatgtgaagctcttcaaaacagatcttctctcattcctctttccagtcttatactatatgctttaaattacagtcagatctgactcctggccatgggataacttaggcctgcattkccacctttaaaattctttgttgatacattaacaccaaatgatacgctttgcctgtgattttagttttcagtcttcaacagttttaatctatgttaaatgccatttcctccagcaagctttatccatccactcctaatacactatcttcagccccattaaaagttgctctgtctctatttagtttttccagaatgtatttattgaagttttatttacataactgaatagacctttatttgttcagtgatttggcacacatttatatttgcaagttgcctaataaatacacatcagataaaagggacttcgtttaat

SEQ ID NO: 192506 - DNA, 548 bp, Homo sapiens
tcacctgctaatgcaatgttgagtatttccagaatgtatttattgaagtttgatttatataactgaataggcctttatttgttcaattcttggcaaacattggcaaaaaagcattgcaatgtgaagctcttcaaaacagatcttctctcattcctctttccagtcttatactatatgctttaaattacagtcagatctgactcctggccatgggataacttaggcctgcatttccacctttaaaattctttgttgatacattaacaccaaatgatacgctttgcctgtgattttagttttcagtcttcaacagttttaatctatgttaaatgccatttcctccagcaagctttatccatccactcctaatacactaycttcagccccattaaaagttgctctgtctctatttagtttttccagaatgtatttattgaagttttatttacataactgaatagacctttatttgttcagtgatttggcacacatttatatttgcaagttgcctaataaatacacatcagataaaagggacttcgtttaat

SEQ ID NO: 192507 - DNA, 576 bp, Homo sapiens
ctttaaaacactatcatatcctaccrtattttctacccatgattcccattctgaggcaatatcacgtctcctgtggaaattacagcagtctctggcctagagcactcataggccttatgcagtcctctccacccaaaagctagaaggaattttttttccgaatataaatcaggtagttcatgtcccttctctggtcaataccttccaatggaaacacaaacccctaccctggctcacaaggccctgagtgatcagacacaaacccacttctccaagtgtatcttctttcacttcatgtttgactaattcccttctagcctcatgggcttaagcacatcccacaggtccctatccagaaatactcttctccctgttaacccctggctcacttggtccatgagtcagcttaaatgccacacctcagagaggattcttggaccactgtatctaaaaccacagcacactctctattcttttccctatattactttttcttcaattatctctccctcaacacaatgaataaatcactctgggtatttttgtttacatttattaaaatgtaggtgttatatt

SEQ ID NO: 192508 - DNA, 576 bp, Homo sapiens
ctttaaaacactatcatatcctaccgtattttctacccatgattcccattctgaggcaatatcacgtctcctgtggaaattacagcagtctctggcctagagcactcataggccttatgcagtcctctccacycaaaagctagaaggaattttttttccgaatataaatcaggtagttcatgtcccttctctggtcaataccttccaatggaaacacaaacccctaccctggctcacaaggccctgagtgatcagacacaaacccacttctccaagtgtatcttctttcacttcatgtttgactaattcccttctagcctcatgggcttaagcacatcccacaggtccctatccagaaatactcttctccctgttaacccctggctcacttggtccatgagtcagcttaaatgccacacctcagagaggattcttggaccactgtatctaaaaccacagcacactctctattcttttccctatattactttttcttcaattatctctccctcaacacaatgaataaatcactctgggtatttttgtttacatttattaaaatgtaggtgttatatt

SEQ ID NO: 192509 - DNA, 576 bp, Homo sapiens
ctttaaaacactatcatatcctaccgtattttctacccatgattcccattctgaggcaatatcacgtctcctgtggaaattacagcagtctctggcctagagcactcataggccttatgcagtcctctccacccaaaagctagaaggaattttttttccgaatataaatcaggtagttcatgtcccttctctggtcaataccttccaatggaaacacaaacccctaccctggctcacaaggccctgagtgatcagacacaaacccacttctccaartgtatcttctttcacttcatgtttgactaattcccttctagcctcatgggcttaagcacatcccacaggtccctatccagaaatactcttctccctgttaacccctggctcacttggtccatgagtcagcttaaatgccacacctcagagaggattcttggaccactgtatctaaaaccacagcacactctctattcttttccctatattactttttcttcaattatctctccctcaacacaatgaataaatcactctgggtatttttgtttacatttattaaaatgtaggtgttatatt

SEQ ID NO: 192510 - DNA, 619 bp, Homo sapiens
taaaatgtttttgacaaaagtttcacaaaaaggtttttggttttatttatttatttacttttctggtttttgttagaataaaaaaawtaaggtcaatgacagtgcactctgataacatctaaataagcttctcaaatcttagaattactggtagtttcaagttaaaattcaaaactagcccctgctttcttccgatttgatctttcccattagcccctgggtaagtagaatgtatgcatgttataaaggaatgtcaggcaggtacttgaattcattgtccagccgtgcaagtgaagataaagcagttttatgtcctcctagctccacatagttttggcattttagttgatcctcctgatctaaaccttgtgaggcactattatcatgcaatggaaataacagtgcataggttaagaattccgtgagcaactgagagcaatttatcttctttccaagacacccagagggctatcactatcattcttcaggtctataatattattctccatatattctttggtggtgtttgaactcagaacatcctctctttctccaactcaggacagacgtaatggctgcttattggttatgtcctagagcacttatgaaggcactcaca

SEQ ID NO: 192511 - DNA, 619 bp, Homo sapiens
ggtaagaaacatgagaaggttgacacatatgacttggaattaaagagaaaatgaggtgttgtcsaagatacttcttctgagatgggaaatggaagataagttcttttcttctgtgttgacatatacaactggcttctcaacaggaagggtaaaaatctgcatttttattcttgttagttaccatttattctgtgcttaccaagtatcagaatttaatgtctgaaagtacattacatacatcacattcaattctaacagtaaatgaagacatagatattaatattctgtttactgtatgaggaaaccaaggcacagggaggttaagtgacttgacaaaaatcgcacagttcccaagttttagatcattaattcaaaaacaaagcacttagatttccaagctgctgcatttgactagtagccaacactgcactctcaaatgtgtattttgagaactgagtgtagcaacttttacatcataaaggctgactgggtcttgacctctgcctcctgagcgccagttccctcatctgcaaaatgagagaaataatgcctcttttgaaaataaagatgaaaccatgtatgaggaagaacaaatgcattttccagtgccagtcacagg

SEQ ID NO: 192512 - DNA, 619 bp, Homo sapiens
ggtaagaaacatgagaaggttgacacatatgacttggaattaaagagaaaatgaggtgttgtccaagatacttcttctgagatgggaaatggaagataagttcttttcttctgtgttgacatatacaactggcttctcaacaggaagggtaaaaatctgcatttttattcttgttagttaccatttattctgtgcttaccaagtatcagaatttaatgtctgaaagtacattacatacatcacattcaattctaacagtaaatgragacatagatattaatattctgtttactgtatgaggaaaccaaggcacagggaggttaagtgacttgacaaaaatcgcacagttcccaagttttagatcattaattcaaaaacaaagcacttagatttccaagctgctgcatttgactagtagccaacactgcactctcaaatgtgtattttgagaactgagtgtagcaacttttacatcataaaggctgactgggtcttgacctctgcctcctgagcgccagttccctcatctgcaaaatgagagaaataatgcctcttttgaaaataaagatgaaaccatgtatgaggaagaacaaatgcattttccagtgccagtcacagg

SEQ ID NO: 192513 - DNA, 619 bp, Homo sapiens
ggtaagaaacatgagaaggttgacacatatgacttggaattaaagagaaaatgaggtgttgtccaagatacttcttctgagatgggaaatggaagataagttcttttcttctgtgttgacatatacaactggcttctcaacaggaagggtaaaaatctgcatttttattcttgttagttaccatttattctgtgcttaccaagtatcagaatttaatgtctgaaagtacattacatacatcacattcaattctaacagtaaatgaagacatagatattaatattctgtttactgtatgaggaaaccaaggcacagggaggttaagtgacttgacaaaaatcgcacagttcccaagttttagatcattaattcaaaaacaaagcacttagatttccaagctgctgcatttgactagtagccaacactgcactctcaaatgtgtattttgagaactgagtgtagcaacttttacatcataaaggctgactgggtcttgacctctgcctcctgagcgccagttccctcatctgcaaaatgagagaaataatgcctsttttgaaaataaagatgaaaccatgtatgaggaagaacaaatgcattttccagtgccagtcacagg

SEQ ID NO: 192514 - DNA, 565 bp, Homo sapiens
tgttttgaaattttagaggcctggttaaaaatacgtttgcaccccttattatctgcacatctgtgggccaagtasttcaaacctcagtgttaatattaataagaaggggaaagctgtgcccagtttgtcaggttgatatttgacaattgtcaagttgatgacacataaaaagttttaccattttcacatctaagactgacctcaaatcattcagtgcagggatgtctccggaatcctgagttatgtgtttgacaggtagctgagcctcctgggctttgtgtaactaacttcatgggaagctcacttgttaacttattagagcagtgctttcaactggcttcttgaaagctcttcccaacatcccccaacaaaaatccaccacaggaatggggttttctttgtatcacaaaggcattaaagtgtggactaactacatcacaaatctccagcatttgctacagtattatcaggggagtgcagtgaaagctagactccaagtgagaggtggacgtcatatgggcatacctggcaagccttgcacctcagatgtcagtgggaagcaaaa

SEQ ID NO: 192515 - DNA, 509 bp, Homo sapiens
attaaaacatgtacaattacactctcttgctaggggctaatatagtggtgactttgaagccaatgttccattacaattctgaaaattatagggcccttaagaatgatgctaaatctactctgcctgtgcctctacatacggaacaagttttaactttcaatagttcaacaaatgaaatgatataacaaaataaatataagaccccagagcttaaggatagaagagactttaatgatctagcacaactcttyccaaaaccttaacactgacaaccactaaagttcaaataattctatcttaatatgaatgacttgcttatactcttaccatatcataaaaataaagtacatcttatataattttatgtaagatatgattaccaaataaatcccaaatgaaaacagagtttactaattgatcccaatgcctactcccataatatcttaattctcagcttacccagttttcgtcatacaataccaaagcccaaaaaggtaatttggtgttag

SEQ ID NO: 192516 - DNA, 392 bp, Homo sapiens
gctcaaattccctcttggcaatcagttatttccttgggcaccagtcaaggctcaggtgccctgcgcaaagcctatgataataaaatccacttagttggtagtatgataatttcattaacttaacaaccaccataaaacataatttacttttaaaagtaaatatgccaatgtgatgtgattatcctgcagaggccaattcttgttatttggttttaaaatgtcactttattttgttcaraggagaaaaaaatgtcaccacattataagccattatattactacaataagatatggttcatacaattagccaaattcatcagggattgtgtagaaatacaggaaacaaattttggaggctgatgaactttaatttggatcccatctccttgatg

SEQ ID NO: 192517 - DNA, 453 bp, Homo sapiens
gaagaggtagagaaataacaagtgtgtctcacttaagaaaatctaaagtctcaagatttattaaaataagaggatgctgaatcacacacaaaaaattcaccttatgaagggtttaaaatccttgttttaatgaaaaacactgctaatgaattaaaatgcaatgtgactatctgtgaatgcttctagctgatttgggtctcaccttataccacaaatttagccagccttatcttttccaaaakgataatctgatagtgtcacataaacaagtgatatacagctctgcttccagctttatcaaactaaatcaattctcccaactgacagaaacaaaattcaatcttatctcaaagaagataaccttatcagaccattaaattatctctacaattcttcatacaaaaaatctgaaattaaataaaaagttttaaaaatgtatattatttaacttac

SEQ ID NO: 192518 - DNA, 555 bp, Homo sapiens
tagagtgtacgacatatattgtgagctaacaaaaatagtttgccagaaatgatgttctcttagttgagaaggtttccccaattcctttcacaagctatgtttaatgctttctattcattcattctatagttgaacctaattcttgaaaaggaggcaagatggcaagtttgtttgtggtcagtacatggakaatgactacagtaaggccctgtatctaagggaggatggttttcttagtcaccacccaaatggaagtaatgtgcatattcactcatcatgccatgtttccttagtaacagaaaagccaaattaaatattcaaggatatgaacagaggcttcacccaaccttaaacagaacacttccaagcacttttcacttggattggccaactttgagattcggttgtcagctggaaaattctctttttctaaaaagtcaaattgacgtgtcttatttttttctgtgcatggttagcccttggcaacattgtctgacagttgctttgtaaatgtttcagaaggaaaaaacagtacaggcaaaggactgaagatgg

SEQ ID NO: 192519 - DNA, 588 bp, Homo sapiens
ttaattatacaactgtatgtgatagacatcattaggctccttttacagataagcaaactgaggtacagatattttaaataattttctctaagtcacacagctgataagtagaggatcttggagataagcccaggccatttgggcccagagatcatgctctaaccaatggactacctcccagtggtaggtaaatacatggtgtgtttgtggaaggtctgttttccagtacagctaaaccacaggccttttcaaccatggcactactgacatgtgggcctggacaattcttgttgcagtgggctgtcctctgcatctgaggatgtttagcaacatctttgacttccmccccaatgctgaccatcaaagacatcgccagaaattgcctaatgttttctgagggcacaattactctcagttaagtacccccgggctactacatgatgggtaagcctggagaagagcagaaaaaacaactagaacttagctgtgaatattcccaaattctcttctgaaagctatgggaatgtactctatatagagaaagatgtcaattgaggttttacaaccaaggagtagcagaaaagataa

SEQ ID NO: 192520 - DNA, 588 bp, Homo sapiens
ttaattatacaactgtatgtgatagacatcattaggctccttttacagataagcaaactgaggtacagatattttaaataattttctctaagtcacacagctgataagtagaggatcttggagataagcccaggccatttgggcccagagatcatgctctaaccaatggactacctcccagtggtaggtaaatacatggtgtgtttgtggaaggtctgttttccagtacagctaaaccacaggccttttcaaccatggcactactgacatgtgggcctggacaattcttgttgcagtgggctgtcctctgcatctgaggatgtttagcaacatctttgacttccaccccaatgctgaccatcaaagacatcgccagaaattgcytaatgttttctgagggcacaattactctcagttaagtacccccgggctactacatgatgggtaagcctggagaagagcagaaaaaacaactagaacttagctgtgaatattcccaaattctcttctgaaagctatgggaatgtactctatatagagaaagatgtcaattgaggttttacaaccaaggagtagcagaaaagataa

SEQ ID NO: 192521 - DNA, 457 bp, Homo sapiens
atagccagctcagagagtagttcaaggattagtaccaaaaaaaattatttgmataatgcatgttaacagcataataattgtaaaactgcaacagaaagaaaggtataaaacagaatttgctcctgggatgctctcaattggaagagccacggatgctttctttttttttttttttttttttttttttttaaagcaatgggtagagtttgccttgagacatccacccactcattgcctgggaagtggaaacacacatttagttaagtagctgatgggaacaaaaacaagggcattcctaagagccatccgcagagtctcttctttactgaaagtaagcagagagagccacttgcatcaggccttgtgatgcaaaattgaaaggcaaaaccaatctcagctaagcatgcatttctgtttttgtttttgagtttttaaaatcccatttcaatgaatatgt

SEQ ID NO: 192522 - DNA, 568 bp, Homo sapiens
acactttcttctttcccatctaaaaatggatgaattatagatgggtcaattttagttttcattttgaaatcaccaaaaaacagacagaaaagacttccaaaacttacttcttaaaaaaaattaaatcacacaaagttattttccagtagacagaaccacagcacaaccctattgctgactgaagttttagaaagctaaaatcaggttgatttaaaaaaaaaattgcacaggtggttgcggaaggtctagaaaatgctggtatatattttttctccaccagaaaacagagtcagccatcctgccacagggytttcaaatacatcatctctgtgagctggtccttagggaggcaatggatatactattttgaaagcagaaattagaaattataaccagctaaacggaaacctggattcaaatacaaagtggccaaagataaatcaaactcctgtcccatcaactgatatgtctttgtttcttgatatctgttggcaacctctagcttagccaggtgcaatggcccaccagcaacaggaagggagagtctccagtactagacagaaatgag

SEQ ID NO: 192523 - DNA, 547 bp, Homo sapiens
gccagcgcccccactcttgtggccccacccagaagcaatttagtcctcaggaagacagctttggcccactatttcatctctgtcccaaccaatcagcagcaagcatctgttacctggccactcccaccccttcccttaaactgtctttgaaaaacccctaacttgtgagctttgaacgagataatatgagtgcaaactccatcttccacgtggtatggccggcctcgtgtctattaagcttttttttgtttgagacagagtctcgctttgtcgcccaggctggagtgcagtggcgtgatcttggctcactgcaagctccgcctcccaggttcacgccattctcctgcctcagcctcccgtattaagctctttctctatgacaatgctgtggtctttctttatgcagtgggcagraagggcaattacaaaaggcttctctatggtaacacatcccaaaaatattgagtgccaactatacattgcacacttcccaagcactagaaaaaaactgtctctgccatcctgatacttaaagttctaatgtcag

SEQ ID NO: 192524 - DNA, 383 bp, Homo sapiens
gaatgcctactatggtccaagcaccacgggatagagttgtgaatacaaacatcctatgttccagaggaaaagacatggaacaagtaactagacgcttgattattgttctgtgtttccattactccatgcattgtgagagatggattttatgaaaatacagcagaaagcggcaactcttattctgatcgttggatcccakatgtcttgtcatgtattccaatcacgcatcctcattccacaggttgttgagcttgtgtcctcagtcctgagattatgatttggaaaggtagtcgttttcttaaaaaatgtatatatatggttgggcactcttataggactaaaaatgaaagggaaaaagccagtgtgcttgtcatgcaaagcag

SEQ ID NO: 192525 - DNA, 436 bp, Homo sapiens
tgcataaaccctaacaggataatcaaatagtttcctgttattcttcttaggctagaaatatttcaccttagcacttctctccttagcacacctatggatatgttttaaatgtattagaagagaaacaaactgtcctgccaggcctggctcatgtaatttagtgtttctatgttactttaattttaaaagtgctttattattacaatattttaaattcttttttactaattttattttaagttctgggaaacatgtgcaggctatcactgttatcaataatcctctaagggttttgtcagacaggttattgtaacccattgttattgacagrggaggaagggcacaggtgatggagcttctgtcccaggctcagaacacagggaaaagatgagggcccttgatcctgcagtcctaacccactaacctgcacacggct

SEQ ID NO: 192526 - DNA, 481 bp, Homo sapiens
tgggctggaacttacaccactggctctgcttcagggttgaactagaactacaccaccagcattcctgggcctccagcttgcagacagtagatcataggacttctaagccctcattgtcacgtgaacctgtccctcataatagatctgtttatcactttattttctatcggttctgtttctctggagaaccctgaccaggagctagagagttaggaaaacctaaaatttcctcttcagtgagaaatcctcccactcttatttttccatgagcaatttttcagtctaaagatcccgagcaaacctagagaaatcattccaggtagtctagtggttagggggaaaaaaamcaaaaaacaatagaaagtggaagagagaaacatcagtcacatctttctctaaaggcctggtgctgccatctccttaaatattttgaaggaacaatttgaggtgatacctgctttatctttcaaagccattccta

SEQ ID NO: 192527 - DNA, 530 bp, Homo sapiens
cgctcttcatacgttcttggaatttatgggtcgagaaaggccaaggcaaatggccttcatctgctaggcctttgataaagacagaactttaatttgttcattctcaatggtaaccttcacggggaaccacatttttactaagtcacagtagtgtattgtttgtatcagttcttaatgagttccattgttaacttttacgtcaaagaccctgttgcatcaacttctttttagtcttatgataggaagcttgttttcaaggtgtttccatgaaaagcatttgatccttcatatttccgtggtggatttctctggaaagttgggagttttccaaagtctaactgttatatcagtttttatggtgatgggtctcatttttcttgtagtatacattatcttctctactaattgacttaattttcagtccttatctccagtcaagaaatgaaaagaacttacaaattttgttaattgtactgaaattagacrtgtggtgagttttagaggagcgtccaaacagaactggattccat

SEQ ID NO: 192528 - DNA, 590 bp, Homo sapiens
tgttaattgcaaaatcctgcataaatattaatttgtcttctataaacacacaatagttatatgtgtatattagggacctaggtgtatatgtgtgcctcttaataaataaattagttgctaataaaacaatattcaacaaaacccactctttcacacatcccttatctgtaatgccgaatttatgaacagctgtggtatgctctctgtgaaatgcaaggagctcagtatcttggagattaggtcaagaatgggaagaaatgcagatggggattttgctgcatggaatccaagtcagccatttgggtgctgaaagttgcttgcccagagggaatcaagagacattgcctctaaagggctgattcggtgggggatattacaccaytttctccttcatgggtattaagatattctttgaatcagacaatttactgatttactgggcttaactattctctgtatgatttagaaaagtaaatataattctagtttcttataatataggaatttataaagagaatgcaggaatggcaaattagtttcaactagagggcacctcttcagttgactggttatggcttagagaactatgc

SEQ ID NO: 192529 - DNA, 506 bp, Homo sapiens
ctaactcctgggctcaagtgatcctcccatctcagcctcccaagtagttagaactacaggtgcctgccaccatgcctggctatatggagtcaccttctgttgctcaagctggtctcaaactcctgacctcaagccattctcccacctcagcctcccaaagtgctgggattacaggattaagccactgtgtctggcccccaataaaatcttttacaccaaaagaatccagttgatattttttttcttttttmttttctttttattttttgagacagattgtcattctgttgcacaggctgaattgcagtggcacaatcacagctcactgcagcctcaacctcctgggctcaggtgaacctcccacctagccctcctgggttaatttttgccaccatgccaggttaatttttgttttcttgtagagatggtgtttcaccatgttgccaggcttgtcttaaaattctgggctcaagcattccattcacctcagcctcccaatgtgctgg

SEQ ID NO: 192530 - DNA, 506 bp, Homo sapiens
ctaactcctgggctcaagtgatcctcccatctcagcctcccaagtagttagaactacaggtgcctgccaccatgcctggctatatggagtcaccttctgttgctcaagctggtctcaaactcctgacctcaagccattctcccacctcagcctcccaaagtgctgggattacaggattaagccactgtgtctggcccccaataaaatcttttacaccaaaagaatccagttgatattttttttcttttttattttctttttattttttgagacagattgtcattctgttgcacaggctgaattgcagtggcacaatcacagctcactgcagcctcaacctcctgggctcaggtgaacctcccacctagccctcctgggttaatttttgccaccatgccaggttaatttttgttttcttgtagagatggtgtttcaccatgttgccaggcttgtcttaaaattctgggctcaagyattccattcacctcagcctcccaatgtgctgg

SEQ ID NO: 192531 - DNA, 564 bp, Homo sapiens
tacagaaatgttttgctttatataatcaagggaactagctaaacttgaagaatctgcctgaaaacccataatccagggtgactatctctatgttttatcaaattggtttaaaaagtgcaggatctttacttctggtaacttcaggtgatgctctgtgcacatgctcactgccttatcttgagagaacaagaaccagggaataatgtttcctgatttcctgcttgaaatcccttaggtgaacattatctcccatctccctatttacttgtaaacaaagcataacaaaataaaatccagaagattgagagtgttggttctttcagaaacttcccttttggtgaaaatcattagtcagtgaaaaatagctcttcacctaggagacaaataaattagaaaaggccaatatgtttgtgagaatttcagggaaagtataaatggaagaacsagattcacaaggaaaaaatatttcttcaattcagagaggacactagaacaaaacaaaacaacttgatttaatacaatcagagggagaaaaacatttaaaatgtgttgtgtgtaggtatg

SEQ ID NO: 192532 - DNA, 595 bp, Homo sapiens
atgtatgaaaaaatgtgcacatatgcagacaagaaagcttctgcctgtctgtgtcaaaataggaatgatttgtctttctttaacctggtttatagcaactattagaaatggaattcaactaagtgttgcaagaagtccatcatttataaattaagatggaacttacttactgtactttgtctccagagattctttgagtgtaaataacatagacaaaatcatggaatattaagaatggcaaaggaactgagaactctttctcacagctatcaggttgktccagcgaaataacaggcagaccctggagatgttccataaagctggctgctgctaaggtctgctctgatacctgctatgtgataaaagttcctgacacttagcaggagttgatgtcctggtattccacctgcaaatggtaggtctgcagggcacaccaagcacgatgatattcatcctggaaatgtagtgctgagctcagaagtaagtagggtgttaattatccatgactagtcacataaaatcatgtcttatactcagttctggcctggaatgcagggtacacaaagggaggtactcattgataccagcaggagct

SEQ ID NO: 192533 - DNA, 551 bp, Homo sapiens
actggttttcctttattacaccattttgcctcaagtgacctgtaggattctaggaacctagaattaattcctgtggctattttgcatgtcagtgactagcagaaattttactcactgaatatttctactcgattctgctgtgagtaaataactacacttttcttaamtacattgttgtcattgagccagagtattctccttcctcaggcaatttaaactttcacaaatgaaacttttacaaatggcaacccatgcataaatattagctatttaggctagcagtatagaggaatgccaaataaaacatctttcgggctttggcctcattatagtatgctgataagcaatcagatgataaagggcaacatttgctatgaaattatacactggatggaatcaaaccatcttagaatattagagctggaagaaacttgaaggtgacttctaggtcaaacccttcaattttcaaaggaggaaactgacaatcaatgtgattgtacatgaatcactcaatgttactcagctggttaagagaaagagacaatagtaga

SEQ ID NO: 192534 - DNA, 557 bp, Homo sapiens
gatttatatactggttttcctttattacaccattttgcctcaagtgacctgtaggattctaggaacctagaattaattcctgtggctattttgcatgtcagtgactagcagaaattttactcactgaatatttctactcgattctgctgtgagtaaataactacacttttcttaactacattgttgtcattgagccagagtattctccttcctcaggcaatttaaactttcacaaatgaaacttttacaaatggcaaccsatgcataaatattagctatttaggctagcagtatagaggaatgccaaataaaacatctttcgggctttggcctcattatagtatgctgataagcaatcagatgataaagggcaacatttgctatgaaattatacactggatggaatcaaaccatcttagaatattagagctggaagaaacttgaaggtgacttctaggtcaaacccttcaattttcaaaggaggaaactgacaatcaatgtgattgtacatgaatcactcaatgttactcagctggttaagagaaagagacaatagt

SEQ ID NO: 192535 - DNA, 504 bp, Homo sapiens
actctctstgtgtgtgtgtgtgtgtgtgtgtgtgtgtgtgtgtgtatcacaacttaacccatagttttggaatgtcagtcatctcaccaaaatccggaatgaactatgtcccagtggatcacatattcttgaaagggcagtcagatttctgataagcaactcatatacacgagagcaaaggcaaggttctatctatagccctgtcatgaggcaagctgtctctttttgaaaatgatttagaggcagctggcctctggtctgctagtctgttggtgtctcacttggctattcaacatcagaggcaggaatctctgcccattttcacataatgcacatgtcttcctactggaagatctttctccaggagtggagggttcaggtcaaggtctctgctcacaaaataaagacagaactcagcactatttatatcacaccagaactgactcagcgccattgcccatttaactcacttgtcttgctatttggagatgttctctctcttct

SEQ ID NO: 192536 - DNA, 504 bp, Homo sapiens
actctctgtstgtgtgtgtgtgtgtgtgtgtgtgtgtgtgtgtgtatcacaacttaacccatagttttggaatgtcagtcatctcaccaaaatccggaatgaactatgtcccagtggatcacatattcttgaaagggcagtcagatttctgataagcaactcatatacacgagagcaaaggcaaggttctatctatagccctgtcatgaggcaagctgtctctttttgaaaatgatttagaggcagctggcctctggtctgctagtctgttggtgtctcacttggctattcaacatcagaggcaggaatctctgcccattttcacataatgcacatgtcttcctactggaagatctttctccaggagtggagggttcaggtcaaggtctctgctcacaaaataaagacagaactcagcactatttatatcacaccagaactgactcagcgccattgcccatttaactcacttgtcttgctatttggagatgttctctctcttct

SEQ ID NO: 192537 - DNA, 553 bp, Homo sapiens
tcctatgtgcaggagattctgtccctgtggagttggggtgcaccacccacctggcacatggatgcatttgtaacccagaaactttccaaacctcataggctagrgactggtgttgaggcttcatcacatagacattattaattattaacctaatctccccttcctggaggatgggagacgggactgaaagttccaagcttctactaacagcttgggctttccagtggccagctcccattctgaagctatccaggagcccaccatgagtcacatcattagaacaaatgacactcctatgatccaggaaattccaagctctggaatcaggagctccagagttctgtgtcaggaaccagggacaaaaaacaaatactaggacaaaagatgctcatagcactcatcactaaggaaattgtaagagttttaggagctcagtattagaaccagggacagagactaaacacatatttcttcttatgttatctgcagtaacttcctttcctcatgctgaaagtacatgtcaatactttcaacatgctctgagatggttgaa

SEQ ID NO: 192538 - DNA, 553 bp, Homo sapiens
tcctatgtgcaggagattctgtccctgtggagttggggtgcaccacccacctggcacatggatgcatttgtaacccagaaactttccaaacctcataggctagggactggtgttgaggcttcatcacatagacattattaattattaacctaatctccccttcctggaggatgggagacgggactgaaagttccaagcttctactaacagcttgggctttccagtggccagctcccattctgaagctatccaggagcccaccatgagtcacatcattagaacaaatgacactcctatgatccaggaaattccaagctctggaatcaggagctccagagttctgtgtcaggaaccagggacaaaaaacwaatactaggacaaaagatgctcatagcactcatcactaaggaaattgtaagagttttaggagctcagtattagaaccagggacagagactaaacacatatttcttcttatgttatctgcagtaacttcctttcctcatgctgaaagtacatgtcaatactttcaacatgctctgagatggttgaa

SEQ ID NO: 192539 - DNA, 566 bp, Homo sapiens
tcttaggcctaggagaattcctacgattctagcgtgttttggggtatagttaacggtggaaagagagaatacaatttgaaaaatcctgtgaaatataaatccaaactaaagccaaactgaaactaaaagcaaactgaaaactacastgcccgaaaagcagaacattatctagttcaccatcataacatggagttggcttttgtctcaaatcttttctcctaaaatgatactatctcaatatgtctgtggttgtcatatcatcattagaatatattaccggtactttgattagattaagtggaaagctaagctttaatttacagaaattcacatcacagccaactcttacttgaaacacttctagcccataaagcagcactaaaacttggtgcatctagtagctgacactctgacttattttttaatatttgttaagggcaataagcaagaactagttcttctatcattttacaagctgaatggctggttagtagtcatttttattctgacctggtttgaacctgcataatactcacattgcctctggcatttgactgtgtgcagat

SEQ ID NO: 192540 - DNA, 566 bp, Homo sapiens
tcttaggcctaggagaattcctacgattctagcgtgttttggggtatagttaacggtggaaagagagaatacaatttgaaaaatcctgtgaaatataaatccaaactaaagccaaactgaaactaaaagcaaactgaaaactacagtgcccgaaaagcagaacattatctagttcaccatcataacatggagttggcttttgtctcaaatcttttctcctaaaatgatactatctcaatatgtctgkggttgtcatatcatcattagaatatattaccggtactttgattagattaagtggaaagctaagctttaatttacagaaattcacatcacagccaactcttacttgaaacacttctagcccataaagcagcactaaaacttggtgcatctagtagctgacactctgacttattttttaatatttgttaagggcaataagcaagaactagttcttctatcattttacaagctgaatggctggttagtagtcatttttattctgacctggtttgaacctgcataatactcacattgcctctggcatttgactgtgtgcagat

SEQ ID NO: 192541 - DNA, 566 bp, Homo sapiens
tcttaggcctaggagaattcctacgattctagcgtgttttggggtatagttaacggtggaaagagagaatacaatttgaaaaatcctgtgaaatataaatccaaactaaagccaaactgaaactaaaagcaaactgaaaactacagtgcccgaaaagcagaacattatctagttcaccatcataacatggagttggcttttgtctcaaatcttttctcctaaaatgatactatctcaatatgtctgtggttgtcawatcatcattagaatatattaccggtactttgattagattaagtggaaagctaagctttaatttacagaaattcacatcacagccaactcttacttgaaacacttctagcccataaagcagcactaaaacttggtgcatctagtagctgacactctgacttattttttaatatttgttaagggcaataagcaagaactagttcttctatcattttacaagctgaatggctggttagtagtcatttttattctgacctggtttgaacctgcataatactcacattgcctctggcatttgactgtgtgcagat

SEQ ID NO: 192542 - DNA, 566 bp, Homo sapiens
tcttaggcctaggagaattcctacgattctagcgtgttttggggtatagttaacggtggaaagagagaatacaatttgaaaaatcctgtgaaatataaatccaaactaaagccaaactgaaactaaaagcaaactgaaaactacagtgcccgaaaagcagaacattatctagttcaccatcataacatggagttggcttttgtctcaaatcttttctcctaaaatgatactatctcaatatgtctgtggttgtcatatcatcattagaatatattaccggtactttgattagattaagtggaaagctaagctttaatttacagaaattcacatcacagccaactcttacttgaarcacttctagcccataaagcagcactaaaacttggtgcatctagtagctgacactctgacttattttttaatatttgttaagggcaataagcaagaactagttcttctatcattttacaagctgaatggctggttagtagtcatttttattctgacctggtttgaacctgcataatactcacattgcctctggcatttgactgtgtgcagat

SEQ ID NO: 192543 - DNA, 431 bp, Homo sapiens
tacttttccaggttgcttatctatttgagtaatccagacatttttccttgaagagatgataatmttacatactttgccctagtgaaactatattgctgtatttgccctttcacaattattactgtacagtaaatcttaggagatactccactgaattgccagcactgcaaccatacttcttccagatgccactgtgtagcagcaaataaggcttcttatggcattatgggttaattatatctactcatatattaacttttttctttttctttgggtctattggaataagatagttaaagagaacaggtaggactcatggggatgggaggccaaaattctgcaaatggaaagactaatgttaccattacctgtcatttcctggatccatgtcttccacccactatgcacagaaccatatatattaaatgcag

SEQ ID NO: 192544 - DNA, 431 bp, Homo sapiens
tacttttccaggttgcttatctatttgagtaatccagacatttttccttgaagagatgataatcttrcatactttgccctagtgaaactatattgctgtatttgccctttcacaattattactgtacagtaaatcttaggagatactccactgaattgccagcactgcaaccatacttcttccagatgccactgtgtagcagcaaataaggcttcttatggcattatgggttaattatatctactcatatattaacttttttctttttctttgggtctattggaataagatagttaaagagaacaggtaggactcatggggatgggaggccaaaattctgcaaatggaaagactaatgttaccattacctgtcatttcctggatccatgtcttccacccactatgcacagaaccatatatattaaatgcag

SEQ ID NO: 192545 - DNA, 547 bp, Homo sapiens
atagtaaaagaatatatgcatatgagaagacaggcctaacatagttattatttttttttttgagatggagtctcactgtgttgcccaggctggactgcagtggcatgatcttggctcattgcaacctcmaactcccaggttcaagcaattctcctgcctcagcctcccaagtagctggattacaggagcccaccaccatgcctggctaatttttgtattttagtagagacggggtttcactatgtaggtcaagctgatctcgaactcccgacctcaaatgatccacctgccttggcctcccaaagtgctgggattataggcatgagccaccgtgcctggccctaacatagttattcttgtgtgggccaaagaatgtgaactgcttgttaccagttatggtgaagtaaatacagaaattgagagtaagactttagatttttttttttttttggcaatttgatgttgtgacatccaggtggcattttactttcctagtttgtttttattctacagaaatattgatttacggtggattggatgggagaag

SEQ ID NO: 192546 - DNA, 547 bp, Homo sapiens
atagtaaaagaatatatgcatatgagaagacaggcctaacatagttattatttttttttttgagatggagtctcactgtgttgcccaggctggactgcagtggcatgatcttggctcattgcaacctcaamctcccaggttcaagcaattctcctgcctcagcctcccaagtagctggattacaggagcccaccaccatgcctggctaatttttgtattttagtagagacggggtttcactatgtaggtcaagctgatctcgaactcccgacctcaaatgatccacctgccttggcctcccaaagtgctgggattataggcatgagccaccgtgcctggccctaacatagttattcttgtgtgggccaaagaatgtgaactgcttgttaccagttatggtgaagtaaatacagaaattgagagtaagactttagatttttttttttttttggcaatttgatgttgtgacatccaggtggcattttactttcctagtttgtttttattctacagaaatattgatttacggtggattggatgggagaag

SEQ ID NO: 192547 - DNA, 553 bp, Homo sapiens
ttcccccttagctttctcttctctctcctgctcccttgtgaagaaggtacctgcttaacatttggccatgattgtaagtttcctgaagcctccccagccatgtggaactgggagtcaattaaacctctttcctttataaattacccaatctcatgtagtacctttatagaagggtgagagcrgactaatacactatgagatatgtactattattatccccctttcaccgataaaaataactgaggcacagagtggctgggtagcttgctgaaagtcacacagttagatgaggcaaagccaggactcatatttgggctgttgaacactgaggcttgtattgtagaacactagattaaagaaaataaccaaaattaccaaaggcatggctaaaaaggaaaaaacaaacaaacaaaaatcaagtagagggcaaagaataaagaagagaaagaggaagagcaagcatacgtaacaggcactatactcagagctttttaaacattgtttcaaacattgtctctttacaaccctagggaggggtattgatgatcctgtt

SEQ ID NO: 192548 - DNA, 565 bp, Homo sapiens
ttaattctaaaaattgacttaagtatttctactaggtaggtgcttaagaaatagctgatgaaattgaactgtacctgaccactttctaaaatacatgttccacaacaactttagaagtagttttcatttgaagaaaggaaataaaaataaaactgataaaatgaaaccgtgtacttcatctgaatctgtctttaggacacacatccaactccgtgtaccaatttagttcaagtcagccctgcttgcattatgcagacatttcagctaagaaacttaaatgtgcttcttgtgtacatttgctttcatgaccaaaccatattgtcttcagacgttgactggattataatacagatgagtacttcagacagtggctttatatcttctgaaagagaaactgataagggagtgggggggataaaaaaagaaaacagggaaatggacagtcatttattcagtttatcaagaggcttmaataggaagattcctaactgaaatcaagttgtaatgatgataatttcccaaatgtctttctcaatactgacatttcattgattcctacaaattc

SEQ ID NO: 192549 - DNA, 577 bp, Homo sapiens
ctttctcaatactgacatttcattgattcctacaaattctttaccagtctttcaaatacaatcttagtgtttataatttctggtagctaagctaatggactctagagacaaactgcttagatttgaatttaaagtccaatcctttccagctgtttgtccttgggcaatttatttaacctcacakgtctcaacttccttacttataaaatggggatactaatgttacctgtctcatggggttgttttattggttcagtgaatatctatgtggtattgacagtagtacctgctactgtcagtctcaatttcacatgtctcaatttccttatttataaaatgggaatagtaatgttacctgtctcatggggttgttttagtggttcagtgaatgtctatgtggtactgacagtagtacctgctacatcataaatgctcattgaagttagttatcattagcccctatcatcccctttccacatcctacactccactttcccttctgtgggttctgcctatttagacttcagctggagtgtccaagaacttgactttaaatcctgtgatagttgcaaaaaca

SEQ ID NO: 192550 - DNA, 577 bp, Homo sapiens
ctttctcaatactgacatttcattgattcctacaaattctttaccagtctttcaaatacaatcttagtgtttataatttctggtagctaagctaatggactctagagacaaactgcttagatttgaatttaaagtccaatcctttccagctgtttgtccttgggcaatttatttaacctcacatgtctcaacttccttayttataaaatggggatactaatgttacctgtctcatggggttgttttattggttcagtgaatatctatgtggtattgacagtagtacctgctactgtcagtctcaatttcacatgtctcaatttccttatttataaaatgggaatagtaatgttacctgtctcatggggttgttttagtggttcagtgaatgtctatgtggtactgacagtagtacctgctacatcataaatgctcattgaagttagttatcattagcccctatcatcccctttccacatcctacactccactttcccttctgtgggttctgcctatttagacttcagctggagtgtccaagaacttgactttaaatcctgtgatagttgcaaaaaca

SEQ ID NO: 192551 - DNA, 618 bp, Homo sapiens
ctaataaacttttcttacagggttattgtaagaagtgaattagattaaacagagagtacacatgggcacatggtacatcaccaatcaatggaagatcatggtagtttgactctgaagaattaacactggaagcagaactcattgaattgtaaaggyattttcactgtcaaaagtgactggtaggaagatatttaggcaagccttcttctatggtgtgtgaggtgtatgtttttaaaatctagcatcaacattctaggaaacagctacagctcattttttccaacttttaaatgtcacatctttttttttttttgagtcaggatctttgttgcccaggctggagtgcagtggcatgaccatagctcactgttgcctcaaactcctgggctcaagtgattctcccacctcagcctcctgagtaactggtatgatagctgtctgtcaccacatctagctattttgtttaatttttttgtagcgatggggtcttgctatgtcatccaggctggtcttgaactcctggcctcaagtgattctttcccactggcctcccaacattctaggattataagcataagccatcgtggctggactgttatatcatttttatggttatgg

SEQ ID NO: 192552 - DNA, 459 bp, Homo sapiens
caagacagcaaaactgagccttagatccaggttagagatagttatgtaaacaggcaatttttgtattgaatgtttaatayatgataaaaatcagtactagtattataggaaaacagaacagaaacataattatgtattagtgatttctcacttctcaattaatgacactctaatccgtctacttacttaactgaatacttggactcatccttcattcttcatttttcctaacactccacatcctatccattagtacattctattctctatgctttcaaaatatattcagaatcctaccccggactaagctaccataatctctcagcattctgtcacagtatttcctgtgtttccccctttttccactgttgttctattttccatgcagcaaagtaaaaaatttttaatgaaaatcagattgtaatgtttctctggtaaaaaaaaaaaaaaaaaaaaaaa

SEQ ID NO: 192553 - DNA, 404 bp, Homo sapiens
ttcttctctgtgatacaaaatctgtgatgtttagcatatttattacactataggatatagctggttatgcagggattcagctcccatttgataattacttttatgaaaagccagtgtataacacatggttcaccgcacttcagcttaactaatgggaaacaaataaattcaggtatttctaatatttttacattttcttctaaattgcttccctgagttgtgcttctcagtcttgaaaattttaatatgctattgagcccatctcttgggatgtcatgtgggcttaaataggtaaatmaagtctctggatgtaggtctttggtggagaagcatctaccatgctcgacccagccctgttctgctgtcctctgtcaggtgtatgaagaaacaggctgctataatct

SEQ ID NO: 192554 - DNA, 416 bp, Homo sapiens
gaattcccctcaacttattaacatcatgctggctgcctgtgagtctcacagtttaagctgctagagagagagttggcagacaggctgggcacagtggctcacgcctataatcccagcactctgggaggccgaggcacgtgggtcacttgaggtcaggggttcgagaccagcctggccaacatggtgaaaccctgtctactaaaattacaaaaattagctgggcrtggtggcaggcgcctgttaatcccagctacttgggagcctgaggcaggagaatcgcttgaagggaggcagagggtgcagtgagccaagatcgtgttactgcactccagcctgggtggcagagcaagactgtctcaaaaaaagaaaaagagagagagagatagctggcagacagacagatgctggaggcaatt

SEQ ID NO: 192555 - DNA, 629 bp, Homo sapiens
agccattgcgcctggcctgaaattatctatttttttttcttttgttatttgtgcttttggtgtcatagataaaaaattattgccaaatctaagayaataaagatttatccctatgttttcttctaagagttgggtagtgtagctctttgatccattttgagttaatttttatatatggtgtggggtaagggtccaatttcatttttggcatgtggatatcaagttgccccagagccatttgttgaagaggctattctttgtcccactgaatggtcttcgcacccttatcaaaaatcaattgaccacagaggtatgcgtttatttctagactcttaattcttttcccacaatgcatgtttttttttttcaagttaaactgtatggactttctgtatttttagtagagacagagtttcaccgtattagcaagaatggtctagatttcctgacctcgtgatctgccccccgtggcctcccaaagtgctgggattacaggcgtgagccaccgcacccggccaaaatgtatggacgttctaaataaggtataggagtggtaaataaaactaagtctctagttattaaattttgacatagtcaatactgcttccaatttatcatatgaattactt

SEQ ID NO: 192556 - DNA, 644 bp, Homo sapiens
tataaatgattttgtaattttataattttaggcattagccaggcagcagaaagaagtgttggccaggcgcggtggctcacgcctgagtaatcccagcactttgggaggctgaggcgggtggatcccctgaggtcaggagtttgagaccagcctggccaacatggtgaaaccccgtctctactaaaaatacaaaaattatctgggtgtggtggcacgcacctgtaatcccagctacttggtaggctgaggtgggagaatcgcttgaacccaggaggtggaggttgcagtgagccgagatcacgccactgcactccagcctgggtgacagagtaagactccgtctcaaaaaaaagaagtgttgctgtgaggtggtggttgcaggcagagaagaggagggagactgttgcctgggactctsaaattacccattgtggatctagacttctaaattcctcagttgttttctctgattcttggcaaaacagacaaaaacctagcaacagcctggatgactgaggatgattcccagggctttttctaattgctctggaggaaggcagttcatatattacagttgctggaaagaagctggggaaataacataatggtcaggcctcttcagtcatgttcacaagagtgaacca

SEQ ID NO: 192557 - DNA, 599 bp, Homo sapiens
gaattcagctgtcttacagactgctttatgctgtattcatatcactaagaacgaatcccaaagctccttgtgtgtggaaggatgagggtgggtggaatcttaccatgggagaatcagggacaaacagttccccttttactgttacatactggttacatactgggcttctgggtatgatttcgtttgacagcacacacctgtttcaaggacgggcttgaaaatgactatyttattgcactttgctcttaccttttctttattgagacagagtctcactctgtcaccaaggctggaatgcagtggcacaatctcagctgactgcaacctccacctcctgggttcaagcgattctcgtgcctcagcctcctaagtagctgggattacaggcatatgccaccatgcccagctagtttttgtatttttagtagagatagggttttaccatgctggccaggctggtttcaaactcctgacctcaagagatctgcctgccttggcctcccaaagtgctgggattacaggtgtgagccaccactcacagtctgctcttaacatttcataaaaatagaaaagtaaaattgctgattctagtgtaacaa

SEQ ID NO: 192558 - DNA, 294 bp, Homo sapiens
  misc_feature (1)...(294): n = A,T,C or G
agtagaaatataatgtgaatcacatatgtaatttcgaaaagtgagtcacatttaaaaagaataaaacaggtgaaattaattttaataatatattttattgaaaccaatatatctaaaacattgtcattttaacatataatcaatcaatatttgaaaaattattaatgagatatttcatgttctttttcccaactgtcttcaaaatctattgtgtatttgacacttgctgcayatctgatctcatactagctacacttcaaagtgctcagaatnnnnnnnnnnnnnnnnnnnnnn

SEQ ID NO: 192559 - DNA, 583 bp, Homo sapiens
ctctgtgcctcctctattcattctctcaccaaatgagcttctaagcaccagtctccgtctgccatcagattagctgctttaggtgcacagttctcttctcaccccgtacttgctttcttcccctgcctttctatctcagtcttcctctgcctacttttgccacagtctcattgctcgctgacttggaggctagggctggtctgcacttagcctctcccttcctgactaatttctagccccagtgggcagccctgtcttagccctggctgacctccacagtgtatcatcatgttcctgctaccttcctgacccctatgctcagtctggaattgttgtaggaggtaacaagggcactcagaagagtcagttggataccagtgtcttggtgtttactgtttcaygtcttcattcctgagttggggatggggtgtgacagagaaggggtggtctagctagaatgcaaactaagaacttctccatctgctttactttttcttctttgacaaactgttaccttttttactccaaaatgaccaagaagttgtgttaaccgtttgtggctcctcaagtcttaccatccagc

SEQ ID NO: 192560 - DNA, 413 bp, Homo sapiens
agactccctttcttttgcagcaaaaactataatcaatcctctttctgttttttcctagcctaccagggaactcagaactaagtaagatcactcttctcatgaaaggtctggcttccttcatcctctttgccttttaattttccatttgaaacttaagttcctttgagggcttttattgtatttgtggggaggggagaaggaggaggaaggaaccagttattaatacttccttacacaagaaactctagtaggtttcttcctcgccccattccaccactctacccagtcrtaaggcccagtcataaggacgaaaatcccttcaatgaacagcactcctgtctaggaatttatcatgaaagaatctggactctaatcccagggcaaagaggccttggaaggagctgccacgaatt

SEQ ID NO: 192561 - DNA, 536 bp, Homo sapiens
attcttaacatggtttggtgccatagtactataacagctagcatacaacattgaaaattagacactgaaaattagagcacaatattgtcttaatatgtggaaaaaggtagatgcacttgagtatcaagcaaattgctactgaaagtggtaggtttctagatgaaaaatgggtttgattaataaaaacaaaataattgaaatgtatttattcattcactcattcttgcattcattcatttatcaagaattttttgagtacctgttatgagcctgactctgttagaggcagaggatacaaagtaacggaatatgtggtctatgttctcctggagatttcactctaataacatgtattcatttggtcaaaatgttttattaatttagtgcattagtccattctcacactgctataaagaaataccagagattgggtaatttataaaggaaagagttttaattgactcaccgttccgcatggctggggaggcctcaggamacttacaatcatggcggaaggggaagcaggcatgtcttac

SEQ ID NO: 192562 - DNA, 601 bp, Homo sapiens
gctgggctcctggtgaattctagaatgtgatcaagggcaggcatgggaggaagccctgcaggagtgcaccatggggcgaatatggactccacctgggcagattaaattgggaaagggtcgggagaggcagtcagatcatacacttaggagagtttcaggtgagaggaccaaaggccaaaacactcccggagcttcgaaaagggcctggagaagcctggcaggcacacagagccttcacctttgccctggaagccaagttgtgcccttgcccaggatgaggtaaatggcgtgagggacaccacgagctctttggctcttgtttctggagacagatttttgttttttcacccaggctgragtgcaatagtgtgatgaaggctcactgcagcctcaacctcccctactaaagtgatctcccacctcagcctcccaagaagctgggactagaggtcacaggccaccacagcccattaatttcttttaattattttgtacactctgagtctatgttgcccaggctggcctccaactcctgggatcaagcgattctcccccttggccttccaaaatgctgggattaaaggagtgagccaatcgcacc

SEQ ID NO: 192563 - DNA, 516 bp, Homo sapiens
gtttgcttccccttccacaatgatagtaagtttcctgaggcctccccagccctcaggttaattgactgtgagtcaattaaccctctttcctctatatattacccagtctcaggtatgtctttattagcagcatgagaatggacatatgtattagaaaaaaaaaaaggaatatatcattcaatkgtttcttcttttcttaataagtaaaaagagccactgaaacatgaacctagtcccttaaatatgaaaaccaatttacctcaagggcaaccttttaaaaactaatcaaagtttttcagtaaaaagcatctggttgttgattatgagtagttaataatgtcataaactattaggtgcttttaaatgaatttctttttaacacaaattttcatacactgacaaagatatttatactatttctgtgacacttttacaggagtataagtagaggactgagagaaaagagggagtcacaggtctcatcacctcgattttcatctttgccacctgtatacc

SEQ ID NO: 192564 - DNA, 461 bp, Homo sapiens
acagcagtataaaatttaccaaaagttggaaaattacttgttttctgcaagtcatttcgagcaaagacacttggcacccgggaggtaacaaagcaggcctttaaacagataggtcttagaataataattttacttcgttaatgagttctatcatatttaaattagaatggtagatctattatttcaaacagaatcatctatagacacatgattttctgaagtgttttctgcagcatgacagtggtcattgaatcactttttacaaggagagtcctttttactgtttttgctagtctttcgggttaaatcttattatatttttactaatagacatcctacatggaatataatacttaaatgttggctgggagtggtggctcaygcctgtaatcccagcactttgggaggccaaggtgggtggattacctgaggtcaggggttcaagaccagcctgaccaaca

SEQ ID NO: 192565 - DNA, 557 bp, Homo sapiens
aattgcatttctacaacaactgcactatagaagaacttaatgaaaacttacttttgataaaacaagagataaaaaaacagaacaataaaaataaaaccagaacaataaaaataaaaccagaataataaaatgaaaatttaaattacagagttaagaaaacattaaaatcaaaacaatactaatamgtacagttttgggatgccccctaaaataagcaacttcctgattaatcacacatagagtgagttccacctctcacactccagatcttccagttaatacataagttcactcttacatataaacagacaggtgaagatttacagatacttgagaaaaattttcaacatgaaatgtagagaccaacaaaaacagaattaaaaagtcaagtgaaagaaacaatgcagaaagacaaaggcattgaatagtcatttctccaaagatggtaaacaaataccaaatgagcataggaaaagatgctcaacatcactaattattatggaaatgaaagtcaaaatcacaatgagatatcgccttgaccccactaggatggccat

SEQ ID NO: 192566 - DNA, 557 bp, Homo sapiens
aattgcatttctacaacaactgcactatagaagaacttaatgaaaacttacttttgataaaacaagagataaaaaaacagaacaataaaaataaaaccagaacaataaaaataaaaccagaataataaaatgaaaatttaaattacagagttaagaaaacattaaaatcaaaacaatactaatacgtacagttttgggatgccccctaaaataagcaacttcctgattaatcacacatagagtgagttccacctctcacactccagatcttccagttaatacataagttcactcttacatataaacagacaggtgaagatttacagatacttgagaaaaattttcaacatgaaatgtagagaccaacaaaaacagaattaaaaagtcaagtgaaagaaacaatgcagaaagwcaaaggcattgaatagtcatttctccaaagatggtaaacaaataccaaatgagcataggaaaagatgctcaacatcactaattattatggaaatgaaagtcaaaatcacaatgagatatcgccttgaccccactaggatggccat

SEQ ID NO: 192567 - DNA, 557 bp, Homo sapiens
aattgcatttctacaacaactgcactatagaagaacttaatgaaaacttacttttgataaaacaagagataaaaaaacagaacaataaaaataaaaccagaacaataaaaataaaaccagaataataaaatgaaaatttaaattacagagttaagaaaacattaaaatcaaaacaatactaatacgtacagttttgggatgccccctaaaataagcaacttcctgattaatcacacatagagtgagttccacctctcacactccagatcttccagttaatacataagttcactcttacatataaacagacaggtgaagatttacagatacttgagaaaaattttcaacatgaaatgtagagaccaacaaaaacagaattaaaaagtcaagtgaaagaaacaatgcagaaagacaaaggcattgaatagkcatttctccaaagatggtaaacaaataccaaatgagcataggaaaagatgctcaacatcactaattattatggaaatgaaagtcaaaatcacaatgagatatcgccttgaccccactaggatggccat

SEQ ID NO: 192568 - DNA, 571 bp, Homo sapiens
atggattctttgttgtctagcttccttccctcagtatcatacaaaggcatacaggaaacagaaacatattactcattaaaaaaataaatttaccaaaatcattcatgagaaagctcagatatcagaattatcagaagactttgaaacaactgtcttaaatatgctcgaacagctaaagagaaacatggacaatgaatcaaagaaaataggaaaaagatttatgaacaaaatgagamtatcaatgaaaacaaagaaattcttttttaaaaataagtaaatggaaattctagagctgaatagtataattattgaaataaatactcattcaggagttaaaagttaatttgatatcatctcaccgcagttaaaatgcttttatccaaaagacaggaaataagaaatgctggcaaaaatgtggagaaaagggaatgcttatacactgttggtgggaatgtaaattggtacaatcactatgttttgaggaacagtttgaaggttcctcaaaaaactaaaaagagctactgtatgatccaacaattccaccactggctatatatccccaaaaaggaaa

SEQ ID NO: 192569 - DNA, 594 bp, Homo sapiens
acacagtggaagtatgctgctaattttcccctgctgcacatataaattatgcagagaacattggattggtagcttctctgtagtgaaaactgtctattcgctttcagggcctggcagaggtgaaagcagtggtgaaaggaattagcatgcaatgaagaaagaaggaacataaaaaattacgtatatcacagaggatcctggaagactwcaaaatataaacatgcaacctgacagtcatattagggaagatacacatttcacttaacctgggatttcaggttggcaggtataataagaagctctttaaataattaacaactttagctaattgctggttcataatgaagttaacgggtcttagctgatgttttatttgcaagctttaataaggcttacttaaaccctttattttttcttaaaaaattgccagcaatgcataagaaaggcaataatgtacagaacactggcaaataaatgtctgcaagacttatgtggcctcttgacagtagctttgacatatatttttcatgttttagaatgataaatgcaacatcttcttggagcataatttgctaaaaaaaaaagagagacaga

SEQ ID NO: 192570 - DNA, 497 bp, Homo sapiens
ataaatggcaacttccatatgaatggtaataatccttgtttttagatgtgtggtctatacgtgggtattcattatactgtgatattttgtaccatgcatatgtagtataaatattgtttggatacatttaatatctgatgtgtgtataaaaataggtaatgtaggccgggcacagtggctcacacctgtaatcctagcacttttggaggccgaggtgggcgggtcacaaggtcaggagtttgagaccagcctggccaacatggtgaaacactgtctctactaaaaatacaaaaattagccaggtgcggtggcgggtgcccataatcccagctactcgggaggctgaggcaggagaattgcttgaacccaggaggtgaagattgcagtaagctgagattgtgccactgcactccagcctgggtgacagagcaagactccatctcagggggaaaaawaagtaatattttttaagcaatctctgagcaaagcattgtgta

SEQ ID NO: 192571 - DNA, 434 bp, Homo sapiens
ttctctccccttagttaagagaggaggggccttaacttgcattgagtaatgaagtgtttattaatatatcaaaatgccattctaatagagactagtatcttgaagcaaaaaataactatatgatgttattacctaaaatccatcagaaaaattgtgtgacttcctragtttgcattcagtgactggagtgacaccacctccatagaagatgtaaatggactgtgaggttgaaaatacaggtgggttctggtttctccccatgggtcatgcttattctatacatggaagattgttgtgaagattaaattaattgacacatatgagttgtttaggatagcaccgggcacctgtgggagctcagaaagctgaccaataaagtcatcatcatcatcatcatcatcaatagcagctaaaatttatcataacagatcatg

SEQ ID NO: 192572 - DNA, 567 bp, Homo sapiens
aaggaatgttaaaatattttaaagtgtttacctacaacaatttataagaatctttttaaatccacattttctccaacatttcatagcatcacacttaccaatgtttgcaaatagaatgggtatgaaatggtgcctatgcacagtccaaatttatgtttctctaatctcaaataaggtagaacatctctccacatgattactggcctgtattagtttgttttcacactgctataaagatactacctgagactgcgtaatttataaacaaaagaggtttaatggactcaaagttccacatggtggagggtggaggggaagcaggcaccttcttcacaagatggcaggagagagagagcacaagtgaaaactgccacttttaaaaccatcagatctcytgagaactccctcactatcatgagaacagcatggggaaagccactccatgatccagtcacctctcatcaggtacctctttaaaacatggggattacaattccagataagattcgagtgggaatgcagagccaaacaatatcatggccaaatgctatttactttctgtaaaac

SEQ ID NO: 192573 - DNA, 543 bp, Homo sapiens
accgattcttcactgatttttggagctctcactgagacgtccatgtagattcacctgagacagccaagtaaacgctcttgccaaagaaacgcatatatgctatgacctgctaggcatttttttacttcccatatttcaccccaaccagtaaaagaactttaactttgtctctctagttttgtttttattttaactgtgattttgtgttttatttacattctggattcacacaggctataygttatttcccatttgtagcaataattaaggatttggttttacagaagaccatttggtgatatctgttagatagattattgaaatcctattccttagagggagcaatgacagcgaatctagttagtcattttgtttatttgtacatcaatttatgatctcaaatccattaaaaatttatgttcactaggaacaacagtctttgagacatagactgaagaatttttgtgagtctatgtttacttctgatttaaggccaaaattatagaacttaagatataaagtattttctgtaatttaaaaaag

SEQ ID NO: 192574 - DNA, 427 bp, Homo sapiens
aatacagccagtttagtgagaagacagacaagccagcagctaactccagtgcaaggcagaatggtgtacatgttggaaagaggtgaccaacagccagctatgagtttgagggatagttgtgatgaagaaccacccagaactggaggaagtccccatagcctgcttccttgagttagagggctctggttatggggaaatkgtctatatataataatactttttattgagcatttattaggtgccagacacttagcccacttgtcagttaataggcataacagtccaaggtaggtactactgttttcccctattttacatatgaagaaatcaaggatagagagggcaagtaatgtgcccaaggtcacatgccctaatacgaggtcagccctaatgtgaagctaggcagtctacttccagccattgctcc

SEQ ID NO: 192575 - DNA, 514 bp, Homo sapiens
ttttaaactacagctcaagttttccagatttctaaaagaccttgggaagaagcagcttctgttctcagtttasttttcagtgtatccagcttttgttcatgttcagcctgataattctagtttacagttttatttaattctgtgaagcaccaggtgtttgcagtgaaaaaattattcaaatacatggccagccatgtggcagaacatagaaatattctttcacaataataaacacttaaaaacacctgacttgaaagcagtcctgacattggaggcaactgtgaatggatggtctgtaataacgtcctgttgtgcatttgacaaaaactgatatgcaaataaagcctgtagtcattaccctttcattcatccaaaaatactgagtttctctcatgcgttgggatacagatgaaaataaaatagacaattccctggcatttataagcttactctgtaatttggcaagcaggcaataaacaagatacttaataaatataatatcaggtagtgatag

SEQ ID NO: 192576 - DNA, 514 bp, Homo sapiens
ttttaaactacagctcaagttttccagatttctaaaagaccttgggaagaagcagcttctgttctcagtttagttttcagtgtatccagcttttgttcatgttcagcctgataattctagtttacagttttatttaattctgtgaagcaccaggtgtttgcagtgaaaaaattattcaaatacatggccagccatgtggcagaacatagaaatattctttcacaataataaacacttaaaaacacctgacttgaaagcagtcctgacattggaggcaactgtgaatggatggtctgtaataacgtcctgttgygcatttgacaaaaactgatatgcaaataaagcctgtagtcattaccctttcattcatccaaaaatactgagtttctctcatgcgttgggatacagatgaaaataaaatagacaattccctggcatttataagcttactctgtaatttggcaagcaggcaataaacaagatacttaataaatataatatcaggtagtgatag

SEQ ID NO: 192577 - DNA, 604 bp, Homo sapiens
ctgaagttctttctataagagcactaaccccattcatgaggactccacttcatgacctaattacctcccaaaggccccattgcctaacaccatcacattgggggttagaatgtcaacatttgaaatatggggagacataaacatttagttggttgcacttgtggaccatctgctaagatgtaatgtgaagctgttatttctcctagtcctgaggtattcattatttgcactaaaattttgcaatataggaataaaaaagtacaatgtgatcatgtgtattttttgtggggtgtggaagattagggaacacattcctgttgcctcataaattgaaatcaatatgatgtagagaagactgctctattttctcgattatgcaatccgtggatccacaaatcaggaagaaaatgtgtgagaaaacatttcctggccatctctcagacaaatgagtctgtttactttccaagggtaatttttttcagttttaactcacaaaatgattcttstttttcactttgtaggccttataattagtgcaaattgtctgaaattagattgttgtcactcttactttcatatgttgttataattgtgggttgtcata

SEQ ID NO: 192578 - DNA, 545 bp, Homo sapiens
aggcgttctacacttagcctttctaaaaacatttttcatatgtttttaacaatgaatatatagaaagcacgaaaccgtaaaatgaaatttgcgagtcccttttaccatgtttgttttgccatatttgtgccacttccctagagaaggatccttaatgagctccttgcctctcaggacctcctttgagccaacttgggcttccatggccgwctctcactttagttatttcctgactcactctccacactgaatcatgcctattgtatgatgcactctatcacagcctttgatccctgtttaatgatagctagcaagtggaaaacaaaagcaagcaatgattgcatacttgtgtcttttcaacattttttttttagtaactgccagtttaatctttaccaggtcacatgcaattgtatcaatacacagtaatgatctctcagcacactaattttatttacattctccacatggcattgatcattttccatctattttactgttggtagttcctaacctcatatcctgtattggcaatgatatcttta

SEQ ID NO: 192579 - DNA, 460 bp, Homo sapiens
agttatgagaaattttaaccatgaaaagtgatctaagcattaatatttgataaagagctttaatttaatcttataggcaataaggactctagcgaaaaaaaaagacaatttattttgtcttcagacaaaatcatattttytgccaatttctgccctaagagaatttgtaaataccagtgcactttcaaaagtataacttttaaacatttttgaacactatattatctttgtgcagtatcccttcagaaagtcttttaaggtttcatatttgctttattccatgcaattacctgtaattttagaagaattccttctaagatgcaatagaaatacattaaaactaaggaacatacttactagttgtgttcacagcttagtatgcattaagccttgttttgtctacgatgatcctctttgaaatcacacaatttaatgatgccctactccagagaaaatttgg

SEQ ID NO: 192580 - DNA, 460 bp, Homo sapiens
agttatgagaaattttaaccatgaaaagtgatctaagcattaatatttgataaagagctttaatttaatcttataggcaataaggactctagcgaaaaaaaaagacaatttattttgtcttcagacaaaatcatattttctgccaatttctgccctaagagaatttgtaaataccagtgcactttcaaaagtataacttttaaacatttttgaacactatattatctttrtgcagtatcccttcagaaagtcttttaaggtttcatatttgctttattccatgcaattacctgtaattttagaagaattccttctaagatgcaatagaaatacattaaaactaaggaacatacttactagttgtgttcacagcttagtatgcattaagccttgttttgtctacgatgatcctctttgaaatcacacaatttaatgatgccctactccagagaaaatttgg

SEQ ID NO: 192581 - DNA, 551 bp, Homo sapiens
ttttagtgttattattgttagaatactggaaaataagctcagtgagataagttagctcagtgaggtaacttacttcagttattccctctacttggagtaaagagttcactgctttatttctagtcaatagaattgcttctagaacacagaagataataaatattaaaaattaaatgaatgcttatatgtgagatcaagatgtataatgacttccaggtttctgaatggatacaatttttaaaataggaaagagattggataacaggtttgtgtttttttcttaaaattattatgaatcatacatattattataatcatcttccttatcaataacratggtttttgagcatctatacagtagaaatattgtgaccagtactataagaaaaaaaagaatgagatatacgattctttatttaataaaattaagagcatgtaaggacttagttaaaatgtaggcatatatggtacaaaacaataatagattcccccccacacatacaaaactaaatatttaaagagaatgctgaaatattttcagtgtcttaatt

SEQ ID NO: 192582 - DNA, 435 bp, Homo sapiens
agcattcttttcttctgttaatagtgtgtttctaaaattatattctttatttgggagtattttacttgcctatatttaattattttaaaccttttattaactgttatgaatattgtattatctttaattgtccacataatagtgaatcaagattttaaaatataacagcattgtaacaaaattggatataccaatgactattttctgacagtagcacattgatataatttttatatacattattatgcaataaaaagtcaagttaattgcaagcagaagttgaaaatcaagtttaaattaatcaaaaatttaattaaactaaatgatctttgactagcagcagttttcttggctgagggttaaaaaataaaaccrtaatagagaatttttttttaagatggaatctagctgtgttgaccaggctggagtgcagtg

SEQ ID NO: 192583 - DNA, 594 bp, Homo sapiens
attatgctgtattttctttttatttttaaattagtttatattttcaattaaaaaaatgtacaaaataaagctacaatgctggtcatggaagagctatacaattttcctaaatgtatacctgtaactgcagcagttcacctattgcaaaaatttggaattctgttcatttgttattcttgagaccatctcaaatttaaaggctaccttgatgtatgtttaaagtgtattataacagtgtgatagttaataaaacactattcctttttcttttgaaaaaaataacagagggatatggagttcaatatttattttaattgtgtacttttctgttattcagcaataaataataaataagcaataaatatgttttatataggcgaaggcaatttgcaaaaacttagaccattcaccatattagaaaaaagcaggacaattttatattgttgtagaaatatactttatggaatayactattgaatctaagcattagtggctattgctgcttcttaaattttcatgccatgaattcaaaaataccttatatatttcctttctttagtgttccagtagttgataaaagatccaatgaaatga

SEQ ID NO: 192584 - DNA, 350 bp, Homo sapiens
gttattataaacccattgaaakaaaaatgattatatccttccagcttttaattgtatttgaaataacagactgattctattcacaatactaagataaacaataattaaatttaatttataaactttatcttttgtatttttagataagacaatatgtatatttataacctgagaatctatttttaagcattaagtcgatatctgtactgcaagaaaatatttctaacacgctttcactctgccctttagaatttagtccaataatcaccaaaatcacaactctgtccgttagatttcccttcttactctgacagaaaacgtgatttttccctgagaacatctatttccct

SEQ ID NO: 192585 - DNA, 635 bp, Homo sapiens
catcttcattttaaataccttcctgaccatacatggaaagacaggatatctctcttgtatagtatcagcccagctgctaattctgctgacagaaggtattgaccacctacctgcatccctttagcatttcttaagattcaggaagcacctacagcttaggtttgcattccaccactgccatcaactgaagtagggactttggccaatagcggagtctttctgagccccagttttctcatctgcaaaagatgataataattatccagcagcatggtgaaggttagagacacgatgcctacccagcatcacctagcatagagaaagtatttagtggtawaaataattttctttttttaaatttttgtgtttttttgaggcaaggtcttgctctgtcacccaggctagagtgcagtggaatgatcatggctcactgcagcctcgacctcccagcctcaagcaatccatctacctcagcatcctcagtagttgggactacaggcatgaaccacaatgcctggctaattttttaaagaaaattttgtagagaggagatctcactatggttgtccaggttggtcttgaactcctggggtcaagcgatcctcctgccttggtctcccaaagtgttgggatta

SEQ ID NO: 192586 - DNA, 563 bp, Homo sapiens
ccaatatttattaagttcaggaaactgattaacaactggaagaacacaagtgaaggagataggtctggaaaggagatgagaatttcttggtgaccaagagtgtaaggtaagacaatggacaaaggtgagcacggagrctgaggaatacgcaagtctcctcaggttcagttcagtgctgggccctctgctagaaaatgctttgaagccttatggtataaaaagggtaaaaaaacaagatcaattttattttggtgtatcgctgtgccagttcaggatgattaatgaagacatgaggtaaaaatgtacaagctgtgtctgaacaagttgagttactgagccagctgctgtggttcttggattgttgatatgtcagctcagctcaaccattcgtattgccacaggaaggtttgcctgatactgaatacccaatgaggggtcattcacacttgctggattaaacttgattaaagtagcttatttgtgacatctgaaatgcctgtctttagaattctatgtaattatagtgatgtttagggacacagggatatccagtagtcatttag

SEQ ID NO: 192587 - DNA, 553 bp, Homo sapiens
gttatattatgcattattgcaggaatggtgtttgttatcaaagtgagttcaatcccttcttgccccctctctctctccccccctcttccttttgtgtgtgcacgcgcatgtgctctctygcctttccaccctcccccatgggataaggaagcacaaaggcccttgacagacatgggaccctcactcttggacttttcagcttccaaaactgtaacaaataaacctctgttctttttaaattacccagtctcagatattctgttataacaccacaaaagagattaagacaccttcccaacttaccattccacggatcctttactgctttgtcatttgtgattctaggaatcccacatgggtagtggaaattctgcttctcctaccagactctttcttctggcttgttatgattaagcggcagcaggagtaagctagaagacccagtgtctatttatggacagtttgccctctagaccctgctccaggaggagaaatagcagaggttcactgaactcatcagccatccacagtttcctagtctttaggtctgtta

SEQ ID NO: 192588 - DNA, 581 bp, Homo sapiens
gcgtaaaactaggaaagacagctctttatacttttaaaaataattctatagcctaaagattgtgatttggatatgaatgtaatattaattatatttttgttttctgataccacctaggataaacttttgcccatcccttgcccttagaatactacactaaaaacttacacttaaagaaaactcggccgggtgtggtggctcatggctgtaatcccagcactttgagaggcygaggtgggtggatcacgaggtcaggagttcaagatcagcctggccaagatagtgaaaccccttctctacttaaaaaaaaaaaaaaaattagccggacgtggtggtgggtgcctgtaatcccagctactcgggaggctgagacagagaattgcctaaacccgggaggtgcaggaggtggaggatgcagtgagccgagatcatgccactgcactccagcctgggtgatagagcgaaattccgtctcaaaaaaaaaaagaaagaaaaactcaagagctcttgaagagttacattatacctcagtaatagctttaaaaaaccctcctaatagctaagcaagatccctacagcta

SEQ ID NO: 192589 - DNA, 441 bp, Homo sapiens
actctgttgagaagagaatggtgaacagcaaggagacttttgcaatgaaataatgcaaactattccaracatgcctaatggttatatttgctgtgtgccttaggtcagggtgtaagacaacccaatcttgaaggaaaacagagtagcttatcttgcctggaagtaacaaaaaaaaaaaaaaaaagctcccttggtgggtcacatgaccctaccagttctcaagtcagatctcttctcataagggcactgtgtggagcttctgagatctgtggaggtttttctctgcaaatgcaggaagaaatcaggtggatggatgcataattatggccctgctcctggtctctttgctggcattcctgagcttgggctcaggatgtcatcatcggatctgtcactgctctaacagggtttttctctgccaagagagcaaggtgacagaga

SEQ ID NO: 192590 - DNA, 441 bp, Homo sapiens
actctgttgagaagagaatggtgaacagcaaggagacttttgcaatgaaataatgcaaactattccaaacatgcctaatggttatatttgctgtgtgccttaggtcagggtgtaagacaacccaatcttgaaggaaaacagagtagcttatcttgcctggaagtaacaaaaaaaaaaaaaaaaagctcccttggtgggtcacatgaccctaccagttctcaagtcagatctcttctcataagggcactgtgtggagcttctgagatctgtggaggtttttctctgcaaatgcagraagaaatcaggtggatggatgcataattatggccctgctcctggtctctttgctggcattcctgagcttgggctcaggatgtcatcatcggatctgtcactgctctaacagggtttttctctgccaagagagcaaggtgacagaga

SEQ ID NO: 192591 - DNA, 524 bp, Homo sapiens
taactatatcctttgatcccatattggtagaatgattttaagtcctggatgccttggatagtcctggcagtaattactaacagagtctcctttcacwctcaaaattgttctggtttacaaggtaagttaaatcatttctttagaaacctcactctcaaaactagcattaaaactgagctatttcccattatgtcagagccacagaaataaaaatatagaactaaggcaggtaatttagctacaatgaggtgggaatgattcagcaggaccatctggcagaaacgaaagagggaccatagtcttcctgggtcaccaaggcaaccgagggagggactcttctccccaggaagggtggctgtgtagtcctgcagaagtcagtgtcagcctgagagtcaaccagcctcagcctccttcttcccggtccctcagtccatctccctgctgccctggctttctaggacagagctgtccccaaggagtgggtgctggcttgaaaaccatcacacctgtgtttgaagcctggg

SEQ ID NO: 192592 - DNA, 584 bp, Homo sapiens
tggtggggcttagcagcattctagactctttacagccatgtgtagcaacagcaagtatcccagaatggcaaagcacagctctagtttgggccgggggggagtgggtacatggatgactgcactccccagggagagaggtatctcagaagcccagaatagggaactagtccggctccagggaagcaaggtactagaggtatttggcatatagggtggagtatttcagttcagccacttctctcttgcctgggcggcaggatactataacarctcagccttggaatatgcagctgttcagcttggccagggcattgacttcccaggggcaatgtgccacttcagctcaggcctgtgggatgtgactgttctaggcagcccaagccccatttccctggaatgcagagtgtcacatcagcttaggtactggggtgtgtgaccaccctggctggtcaaggcatcatttcctgggatgcagggcacagtttcaacttaggcactggagaggcatgacttctctgagtggtcaaggtaatgttttcccaggatactgagtttttgtttttgtttttttttccttttgctaa

SEQ ID NO: 192593 - DNA, 533 bp, Homo sapiens
atcaagagaaagagatgtttgtgtggggtttttccatgctgcatctcaaaataacagaactattcagcccaagggaaayatgctcactctctaaatcccacaagtgagatcagaggagcgcaaggattacacagctgctggaatctgacgcctagagaaagcctattggtttggggaagtttggtgcctgaagatgcttgtaaaatcaaagcatttgagaattgaaaacatctcagcgtcattttacatcaaactttcagcaatctactgatgagttttctctcaatatcctcaatttgtggatctttctgttgcatcgaaacagttaaacttttgaggtccctatttcttagaagttttcatcaagcttgccattagaaagatacaaaaatgggctcagctgtgcattcttgatggtttctgacacaggactctgtgataactttatgttgactcttgctgaaaaaggtctgagagatgagatgcaaaaaagggctcatgtcactctgaagactaaaagtataattgaattc

SEQ ID NO: 192594 - DNA, 562 bp, Homo sapiens
aaacaaagaataaactgagaatagtacaaacaggaggcataacgtaaagacacaaagaggtagaaatgcacaaactatgcttgagccctgtggagtaggctcctgttggagaataaagagaggtaaagtcagaaagatgagctattgaatgtttttgaactgggaaatcacaacatggtggcagtggtgttttatggagaaaatagaatgacggtgtgcaggctagtttggagaaaagagggattgataagaaagacataaattaggaagtaattatataatccaggatttagattgccagggccgaagcaaagataatggtaatttttttaaaaaaaatattattattagtagcagaaatatgaaaggaacttgtaaactgattagatgggtaaccagaaaagtttgaaacctatatgatgaggagaagtaaactgtcaacattcaacaaatgaggaagttaggaatggtttttatagttttgtaatccattgttttatcttctctttcttcacctcagaacaggtaatacctrgttacctcatggttacctatagtctat

SEQ ID NO: 192595 - DNA, 530 bp, Homo sapiens
ctattgtgacaagagtttttgtcaggaaacccttaatatcatcctgggatcttcactgtgatcagtatattcctccaccatgccaaagaacacctataatagttgaagatataaaaacatttttccaaaaaaatgattctattgtcctaaatcatttgcccaggttacttcataactatctcttcaattgagtttcaatattggcaaaaattcttttggttttctaatttatctttcttccataagacacataatttataattaaacaaaatgtgtctctattaagttaaagtaacgtctccattccttcatcactcttcacaaaggtaaatgaaacaatcaactgcctcatctataaaccatcatttrtattcctaattcttccttcctgttgggcttgatatactttcaacatcttttaggtaagccacacggataggtggtcaatctaaatgagtgaaaaatattctgtagcaatcaagaagataaatcaaaccttgtaaattttccctacaaattggagcaatatt

SEQ ID NO: 192596 - DNA, 327 bp, Homo sapiens
atatagtccttcaatcatgtataaagactttcagctgcaagtataagcatatttactctacagtggtttaatcactaaagacaacaaattacatctcatgtgacaacatgatggttaaaagtaagaggccaatgacattaattcaaaagccaaaaaatgtcaaggccactagtgtttttatgcttttgrtccttcccatataaaatcaaggtgggagccaagctccagttattatacctgtatacgaggaaaacaaaacgggaggacagaaacgcttagtgacatgagttctgttcaacaagaatgtaaaagctttctcagaacccc

SEQ ID NO: 192597 - DNA, 617 bp, Homo sapiens
aatacaaactggtttgcaataatatacaaaatttctkccctaatgtagcttagataactcccctctccttagtgctaaaattgccacacaactcatgtctttatatattataggtccatcaatacagtttaataattactaccttattagattgtcttttaaattagatagtaaaagagttacaaatttagaaaaacttttatactgccttgtatattcacctgtatagttaactttatcaatgctctttgtgtggaatcaagttgctttcagatgtctttttttcagttgaatgcatcctttattaatttttgtagaataggtctatgtgaaataaattctttctgcttttgtttttcttggaatgtcctaactagcctttattaagatagatttgcagtttatagattctagtttaacaaactttttcttttagctcttcagatgtgttgtctcactgtcttctggattccatagttgctgataaaaatcaactgttagtgttaatgaggactctgaatgcatgatgagtatcttttcttttgctgctttgaagctttgtctttggttcccaacagtttgactatgatgtgtctaggtttgaatttctgagtttc

SEQ ID NO: 192598 - DNA, 617 bp, Homo sapiens
aatacaaactggtttgcaataatatacaaaatttcttccctaatgtagcttagataactcccctctccttagtgctaaaattgccacacaactcatgtctttatatattataggtccatcaatacagtttaataattactaccttattagattgtcttttaaattagatagtaaaagagttacaaatttagaaaaacttttatactgccttgtatattcacctgtatagttaactttatcaatgctctttgtgtggaatcaagttgctttcagatgtctttttttcagttgaatgcatcctttattaatttttgtagaataggtctatgtgaaataaattctttctgcttttgtttttcttggaatgtcctaactascctttattaagatagatttgcagtttatagattctagtttaacaaactttttcttttagctcttcagatgtgttgtctcactgtcttctggattccatagttgctgataaaaatcaactgttagtgttaatgaggactctgaatgcatgatgagtatcttttcttttgctgctttgaagctttgtctttggttcccaacagtttgactatgatgtgtctaggtttgaatttctgagtttc

SEQ ID NO: 192599 - DNA, 484 bp, Homo sapiens
ttaatgtatttcatcaagttggagaagttttcatcattattgctttacgtattctttttgccaattttattttgttttatccataatgagaatcccattatgcatatattcatatgcataatgttttttcacaggtctctgaggttttgtccatttttcttcttctatttcttatattgaataatttcacttgatctaagtttgctaattctttctactgccactttgaatgtgttgttaaacatgcttcagtttttgttattttcagattttttatttgagcttttgtayatttgagccccagaatatttatttttaaaagtaatttctatttattgatattttctatttgatgagacattgttcttatacttttctttaattctttagtcatgataacatttagttctttgaacatatttacaacagctgatttaaactccttgtctagtaagtctaacatctgtatttcttatagactgtt

SEQ ID NO: 192600 - DNA, 543 bp, Homo sapiens
tcacttcctctttgtgtcaaaacgattgtgacgacctatcactccagtttctataacttagcagtctcctttataaaattattccccagaaattcttaagcattgcctaggagtctctttacaaatatgttgacacaattatatcagtttattctgctccagctttcttatatataccttgccaaaaatccatggtgctactactattccgaaaacccctgttttgctggacacagcttttctcagctttcaacttctactgccacctcctgtcccacaaaagtgcatgacataggggaaaatatatgattttccctatcatcagttatctccaagcagttgtccttccttttaaaaactgtccataatataactgaaaccaagtagtatctttaataatgcttcaccaaatatcatggatggtttacatattgcttctctagctaactctgcactaagaattttttatgaggctaaycctgtgcctcagttttgtctgcaggctcatatccacggagaacttcctcattttttttttttttt

SEQ ID NO: 192601 - DNA, 509 bp, Homo sapiens
cttccaccatgattgtgaagcctccccagtcatgtagagctgtgagtctattaaatctcattttttaaataaattamccagtcttgagtatgtctttattagtggcataaggacagactaaaacacacctcaacctcctgagcagcagtgactgagcttcctcatcttgactaaaattgacttaagcctcttcatacttcagacatagtgcactttaaatactctgggacctagaaaaggggatatttggaagggagaagattttaataataagagagaaataaactcttttataagagaaatatagttgtgtattttatgtttaatgaaataattaagatatataaggtcagtaaattcagaggaacatgtagcatatgccattcagtcagacattgaaagagaaaataactttaaaatttttagttgcttttccaaaagccaaattaaagtgtgtacacagttggagattaggggatctaactgaaatggtagtcactaagtctagt

SEQ ID NO: 192602 - DNA, 589 bp, Homo sapiens
caactccactagtcaatgccctggtggaaactctgtgggggctccgatcccctctttatcattggcactgccctcttwgcgtctctctgtaggggctctgcacctgtggcaggcttttgcctgggcacttagactttcccgtacatctgaaatcaaggagtaggctgctaagcctccatcactcttgcattctgcacacctgcagacttaacactacaccacgtagaagccacaaaggcttatggtttgtgccctctgtagcatcatgccaaactatagttggggagctttgagccatggctggagttagagatgcagacatatggggagcagtgtctcaaggctgtaaagacaacagggccttgggcctggcccctgaaaaacattatttcctcctaagcctctgggcctgtgatggaaggggctgcctcaaagacttcgaaatgcctttgaggcctttttctcattgtcttggctattagcacttggattcctgttattcatgctaatttccctagcaagtgtttgctctacagcctgcttgaattcatctactgaaaacgctttttccttctataccacatggcta

SEQ ID NO: 192603 - DNA, 589 bp, Homo sapiens
caactccactagtcaatgccctggtggaaactctgtgggggctccgatcccctctttatcattggcactgccctcttagcgtctctctgtaggggctctgcacctgtggcaggcttttgcctgggcacttagactttcccgtacatctgaaatcaaggagtaggctgctaagcctccatcactcttgcattctgcacacctgcagacttaacactacaccacgtagaagccacaaaggcttatggtttgtgccctctgtagcatcatgccaaactatagttggggagctttgagccatggctggagttagagatgcagacatatggggagcagtgtctcaaggctgtaaagacaacagggccttgggcctggcccctgaaaaacattatttcctcctaagcctctgggcctgtgatggaaggggctgcctcaaagacttygaaatgcctttgaggcctttttctcattgtcttggctattagcacttggattcctgttattcatgctaatttccctagcaagtgtttgctctacagcctgcttgaattcatctactgaaaacgctttttccttctataccacatggcta

SEQ ID NO: 192604 - DNA, 603 bp, Homo sapiens
aaacatttggcattcagcagccgttgtgtaatactcaaatggatataaatgtgctgtggggattttgaaacaaaaaggaaaaactcactaacaactttacagtaacatcccatcctgaaatgtgcctgaaaaaaatagtacaatacaagaagacaacctgcaatgctggtgatagtacagaacttttgacttcagtcttaagatttcataattagttctgtgagctgctggcactttgataccactacatttggtgacataattcagacatttttttaaacaagcatatgatgaaaggtcaaaagatgaaagaatcagcaaaaatacactgcggaatttcagcagtttttcagattttaaattgttcttaattattttgtaatataataagatcccatggtaacaaaaattttaaaaggcataattctaatctatacatgacagcttaaaatcagcctttcccccttatgttcctagtaatttagaaaaaaatatgcagattcaaaggttggcaaaactagagatggattccaagtcgagtttctacaggagatgtatggtaggaagcrgagagcagctgcggagaaagaccagtgctaacag

SEQ ID NO: 192605 - DNA, 614 bp, Homo sapiens
acatcaaccactgcagcatcatataaaagagtgtctctgtcctaataaccctctgtgctctgtgtattcatccctctctcccctctaactcccggaaaaattgattatgacaaccactgatctttttgctgtgtccatagttttgcctttttcagaatgtcatgtagttggaatcattcagtatgtagccttttcagattgacttctttcatttagcattatgcatttaagttttctccatgtctttcctgctgtggagactaaagtaacttcatcttgaatgctaatcagctgtgttaaactctgactagccccagtcccatgaatgccgcctgattcctactttatttactgtgctagtgtaagaacaaagtaacctcgaatttactgcaaaattataggccatgacaaacatagtattcttgcctgttctggagagtgcctttaattgtcatgctagagtacatatatcctttccttatggtatataagccctgggtctgggaagtaacagtgcagagatctacttgtcttacrgctcctctataccatgcttctgcctgcaatttcacttaataaatcaaccaataccaaacaactggattcatctgcct

SEQ ID NO: 192606 - DNA, 521 bp, Homo sapiens
ttcagtctcccacaaactttcttaaattaaatcgaggtgctgcctgggcctgagccgatgtttgtctctggagcacaggtggatgctctgcactgcccgtgatttctgtctgtagtcaccagatcacggacactccctctggctgcagctggctccccaagtttgaccagaggaggtacaactcaccccttgactgctgaggtccaatgcagaaacgatacctgctcttctcctcctcccattccctacagcacaaatgagtccagatatactgtttctaaaactttgtcaattgttgagaaacagaattatagcatagagaaacttatgtctgtctctaagttacttctgctttgctgrgccctcagacctcaatacaggagacccgccccttgctataccagcccccttgccagattacaaagtcatagtccgtagcagaagacagggtcaacctgccacttaggcaggcattttacattcctagagtctgctgagtccaggttgaagaaagaaaggga

SEQ ID NO: 192607 - DNA, 520 bp, Homo sapiens
tcatttctgttcaggccctttattatccagatctctcattcaacaaccctgctctgacagtcatgagatacaagacatgcccatctcctcacggaccttagtaccctgtggaggataggcaacagataagagatgattttaggccgagtgcagtggctcatgcctgtaatcccagcagtttgggaggcccaggtgagtggatcacttgaggtcaggaatttgagacccaccggtgcaacatggtgaaaccccatctctactgaaaatacaaatatcaggcaggtgcagtggcatgcgcctgtaattccagctacttgggaggctgaggtaggagaattgcttgaacccaggaggtggaggttgcagygagccaagatcgcgccactgcactccagtcttggtgacagagtgaggctccatctcaaagagaaaaaagagagagagagatgattgtagtgctggccagtgtgttatgctaggcatctacacagtgctggagcagaaaatgtagagaatgatt

SEQ ID NO: 192608 - DNA, 463 bp, Homo sapiens
tggaagcattcccccctccccagcccctgctttgagttgtcccacctttctgaaccaagccaatgtacttcttagatgtatttgactgatgtctcatgcctrtctaaaatgtataaaaccaagctgcgccccaaccaccttgggcacatgttctcaggacttcctgagagctgtgtcatgggccatggtcactcgtatttggctcagaatacatccttcaagtattttatagagtttgactcttctcattgacatttaaaatactattgaataatgatctttaatcaccattgttatgatgattaacaattgcagtaactgaaggatacagactgtctgcatcaatagtacaaacattctttgatagaattattttctgccaaagattatgttcatttattacaaagtacataggacaggaggtttacaaaatgtaaaatttaagaaaggttgctatatctga

SEQ ID NO: 192609 - DNA, 575 bp, Homo sapiens
tttttcttgctatctctattcccctttgcgagccttttgttgatataagtttgtgtttaaaatttggctgttaaggaaccaagcaaattgataggtttctctgaaataattaataagcgggttattctatccacactaacatgtwtatattaatatgattaaggaatataacaattaatatatgataaatatttcatgagattaaatttaatcatttaaaagttgaacatagaaaaacgaacataacctcaggctttcacatttatgtttatgtttctgtaactacctaagtgtttttataaacagaatgtattttttatatgtgcctctaaaatctagtctaatcatatgacaatctcctaccaatatgatgtctgaactcttagtagtggaatatctttgctttcaaagtttgcttttatgacctgtaagagagcattttgaggagaagcaaatttggtgcagaaggaatcacttgcccttttgtaacccagagaaaataatcaggaaaggctcacagtgggctactctccagaacctgaagaagagtcagctcctactcccatctctcagcg

SEQ ID NO: 192610 - DNA, 480 bp, Homo sapiens
attaataagcgggttattctatccacactaacatgtttatattaatatgattaaggaatataacaattaatatrtgataaatatttcatgagattaaatttaatcatttaaaagttgaacatagaaaaacgaacataacctcaggctttcacatttatgtttatgtttctgtaactacctaagtgtttttataaacagaatgtattttttatatgtgcctctaaaatctagtctaatcatatgacaatctcctaccaatatgatgtctgaactcttagtagtggaatatctttgctttcaaagtttgcttttatgacctgtaagagagcattttgaggagaagcaaatttggtgcagaaggaatcacttgcccttttgtaacccagagaaaataatcaggaaaggctcacagtgggctactctccagaacctgaagaagagtcagctcctactcccatctctcagcgttggcatgcttga

SEQ ID NO: 192611 - DNA, 575 bp, Homo sapiens
tttttcttgctatctctattcccctttgcgagccttttgttgatataagtttgtgtttaaaatttggctgttaaggaaccaagcaaattgataggtttctctgaaataattaataagcgggttattctatccacactaacatgtttatattaatatgattaaggaatataacaattaatatatgataaatatttcatgagattaaatttaatcatttaaaagttgaacatagaaaaacgaacataacctcaggctttcacatttatgtttatgtttctgtaactacctaagtgtttttataaacagaatgtattktttatatgtgcctctaaaatctagtctaatcatatgacaatctcctaccaatatgatgtctgaactcttagtagtggaatatctttgctttcaaagtttgcttttatgacctgtaagagagcattttgaggagaagcaaatttggtgcagaaggaatcacttgcccttttgtaacccagagaaaataatcaggaaaggctcacagtgggctactctccagaacctgaagaagagtcagctcctactcccatctctcagcg

SEQ ID NO: 192612 - DNA, 558 bp, Homo sapiens
tttgaaatttattcttttggcctgagaaataaacatgaggataggagcttcagcagccgtgttgaaacatggggtgactttcagaatggaagtcaaatactgactctgagaagaaactcaggttcccaggtctcctattagtgtaatgtatttgacctatttttcttgaactacctatccctgggatacagaatacatgaggaataagtattcttttacacaagtgagtagatataatctttactgatgctttgctataagggggatgctggaattcctaatgcaacagttggagaagaaagaatcaatcagatcaataaaatatgttttgtatccacagcccgaggaagcacactagttttttgactatgagttttataaacaataattagagtacaaatcacaaaaccagcttgaaggcaagagttattcaataatcatgcaaacaataatwaccaagaatcttctataagcaatgtctgtgtaaacatggcaggcttatttaaggaataggtaaaacttggtgcctgctcccagaaatatacttctgtgcagaag

SEQ ID NO: 192613 - DNA, 610 bp, Homo sapiens
ggtttcctgtatacaccaagtctcattttcctgcctgtccagggctgtctttcctgacactattttccctaagactttatattaattttcattcagctaactcttattcaccctctgagattcagttcaggtgtctcctccccaggaaacttcatgaattcctggggagtgtctgtaaatgcatagaattgggtctgtgcttccaacctttacacatatgtgaacattactwctatcacctctccattcaaatgctaattctttgagtgtagggatgaagtcataccaattcatatatcctcagtgtcttggacattccctggtacacagtaagtatggaactatttttgggttttaattttctgaatcagtatttgttttaccatgtcaaatgcaatgataagtacaatttgaaaaattccaacattgactgccccttaaacattatcaaccacaaatagaagatgcaatattttcttgtttccttttttcagttaatgtggtaactcatgtaatagacatttattgatgcctagaaatttctttaaaaaatggagaaaacaggattggcagaattactcaaaattctcaaatcattctggagattatc

SEQ ID NO: 192614 - DNA, 605 bp, Homo sapiens
tttaaatgttggcaactaattcatgttttagaagttttttctataggtgtgatggttaattttagatgtgatcttactgggttaagggatacccaggtgatatgatttggatttgtgtctccagcccagtgttggtggagggacctggtgggaggtgattggatcgtggcggcggacttcccccttgcgacactcattagagtgtgttccttctcacgagatctggttattttaaagtatgtagcacctcccccttctctctcttactcctgctctggccatgtaaggtgcatttgatttgccttctgccatgattgaaagttttctgagacctccagccatgcttcctgtacagcctgcagaactgtgaatcaattaaacctctttctttataaattacccwgtttcaggtacttctttatagcagtgtaagaatggactaatataccaggtcgctggtaaagcattatttcggtgtctgtgagggtgtttctggaggagactggcatttgaatgagtggactgagtaaggaagagccaacctcactccatgtgagtgggcaccatttaatccttcaaggcctagaatagaacaaaaaggcaga

SEQ ID NO: 192615 - DNA, 605 bp, Homo sapiens
gctttaaagaaaacatgtgcccttagaggacactatcacacaaagrttccttttaggggacattatcccacaaaggctccctggatgtcaaagttcttccagagactgagaattcaaaggtcatcaactgagagagatattcctatcaccctccttgatgatcactagcaaagggctttgtgttcattccattcccttgccaacatttggttcccaagcttgtcctcttgtatccgtctacccatgtcctggaatgcagccagcccaccgacactgacaggatggatgctagctgcagcgagactgcttgtctgctgtatacagagaggatgacagcaggacatcagaacagctgttggaagggagaggaagtgggcagctgcaagcagggtggtcagaagaaatgcctcaaagatgccctgagagcaacacatcacaaagcaccacatctttaaacagccaaccaggcagaacagcctgttgggaaatgaccagaaacaggattcctttctaaacggaagtctgggtcaggaagtgagtcaaagaagcagagcagccaaaggaggttaggactattgtatgctgagagcagttccagtaaccaa

SEQ ID NO: 192616 - DNA, 478 bp, Homo sapiens
cacgataggccatctgcaagctgaggaacaaggaagccactagtagctcagtccaggtcccaaaacctcaaaagtagggaaactgacagtgcagccttcattctgtggtggaaagcgctcaaggccctggcaaaccactggtgtgagtccaagagtccaaaaaccaaagaagctaaagtcagatgttcaagggcaggaagcatccggcacaggagagaaaggtgaaggccagaagactcagcaagttgactcattccaccttcttcygcctgctttttctagccatgctagcagctgattggatggtacccacccacactgagggtgtgtctgcctctccctgtccattgactgaaatgttaatctcctctggcaacaccctcccagacacactcaggaacaatactttgcatcttttaattcaatcaagtagacccttaatattaaccatcacaattggtgttagcaattgtagggg

SEQ ID NO: 192617 - DNA, 220 bp, Homo sapiens
atttgacagagggcactggtcaaactgttctcctccttgtatttgtcctccagtcctgctccaggtatactgtttggtaactcccctttctacccatctstgtgcttgactccatatattaaactggaaatgtcattctacgtactgataagattatgtaaaggaaacagagtgaatttttagaaagggaattattatttccttgaaaggtaaagctgta

SEQ ID NO: 192618 - DNA, 220 bp, Homo sapiens
atttgacagagggcactggtcaaactgttctcctccttgtatttgtcctccagtcctgctccaggtatactgtttggtaactcccctttctacccatctgtgtgcttgactccatmtattaaactggaaatgtcattctacgtactgataagattatgtaaaggaaacagagtgaatttttagaaagggaattattatttccttgaaaggtaaagctgta

SEQ ID NO: 192619 - DNA, 564 bp, Homo sapiens
tggagtcaaggattatgtcatttggtcttgtaaattattggcccaggagtatcttgtagatgtccaacaggcagtaaaggaaaacatgacagagcttctgagaaccagctcccagggagaaaagcaaggaacagccagaggaatcacgaggtggagagcaaatgagaagtggcaggagagtgtttacgatggaccaaagttcacccaggagcctctgcagcagagcatcagctagtacacagagcagagggaaaagcaagcccaggcttaagaaaatttctgattaagtcttttgatcctttacaaaaagaaaaacatttccttcttcatgaaaatatgtttycacctggaagagcagcttcaccagagacaatttctaatgtgagctactggcatgtattctattctagctacacagcaccagcattcaagtcccactcaaatccaattctggtcttagaacaaagaaactggagcttttctcttcctagctatattcaatgcaaagcaaatcatactctttaagtagaaatggcttgtgtttctgaagaacacacaagtgtt

SEQ ID NO: 192620 - DNA, 593 bp, Homo sapiens
cttctgggtagacccaaactaacataaagaatttggtcgaaatgtgtatattattaaggtaatgctagctgctgtaaaaataacttctcagttcaacaacatgtacatcattcagacagaaaattagtaagaaatgcaggacttgaattgcatttttggccaaatggacccaatagacatgtacagaattttccatccaacagcagcagaatgtaaagtttttctagagtatacatagaacattctccaggatagaccatatgttagrccacaaaatttaagattgaaattatgtctagtatcatttcagatataacttcaaaccacagtggtataaactagacatcagtgacaggaggaatcttgaaaaattcacaaatatctggaacataaacaacatgccccagaacaaccaatgggtcaaagaagaaattaaaagataaatttaaaaaatgccttgagacaaatgacaacggaaacacaatataccagaactgatgggatataggagaagcagttctgagaggaaagtttatagcaatatatgcctacattagaaaagaagaaagatctcaaatgaatagtgtgacatt

SEQ ID NO: 192621 - DNA, 537 bp, Homo sapiens
aatgattttctaatgacatacccctatcaagtaccagaggcaggatttgaactcacgmattctggctccagggcctcttctcatgaccaacatgcaaggctgcccaagccagtataagctgcctctgccagcaaatgtttgggtttggtccagataccaagtagatggcaaatagcactggtggctatggggaaaatagtaaattgtacagtatgaaagttcccaaaattaaaaatggagacttgtactttgttgctgacaaaatgccaaagattgctttctagacttgactggctgtcagatttggtgtctcgtttgattctaatattggtggtgcctttaattttggtaagcatgagattgggaaatatggaccagattggcatggtggataggtagcttcaaggcggagtggtgcaaggtgggattctggctctccttgaagggctttcatatcctgcacttactctatcatctctatggaaccacttagcggccaccatatctagtcttggtttgcttcttttcttctacttc

SEQ ID NO: 192622 - DNA, 575 bp, Homo sapiens
ctttcttaaaataaatcccttgggacaagacatagcatcccacacatgggacatccagacctgagagtagttgagtgagaacattacattccctgatctaaaggggacagctctcttaatgtggccttaaggaggtgtcgccttctgtaagaatcacactgcactggtggctcacaatgttgtggaggaaataataccaagcaagtgttcccatgtgcacttgaacaattatttttaactaaaatgtagcaatttacagttatttctatttaatgtcatcttgctactataacaactcacataaatcctttaaaatgtttactaataggtcacacatatataaaaaacatagrcagtttttaaaaacaattatgaagaaagaatatccttgggaccactgtccaggttgggagataaaacactgccaggacctcagaagcccccagtgagccccttctctatcatacccactccttcacctctggaggtagctgttatactgctttttgtgacaatcatattaaatcatattaattttctttatagttttaccatctatgtatgtatccctaaat

SEQ ID NO: 192623 - DNA, 655 bp, Homo sapiens
tctcatatgccctgtggttaatcttgttgttaattaataaaaactaaattagaaaagatttgaggatgtgtgtcttaatcttaataaactttataataaatgagtatgggcattagcaaggattttaagctgtaaaattgtaagcatgaaatcagtctcttgacagaaaagaaaactaagactctattagataatgaaatatgagagggtcttctagcaattgaaattgtcccctgggttcttcagatgtcaagaagcaacatacttgggactgttttaaaagtcccttttttttagtctatctgtgaaaatcttgctggatttgtgaacctctgaacattactgcctggagtggagaacaattagattcattaatttgtttcccttctgacttcatttaaaacatcctcagtaataaagcttactaacaattgtgggcttgactttagtacttattagcaaattatactttaaactgaatattgagttatcatcatggaatgtgaataaaaagagagcatttcaaagctgaaaagaaaygattgggggcacatgctttcaaagtcatcagattttataaaattagaattgtttagaagatagaaaacccagtggcataactgtttcttgcattatatttttctatgttaaaaat

SEQ ID NO: 192624 - DNA, 484 bp, Homo sapiens
tattcaggtttttatgctatgttctaagcagggtttggcctggttagtacaggctgttctgtggtgctgtttggatccagtgttctttggagtttggagaagtttcgcttttaaaaataaaactgtcatggaaactgctttacccaaaattttggttcatagactcaattggattatctattggggtaatgaggtaaacgaggtttagctttgagaacatgttcataggctggggagcttgtactgctgtcacgtggctagagttccaaggtaaaagctattgtttatgagtttatatacatgtttagatgtgtttatatgcaggtacatttattatatgttatgcctacaaaattggcttataartaaaagagcactggtaaattaagtaaataagttaaagcaattttcaatttcatgtgacttaagtacatctttaataaacaagctagcttcaaaattataggtaagataaaaatagaaa

SEQ ID NO: 192625 - DNA, 484 bp, Homo sapiens
tattcaggtttttatgctatgttctaagcagggtttggcctggttagtacaggctgttctgtggtgctgtttggatccagtgttctttggagtttggagaagtttcgcttttaaaaataaaactgtcatggaaactgctttacccaaaattttggttcatagactcaattggattatctattggggtaatgaggtaaacgaggtttagctttgagaacatgttcataggctggggagcttgtactgctgtcacgtggctagagttccaaggtaaaagctattgtttatgagtttatatacatgtttagatgtgtttatatgcaggtacatttattatatgttatgcctacaaaattggcttataaataaaagagcactggtaaattaagtaaataagttaaagcaattttcaatttcrtgtgacttaagtacatctttaataaacaagctagcttcaaaattataggtaagataaaaatagaaa

SEQ ID NO: 192626 - DNA, 584 bp, Homo sapiens
gggtgtatgtatctgtatatacctagaccaaatgtgttcctaacagaaatctaaactctcaaatatatatatatatatttttcttttaccataaatatattaccatatattttccagataaatgactagataattttaacacagtagattaatgtccaaataaagaattaggtaaaattcgaagcaacaattcacaaccagggctcaaatagcacctcaggaaaactttttctacctctggcatttgtaactttttgaaatgttgacactttgtcattaacctttggggcacatttttctttgcatttgtgttccaaaagtgtttccattgttctccagcccttccatttgtatgccgacttacgcttcatatctcattgtttatattattttgcattattcaatttgttaattatagttttaaaaactaaaaaaatcaaaagttgagatattgaaagtaataatatctaaatgtgtagcattcgctcattgcaatgaaataaatgaarttgagtatgaatcatactttctagttcatttttattttgaataagcaataaactatgtgcttgtgttagtcagcc

SEQ ID NO: 192627 - DNA, 584 bp, Homo sapiens
gggtgtatgtatctgtatatacctagaccaaatgtgttcctaacagaaatctaaactctcaaatatatatatatatatttttcttttaccataaatatattaccatatattttccagataaatgactagataattttaacacagtagattaatgtccaaataaagaattaggtaaaattcgaagcaacaattcacaaccagggctcaaatagcacctcaggaaaactttttctacctctggcatttgtaactttttgaaatgttgacactttgtcattaacctttggggcacatttttctttgcatttgtgttccaaaagtgtttccattgttctccagcccttccatttgtatgccgacttacgcttcatatctcattgtttatattattttgcattattcaatttgttaattatagttttaaaaactaaaaaaatcaaaagttgagatattgaaagtaataatatctaaatgtgtagcattcgctcattgcaatgaaataaatgaaattgagtatraatcatactttctagttcatttttattttgaataagcaataaactatgtgcttgtgttagtcagcc

SEQ ID NO: 192628 - DNA, 414 bp, Homo sapiens
tctgtacctcttttagaactatttcgattattttttctttaagcaagatatgatattttatgcctgtaataaaattgattaatttcattaaaatttttgtatttatgggtctacttttgtttgtggaattgcattattwttgtttcaaaatctgttatttctgtaatgataccacttcttgcattctggacatggataacttgtgttttctttcttttatttgattagtttgatagagctttatccattttgttgatcttttcagagaaagtgcctttggttttattgatttttcttaatagattttctgctttcaattttagaatttatgcttatttactcacgatttttattatcttcttgctttatatttaaatcactgttttctcactttttcagtgtaagcttaggtta

SEQ ID NO: 192629 - DNA, 480 bp, Homo sapiens
gcctttggttttattgatttttcttaatagattttctgctttcaattttagaatttatgcttatttactcacgatttttattatcttcttgctttatatttaaatcactgttttctcactttttcagtgtaagcttaggttataagtgtgttgtttaatgtcttatttgggaatttttcaagattttttatcttttttttccgatttaaccagattatggtcaaaggacaaacattaattgatttcmgttttttaacattcctgaaagttgttttatggcctgtataacatgatcaaccttggtaaatgtaaatgtttcacataaatttgaaagtatttgtatttaattggtcagatgttttaaaatgccaaagagttaaaagctagttgctactattattcaggtctgtaatatcttgattgctttatgtctacttttctatcaattgccgagagaggggtgctgaagttttaattatg

SEQ ID NO: 192630 - DNA, 583 bp, Homo sapiens
gagcaatgttttggcatatactaatcccttcacaataatggttcagaaagttttcttagggtaggtcctagaggtatttgaagaaaataacatgcccaagttgaggaaaataagattttgaattatgttaaattttgctactagcatcattcatcattaaaaatttatagcatggtatctaaagagacacctacaaaaatcatccatggactcaaagtcataatgatataatgatttctgatatagtttggctgtgtcctcacccaaatctctgcttgaattgtagttcctataattcccacacatcatgggagggacccagtgggaggtaattgaatcatgggagtggttacccccatgctgttcttgtgacagtgatttctcatgagatctgatggttttataaggggcttctccccctttgttcgacactcattctctctctcctgccaccctgtgaagagatgccttctgccatgattataagtttcctgaggcccctccacccatgtggagctgtgagtcaattaaacctcttttctttataagytacccagtctcaggtatgtccttatatcagtgt

SEQ ID NO: 192631 - DNA, 262 bp, Homo sapiens
gacttgcatgggccctgtggctcctttgttttggtaaatttctccaattaataatgggtgtatttacycaatgcctatgcacccactgtatctaggaaataactaactaacttactttttgattttataggataataggtggaaggaactgtcttgtctcagatgagaatttggacttggacttttgggttaatgctggaatgagctaagactttggggaaactgttgtaaaggcattattgtgttctggaatgtgaggaca

SEQ ID NO: 192632 - DNA, 552 bp, Homo sapiens
gggtggagcctaccacagctcggcaaagctgctctagcccaactgcctctctggattcctcctctctgggcagggcatctctgaaagaaaggccgcagccccagtcaggctcttatagataaaactcccatctccctgggacagagcagctgggagaaggggcaactgtgggtgcaacttcagcagacttaaacattcatgcctggtgtctctgaagacagcagaagatctccaagcacagtgctcaagccctgctaagggacagactgcctcctcaagtgggtccctgactgctgtgtctcctgactgggagacacctcctagcaggggtcgacagactcctcatacggaagagctccagctgkctcctcatacagaagagaaaggaacaggcagcaatctttgctgttctgcagcttctgctggtgatacccaggcaaacaagttctggagtggacctccagcaaactccagcagacctgcagcagaggggcctgactgttagaaggaaaactaacaaacagaaaggaatagcatcaacatcaacaaaaa

SEQ ID NO: 192633 - DNA, 473 bp, Homo sapiens
gaattcatgctttcacattttatttgagttttcaatctgcttcctttgcacaggttctctgggctttctccaagttagactgcaaaatggaaatgaacaaaaagaaatattatgtttctaagatgcatgtaaaaagagttgacagtggtttacaacagctattgagtccacatcaggttgtagggatggctgagattggaagggatataaaatcaatgcaaaaaatacaacgagttatcagccaattcttctgtattcgttatctattgctgcataacaaattaccccaaattcagtggcttaacacaacactaatttattatctccatgtttgtatgagttaggaacctgggcatggcttatttggattctctkattcatattctttcagaagtctgtaatgaatcaatgtgtcagctcagggtctacagtcccagctgaaggctcagctgtagaaacatagagttccaaat

SEQ ID NO: 192634 - DNA, 507 bp, Homo sapiens
attgaacagttttagtccaacacatagagacctttatgttgacaagttgagaagagggaagtttgtactaagaaggtatagtgttatggcacaagtttatcattactgttaaaaaatcaaatgcctttcttaaggattcggcattcagacaattacaagtcacaaaattcagaaactcgtttttgtgggtcttcatgaatgaaaaggaatactttattaaaacctgagcaggggctgtgtcggtactcacaatctgatgctctaacatgtttgctgaaatcatcatgttatgtattatcagtttcmacatgcagaaagggaaacactttgtacataacatgcatgcttgtattgttaatttgcattttgtctttttccacagccgctctacagtaaggtaaataagtcatttagtcaggaactctgcacatttacctctgcatttatcaaatatttgttgaaggaaataataaaagaagtgaggaggaagaagaggtttcctgggta

SEQ ID NO: 192635 - DNA, 602 bp, Homo sapiens
ggtcatttatctttttcaaagccaatataaaaattttatttcatctacagtttctaacatgtccacaacgtaataacttacacataagtagacagaaaataaggggcttacaaaatttaagtatgatttctgaaaatacagtaaaaaccagttttgaaatttcttcttctgattccacactaggtataatttaaattagactataagataggggagtgtaaaggatttttttaaacttgttcctttttgtaaaagcaattttaaactaatatttgcctacctcytagctcaacagccatgatatagaaatgtttttatttctgtttgtctaacctatttccccaataattctaaaagtggacccttcttccagtttactaaacattgggaaatgttcagtacataaattttatcataggcataagaaatattatctccagaaaaaattctgatataaaactccagacatttgaaaaaaggaattaatgtttcactaatggttttggtatcaataataataaaagttttgctaataggacacatgggcaattagcacttagatgtggcttataaaatattaatgctgtcaggcatgcattaaa

SEQ ID NO: 192636 - DNA, 602 bp, Homo sapiens
ggtcatttatctttttcaaagccaatataaaaattttatttcatctacagtttctaacatgtccacaacgtaataacttacacataagtagacagaaaataaggggcttacaaaatttaagtatgatttctgaaaatacagtaaaaaccagttttgaaatttcttcttctgattccacactaggtataatttaaattagactataagataggggagtgtaaaggatttttttaaacttgttcctttttgtaaaagcaattttaaactaatatttgcctacctcttagctcaacagccatgatakagaaatgtttttatttctgtttgtctaacctatttccccaataattctaaaagtggacccttcttccagtttactaaacattgggaaatgttcagtacataaattttatcataggcataagaaatattatctccagaaaaaattctgatataaaactccagacatttgaaaaaaggaattaatgtttcactaatggttttggtatcaataataataaaagttttgctaataggacacatgggcaattagcacttagatgtggcttataaaatattaatgctgtcaggcatgcattaaa

SEQ ID NO: 192637 - DNA, 602 bp, Homo sapiens
ggtcatttatctttttcaaagccaatataaaaattttatttcatctacagtttctaacatgtccacaacgtaataacttacacataagtagacagaaaataaggggcttacaaaatttaagtatgatttctgaaaatacagtaaaaaccagttttgaaatttcttcttctgattccacactaggtataatttaaattagactataagataggggagtgtaaaggatttttttaaacttgttcctttttgtaaaagcaattttaaactaatatttgcctacctcttagctcaacagccatgatatagaaatgtttttatttctgtttgtctaacctatttccccaataattctaaaagtggacccttcttccagtttactaaacattgggaaatgttcagtacataaattttatcataggcataagaaatattatctccagaaaaaattctgatataaaactcyagacatttgaaaaaaggaattaatgtttcactaatggttttggtatcaataataataaaagttttgctaataggacacatgggcaattagcacttagatgtggcttataaaatattaatgctgtcaggcatgcattaaa

SEQ ID NO: 192638 - DNA, 522 bp, Homo sapiens
ctcacatggccccctccttggcgagtgtattaggctgtacttgtatttctgaaatacaaataaatacctgagactgggcaatttataaagaaaagagggttaactggctcacagttctgcaggctgtacaggaagcatgatgctggcatctgcttggcttctggagagctctcaggaagcttccaattgtggaggaaggtgaagcggaagcaggcatctcacatggccagaacaggagcaagagcgtgacgagggaggggctacacacttttaaatgaccagatcttgcaagaactcactcactatggtgaggatcgtactaaggggggtgctgctgaaatgttcatgagaaatctgctggcatgatccagtgccctccccccaggccccacctccaacaatggggattccatttcaaccagagatttgggcagggacacacatccgaaccatgttaggragcgacccacacagagaggacagggaaagctggctgctgggcctattcaggagtatatctgt

SEQ ID NO: 192639 - DNA, 423 bp, Homo sapiens
ggcacctcgtcttcgccgcttccctgcttgcagcaggcccagctctctggttagtctaggatgtggttgacgatggattgagaaagctgctgtggagaggcagtgagcatcatggagatctgggtgccactggagcctctgtcttgctaggctgactttctggtctcttgcctgcacagggctcaaggraagtgtggggtgggggtaggaacgtgcagataggacacctctccctggtggtggcgccaggaggaggtcctgacacatcagaggcagagcccagtacagtcccctgcctcataaatccagtgataaaatctgaccatatgttggcagggtgaggggttctagagggcatttttttttttaaattgaagcttaggttagaatcaagtttaattagaacactgaaagtttgaattc

SEQ ID NO: 192640 - DNA, 424 bp, Homo sapiens
cggcacctcgtcttcgccgcttccctgcttgcagcaggcccagctctctggttagtctaggatgtggttgacgatggattgagaaagctgctgtggagaggcagtgagcatcatggagatctgggtgccactggagcctctgtcttgctaggctgactttctggtctcttgcctgcacagggctcaagggaagtgtggggtgggggtaggaacgtgcagataggacacctctccctggtggtggcrccaggaggaggtcctgacacatcagaggcagagcccagtacagtcccctgcctcataaatccagtgataaaatctgaccatatgttggcagggtgaggggttctagagggcatttttttttttaaattgaagcttaggttagaatcaagtttaattagaacactgaaagtttgaattc

SEQ ID NO: 192641 - DNA, 607 bp, Homo sapiens
taaacatcttgccaccagctacctagtcatgcccctcaatgttgaagataatgaaaatgctgggacttttcccaaatgcataggaaggtgggaaatccaggtcagacccagactcccaagttcttttaacagtgctgtctacaccaaggctagcatcctggctgtgaaatccacagtcccccattaaacggctcagggatacccagratgagggtcagccaaccgagatacaatttaaggagagccaaaaatctccatcatcaagataaataatattttcatgccacatttgttttcttaactattatggatacataatagttgtacatatttacagagtacgtgtgatattttactattaatagaagcatacgatgtgtgatgatctaatcagggcaattgtggtatccatccctcaagcacttatcatttctttgtgttaggaacattccaatttttgaaattggaattttagtttctttttagtttttattgaaatattctttttttgaaatatacaatatctgagttatttttgagtttttgaaatataccataaattatcagttactatagtctccctattgtgctagtaaacactagatct

SEQ ID NO: 192642 - DNA, 462 bp, Homo sapiens
gctgaggtcaaggtgtcggcaggctggttccttctggaggcttggggagaatcgatttccttgccttcttcagtgtctagtggctgcctgtgttcctgggcttgtggccccttcctccatctacaaagcaacccactctcaagctttacttctgccttttcctttgactctgaatctccccygcacccctttgataagaaccattttgattacattgggctcactcagataatccaggaaaaatcgtcccctcttaaaacccttaacttaatcacatctgcaaaatccttttcgctgtgtaagatagcatttgcaggttctgaggatcagatgtgaacttatttgggagctgctatgcaccctaaagcaacatctatggaatttattgacttcatctgagggtaagaggatagacattttctcctttgatttgacctgtggttttaagttgatgtatggcca

SEQ ID NO: 192643 - DNA, 462 bp, Homo sapiens
gctgaggtcaaggtgtcggcaggctggttccttctggaggcttggggagaatcgatttccttgccttcttcagtgtctagtggctgcctgtgttcctgggcttgtggccccttcctccatctacaaagcaacccactctcaagctttacttctgccttttcctttgactctgaatctcccccgcacccctttgataagaaccattttgattacattgggctcactcagataatccaggaaaaatcgtcccstcttaaaacccttaacttaatcacatctgcaaaatccttttcgctgtgtaagatagcatttgcaggttctgaggatcagatgtgaacttatttgggagctgctatgcaccctaaagcaacatctatggaatttattgacttcatctgagggtaagaggatagacattttctcctttgatttgacctgtggttttaagttgatgtatggcca

SEQ ID NO: 192644 - DNA, 529 bp, Homo sapiens
catcagaaaaaacgggtgaattctggatacttgggaatgtagatcctaaagaaggataaaggcacagggaaggtttttctatgaatattggttacatggaaaacttgagactgcatcacctctcagtttgtgctgaaattctactaagacatcttcaaggaatgaagttagttgtggaatttcataattttgtaatgttttatttacaagatattattcggaaatacttacaaaacaatattttataaacaatgaatcagtttaggagcagagtagytatgcttgtgatttgagacccacttactggactgggtaccttgtcttcattcgtcaatgtgaaccctctctgtctccttttctccattcacaaaatcaggatattgacataataactaacatttgttgggaagtcactacatgccttggagtcacccttgactcctgtctcacacataccacatccaatctgtcaggaagtcactttgatctgtcttcaaaataactcctgaagcctcatggctaccacctc

SEQ ID NO: 192645 - DNA, 407 bp, Homo sapiens
aaattctcaattttgatatatatatgtatatatgcatatacatatccacacttgtctgcaagaatattgattaaaattgctaaatttgtacttgttcaccagataaatgtgtgtgggaatttttgggcaaaagtattgtgtattaacatcttttagaagtatccagggatacatactatgcayactctagcaacagtggaaggtatgcattctttttgtgggtgctgcggggctctgaaatgatgaggaggatgagataccatcagtatcagtactagaactggccacaccattgaccactgcacaccaagtgctttccacctgaggcgacgatctttccacatccacggggaaaatatatttgttgccgccatggaggcatatccagtatgttccagatggataaa

SEQ ID NO: 192646 - DNA, 395 bp, Homo sapiens
aatggaatctcgccagaagtaaacaaacaaacaaacaaaaatggccattcgatctcacagtccagggacacattgtaagtaactaatggaaagcagtgtcccatcatttctcaagaaacgaataatttcccacaactgaaatttgtatatgccttcaatgtatttcttaaagttctgagatttttttttaatgcccagatttcttgatttgctgcactcttgaaactaaactcggcccaagtttrtcattaagaaaaagttttattctgcagtaaacacaatgacagctctcccctgtgctaagcttctcacgcgcgcatcttcattgagtctcaacaaagccccgcgcagaagctactgttgttgtcttcacttcacagacaaggaaacgggcc

SEQ ID NO: 192647 - DNA, 606 bp, Homo sapiens
ccaaaagctattcccagcttctttctcccttgccttctactacagaggccggaatactaaacattcagtcatgacttttcagcttcccttgcagctaggatggccatatgatcaactctagccaatgacagacatagggaggttcgtcctgccatttctcagaaagcattttaaaggggttaggtttggctgttatgggctggtggccttttgtaccttcctccttttttaccccttgggatgtcaacatgatacctggtgatgcagctgccaacttaaaacatggagtgacaatcttgagaatgatgacagcaaagcggaaaatggaacaaggctatgtgtccataaccttgttaaaccatgggacagtcccggactctctgctcccaagtttactggtgaatgagataaacaattctcttacttgyttatccactgttaatcagatatcatgtgagtctgcagcccaacccactgctacctaacatcacttctggatttgtaaaatcaaatcatcttcctgatttttaaatgagagctgctttggtttaattttcattactttctgtttgttatttttaagggatcccctctgggaatttaatt

SEQ ID NO: 192648 - DNA, 428 bp, Homo sapiens
ccaaatggacctaacagacatttatagaacatttcactcaacagatacagaatacaaatttttcttatcagcacatggaacattctccaagacagattgtatgttagaacaaaaaacaagtctcaaaaattttctttaaatagaaatcatatyaagtatgttctcagaccacagtggaaccaaactacaaattaataacatgaggaactttggaaactgaacaaataaatgaaaattaaacaacatgtacctgaacgatcatatcaagataaaaattaaaaaggaaataaaatttcttgcaacaaaattaaaataaaacacaacatatcaaaacctgtgggatacagcaaaagcagtcctaacagtttatatcaatatatgcctacatcgaaaaagtagaatgacttcaaataaatgatctaacaatg

SEQ ID NO: 192649 - DNA, 428 bp, Homo sapiens
ccaaatggacctaacagacatttatagaacatttcactcaacagatacagaatacaaatttttcttatcagcacatggaacattctccaagacagattgtatgttagaacaaaaaacaagtctcaaaaattttctttaaatagaaatcatatcaagtatgttctcagaccacagtggaaccaaactacaaattaataacatgaggaactttggaaactgaacaaataaatgaaaattaaacaacatgtacctgaaygatcatatcaagataaaaattaaaaaggaaataaaatttcttgcaacaaaattaaaataaaacacaacatatcaaaacctgtgggatacagcaaaagcagtcctaacagtttatatcaatatatgcctacatcgaaaaagtagaatgacttcaaataaatgatctaacaatg

SEQ ID NO: 192650 - DNA, 428 bp, Homo sapiens
ccaaatggacctaacagacatttatagaacatttcactcaacagatacagaatacaaatttttcttatcagcacatggaacattctccaagacagattgtatgttagaacaaaaaacaagtctcaaaaattttctttaaatagaaatcatatcaagtatgttctcagaccacagtggaaccaaactacaaattaataacatgaggaactttggaaactgaacaaataaatgaaaattaaacaacatgtacctgaacgatcayatcaagataaaaattaaaaaggaaataaaatttcttgcaacaaaattaaaataaaacacaacatatcaaaacctgtgggatacagcaaaagcagtcctaacagtttatatcaatatatgcctacatcgaaaaagtagaatgacttcaaataaatgatctaacaatg

SEQ ID NO: 192651 - DNA, 501 bp, Homo sapiens
gaaggatagagaaaattatgtctaaaatgtactagatgctgtcccacttttctggggatgttaaactaaacacagctattcccagctgactcaggtcccaatcaccaatcgccgagtataaaagcacaatgctgtctcaaagcttgctgaacgctgtggggctgcttgagaagtatttgctcagacagtaagaagatgcagcagcacccttacacttgttgtttctgtctgtctctgcctcacatggagatgtttctcatcagctccagtctrctctggtccagcattgaccgctcggcaaagtgcttgggctttctgaccgctactcgcaggtcagacacttatttctctcattccttcatttatttattaaatatttatggagttcctgctatatacaagggaacgttgagttttacatctactctcagggtgctaggtttgattaaaacagtcaatcttagtggaaaactgagtttgatatggggcattgttctatgt

SEQ ID NO: 192652 - DNA, 530 bp, Homo sapiens
agaggccacagcatgcccctggtcttggctcatacatctgcccctgctaagaggatgctgcctgacccacaccccggctgctggggtagcgcctcctcatctctcaagacccatctttccaaactctttcttgagcgttttccattcattgcaccccctggcyccctgcacacactccagtacaattgatcatcctttctatccaactcccactgcatcttatacatcctcatctcctcacaagggacaccccattgcacttacaggtgtacgtgtagattccactttgtccaccagggtttctcaagctctgcactgttgacatttggggccggatgactctttgctgcagcatcctgtgcattgtgaggtatttaacagcatcctggcacccagcctgctgggtgccactaggaaccctcccccagccgtgacagccaaggctgttaggcattgctacatgttctctgggaggcagaattgtccttattggaaaccactgtgctagactcaaagctcatgagggtgat

SEQ ID NO: 192653 - DNA, 648 bp, Homo sapiens
acataactgatttccagaggttgttattttaaatcaatgcccagcacaaccatattgaattagacctagctgatttacaatcataaatgtgttgaactggaagagtatgcaaagaatctcttgtctagcagttttccaaaatagttcctcaaattgcagatattccaaagacttccataaaactgargtagaggctaaggggaaggatatcgcggtcaggacccaggctccaaatgtcagcttcgagcagaactgctacatttttacctatcatttatattagtatgctgaatctagatcattttggggggaaaaaaacaagcttttaaaaggttactcacactccccacccctaccatgaagctgaaatgtacggaagggtggagaattgccccagacagcataattagtgagtggcaaagtacaatggaatcttgttattctgggtctcaatacagtttgcagatttatctaaatttcagatttcaaaactctgattaatttctcaaatgcttctttgcaatactgtataaattcatgttgtgactcaactggaaaaaaattcagtaaagattcatgctgttttaatccattcttgaccaaaaaatccttgtaattaccaagctactttattttcttaagtacaaa

SEQ ID NO: 192654 - DNA, 592 bp, Homo sapiens
atgtcagcttcgagcagaactgctacatttttacctatcatttatattagtatgctgaatctagatcattttggggggaaaaaaacaagcttttaaaaggttactcacactccccacccctaccatgaagctgaaatgtacggaagggtggagaattgccccagacagcataattagtgagtggcaaagtacaatggaatcttgttattctgggtctcaatacagtttgcagatttatctaaatttcagatttcaaaactctgattaatttctcaaatgcttctttgcaatactgtataaattcatgttgtgactcaactggaaaaaaattcagtaaagattcatgctgttttaatycattcttgaccaaaaaatccttgtaattaccaagctactttattttcttaagtacaaaacctacaggcacagtcccagaggaaattctccaatttggaaaccctctgagcatttatgtaatttattccaggaatgaataagaggcttagctagcatgccagtactgattgattggtagtgactgactgagaaagatcctgaagccaccactggccacagagattatgcagcaatg

SEQ ID NO: 192655 - DNA, 648 bp, Homo sapiens
acataactgatttccagaggttgttattttaaatcaatgcccagcacaaccatattgaattagacctagctgatttacaatcataaatgtgttgaactggaagagtatgcaaagaatctcttgtctagcagttttccaaaatagttcctcaaattgcagatattccaaagacttccataaaactgaggtagaggctaaggggaaggatatcgcggtcaggacccaggctccaaatgtcagcttcgagcagaactgctacatttttacctatcatttatattagtatgctgaatctagatcattttggggggaaaaaaacaagcttttaaaaggttactcacactccccacccctaccatgaagctgaaatgtacggaagggtggagaattgccccagacagcataattagtgagtggcaaagtacaatggaatcttgttattctgggtctcaatacagtttgcagatttatctaaatttcagatttcaaaactctgattaatttctcaaatgcttctttgcaatactgtataaattcatgttgtgactcaactggaaaaaaattcagtaaagattcatgctgttttaatccattcttgaccaamaaatccttgtaattaccaagctactttattttcttaagtacaaa

SEQ ID NO: 192656 - DNA, 521 bp, Homo sapiens
gcaagggggttggggagagtaggagcaaaggcaagaagaagcagagaaaagacatgaaatgcaactccatttccaggcagcaaacctcagatatgatttgaatgctgggaaaagatttaactctaaatcaagcttgaaactgaacatgttcattaataattgaggcttcttttcctaggagtaacttaaggcttttctgttacttaagagtgactagagatgtcatgaagtctgatgcagtttttattcaaggaaagagaaagatctagctctattaaataaatgtcaaggtaaaagaaaaaagaagagagtttctctgtgattttatcccatgagtcagttttgtttaatgtagtggttgcatctgagttcctttaaaaactgcaattatactacacttgcggctgttttgtaacttctttttttcattaacagtatrttgtcaatgtctccttgtatactagatagtattctgatatatgggtgcaatgcaatttacttaattttctgtcataggagag

SEQ ID NO: 192657 - DNA, 549 bp, Homo sapiens
agatcttgattctcattgttttcacattgagtaggctcagrggaggaggaaaaaggaagggttggccttacattcttgcagaggtggaagaaattgggtgtataaatggattattgcagtccaaacccatgttgttcagagtcaactgtattctgaatttgacaatgtacttaattttaccagtaagttttatgctttcatatcttttcatgttactaattagtattgtttttctgtaagcttgaaggattccctttagcatttcttgtaaggccagtctagttgtgctgaactcccgcagtttctgtttttgacgggaagcccttatttctccttcattgctaaaggacatctttgctgtatatagttctttatggggagtttttctttcagcagtttgaatatataactccattctttcctggcctgcaaggtttctgctgagaaatctactgatagtcatataggacattcccttgtgtgtaatagattacttttctcttgatgtttttggaatccttattatgtctttgacttttgagagtttga

SEQ ID NO: 192658 - DNA, 549 bp, Homo sapiens
agatcttgattctcattgttttcacattgagtaggctcagaggaggaggaaaaaggaagggttggccttacattcttgcagaggtggaagaaattgggtgtataaatggattattgcagtccaaacccatgttgttcagagtcaactgtattctgaatttgacaatgtacttaattttaccagtaagttttatgctttcatatcttttcatgttactaattagtattgtttttctgtaagcttgaaggattccctttarcatttcttgtaaggccagtctagttgtgctgaactcccgcagtttctgtttttgacgggaagcccttatttctccttcattgctaaaggacatctttgctgtatatagttctttatggggagtttttctttcagcagtttgaatatataactccattctttcctggcctgcaaggtttctgctgagaaatctactgatagtcatataggacattcccttgtgtgtaatagattacttttctcttgatgtttttggaatccttattatgtctttgacttttgagagtttga

SEQ ID NO: 192659 - DNA, 549 bp, Homo sapiens
agatcttgattctcattgttttcacattgagtaggctcagaggaggaggaaaaaggaagggttggccttacattcttgcagaggtggaagaaattgggtgtataaatggattattgcagtccaaacccatgttgttcagagtcaactgtattctgaatttgacaatgtacttaattttaccagtaagttttatgctttcatatcttttcatgttactaattagtattgtttttctgtaagcttgaaggattccctttagcatttcttgtaaggccagtctagttgtgctgaactcccgcagtttctgtttttgacgggaagcccttatttctccttcattgctaaaggacatctttgctgtatatagttctttatggggagtttttctttcagcagtttgaatatataactccattctttcctggcctgcaaggtttctgctgagaaatctactgatagtcrtataggacattcccttgtgtgtaatagattacttttctcttgatgtttttggaatccttattatgtctttgacttttgagagtttga

SEQ ID NO: 192660 - DNA, 549 bp, Homo sapiens
agatcttgattctcattgttttcacattgagtaggctcagaggaggaggaaaaaggaagggttggccttacattcttgcagaggtggaagaaattgggtgtataaatggattattgcagtccaaacccatgttgttcagagtcaactgtattctgaatttgacaatgtacttaattttaccagtaagttttatgctttcatatcttttcatgttactaattagtattgtttttctgtaagcttgaaggattccctttagcatttcttgtaaggccagtctagttgtgctgaactcccgcagtttctgtttttgacgggaagcccttatttctccttcattgctaaaggacatctttgctgtatatagttctttatggggagtttttctttcagcagtttgaatatataactccattctttcctggcctgcaaggtttctgctgagaaatctactgatagtcatataggacattcccttgtgtgtaatagattacttttctcttgatgtttttggaatccttattwtgtctttgacttttgagagtttga

SEQ ID NO: 192661 - DNA, 376 bp, Homo sapiens
attacaatgtgtcttagtgaagatctcttcatatttaatccacctggggttctttgggctaccttgatctaattgttcattttcctttcctgatttaaaaacttttatgtcattatttctttaaataaactatctgtatgtttatttttctctgtcctttctgggacaccaataacatagatatagatatagatatagatatagatatagatatagatatagatagagtcagttgatggtgtttcataattaccatagattttttgaaactttttacttcttttttgttttttgttcctttgactgaatcacttcaaatgacytgacatcaaactcactgatcccttcttctgcttattcaagtcagctgctgaaa

SEQ ID NO: 192662 - DNA, 557 bp, Homo sapiens
tcagcttggctctgggctaagcttgaaatctgggtctgtggtgttgggcctgaatcctgaagtggattacaccctagatgctgtgtcctcatgtactagcatggtacctgaggccatagatgctagcttgacactggggtgggtctgtggactgcatctgtggggctggcctggcattggggcagacctggaggctattcctcaggtattagctttgagcctaaggccatggaggcctgtgcctgcctggtgttggttattactggggtggcctcagtgttgaggtcctaggcaaagtctggtgctcacttcactctttttcccatatgtagagaggatctttgtgctgtgttgcctggagataggggagaagtartgtaggtaatgtaaaactgtctttcttaccattttcaatatgccttttcttatttatgtttaacatctatatgctgtcatctctcaccttgtttccttagctcttgtggaggtatttttaagtgtggatagttgttcaaattaatgtttctgcaagggacaaatactggaaagtcctattc

SEQ ID NO: 192663 - DNA, 447 bp, Homo sapiens
aatactgccctaagactttcgccattgaggatgctagattgaggcacttctctttatcagtttaccatgacactaatgtattttgcctgttttgcctgggcagtgatgaatctgttggcaagagaaaacaaataagttttgttgctgagagacatgttgtccrtgatttgtctcagcagacatgccaacttgctggccaattcatttcctatttaatttaagtggcagatctgtcttcccctttcaggtatgtcttttatctactgcacaaccacactggcagtgctctgagacagtctgcagtggatctctgcaaggatattgacacagcggagccaagaaccaaatctactataattttcagaagaatctctttgaaatagagagctactatctaagccagtgtctgacatgaaagctcttttggagaatattttaacagcattt

SEQ ID NO: 192664 - DNA, 447 bp, Homo sapiens
aatactgccctaagactttcgccattgaggatgctagattgaggcacttctctttatcagtttaccatgacactaatgtattttgcctgttttgcctgggcagtgatgaatctgttggcaagagaaaacaaataagttttgttgctgagagacatgttgtccatgatttgtctcagcagacatgccaacttgctggccaattcatttcctatttaatttaagtggcagatctgtcttcccctttcaggtatgtcttttatctactgcacaaccacactggcagtgctctgagacagtctgcagtggatctctgcaaggatattgacacagcggagccargaaccaaatctactataattttcagaagaatctctttgaaatagagagctactatctaagccagtgtctgacatgaaagctcttttggagaatattttaacagcattt

SEQ ID NO: 192665 - DNA, 568 bp, Homo sapiens
aggaatcaaaactacattatagattgaaatttccattacacaagtaagaggtgtccatagatgtgataagttgtcctasaaagagtagtagaaacaaagaaataagatttttctcactttttcttctgggcagttacctactatgatcaacagtagggtcaagataaaaaggcatagaacagaaaggagaaggcagcctctgacatcaggaactggtggcctgatattaacatctgagccctgatgtgttgctatgagctggcctagtaccatcagccaagacttagttctcctgttgaatacaaagggtttcacagaacatcaatatcagacaaggccactctgtgatcatgacagaactaggcaataagaccactctgtaatcatacctgaaaacaaatcatgaacattttccaaaccataaaaatgaccaaatatctcgctatcctagctaatactagttactactgcttctttaccaagtacagttttagtctaccctgcagttaaatgagaattatggaaacacccagccatagaattgtacccacctattgacagtacccac

SEQ ID NO: 192666 - DNA, 620 bp, Homo sapiens
gaaaacagtgaatttgagcaccttctagaagaaaggacttgagaaagagaggccacaaggaaagtgaacagctaaaatgtgattatgtactatgatggtgatggctaggactacrgtaacagctacagcaatcacaaagaaagaatatttctgagaggttaaagaattgtttggcctcagtgatatgagaaaataatgttaaatttgtcaaaaaacaaatctgcattatgacatcagaataaccagaaaatttatcatattttaaaagtaaataatatattcacttaattaaggtaaaagaaattgactaaaattattagtttacaaagagtatctaaagattaatgagaacaataaagataaattaacagatattaatatttaaatgttcttctgaatctccatgtactgatatttaacttaatattatcaaaataattcttaatatttcatatgttcacattatttttccagtttcaaagtgactttacatatattgccacacttgattctcacaatgaccctgtgaaataaataatagcagagatattcagcattcctagctttatagactgtacaccaccatcacttacattattgatgttcatattttcatcaat

SEQ ID NO: 192667 - DNA, 621 bp, Homo sapiens
gggggtgggatgagatggggggagtatgtagtaggttcctgttattctgtattatatttttttaaagtaagtttaaaagtgctgtttatattgggcttactctgttgttatatcaattactctagctattagaagtcatgtcttaatgaactatagttatggatagttagagagaacttactcccactaatcatgtttctatagttctttctaataagttttcaactatacacatacctgtgtgtgagtgtatacaaatatagttgttcatcaatgccaaacagcaagtcatttcttgcctatactattacatgttgtgatgtttaattttatgtgtcagtttggctaggctgtgataaccagttgtctggtcaaacatcastctagatgttactgtgaaggtattttttagatgtgattaacatttaaataagtgggctttgagtaaaacagttgttctccataacatgggcagacttcatccaaacagctgaagacctttagagcaaaagagtttccagcttgctatcctggggaattcagaattcaaggctgcaacatcaacccataccttagtctccagcctgtcagtctgccctatggatttcagacttgccagtc

SEQ ID NO: 192668 - DNA, 525 bp, Homo sapiens
attcattgtactttagcagaaaagagacttgccccatctcactctatactaaatatcagtactaagatgtctcactcaagaatctacattgtattctgggatatatacatatttaaaaattagctatcctttctttattgataggtttcattccagatgtttttgcagaaactctgcaaaaacctggtcctgtggcattttttgtcctcttcttcttatggcttttaccttggaaattttaaaatatttttttcactcctatacttttttgtactcatttcaatgggtcttaatgagagaaggtagttaaaatgtacactycactctctgtcttgaatcatagcattggcttgcatcttaataccttcctcaacaataatttacattctggctattggaaagttttttaacttcaaggaaatagatccctaatatgatgttagacatttgtgagaaagagaatttgcattatcaaatttgcagcaaatagtattgtgtttatattctggaatgtatctgtaagtg

SEQ ID NO: 192669 - DNA, 539 bp, Homo sapiens
tccattacccaggctggagtgcaatggcgtaatctcagctcactgcaacctctgcctcctgggttcaactgattctcctgtctcagcctccagagtagctgggattagaggcatccaccaccacacctggctaatttttgtatttttagtagagaagggatttaccatgttggtcaggctggtctcaaactcctgatgtcaggtgagctgccttggcctcccaaagtgctgggattacaggtatgagccaccacgcccagccatatgtgtaactttttgaggaactgtcaaaatgttttctacagtagttgtaccattttatattttcaccagtgatgtaaaaaagtttcygtatctctacaccctcactgacatttgttattttctgtttattattattattgccatatcagtggctataatgtaatacttccttttatttgtatttttctagttattaataacgttatgcatctttttgtgtacttgttggccgttttcgtatcttttttagagaagtatctgagtcctttacctat

SEQ ID NO: 192670 - DNA, 625 bp, Homo sapiens
tatgtcattccatttattaaggaattccttattttcaataaaatttttctgttttaagtaagttttcagtgtgtaggtcttgtatttcttttgataaatttatttctaagtattttcttgttttactttctcttgtaagtggaattgtttagttaattttattttcagattgttcattgctggtgtagggctttctatgtacaaaatcttgtcatttgtgaagggagatagtattatttattgctttctgtattagtttgttctcacactgctataaagaactacctgagactgggtaatttatgaagaaaagaggtttaactgacacacggttccacaggctctacargaagcatggctgagaggcctcaggaaacttagaatcatagcagaagatgaagggaaagcaagctcgtcttaccacagtgaagcaagagagacagaaagagaagggggaggtgccacacacttttaaaccatcagatttcatgagaactcactcactattacaagaatagcaatgggaagtgcacccccaagattcaatcaccttccaccaggcccctcctctaacacgaggggattacaatttgagatgagatttgggtggggacacagagacaaa

SEQ ID NO: 192671 - DNA, 522 bp, Homo sapiens
tactgagtactaactgttcaagtttctaagatagattcccacacacaaagatgatttgtagactcagggcaggagaaatacatactccaatgtatggagtatgcatggaaaaagataattaaaatatattgtgatgtgatcaagagtactgtcatcttttcaacaaataatgctgttggaatgtttggacgttcatatgcaaaaaaccacaactttgacccaaaccttacattttacacaaaaattagttccaaatggattatagacctaaatgcagaatgttagactgtaaaatgtttagaagaaaacataggagaaaatcttcttgacttggagctaggcaaggaggtcttgtatgtagtaccaaaagcataatccataaaagaaaaatttaatatattgaacttttgccctaccaaagacactgcytagggaacaaaaatgcaaattagagattaagagaaaatatttgcaaatcacatatctgataaatgacttacatccataacatataaagaattc

SEQ ID NO: 192672 - DNA, 522 bp, Homo sapiens
tactgagtactaactgttcaagtttctaagatagattcccacacacaaagatgatttgtagactcagggcaggagaaatacatactccaatgtatggagtatgcatggaaaaagataattaaaatatattgtgatgtgatcaagagtactgtcatcttttcaacaaataatgctgttggaatgtttggacgttcatatgcaaaaaaccacaactttgacccaaaccttacattttacacaaaaattagttccaaatggattatagacctaaatgcagaatgttagactgtaaaatgtttagaagaaaacataggagaaaatcttcttgacttggagctaggcaaggaggtcttgtatgtagtaccaaaagcataatccataaaagaaaaatttaatatattgaacttttgccctaccaaagacactgccwagggaacaaaaatgcaaattagagattaagagaaaatatttgcaaatcacatatctgataaatgacttacatccataacatataaagaattc

SEQ ID NO: 192673 - DNA, 509 bp, Homo sapiens
aagcatgtacacacacactcacccctgtcacagtatagaagagtagaacagtgtctggcacttagggagcccagttgaagtgttgtcattcctaagatagtgtgtcaggaaagtgacctggacctggagtggtgtgagagtgacttcaacggtctgcaggagaaccgaattccagtttcccctctgagcttggttcagggaggcagatttttttctttgtttacaagtttgagtagtttattaatctgacaaaattacattttaataattaacataatcaataaatgtaacataaaaaattataaaaactagatatatgtaatcatatacatatagctattttgcaatacaaagttatgaaatagcaattctctgtattaagtacytaacacacactttgaacaaatgatgttttatcaatattttaagtttttaaacactattttttaatttttatggatacataataattatacacatttacggggtacacataatattttaataca

SEQ ID NO: 192674 - DNA, 622 bp, Homo sapiens
tcaattttgttggaagcagcatcctgtgctccttattaataacaagaatacctgtgcttgcatagcaatttataatttgtgatacatttttccatatattttctaacttaatcctcacaatgtgcctatgtgaagggtggttttaacctcattttttwagatgaggaaactgaggctcagggaatatattgatgtattcacaatgatttatttagcaaaaacagaagttgaacttgaaggtacaagccctttgtagaatatgagctcccgctttttgttgcagttcttttgctataaactttaatttgtttatgcaaaatctgagatattgctttaaatatctgcagctagatttggctgcagtgagcagagttttgtatgtctgctgaacattaaaatatactgaggcagtaagaagctttttttttcctagataattatcacaaggaagattttcttagtgggctctaatgctaatgctcttctgagactggggtgcctcagtactcaaatgctcacactgcatcattctccctggagatttggtgctgttaagaatgtgtttcattctcttcaggtccaatgacatgccttgtttctgtagtgaaaaataatcatcatc

SEQ ID NO: 192675 - DNA, 622 bp, Homo sapiens
tcaattttgttggaagcagcatcctgtgctccttattaataacaagaatacctgtgcttgcatagcaatttataatttgtgatacatttttccatatattttctaacttaatcctcacaatgtgcctatgtgaagggtggttttaacctcattttttaagatgaggaaactgaggctcagggaatatattgatgtattcacaatgatttatttagcaaaaacagaagttgaacttgaaggtacaagccctttgtagaatatgagctcccgctttttgttgcagttcttttgctataaactttaatttgtttatgcaaaatctgagatattgctttaaatatctgcagctagatttggctgcagtgagcagagttttgtaygtctgctgaacattaaaatatactgaggcagtaagaagctttttttttcctagataattatcacaaggaagattttcttagtgggctctaatgctaatgctcttctgagactggggtgcctcagtactcaaatgctcacactgcatcattctccctggagatttggtgctgttaagaatgtgtttcattctcttcaggtccaatgacatgccttgtttctgtagtgaaaaataatcatcatc

SEQ ID NO: 192676 - DNA, 428 bp, Homo sapiens
aactccctttttttgggtcctctgtttcctgactctgagtctgcagattttcctgatggttttaggctggatgatggcaatcacatagccactctactatggttctctcatagctactcacagagccactctgctgcaggataacttgctcatgaaaggaaatgccagattaaaccccttgccaccctggacctgggtcctccaaacatggaataggtatgtgggggaaggaatgagttcattttgagcaatttaacacatattttaatrtaattataccccattaaaaaaaaagtagcttttccccacagtggcatactcctttactgacatgaatgagtaattggaaatggggaaggcctttcactggcgatcctgtgtgctgtctcagcaagatagctgtaccagacggggctggggcagcgata

SEQ ID NO: 192677 - DNA, 447 bp, Homo sapiens
ataattttaaatttcataataaagtattargacccccctcctccccactacatattgactttattttgtttgtttctgattaaactgattttacaatagaaatatttaaaaatgtctcctaagtaataataattatagtttgttatggcaacccatgacaatgctagacatcaaataaaaatctgcctttaaaatgatatgcatatatctcccaaatacctcatttcttgtttttatgagtgtcatggagaaatacatctgtggtgaagttattcacaaatctaatagcaatgctattgtttctgatttttatagactgcttctgttgtgatattacaatgcattacaaaagtagactcatctgtttgcacaatactagccgttccttatattcttgctttacaaatggagagagagaagcaaggagttttggcatgattttaaaca

SEQ ID NO: 192678 - DNA, 447 bp, Homo sapiens
ataattttaaatttcataataaagtattaggacccccctcctccccactacatattgactttattttgtttgtttctgattaaactgattttacaatagaaatattwaaaaatgtctcctaagtaataataattatagtttgttatggcaacccatgacaatgctagacatcaaataaaaatctgcctttaaaatgatatgcatatatctcccaaatacctcatttcttgtttttatgagtgtcatggagaaatacatctgtggtgaagttattcacaaatctaatagcaatgctattgtttctgatttttatagactgcttctgttgtgatattacaatgcattacaaaagtagactcatctgtttgcacaatactagccgttccttatattcttgctttacaaatggagagagagaagcaaggagttttggcatgattttaaaca

SEQ ID NO: 192679 - DNA, 613 bp, Homo sapiens
gtgaagttattcacaaatctaatagcaatgctattgtttctgatttttatagactgcttctgttgtgatattacaatgcattacaaaagtagactcatctgtttgcacaatactagccgttccttatattcttgctttacaaatggagagagagaagcaaggagttttggcatgattttaaacaaatgtccccagtatttggaaagactgtcaaggagaagggattctctcctgacccctgggttgctattgtagcacccataccaggctttttcccgtggaagaaaatgaaatatctcacacaacatgtttacagtacaatatgtaaggtacaatggcaaaacacagttatgtcaataccatttatgaagaacaaattaaaaaaatacctccttcataaaatcaatagcaaggcagagaaaatcaasatgaatgggcaaaggagagtaggtaacccggataacaaatgagtggaatctgagcgcacacctgcttgagtgagcataggtaaacaattactggctgaatgcgtgctttcaccgagtaagttgggtcaacagagtcagataagaggaagagaggataaattgttgaggcataaaataaaaatgtt

SEQ ID NO: 192680 - DNA, 495 bp, Homo sapiens
aaacaaagcacaagagagcatgttgggaagactccaagcacttcaggattgatggacagtagagtgccagggttagagacccaagggagatgtggctggaaatgacagcaggagccatgcagagagattggcaagatcactgtggtcataatgtggcaagatttgagacagacaaaagtgttagaaggctgttgccgacagtgacggaagatatatttagaatttgactctctgcaatatttcagtaaataaaataagtgctgattcttcacttcatgccacatgatcataaattcaggactcgttctagctcccatctgtataaggtatgacttacctggtctaatctacaaattttttaatttgaacatcaktttgggaattagtgcaactaattgcagatgcttctctttaataactaaattattaacttggaaacttaaagaggcaactaagaaagttaataaaagtctggacagaaccacatagagttta

SEQ ID NO: 192681 - DNA, 569 bp, Homo sapiens
taattttctctgttttgtttgttgttgtattaacacatgaaagagccctgagtccttagatcacccctgggagggtgacttactataaaacatagaagttattttctcccactcagggtaaacatgtccttggtgtgtctaagatctgggttctcactcctgtgggacatcaggcatgtcccaggtcccatccctttggagaagagttataattagattcacattcctttgaaaggcccagcagacctggtccaggagtggtctcacagaacactggtgcagggtagataagcaatataggcagagggagccacaagggtgactcgagrtgcccacaataggtagcagttgcatgggccgggggacataaaactggttataattaaattggggaaactagcctgagtattatacaacagttcatatttgttttattatggtagctcttcacatttgaactaaattctcactatctgaacccagaagctgaaaaaattcagaaaatgaagaagtacacacccacaaggatgaagtgctttgtccacctcccataagaaggaagtggctga

SEQ ID NO: 192682 - DNA, 533 bp, Homo sapiens
tcccattttttagctactgagttgaatttaggtgggggaagtatttttgacttgaactttctacaaatttactgtatgtatgtgaacattaataggatagcagtatactaaatatgaatattgggattgaagactgcagaatgcaagacactgtggcatcttacaatagttacaaaggcattagcacaaggcagatttatttgtttatttatgtcccctataaaccacagctaractgttttttattgattttttttttaaatttgccttgacctcttttttctaaattccaaaatattaagattcttattcagcagatttgagaagtttttaaatgtaataaagtggttttgattgtagtgaggaaaaccagcccaagagcatatagctgctgtgaggatttactacctgggaaggtaaaagaaaacaaaagggtccatattcatgggggtcctttattttacatatgcatatctgtgttcatggaccagaatttgtattctccacttgtattttagaaagactgcctagtg

SEQ ID NO: 192683 - DNA, 604 bp, Homo sapiens
ccacacacttagcaaaaggaactcattttgtcaagaaagcaagtagaaaaaagaaattaaaaacgtgactgtgataaacattatatttacttcagtatttaaacatttggcctctcytatagctttaaccaaacaactgagtttccctggggtcagaggcaaatgaggctgtggtgtgaactagaagtagatgactttgtgctttcttgcatcgcaggaaacaatgaggattagtatcctcatagaagcacacaaggatgtgtacatctcagactgaattctgccttttacctggggttcaaaataatgaattaggagctttagtaagataggtaaaataaaggaaatactcatcttgccttccttctgcctgaattctaccatgtcagcagctatcgctgtaacagctatggcaactgcaacaccaacaacaccacaaaacagtgcctatttctactagaagaactgctactaccactaccagagtcctctcctggcctcttctctacaactgctcttacaatgcaataacaactaccattgctaccacatagccacaatggtaatagctacaatgacaacaataacactactactaatacta

SEQ ID NO: 192684 - DNA, 523 bp, Homo sapiens
tttaaaaactatagagtcagcatcttgcagaagatactcaactgggtawtttttttaaaaaatggaggcttttataacatccaattatatgacaagtgagttacatttaaaggcattgaaaaaattattccaaatacgaactgaacagtgttatcaactttaattagtcctcatattaagctctttccaagcccatgacggaggcgaaggagctataaatgataagcatgcatcccatctgaaacggtacttccaactcggagcagcatgtttggtaaccaggtcactggaggagggtgatgatcatgactgccactcatcagccaatccccccccatgacgattttatgtatatcatgcattactgctagccaccatgaatattacatagtactataattgcttgagcgtccatggtacataccaagccaaaccttacattaatcctctacccctgagaatccaaaattctccgtgccacctgtcgcaccctatcctaaagtaaggtcagctaaataagcta

SEQ ID NO: 192685 - DNA, 523 bp, Homo sapiens
tttaaaaactatagagtcagcatcttgcagaagatactcaactgggtaatttttttwaaaaatggaggcttttataacatccaattatatgacaagtgagttacatttaaaggcattgaaaaaattattccaaatacgaactgaacagtgttatcaactttaattagtcctcatattaagctctttccaagcccatgacggaggcgaaggagctataaatgataagcatgcatcccatctgaaacggtacttccaactcggagcagcatgtttggtaaccaggtcactggaggagggtgatgatcatgactgccactcatcagccaatccccccccatgacgattttatgtatatcatgcattactgctagccaccatgaatattacatagtactataattgcttgagcgtccatggtacataccaagccaaaccttacattaatcctctacccctgagaatccaaaattctccgtgccacctgtcgcaccctatcctaaagtaaggtcagctaaataagcta

SEQ ID NO: 192686 - DNA, 523 bp, Homo sapiens
tttaaaaactatagagtcagcatcttgcagaagatactcaactgggtaatttttttaaaaaatggaggcttttataacatccaattatatgacaagtgagttacatttaaaggcattgaaaaaattattccaaatacgaactgaacagtgttatcaactttaattagtcctcatattaagctctttccaagcccatgacggaggcgaaggagctataaatgataagcatgcatcccatctgaaacggtacttccaactcggagcagcatgtttggtaaccaggtcactggaggagggtgatgatcatgactgccactcatcagccaatccccccccatgacgattttatgtatatcatgcattactgctagccaccatgaatattacatagtactrtaattgcttgagcgtccatggtacataccaagccaaaccttacattaatcctctacccctgagaatccaaaattctccgtgccacctgtcgcaccctatcctaaagtaaggtcagctaaataagcta

SEQ ID NO: 192687 - DNA, 423 bp, Homo sapiens
ccatgccacgcaaggccacagtgggagcatcaagctttggtcaggaaacagaagcaggaatgagaaaaaaaacaagaccagagctttcattgggatttyttcaacagcaaggcaagccagggtaaatagtttagtattggctagtttgaataacaaacaggcttagaggaaaaaaaaaaaaaaaaaaaacagtttatgttaaacaagctttgttcaaacgtgagttacagggctattggccatgagtccaatgctaatgaatcaacaataatgtatgaaataaggtgctttaaacaaaaccacacataaaacaaggttttgtattgattggttgaaaatattctgaccagagcctggtaggaaacttaccctgtattaaaccctaggaggtttgattcagtattcattaatatagtatttgtg

SEQ ID NO: 192688 - DNA, 423 bp, Homo sapiens
ccatgccacgcaaggccacagtgggagcatcaagctttggtcaggaaacagaagcaggaatgagaaaaaaaacaagaccagagctttcattgggatttcttcaacagcaaggcaagccagggtaaatagtttagtattggctagtttgaataacaaacaggcttagaggaaaaaaaaaaaaaaaaaaaacagtttatgttaracaagctttgttcaaacgtgagttacagggctattggccatgagtccaatgctaatgaatcaacaataatgtatgaaataaggtgctttaaacaaaaccacacataaaacaaggttttgtattgattggttgaaaatattctgaccagagcctggtaggaaacttaccctgtattaaaccctaggaggtttgattcagtattcattaatatagtatttgtg

SEQ ID NO: 192689 - DNA, 597 bp, Homo sapiens
agtataaattagttcaaccattgtgaaagacagtgtgcgtccaaggcctagaggcagaaatatcatttgacctaggaatcctattattgggtatatactcaaaggaacataaatcattctattgtaaagatccatgcacacatatgttcattgcagcactattcacaatagtraagacacggaatcaacctagaagtccatcagtgatagattaaataaagaaatgtagtacatatataccatggaatactatgcagccatgaaaaggaatgagatcatgtcctttgcagggacatagatggagatggaagccgttatcctcagcaaactaacacagtgacagaaaatcaaacacagtatgttgtcactgataagtgggagctgaatggtgagaatatatggacacaggtagaggaacaacacacactggggcctgttagagggtggttggtgggaggaagaagagcatcaagaagaatggctaatggatgctgggcttaataccgagatgatgggatgatctatgcagctaatcaccatggtacgtgtttacctctgtagcaaacctgcctgcacaccctgcacatatacccctga

SEQ ID NO: 192690 - DNA, 597 bp, Homo sapiens
agtataaattagttcaaccattgtgaaagacagtgtgcgtccaaggcctagaggcagaaatatcatttgacctaggaatcctattattgggtatatactcaaaggaacataaatcattctattgtaaagatccatgcacacatatgttcattgcagcactattcacaatagtgaagacacggaatcaacctagaagtccatcagtgatagattaaataaagaaatgtagtacatatataccatggaatactatgcagccatgaaaaggaatgagatcatgtcctttgcagggacatagatggagatggaagccgttatcctcagcaaactaacacagygacagaaaatcaaacacagtatgttgtcactgataagtgggagctgaatggtgagaatatatggacacaggtagaggaacaacacacactggggcctgttagagggtggttggtgggaggaagaagagcatcaagaagaatggctaatggatgctgggcttaataccgagatgatgggatgatctatgcagctaatcaccatggtacgtgtttacctctgtagcaaacctgcctgcacaccctgcacatatacccctga

SEQ ID NO: 192691 - DNA, 669 bp, Homo sapiens
aagaggtgagactggaacaagttgtgaataccttatatactatcttaaggagtttaaactctactctgttgactagaaaggcaggagcaatctttaaaagagtgagagccacgatgaacttgggtatttagagacatggctcttttgttcataaaaagtatagggatggagaagcttgtttgagggaaataatgttaaatacccattggtcttgcaagtgatcattatcatcaaaattccattatctaaattaacgtattgggctaggtgcagtggttcccgtctttcgtcccagctacmtgggaggctgaggcagaaggatcactggagcctggggtttcgaggctacaatgagctatgatcatgccactgcactccaaactgagtgatggagcaagagcctatcttcagaaataaaataggaccctatcttcagaaacaatacatttccaccaaactattgtctcctttatgctagcctatatagctgtttttgaacatgggaaacactttttaaccttatgagaagaaatgtaatactaccacataattcatcaagctgcacactgataaatgtgcagttatctgtgtgtatgtatacatattacatttcaataacaagtttaaaatattagcttgaaagtgatgctaccaatatgtacacatgtg

SEQ ID NO: 192692 - DNA, 546 bp, Homo sapiens
tccatgctatatagactcagcgtgcttgctaagcaaaccctgccttaagataatttccctatctttcccttgtcccatttcagctattttttcctaattccttcctaagtgaaaatcttggagtagcccacgaattagggtattacatccatcagtgtatttcttgtaggctaaggaataatattttggaagattatatttgtattgatttttatatataaatataaaacaagatcatgagcaaaagccaactgtagttctcttggtagaacggctytctatttatgtgtagttagaaaaggcatttgcaggaagcaaacctttaggggcattttggctctgtgctgggaatgtaagtttgctgtagctaaatcctcaatggtagtgacatttcatttagcacttcgaaaagttgtagaaagataatacagttccccaagccatcatgatacttgggctgcttttttagtgatatgtcacttgagaataatcttgaagtcataaaactttgtttcctttattaatctaagtcagtgtgacttgaac

SEQ ID NO: 192693 - DNA, 546 bp, Homo sapiens
tccatgctatatagactcagcgtgcttgctaagcaaaccctgccttaagataatttccctatctttcccttgtcccatttcagctattttttcctaattccttcctaagtgaaaatcttggagtagcccacgaattagggtattacatccatcagtgtatttcttgtaggctaaggaataatattttggaagattatatttgtattgatttttatatataaatataaaacaagatcatgagcaaaagccaactgtagttctcttggtagaacggctttctatttatgtgtagttagaaaaggcatttgcaggaagcaaacctttaggggcattttggctctgtgctgggaaygtaagtttgctgtagctaaatcctcaatggtagtgacatttcatttagcacttcgaaaagttgtagaaagataatacagttccccaagccatcatgatacttgggctgcttttttagtgatatgtcacttgagaataatcttgaagtcataaaactttgtttcctttattaatctaagtcagtgtgacttgaac

SEQ ID NO: 192694 - DNA, 617 bp, Homo sapiens
ctttttcttaaaattgttactgaccttacaccacaggtaagacagaggtcctagaaaagcagagcaattgtctccctagaggacgtattaactaaactgtataacaataatagtttccattttctttaaatagttcatgcacagcagcatcaaaacacagaaaagctaaaggtaagatggtctccagtaagtcagctatgtcagaattttattttccatttaaatgcaaatatgaaaatagttggcagttaacttgaatattaatagctttagatgaagatatgaaaagagagaggataattccctaactagttatcttttccaggtataaaatattggcactgagtttactctgccgacagttttcagtgtctctagaggggatgcagctactgcttcttttgggaaaatatgactctctmtgtggacctgccttaatttttttttttcttaattgaaatctgggttttgctgcattcggtgagctaaagagttttttactatctggggttgccattttaagccttctaacaagggtatgatatcttcttagcaacgaagccaagcatttgccgtatcttgtttgtgagcagaagcaaatcactttgaatcttaag

SEQ ID NO: 192695 - DNA, 592 bp, Homo sapiens
ttctattgtctaaatatttccaatatttcatattggaaaatttgtacagaatggaagcaacagttttgtcttcagtatcttcctcaaatggctctctaatctgcctgtcccttaggccatcaccatgggtcattgtcaatataataataatttaatgctatcatgggaacgtgtaaaaaacacagttttgaactctacctctaggatattctggtgtagtaagtctgggatagggcttagaaaaccacgcttttaaaaaagttgttcttagggtgattgtgatcaacaggcagtatgagggaaccattagtctaactgagctctctacctgttctcacctttaattggcttataccttgctttctctgcatcaaaggtaagctccctgcccaggttccctccctgttgagagaacatcaatggatccccattggaaactgatgcaaaatacagattataagcatcttaaatgggccttcactgccaatcattgtacaggccatgtatttccccataccattgctgcctcctttttccacttscccttctaaaattccacttgtcttttaatgtccagctcagatgactcctt

SEQ ID NO: 192696 - DNA, 632 bp, Homo sapiens
gtgacactatggatgagaaacattgtcattaatagccacagggttattttggaggtaactcagattcacagatggcagcttaaaagaaaagcgtatttgtgattccaaattcaaaccaaagcccaccccctaccttctttctcttctatgctccattgcyatcattagctaattatagccacagagcctacccctctgaatccttgcctggagaaagcttgtttctctttaaatggagctcagccaacagttgcttgttctcatgtaaatttcatacaaacaggccctgaaacttaaaaggatatctttaaaccccattaaataacacagttccttagcaggaatttctcttgggaagggatgtcttctattcaaatgctatgttatgacaagcatgacagacttgatggggatctgttctgactcatgacattgcataaattgggttaggtggaatgtgtgcctgcattctaagaaaagctcctcggggcctcagccctattatttttgttaatagctctgaattatgactatctcctcctaggaatgatacaccccatttccacattgggtgcgtcatggaatctatgtaatacatgattccttaccggcaaagccaagtggcctgcaca

SEQ ID NO: 192697 - DNA, 610 bp, Homo sapiens
ccacaacccctattataaaggcatgaatggaatagatatataatacatatcatgtagtttgatacttaggtgctcagtaactttgtccccttttctttatgagaagtaaaatattcttgaaataggagaacaatagtaataaaagtttacttatttgtgttctaggcactttttattacctacaacttcataagatcagtgtcattattcccgtgttactgatcagaaaactgaggctgtaagggatacaaaacttgcycaaatagtaaatagactatttagtaaatagaataagtttaatagtaaatagaataagtctaacttattccagagctcaacttttaattgctaccatttaatgccttaataattacccatgtatgtaagacattttgcatacattacatattgtacctaaaaatgaccctgttaagataaagtctcaattttcctttttgatcttaaattgaggcaaatagtttgctggcacataaagctgtttccttagagaattagaacaattataagcttctcaggagtcagtaaatggtgacgtctgtcaaaaagtgaaatattacaaaggcagttgctattaatttttaaataactg

SEQ ID NO: 192698 - DNA, 330 bp, Homo sapiens
ttttttcttctggctaatcatctttatttctttctattctttctcatatctggttttgaaactctctaacattcttgtcactctccctaagtatattctagcatgccagtggccttcttaaaagtggcatctaaaactgaactcrttaattcgtagtatagtcatagttgtacgtaatagaaagggactagtgtgttttcttgccatagtcattattattttttttaaatgtgaattcagattgctttggcttttgggagaagctgtatataatactgttaactcagatttagcgtgaaggcaagtaaaacacctatgtctttctaaact

SEQ ID NO: 192699 - DNA, 373 bp, Homo sapiens
cagagtgcagttaatagctaactgcagcctccacctcccagggtcaagtgatcctcccaatcctcccaccttagccttttaccatctcaagtagctgggaccacgggcatatgccaccacgcctggctaattttttttatttttttagaaacagggtctcactatgttgcccaggctggtctggaactcttgggctcaagcaatcctcctgcctyggcctcccaaagtgctgggatcacaggtgtgagccaccatgcctggctcttttttttcccattcttttatttttgcatttcagtttgggaagtttctattgacctatcttcaagattactgagacttttaaaaatcgtgttaagtcttctgagtgacc

SEQ ID NO: 192700 - DNA, 568 bp, Homo sapiens
acttcttccttccacataacagctcttcagatatgtgtgacagttcattaacgacctgtcctcaagcttttctttttctagctcatcacagtgaaatgctctaactattgttcatatggtatattttgcagccccatgytcttactaatgcattctaattcatgcacactcagctaaggtccaaagatgctttccagaaaccatgaaacccctaaacttacatgcaaatctgttgtgtatttgcacattatttagaggagagcttttagggccgccttcacattctcaaaggaactcctggcccccaaacagggtccggggtgaaaagagaagatgaaagaaaaatgggatacaatggcagtattaatgatagccctgaaatgtaacataacaaatgagaggctgagatgaaagcagaccttaggaaccctagtgcctaggcttgtttctatttcaacaccacctgtgtattttcacacaagagttgcttcaatgtctttttaaaacacagccaccatttttttctataaacacagtaacatgtaatttttataaatctatatgtcat

SEQ ID NO: 192701 - DNA, 553 bp, Homo sapiens
ttgtttcaaaatgctttctcaactaaagcatttcaaattctgcatacattgctgtaaaaaaaataaattatttaagcttttagattttgaataaatagaactttatagcattttgacgaagaggagttatgacgttcatcatactgaagcaaaagcagacataaagaaaatgagctgtatttcaagcaaaaacagttaaattaggtatttatcatttctttatattaaaaaaggactaaatctaagtcctaaatcattaaaagcatcattccatttgtcatgggttataaccagaaaaatttattcaatcatttgttctcgagcaaaatgttaaggttataaacttcattctgtattatatttagtctgtcagtgggacattaacctagactacagtgtgtttggtctrgattacttgaaagtagaccgtgcttcaacttaacacagaattttcttttaaaaaacttttaatcccagggagggcgtgtgtgattaataggactaaaactacttcaaactatgcattatcctaaatatactgaaattggtaaaa

SEQ ID NO: 192702 - DNA, 621 bp, Homo sapiens
cttccaactactggccaaggcagtcacaaaggcagcccaagttcaaagaggaaaggcataggcccaaccaatcgatagtaagaatgtcaatttatattgtaagatgagcttgcagtatgcgatatattgtggcagctaccattggaaaatatgtcacaagaaggcaattaaagctgttcaaaatctaaacataaagaacctacacaataaataaataaattaaataagtgatatcagcaatgtcctactataattaaacacctcaggaattatttttaaaataaaatttttactgtttaaatttccttctatcatagagctctaagacattttgatttacaacttaattgtatctgatccaatttcaacttcctgggtaccaaatytgaagctaaatcacccttctattgggaacagttagagaaataaggactgatcattaaagattaaatttttctctcatcatgttaaagtggaaaaatgagcactgccactcaggttttcaaagataaaatgatgttttcagtaacacctactacctctgagacatctcatcctgccctaaaacagcactgtaaatcaaaatcttggtttgttttatcaagatggcatgtcgtttgt

SEQ ID NO: 192703 - DNA, 433 bp, Homo sapiens
ctgcttccgcaataccatcaacaaggcattgtgaacaagaattctaaccaaaattttagccgctgttcagcatcttttcaatagtaaaacttctcctgcgacaggctatttctgcaggattccttagatttaccaacctgatcaataaccaagtacaagacacaaaaccacagatagtgacaggctctttaagcaacatttgcagctgaaatraaggaaccatcttcatgttccagggcatgaaggggagttgctcctgcactatctttttcctgcctcctccatcacatatttagttattttcagagccatccttgaggatgcaggacctcgctgcttatcagactcctttataaagtgggttcatctgctcggcatgtcagatcacatcaagatatacaagctgttcccactgtagcagagaaagctgaaa

SEQ ID NO: 192704 - DNA, 566 bp, Homo sapiens
gacaatgtcttttttctcattgtgcttaaatgttagggtaggacatggacaacaaacaagtacagttagccctccaattctatgggttccttatccttggatttaaccaagctcagatcaaaaatattcagaaaaaaaatggatggtttcatctataacgatcatgcacagactgttttgtcattatttcccaaacaatggagtataacaattatttacacaacatttacatcgtattaggtgtgataagtaatctagagataattgcaagtgtgccagaggatgtgtgtaggttatgtgccagcactccaccrgtttatatgagggacttgagtatctgtggattttggtatcctagggggatcccggaaccaatctcccgcagatactaggatactgagggatggctataagcacttaattgcagataatgataagtgctgtgaagaaaattaggcaggatgatgtgtgtgtgagagagagtgtgaagtgggtatacttagtacagatgaggtcatcaaggaaggcctctctgaagaggtgacatttagctgagacctgaatag

SEQ ID NO: 192705 - DNA, 614 bp, Homo sapiens
ggcctctgctgcagctgtagctatacacgggccaattgtcatgtctgcaaaatcaggctgtaattctgattctaagttagaaaaagggcaattctctatcatttgcatcaatgtaagcttaataaacatttttatcacttattcatttttagtagaaaaaataactttctttggtattttccatatgttaggatatgctagatatggaaaacatatctagtttttgaatcaaagaaaatattttgattttagattgaaaaggttaaacataatataccacactttctgaagcacagccgattttaagcagatctaaaaaaatagatttaaagaaacaaataaaactctctttatttatgtgtgcaactcgaataacaaggctaaatttttcagatatgcagaaatgatttatagcttgcaattacccactccattcaatataaacaggatcataattcatattacataatctagagctcatttgaaaatacataatgctattctgtaaaaaatagtttcttatgtmatcttgcatgtctagcgccatgcccttaaagtgattttttaaaaagaaataagtaatttatattattaagtcccagagaggaaaatca

SEQ ID NO: 192706 - DNA, 530 bp, Homo sapiens
gtggctcttggctgagttggtaactgtaacatttttccaatgatgtctttaccaccatcttctgtctctccacttccagtgctgcctctttggaagcaaaacctcaccaccttctcaggttctggcctcagaaaagatcttggaatgagaagctggaaggagtttgcggttttagctctgacacttcctatctgagagcccttggaccaccccctctgcctgaggtcagcctttgttctgtttccaaaaactgcagtaataatctctatcttgaatcctcayacactttcaaactgggccttgcaagatagtcagataacagagggagatggttattttagctcattctgtgttgctataacctaataccacagtctgagtaatttataacaaaaagaaatgtatttctcatgattctagaggctggaaagtccaaggtcaaggggcctgcatctggtgaggtccttcttgcagcatcatcccacagcaggaggcatagggtgagaaagtgcacatgacagaggaaaagg

SEQ ID NO: 192707 - DNA, 576 bp, Homo sapiens
agtaaaataaaggaatgtgaacttgttattttcttgtggctatctaactataaaggtaggccagatgtgtgtaaaacactccacttccaggacccctcatcaatgaccactgaaagttggtacaaaattactagaaatttctcaccccttgtgtgagataactctgaggtgttccatccacttttatgcttttaaccagaatccacctagatgccccaattctttcttgagcttcaaattcacatggccaccatgttgtaggcatctccacttgaatggcttccaggcactttaaatttagccttcaaaactaaattaatatttttctstttcttaatattttcagtcctaatcattggatgtaccattccctcaaccacccaagtcagaaaatcgggtttcatttttggccttcccctttgcctcagctctgagctcagccattccatttttaaaagcttctgaccctctaatgctactctaaactagtgccttcttcatttttacaaccagtgacttcagctcattttatctgtgttactccagtgctcctaacttcttttcctgcttacagtg

SEQ ID NO: 192708 - DNA, 574 bp, Homo sapiens
ctcgctgtgatctgcacccagcactgaccttctgatgtcatctgttggcctctatcttactcattttgctccagctccacagacctccctgctgcttcttcaatgcaccaagcagcctcctgcctcagggactttgtactcactaccatttctacctggcaggctatttctctagatatctccttggctgctctttgatttcttttaagtctctgctcaaatgtcaccatatccaggagtccttccctgataacactacatagaaactgatgccctactctctccctatcccttatcacctaaccttcttttatttctcctctagcacttatcaccwtccagcaagtgattatttttttcatttatatattttcttgtcttcccattataacaaacttcatgaggccagggtcttggtctggtttgttccttaatgcatctccagacccacataataatcacccaataaatggtgagtaaatgaataatggatgacaaaaaagaacctagctccatcttgctctgtgtgtgtactcattaattcggcagatatttatcaagcaactactgtgta

SEQ ID NO: 192709 - DNA, 574 bp, Homo sapiens
ctcgctgtgatctgcacccagcactgaccttctgatgtcatctgttggcctctatcttactcattttgctccagctccacagacctccctgctgcttcttcaatgcaccaagcagcctcctgcctcagggactttgtactcactaccatttctacctggcaggctatttctctagatatctccttggctgctctttgatttcttttaagtctctgctcaaatgtcaccatatccaggagtccttccctgataacactacatagaaactgatgccctactctctccctatcccttatcacctaaccttcttttatttctcctctagcacttatcaccttccagcaagtgattatttttttcatttatatattttcttgtcttcccattataacaaacttcatgaggccagggtcttggtctggtttgttycttaatgcatctccagacccacataataatcacccaataaatggtgagtaaatgaataatggatgacaaaaaagaacctagctccatcttgctctgtgtgtgtactcattaattcggcagatatttatcaagcaactactgtgta

SEQ ID NO: 192710 - DNA, 588 bp, Homo sapiens
atggctgtcatatacttcgagtgggacccatcaccatggtttgtgtttttctctagccacattcaacttcccaggtgcaaggcagaattcagtctaactggggcttgggtttttccaggtgactataacagaggccaggagagcaaagaagctgaagacttctgacttagcctatggaggttaagttaggctagaaggctagatgggaactgaggaaactgcaaagaatcactggagaatggacactagagacagtgaggtgagccattgggaggcagagggcaggaggaaattgagactagaaaggggctacggcaattgatcaggatagggtctcaagatgtttgaggtagatggaagacaagatcttggaggagaagaggctagggaatggagagacattattagaaggactatttttggggataactgacaagaattatgacagtaatgctaggaaaacagcaagccagaagccaatctcatcaagaaatggttrggagtgggagagagtagtcccaagggtctccaaacgatgggatggggttggtgtgtgctgatggcgtacatttccaggcaatggtgggg

SEQ ID NO: 192711 - DNA, 588 bp, Homo sapiens
atggctgtcatatacttcgagtgggacccatcaccatggtttgtgtttttctctagccacattcaacttcccaggtgcaaggcagaattcagtctaactggggcttgggtttttccaggtgactataacagaggccaggagagcaaagaagctgaagacttctgacttagcctatggaggttaagttaggctagaaggctagatgggaactgaggaaactgcaaagaatcactggagaatggacactagagacagtgaggtgagccattgggaggcagagggcaggaggaaattgagactagaaaggggctacggcaattgatcaggatagggtctcaagatgtttgaggtagatggaagacaagatcttggaggagaagaggctagggaatggagagacattattagaaggactatttttggggataactgacaagaattatgacagtaatgctaggaaaacagcaagccagaagccaatctcatcaagaaatggttaggagtgggagagagtagycccaagggtctccaaacgatgggatggggttggtgtgtgctgatggcgtacatttccaggcaatggtgggg

SEQ ID NO: 192712 - DNA, 578 bp, Homo sapiens
taagcctgcaaaatcgaaactagttgactacttccaaaatacaatggtgggcataagataaacattcccatttcaaagggagaaatagacaaatataaagaggtaacttgtcctaagtaagtctaaaactcaatagaataaaacattaaatgttaaagctggaaaataatctcctttgactccatgtcctgcaacctgagcaacctggggagtgggagtgggggcaaatccttgggcatcccagttcctatatctttgctgagctcagtccaagctttggctatctagggctgggggcactctggtggccctayggttctgtggtcttgggggtggcccccactcccacagccctgctaggcattaccccagtgaggactctgagtcaacactgcctctgtgccaggtttctccctgggcttccaggtggtccaaggcatcttttgaaggctaagtggatgaagccatgtccccacaacttggcattctgcatgcctgcagaattagcaccacataggtgctatcaatgtttatcacttgtactttagaaatggtaggttgagtagcacttggggttg

SEQ ID NO: 192713 - DNA, 532 bp, Homo sapiens
tagataaacaagaataaactaagcccaaatctagcagaagaaaagaaataacaaagatcagagctaaactaaatgcaattgagaatagaaaaacaatgtaaaggaacaacaaaatgaaaagttggttctttaaaaaaataaacaaattgatagaaaaataaaattgatattagaataaccaggaaaaaaaccagaaaagattcaaataagcacacacagaaatgamaaaggaggcattaaaactgatatcacagaaatacaaaagagtcagactattatgaatgcatctatgctcacaaactagaaaactgagaggaaatggataaattcctggaaacatgcagcctcctaagattgaaccacaaagagatggaaatcctgaacagacaaataatgaatagtgagattgaatgagtaataagaaaaaagctccccaccccagaaaaaaagcccaggatcagataggttcaaagccaaattctaccagacatccaaagaatactggtaacaatatactgaaactgttcccaaa

SEQ ID NO: 192714 - DNA, 599 bp, Homo sapiens
aatttccttgatgactagtaatgatgagccctttttagtgtatctatcagccatttgtatgtcttgagtagcatctttcaggtcttttgtctgctttttaattgggttgttttattgctattgagttgtttgagttttttatgtattttggatattagccccctaccagatgtgtggtttgaaaatattttctcccagtccatgggctgtctcttcactctattttttcctatgcctagcaaaagctttttactttgatgtaatcttgtttatttttgcttttgttgcctgtgattttggggtcatatcaaaaagtctttgaccagaccaaggttgtggaacatttcctctaagttytcttcttatagtttacaattctgagtcttccatttaagtctttaatccattttgagttgattcttgtatgtggtgtgaaataagggtcctatttcatttttctgcagaacatccagttttcccaccaccctttattgaagagactatcctttctccattatatgttcttgacactttagtcaaaaattaattgaccataaatgtgtgggtttatttctcggctctgtattccgttgcattgg

SEQ ID NO: 192715 - DNA, 597 bp, Homo sapiens
gagctcatcacaatagcaacaggaggtggctgcaaaattatcaccgtagtatactacagttataattatgcagttatttttatgcagactacagttaattttatggagttatgttttaatactgcatctttacatttgtttacatttctcttgactgcaaatagtaccatatactggctctgtgtgtataaattttaataaattttgacttttgataatagatttgtgtatattttaaggtagtaaatgataaactagtgtctacatatattttatacattcatgatatagttaatttttcttatttttttcagcatttctagtctgtggtttattgtgacttttaaaaaattgtggcaaatctccaaaatatttttcaacatacgtattgaaaaaaacccgcatataagtggaacatgcagttcaaacccatgttgwtcaacggtcaattgtacattcttccagctcccagccttcaaactccaggttcagatttgactttctcctatcctttgtctcctgttgcctccggctctttgattttaaatcagactgaaaattctccatccagttccttgtcttcatgtctagacaatt

SEQ ID NO: 192716 - DNA, 547 bp, Homo sapiens
actaatgaggccagcggagtcattaaaatcatcttctcaaagctactttccccatcttgtcattctcaccatctgttgtactctcatgacaaaaccaatccaaggtatctttttctctgaagctgaaggaaaccatagattcatgttctctgaatgcactttaactcatagttccagtatcttaggatcacactacatttgctgatatccatctcacacccttcaaggcaactgtttcctaccttctcttttctcctcacagttcaataccttctggcttcctctctctggctttctgtttcattgagaaaataaaatcagtcagaagagaacctgtacgtgctccctccacccacctacctgtacccaaccaccagcatttatttttacggttgatctagctatgctcttctttaaggccagcctcctcctggrccctgcaccacaccccctccagcatactgaaggacattccatttctctagcaagtcttccttctctccatcacatcattactctctccactatattagataattcccattac

SEQ ID NO: 192717 - DNA, 547 bp, Homo sapiens
actaatgaggccagcggagtcattaaaatcatcttctcaaagctactttccccatcttgtcattctcaccatctgttgtactctcatgacaaaaccaatccaaggtatctttttctctgaagctgaaggaaaccatagattcatgttctctgaatgcactttaactcatagttccagtatcttaggatcacactacatttgctgatatccatctcacacccttcaaggcaactgtttcctaccttctcttttctcctcacagttcaataccttctggcttcctctctctggctttctgtttcattgagaaaataaaatcagtcagaagagaacctgtacgtgctccctccacccacctacctgtacccaaccaccagcatttatttttacggttgatctagctatgctcttctttaaggccagcctcctcctggaccctgsaccacaccccctccagcatactgaaggacattccatttctctagcaagtcttccttctctccatcacatcattactctctccactatattagataattcccattac

SEQ ID NO: 192718 - DNA, 439 bp, Homo sapiens
ttctggggtctggaggatggtggccctcttcscagagctccactgggcagtgccccagtgaggactctgtgtggagcaccaaccccacatttcccctctgcattgccctactagagtttctccatgagggctccacccctgcagcagccttctgcctggacatccaagtgtttccatacatcctctgaaatctaggtggaggttcccaaagctcatctcttgtcttctgcacacctgcagacccaacactacatggaggctgctaaggcttgtggcttgcaccctctgaagccatagcctgagctccacattggccccttttaccatggctggagctagagtggctaggaaacagggtgccaagtcctaaggctgcacagagcagcagggccctgagcctggcccaggaaaccattttttccttctcggcctctgggcc

SEQ ID NO: 192719 - DNA, 439 bp, Homo sapiens
ttctggggtctggaggatggtggccctcttcccagagctccactgggcagtgccccagtgaggactctgtgtrgagcaccaaccccacatttcccctctgcattgccctactagagtttctccatgagggctccacccctgcagcagccttctgcctggacatccaagtgtttccatacatcctctgaaatctaggtggaggttcccaaagctcatctcttgtcttctgcacacctgcagacccaacactacatggaggctgctaaggcttgtggcttgcaccctctgaagccatagcctgagctccacattggccccttttaccatggctggagctagagtggctaggaaacagggtgccaagtcctaaggctgcacagagcagcagggccctgagcctggcccaggaaaccattttttccttctcggcctctgggcc

SEQ ID NO: 192720 - DNA, 443 bp, Homo sapiens
accattctggggtctggaggatggtggccctcttcccagagctccactgggcagtgccccagtgaggactctgtgtggagcaccaaccccacatttcccctctgcattgccctactagagtttctccatgagggctccacccctgcagcagccttctgcctggacatccaagtgtttccatacatcctctgaaatctaggtggaggttcccaaagctcatctcttgtcttctgcacacctgcagacccaacactacatggaggctgctaaggcttgtggcttgcaccctctgaagccrtagcctgagctccacattggccccttttaccatggctggagctagagtggctaggaaacagggtgccaagtcctaaggctgcacagagcagcagggccctgagcctggcccaggaaaccattttttccttctcggcctctgggcc

SEQ ID NO: 192721 - DNA, 322 bp, Homo sapiens
ttcctgttatccttaatttttgtcccatctactctattaagtgtgaagtcaactacttctgaaactaatgggtcttttaattgttagataatattctcttttcttctaagagaatacaaagtttttagggaaccagaacttttaaggctttttyttaataataaagattgtagtcaacaaatatgctttctcaattcagggagaaaaatgatgaaaccaattccatcgaaccagtgtggtaagagccattaataaaggctttgaaattgtattccacgtggaatgggaaactgaaggactttgggcagagtaaaaaatatga

SEQ ID NO: 192722 - DNA, 568 bp, Homo sapiens
tcaatcttcgcctgtaaaatatagtacctttgctgtttagccagagaaaatacaatcttagttttaaagacttctttaagcatcgcaacaattttgctgttcttggaagaactttatcaatatttcacatgatattcttctctgcaggagaacctaagaaaaatattcgattaatcattgtgatattaaaactatctgtcacttgtagcatgcatatgtaataaagtactcaagataaaattgatatcagagacaaatggcccacattaaaaatgtctgcttgaagctctaaaattgttccttcttatgatgatctcaataactaaacctctcaatttgcaaatgaagataaatgctaagataattttttaaactagaaatcgtgaagtaaaataaagagagaactaaagtggctaacaatgaaacacctgtaataaatgtttacaaacttgttgagacacattaatcttcatctccttgttattttcttagacatttacttcaaattatctgtaattctatttaaaatgaaactaatsgaagcatgtgaacttaagcaagtattttt

SEQ ID NO: 192723 - DNA, 567 bp, Homo sapiens
tatgagagtttacagccaaaggcgggagatatgaactgaaacaacttaggaaagtggaatagaaagtaagatcgctatagaaatgcaggacacattagcagaatcacacrgtacaaaatgctgcaaggaacgtggagaataatattgaaaacagcaagcaaaattaaatggaaatgaagttaaagagactagagaaaaagtgattactatagaaggcaaacaaaccaatatacatataaattgttctcctaaatgtgataatgacaatgacaaaacacaacaaatatttaaaaatataataaagaaaacttctcagaaatatacaacattataatgatacatctaaaaacagaaagaacacagcatgtgttgggggaaaatgaatagagaattattggtattaagataataaagtaactggacttcaagataaagaaagagtatactaatactttttaattgatactgtaaatgtgtaagtataaagataaccatacttattaatggtaaatcatcaggctagtctctgaaagtttcacaggaacactagaagaccatggagtaacg

SEQ ID NO: 192724 - DNA, 567 bp, Homo sapiens
tatgagagtttacagccaaaggcgggagatatgaactgaaacaacttaggaaagtggaatagaaagtaagatcgctatagaaatgcaggacacattagcagaatcacacagtacaaaatgctgcaaggaacgtggagaataatattgaaaacagcaagcaaaattaaatggaaatgaagttaaagagactagagaaaaagtgattactatagaaggcaaacaaaccaatatacatataaattgttctcctaaatgtgataatgacaatgacaaaacacaacaaatatttaaaaatataataaagaaaacttctcagaaatatacaacattataatgatacatctaaaaacagaaagaacayagcatgtgttgggggaaaatgaatagagaattattggtattaagataataaagtaactggacttcaagataaagaaagagtatactaatactttttaattgatactgtaaatgtgtaagtataaagataaccatacttattaatggtaaatcatcaggctagtctctgaaagtttcacaggaacactagaagaccatggagtaacg

SEQ ID NO: 192725 - DNA, 636 bp, Homo sapiens
tattatataataaagcataactccttttatatttacatatgtaagtcacctataaaagcggaaaatacttttgtgtattttcagattaattaaatgataatatatatatagctttgcaaaacaaatttccagaccataggttataccatacatactattaaatagcttaaataatggctcaatataatatgcagcttagaaagagacaatacaaatgtgtctggcttttcctcaacagttacacctagatttttgtcaaacaaaagggarcatttgaatataaagtaaatatgtaatattttaatgatatggttcatttgaccagccttttcattttcatgatacagggaagaattggaaataagcagtagtaataggcctattcaactgctttttaatacctactgcttcattacacatttatatattagtaattattgtagaaaccaacaatttcagttgtggaaataatcagacaaaatacaaggtgcttttcatcaatcctctatttaatcaaccaactggactaacaaatacgtttcatttctttgataaaatatactgaactgtttctatagtgcaataagctattttgtttagcagactaccacatatattgtctgaataattttgttc

SEQ ID NO: 192726 - DNA, 609 bp, Homo sapiens
tatttatgaagtttacataaattcagttattttaaagtataataaatggtgttatttgatgakagatttatattataatattttaaacaattaaaatgatgtttactaacatttttaacagccatagtttttaattaatagatttaaattcactaagaacttacgagggaattgataatattgctcctgaaaattggaataaatccaaattccaaaagggttaatagttttagtcctcattcttaaaattccacattgtctttattgatcccattagctgaatttgtggttttcttcatgttttacaacagattgactttgcaaacttcttaacatgcaatttgctaacatctgggctatgtaaatgtgtatacatatacatatatgaaaaattaaatgactttaaatcttacaaactttatacttttcctagaacaagagtagagaatccaccattgtttttattactcactgtattatctgtatgttaagcaaccacattcggaagccatcacaacttctagttaacctcaagggaagtctaaggtatttaatggcattgctttactatttaggtgaaaatatattattcttaagtcttggcctaag

SEQ ID NO: 192727 - DNA, 609 bp, Homo sapiens
tatttatgaagtttacataaattcagttattttaaagtataataaatggtgttatttgatgatagatttatattataatattttaaacaattaaaatgatgtttrctaacatttttaacagccatagtttttaattaatagatttaaattcactaagaacttacgagggaattgataatattgctcctgaaaattggaataaatccaaattccaaaagggttaatagttttagtcctcattcttaaaattccacattgtctttattgatcccattagctgaatttgtggttttcttcatgttttacaacagattgactttgcaaacttcttaacatgcaatttgctaacatctgggctatgtaaatgtgtatacatatacatatatgaaaaattaaatgactttaaatcttacaaactttatacttttcctagaacaagagtagagaatccaccattgtttttattactcactgtattatctgtatgttaagcaaccacattcggaagccatcacaacttctagttaacctcaagggaagtctaaggtatttaatggcattgctttactatttaggtgaaaatatattattcttaagtcttggcctaag

SEQ ID NO: 192728 - DNA, 609 bp, Homo sapiens
tatttatgaagtttacataaattcagttattttaaagtataataaatggtgttatttgatgatagatttatattataatattttaaacaattaaaatgatgtttactaacatttttaacagccatagtttttaattaatagatttaaattcactaagaacttacgagggaattgataatattgctcctgaaaattggaataaatccaaattccaaaagggttaatagttttagtcctcattcttaaaattccacattgtctttattgawcccattagctgaatttgtggttttcttcatgttttacaacagattgactttgcaaacttcttaacatgcaatttgctaacatctgggctatgtaaatgtgtatacatatacatatatgaaaaattaaatgactttaaatcttacaaactttatacttttcctagaacaagagtagagaatccaccattgtttttattactcactgtattatctgtatgttaagcaaccacattcggaagccatcacaacttctagttaacctcaagggaagtctaaggtatttaatggcattgctttactatttaggtgaaaatatattattcttaagtcttggcctaag

SEQ ID NO: 192729 - DNA, 614 bp, Homo sapiens
tgattctatgatagtctctgtcataacaaacaaattaaacagaagtgttgagcatagaactcagtacaagagtcgacatgaacattggtttgaatgctggaggaactgagtccctatccttgttttcaagtgaaaattagtcatacatttgaacagaaattattttgctgtaaaatcaagatttccttgaagtgagttgttttctgggttgttctctcttccatgtgtcaggagtgtagagttatttatcagcattgtgagtctaggttgaggaaattcaaagagatcatgtagagaaattgatttctatgccttggagcttacggaatataatatattattattattaaaatgatggataaagtatttaaatgtctattgygaacccaaaggactgcattttgaaagaaactgcatttccacagagggtgaataaatgggtgtgttttcatttgactaaatgcaggatttttgtgagggagttctggcttggcatggtcttacatgctgtccaagaggccaatctcaaaaggtgaggagacatttggaaagaagatgaaactgtactgttctatacccatagcatgagacagaaatgtaagcagccagctgga

SEQ ID NO: 192730 - DNA, 636 bp, Homo sapiens
aattaacgtatgccttacttcatatactttttatttttgagatgagaacacttgaactataatctctaaactgtgggatttttttctttaatctgagtgtgatccagaatgttatgtgtctccttcagattttatccagaggaaggaaaataaatagctcagtgagctggtttaaatagattgtgggccagttaaactgtgaatatatgctagtgaaataatttattatcaaagcagtattcaatgttggtcttggtacttgagaagggaaagaatagaagtgatttatggttgagggtagagacggcaggacaggmttactagaagatttaggtcttgaaggcattggtaaaaatatttgtagtagtatgccacatggtctagacgagacaactagttcatttcagttatctaacaaacttaagagagaaagagcacacaataaaatttttaaaaaatatatttagtgtgtgataaaagttaaatatattttaagacgaacatacttacatttttgatttatagattatggaggtaaatggataaagagcaagaaagaaaaaagctaatactatttgatgcatataatacagtaataaagttgtctctaataacaaagcaattttttttatgttc

SEQ ID NO: 192731 - DNA, 668 bp, Homo sapiens
ttgatttatagattatggaggtaaatggataaagagcaagaaagaaaaaagctaatactatttgatgcatataatacagtaataaagttgtctctaataacaaagcaattttttttatgttctacccatcatggaattgaatacaaagatattgtccatctccatttgtttaggttctggagctatcggtcacatcaaataataattggtcattatagagccagagttttcctcaaaaacttgaaggaattccctgagttggccaaggcaataacataagtaataagacaatttatttcacaagtgaacttgtaacttattagcttgactggcctaaacaatgttatagtaaggcaaatgccccagcttcaattcctttatgaaacaggagctttttcttatgtttgcataccaaacacagctactcatataaccacgctgctagttcctaccatcagccaaaagtagactagtggagaatctatggccccaatttggaaactcagaatcacagttccaaatgtaaggttagtcaaaaagttatttatggtgttgtatctatgtacattatatgactayttagtaaaagatacattgtttgatttcatatgaatatatttctaaagttatattagttaccctattatttctctgtaaacaaaatatcc

SEQ ID NO: 192732 - DNA, 495 bp, Homo sapiens
taccattttagcaaatttcaaatatataatgtagacagtccctgacttattattgtttaacttataatttttcaagtttatgatggtgcagaagcaatatgcattccaatataaatcatgctttggactttgaattttgatcttttcctgggctagcaaaatgtgctatgatattctcttgtgatgctgggtggtgacagcaagctgcacctcccagccaaccacccaataacaaggggaaacaaccaatatrctacagtgcactgttgccagcattttttgaatattgtgttttgtatcaaattaggtctacaaaacactcatttttgacatacaatattttaaacttatgatgggtttattgagacataaccccatcataagttgaggagcatttttacactattttttaactttagtcacaatgttgtacattacatctccagaacttatttatcttgcataactgaaactttgtactcatcgaccaacatc

SEQ ID NO: 192733 - DNA, 463 bp, Homo sapiens
tagcgtcaaaatcatcttttttcccaaaggacagctttcgtaatgtgattttaatgaaaaaatttatatgttacttcaaataataaagtcataactgtcaatatctttttcaaagatgagctctcatttcattccttatttgtggctaattcataataaaataatttaaaagtcaagcttatctaaataagccttttattggtaatgggattctgggtttataaaaaccagattcatagccttgaatcagatattctcattgtaattaaatgagtgaacctatacaaccatcatattaagaataaacagttaaatattctatttatttatgtatttatttatttatttatttattggaagggattttctcattatcaaktgtgattgacaagttttcagttcatatacacatttcccccaaacagaacttcgttctcttcagtacagtggccttgtaaaatca

SEQ ID NO: 192734 - DNA, 539 bp, Homo sapiens
ctaccaggtaatgtcttctccatttcaattcatccttctctacagataacatttttaaaatcttgtttacatagaatactgtataatataaatattatattccattgttttcaaaaaagggatgcgatggtggatttatagcaatttagcatttactggcttattctattgcttttgtaacgtataggctaagtggtggtataaatgagatctttttgttgcccacttgaatctaccatttcagagtctttactattagcaacaaagaagtgccaatttctactgaaatgtagatcgtataagcaaatatcacacttcaacatgctgttgcttctagtctcccttactagagtggtactgttcccagtcttccagctcccttgaagtcytacagatcaaacatctcaaatcacaccttaagtcagacccatagtgcaaaacctaggttataatccaaatgagtgtttttgcagtgatggaaccaagagccaacagtcctgtggcgagtgagtacccaatgtctaacactcagacccaga

SEQ ID NO: 192735 - DNA, 539 bp, Homo sapiens
ctaccaggtaatgtcttctccatttcaattcatccttctctacagataacatttttaaaatcttgtttacatagaatactgtataatataaatattatattccattgttttcaaaaaagggatgcgatggtggatttatagcaatttagcatttactggcttattctattgcttttgtaacgtataggctaagtggtggtataaatgagatctttttgttgcccacttgaatctaccatttcagagtctttactattagcaacaaagaagtgccaatttctactgaaatgtagatcgtataagcaaatatcacacttcaacatgctgttgcttctagtctcccttactagagtggtactgttcccagtcttccagctcccttgaagtcctacagatcaaacatctcaaatcacacyttaagtcagacccatagtgcaaaacctaggttataatccaaatgagtgtttttgcagtgatggaaccaagagccaacagtcctgtggcgagtgagtacccaatgtctaacactcagacccaga

SEQ ID NO: 192736 - DNA, 539 bp, Homo sapiens
ctaccaggtaatgtcttctccatttcaattcatccttctctacagataacatttttaaaatcttgtttacatagaatactgtataatataaatattatattccattgttttcaaaaaagggatgcgatggtggatttatagcaatttagcatttactggcttattctattgcttttgtaacgtataggctaagtggtggtataaatgagatctttttgttgcccacttgaatctaccatttcagagtctttactattagcaacaaagaagtgccaatttctactgaaatgtagatcgtataagcaaatatcacacttcaacatgctgttgcttctagtctcccttactagagtggtactgttcccagtcttccagctcccttgaagtcctacagatcaaacatctcaaatcacaccttaagtcagacccatagtgcaaaacytaggttataatccaaatgagtgtttttgcagtgatggaaccaagagccaacagtcctgtggcgagtgagtacccaatgtctaacactcagacccaga

SEQ ID NO: 192737 - DNA, 566 bp, Homo sapiens
cgttatccagtccaccatgggtgggcatttaggttgattccatgtctttgctattgtaaatagtgctacaatgaacatacatgtgcaagtgtctttatggtaaaataatttatattcctttgggtatatacctagtgatgggattgctggcttgaaaggtagttctgtttttagctctttgtcaactgaactttaaccatatgaacagcaatatttaaaactaaagacaattatcttcaatacttcaacaggcatataagtatctacatgcatataagattggatgggagatatgcatttgcaaaaagacatatatatttaattcaagctgattttttagaatcttagccaaagccacaacagctaacaagataaaattatgcaaaattttatgcatgatttggccttattacttcattgaattactctttgccatttttatggtccaaacaacagagctgaagaaaaatatcacttttaaatggtgaaaaatatgagaaatatagttggaattctttctaaggaaagctctttttgtrcttgtgcaatttgaaatggcagcaatt

SEQ ID NO: 192738 - DNA, 570 bp, Homo sapiens
ggggtgttttgaacctccctctgtcccctcccccttcattgagcttaattacttgcaatagttgttttaatgtatgttgtcacctgggagtattgagaaatgcatatcgttaatatgaattaatcttgattttaatagtaactgacaactgatctccaaaatgctaaacacttgtcaccacttcatatggtaaatacggtactataataaattcatgaaatagagagggacactgttgaaatgactggacaaactttgtttgatatggaatttattgaccaaaactattttaagcaagaaaactcccatgagaatattttcctgataactgaaattcatatatcatcaaaaaaaatttaacataacttttttatctctctgatatttctcagtgatatccctaattccagacaagaaaaaaaggaaggctgtgttttcaaattatcaatttgaagtaaattaatgtggttgtagagcaattcaagagtttatttacctgtatttccttcctcctagaaaacacayacatttttaaaaagtcaagtcatagagttaggcttctccattccc

SEQ ID NO: 192739 - DNA, 513 bp, Homo sapiens
cattctcattgacaaatatttatagtagcctaagagatacatgcctctgtaacagattttggttggacaatcctatcccacaggatttcacaaaacaatgaccctctaaaggcagcagtttgctccctttccctgtttgtgatcacttaaaaaaagagattaatcatcayttaagaattcattgtcaatctttttcttgtatcccttaccacaagagttgtgtccctatgttttaaaaaaatgtgaatgtatctttctgtcacctaagtagggtttatttccagtgtatatttttcagcatccaaagacttgagagcagtattctacatataagtatgcaataaactcttaatcatgcactagacatttaaaaaagtgttgggaagaaagtgcagtgactctattctgattttcactgcatattctcctttattttgtttgagagacacacaggactgcccctagagtgctctgttgacgtttgttcgaggcactgggaggaaatcaaagcag

SEQ ID NO: 192740 - DNA, 467 bp, Homo sapiens
catctagtttcttaagcatgttaatcacagttatttaaagagtccatatccgatcatttaaacatttggattatacatggggttcattctatcatctggtttttttttggtcatttagttctgttttctagcatgacataatttttttgtatatgccatacattgttcaaaaaactatcttcaagatggtctgtgttaagaaatttaaaaattttaagaaataaataattttataaaaaaacaaagctgtccatcactcaggcatgggccatttaggcagcactgctcttaaaccagagtaaatggcactgcaccaggccccacaattcaggaatcctgcactttgcagtaccttcattgaaattttctaaagtcttatccaatgcattgggttggccaggaccagcagtacaattsagatagggcttgctgagttctagtgttacatgagttctagttaccagaag

SEQ ID NO: 192741 - DNA, 534 bp, Homo sapiens
agatggggtgctggtgtagatggcctttttgttgatgttgatgctattcttttctgtttgttagttttccttctaacagtcaggtccctcagctgcagatctgttggggtttgctggaggtccactctggatgctgttttcctgggtatcaccagcaaaggctgcagaacagcaaattttgcagtacagcaaatattgctgccygatccttcctccggaagctttgtcccagaggggcctccacccatatgaggtgtctgttggcccctgctgggaggtgtctcccagttagactacacggtggtcagggacccacttgaggaggcagtctgtccattctcagagctcaaacatcatgctgagagaacatgctgactgctctcttcagagctgtcagacagggacatttaagtctgcagaagttgtctgctgtcttttgttcagctatgccctgcccacagaggtgcagtctagaggcagcaggccttgttgagctgtggtgggctccgcccagtttgagcttcccggctgctt

SEQ ID NO: 192742 - DNA, 580 bp, Homo sapiens
ctttctgtttaaagtatctagaggtttctgccttaggtactatgctgtctgatgcacagagtactaggaaaaacaaaagagacctacactaaacaagttctgttgatattttcatgtcagtaataaagaaataaaatctaggtaaacaaagaatctactaaggagaaaaaatccgaattaaagttatctgtaacacttaataccaagagaattggcatggtatcaaatttgggaaaagtgcatgtccctaagatttataacccatagttgcataacacggactctgagaagcttgcaataaagaagtatgcttaattttgtttgcccaagtgtttcctaaatttatttcagaatgacagtcattatttgggaaatactaatttatttaattatgagggaaaaagtacagtgtcaatataactaagaaaacatttgaaacatcaaaaacaaaagattggaatttactaagtgaagacagatacagaaraaaaaccagtaagcagtaaaaccaacagagttaaagtctaagtaactgttaatacagttattaaatttagtatgcatatcaagtaaaagtctt

SEQ ID NO: 192743 - DNA, 508 bp, Homo sapiens
aaaaccctgttttgtacattttaatctccaattttaatgcttaatatcataatgcctttaaatctgtaacttaactttaggtttaattttaataattctgtcttgttgcatcttgttaaagagattatcaggtagaaaaaaagcaaaaaactaatttaaatgaygtgaataaaaaacttaactaaaaagttttaaaagcctttaaaacaacctgaaaattagaatacttttggcagaaaaattagcagctaggaacaaaattaacattacataatattttaccaataactgcattacaaataatattgttttacatatattagaatgatttgcaacatattatagtaaatggttatacatatcagacatacaaatctattaagaaaactttttaatatagtttagcacttttgagagattctgttcccaataaatgaaaggaacacaatttagaagatgacaggtggtacatcttttaattggagacctaaccaggtaagtcttgaca

SEQ ID NO: 192744 - DNA, 508 bp, Homo sapiens
aaaaccctgttttgtacattttaatctccaattttaatgcttaatatcataatgcctttaaatctgtaacttaactttaggtttaattttaataattctgtcttgttgcatcttgttaaagagattatcaggtagaaaaaaagcaaaaaactaatttaaatgacgtgaataaaaaacttaactaaaaagttttaaaagcctttaaaacaacctgaaaattagaatacttttggcagaaaaattagcagctaggaacaaaattaacattacataatattttaccaataactgcattacaaataatattgttttacatatattagaatgatttgcaacatattatagtaaatggttatacatatcagacatacaaatctattaagaaaactttttaatatagtttarcacttttgagagattctgttcccaataaatgaaaggaacacaatttagaagatgacaggtggtacatcttttaattggagacctaaccaggtaagtcttgaca

SEQ ID NO: 192745 - DNA, 640 bp, Homo sapiens
agggctgaaggacattggcagaggaggttgtggagtgaggttagggaagagttgggagcatacaagtgatcagaagaagcaggagtaagttgggggcccaaggagaggatgtggtggtgatggaaggtaagagtgagaaagtttgtatattagttctctagggctgtcattaacacaataccaaaaactggggtgcttaaataaaagaaatttgtctcaacattctggaagctggaagcctgagatcagggagttggtggggttgcttccttctgagggctgtgagggagagtcctttccatgtctttctcctagtttctggtggtttgctrgcgatctttggcattccttggcttgtagatgtatcaccctcatctctgccttcacattcatatggcattcttcctctgtgcatgtatctttgtgcccaaatgttctgtttttataaggacacagccatactgagtagagcctaccctaatgatgtcatcttaccttgattatctgcaaacatcctatttccaaataaggtcacatttataggtactgggggttaggacctcagtatcttttgggtgagacataactcaacacataatagcatgcaacatgaggattgaaataaaaagactaatttatg

SEQ ID NO: 192746 - DNA, 643 bp, Homo sapiens
tacaagtgatcagaagaagcaggagtaagttgggggcccaaggagaggatgtggtggtgatggaaggtaagagtgagaaagtttgtatattagttctctagggctgtcattaacacaataccaaaaactggggtgcttaaataaaagaaatttgtctcaacattctggaagctggaagcctgagatcagggagttggtggggttgcttccttctgagggctgtgagggagagtcctttccatgtctttctcctagtttctggtggtttgctggcgatctttggcattccttggcttgtagatgtatcaccctcatctctgccttcacattcatatggcattcttcctctgtgcatgtatctttgtgcccaaatgttctgtttttatraggacacagccatactgagtagagcctaccctaatgatgtcatcttaccttgattatctgcaaacatcctatttccaaataaggtcacatttataggtactgggggttaggacctcagtatcttttgggtgagacataactcaacacataatagcatgcaacatgaggattgaaataaaaagactaatttatggagtttttctcatttaattggaaagactgggccacatttcttgacacttaaaggcagcagtgg

SEQ ID NO: 192747 - DNA, 475 bp, Homo sapiens
atgttgacagtgagtcctcyggcttcctctgcttagtgcctgtatcagtcgcttatgcaggcaacctataagctgagccctgagagggaactcagaaaggcttatctacagcagaaccccctctaagggagtaaacttctaggtcgccttgggccaattccacagctctttctgtttctactcccagagtctcaccaaatcagaaagtggcttttggccctcctcttctctgtgtacctggctgctgtctgtcctgggtttcagtctcagtcctttctgaaactacccctttcctctcctgtggccactggcctccgtgacccacaaaacatataccttttcccaccaacaagcctgactcagggtttgtctcagcttgaatcagaggcttttctacgccaatactagcaattaggggtgagggcttcaacataggaatttgggaggacacacttagtctataatactgtggcag

SEQ ID NO: 192748 - DNA, 414 bp, Homo sapiens
ttgaattcattctccagatttaaaaatgtactgtaaagactacagatttaccacaactttaaaaattcaaggtggttttggataatactctgtgaaraaagttatgatcttcttaatctttgtctaaatagttcctgaagcaacttcaagaacagggagtgggaaactaaactgaaataaaactggatcatgaaggtattcatttacatgattaatagttcaataattttttttcctcacaattgtgtgggttgcctgggtggttcttctgtgatctcttctgacatcattcatgtggctacacccctagagcagatgggctgcaggctgggctcacccggagctgtcaaccacagcatattgatcttatagcatgtggttactccgcatagccagcttgggctttcttacagt

SEQ ID NO: 192749 - DNA, 402 bp, Homo sapiens
aagactacagatttaccacaactttaaaaattcaaggtggttttggataatactctgtgaagaaagttatgatcttcttaawctttgtctaaatagttcctgaagcaacttcaagaacagggagtgggaaactaaactgaaataaaactggatcatgaaggtattcatttacatgattaatagttcaataattttttttcctcacaattgtgtgggttgcctgggtggttcttctgtgatctcttctgacatcattcatgtggctacacccctagagcagatgggctgcaggctgggctcacccggagctgtcaaccacagcatattgatcttatagcatgtggttactccgcatagccagcttgggctttcttacagtatggcagtctcaaggcagaattc

SEQ ID NO: 192750 - DNA, 414 bp, Homo sapiens
aaatgtactgtaaagactacagatttaccacaactttaaaaattcaaggtggttttggataatactctgtgaagaaagttatgatcttcttaatctttgtctaaatagttcctgaagcaacttcaagaacagggagtgggaaactaaactgaaataaaactggatyatgaaggtattcatttacatgattaatagttcaataattttttttcctcacaattgtgtgggttgcctgggtggttcttctgtgatctcttctgacatcattcatgtggctacacccctagagcagatgggctgcaggctgggctcacccggagctgtcaaccacagcatattgatcttatagcatgtggttactccgcatagccagcttgggctttcttacagtatggcagtctcaaggcagaattc

SEQ ID NO: 192751 - DNA, 565 bp, Homo sapiens
tattaaatacggacatgaatggtgaccaaacaaactttaagtggtagaaaattaaaaggctttttaactcttcagctgaatcaactgaggactatatcaagtgagartaagtatgtattatacataaaactgatcacatttatcaactaaatggtttaactttgttttaaagggtgaaatacacttgaattgctgaagcattactttactaaattaaaaatatatatttctgcagacacacttaaaactccttctcaccaggcaaggttgctcacgcctgtaatcacagcactttgggaggctaaggcaggtggatgacttgagcccaggagtgggagaccagccagggcaacatggtgaaaccctgtctctacaaaaacattttttaaaaaaaattagctgggtgtggtgctgcatgcctatagtcccagctacttgggaggctgaggcaggaggatcacctgagcatggggacatcaaggctgcagtgagccatgattgtgccactgcactccagcctgggccacagaataagactcagtttcaaaaaacaaaacattccttc

SEQ ID NO: 192752 - DNA, 565 bp, Homo sapiens
tattaaatacggacatgaatggtgaccaaacaaactttaagtggtagaaaattaaaaggctttttaactcttcagctgaatcaactgaggactatatcaagtgagaataagtatgtattatacataaaactgatcacatttatcaacwaaatggtttaactttgttttaaagggtgaaatacacttgaattgctgaagcattactttactaaattaaaaatatatatttctgcagacacacttaaaactccttctcaccaggcaaggttgctcacgcctgtaatcacagcactttgggaggctaaggcaggtggatgacttgagcccaggagtgggagaccagccagggcaacatggtgaaaccctgtctctacaaaaacattttttaaaaaaaattagctgggtgtggtgctgcatgcctatagtcccagctacttgggaggctgaggcaggaggatcacctgagcatggggacatcaaggctgcagtgagccatgattgtgccactgcactccagcctgggccacagaataagactcagtttcaaaaaacaaaacattccttc

SEQ ID NO: 192753 - DNA, 554 bp, Homo sapiens
ctgtctcaatttctaaggtttgccttaaattctttacctcaattatttttacccttttagggttattatttggtggactaaagtgtttattagggtttggagttggagtagtctcaggcaaatgggaggttgagtttttgatttttgagaacgaattgccctagggggtctttccctgtgatgtctgctcttaacccmtatacccaagacgcttcctttggttcttggtttagaatggctggattgttaatggtgatgagtataggattgcattttaaattctggcagttatttggcagggagcccttggacagatgtagtttattctttaagggtctccagctcggagttacccaccccgtgtttaccgtccatccctgaaattgggtagtttaccatacatcatcccagctggggcggagtcatgcgctgctgtaatctgtatctggttcagggcaaagatacttatttgcctgtgagagctgtctctgatttttcaaattcccacaaggtaagaccgggcaggtattaaatcttatagtttgtggtgctac

SEQ ID NO: 192754 - DNA, 620 bp, Homo sapiens
aaaggagatttattacaaggaattctcatatgcaattgtagggtctggcyaagcaaactgaaagtccacagggcaggctgtcaggaaaggaagtagagcaggctggagatgcgtaggcactcgctgaaacttgtagtctctgaactcaaagaggacctgtgtcccactatagagagcttcttactaaataggaatatccagtagtttccattttaattaagttaaagtcaactaggttagagaatttaataacatctgaaaaatcccttcgcagcaacacctaaattagtgtttgtttgaaatactgagagaaggtattttttactataaaatggccactgcctcccttctgttctccgacacttactagaaaacatcacttgtagtccactctatgtggaaatgcattagaaaaggatcctggaaaatatagttcagcctagctaaattaataaaacagaaattgtggagggaaaatagcagataggaggcaggacaacttacagctcccactcagacagacagagcagtgtgtggagacccacgctgtgaacttttgcaccaagaactacaacaggaacataccaggaaagctgagagaatccacagactctttgaag

SEQ ID NO: 192755 - DNA, 620 bp, Homo sapiens
aaaggagatttattacaaggaattctcatatgcaattgtagggtctggctaagcaaactgaaagtccacagggcaggctgtcaggaaaggaagtagagcaggctggagatgcgtaggcactcgctgaaacttgtagtctctgaactcaaagaggacctgtgtcccactatagagagcttcttactaaataggaatatccagtagtttccattttaattaagttaaagtcaactagrttagagaatttaataacatctgaaaaatcccttcgcagcaacacctaaattagtgtttgtttgaaatactgagagaaggtattttttactataaaatggccactgcctcccttctgttctccgacacttactagaaaacatcacttgtagtccactctatgtggaaatgcattagaaaaggatcctggaaaatatagttcagcctagctaaattaataaaacagaaattgtggagggaaaatagcagataggaggcaggacaacttacagctcccactcagacagacagagcagtgtgtggagacccacgctgtgaacttttgcaccaagaactacaacaggaacataccaggaaagctgagagaatccacagactctttgaag

SEQ ID NO: 192756 - DNA, 577 bp, Homo sapiens
gtaatacccttaataactgtagctgactggatgaattataagaatatctgtagtctcatttaagtacttttgaaaataacaagaaatgcactgagagaggttaacattcagcctcctagagagatggagtttcagtccatggaaccctaatttggatataagaaattttactgttttttatagacatcagttggtaaagmctaagccataatattatttgtgactgactcttattgttcttttttcacaattatcctgcaaataattatcatatcttctcccctttatatcctgaaatacaaaaggaattgagactttgacaagttatatggaccaatattttgtctccagactaaaccatactttaaaactgacacgtgtattattcccaactaagaggtagaaactttgcaatgattgctaagatattgatattgtcttataacagctggataaagaaaaagcagtcacactgtttcacaatgttgtcatctttcttactatgagttatgaattttgtaatcactcatctttcatggaagaaatgtgatatggtttggctgtgtccccacccaaa

SEQ ID NO: 192757 - DNA, 577 bp, Homo sapiens
gtaatacccttaataactgtagctgactggatgaattataagaatatctgtagtctcatttaagtacttttgaaaataacaagaaatgcactgagagaggttaacattcagcctcctagagagatggagtttcagtccatggaaccctaatttggatataagaaattttactgttttttatagacatcagttggtaaagcctaagccataatattatttgtgactgactcttattgttcttttttcacaattatcctgyaaataattatcatatcttctcccctttatatcctgaaatacaaaaggaattgagactttgacaagttatatggaccaatattttgtctccagactaaaccatactttaaaactgacacgtgtattattcccaactaagaggtagaaactttgcaatgattgctaagatattgatattgtcttataacagctggataaagaaaaagcagtcacactgtttcacaatgttgtcatctttcttactatgagttatgaattttgtaatcactcatctttcatggaagaaatgtgatatggtttggctgtgtccccacccaaa

SEQ ID NO: 192758 - DNA, 577 bp, Homo sapiens
gtaatacccttaataactgtagctgactggatgaattataagaatatctgtagtctcatttaagtacttttgaaaataacaagaaatgcactgagagaggttaacattcagcctcctagagagatggagtttcagtccatggaaccctaatttggatataagaaattttactgttttttatagacatcagttggtaaagcctaagccataatattatttgtgactgactcttattgttcttttttcacaattatcctgcaaataattatcatatcttctcccctttatatcctgaaatacaaaaggaattgagactttgacaagttatatggaccaatattttgtctccagactaaaccatactttaaaactgacacgtgtattattcccaactaagaggtagaaactttgcaatgattgctaagatattgatrttgtcttataacagctggataaagaaaaagcagtcacactgtttcacaatgttgtcatctttcttactatgagttatgaattttgtaatcactcatctttcatggaagaaatgtgatatggtttggctgtgtccccacccaaa

SEQ ID NO: 192759 - DNA, 615 bp, Homo sapiens
tcccaaatttcccttttaaatgtacatactttatctgcttaattcttattaagtgccagctgtactatatattagcaaaattggtagaaagtwcatttttaaagaaagaatacactaaatgtagaaggccaaagatttgtagaaggccaaagattccttcacaactgcagtttgaaggaataaaagaaattaccttcattttatagcattaaaaatgaaatgagactgctactgtattttgagaacaaaataaatgtactgtcaaatactcttttatcttattttaaaacatcagaattgtgcatatttttagaaaacacaaaatgttgagcatctatgaacatcagaagaaaatgatgatatagattatgttgaatgttagttttaaactatagatggctgcaagttgattatccaaatcaaatacagcatggccttcctggatggacatcagttctcattaatgctcatatattaagaaatttttggagtggagtctaggagtaaaatttattctgttataattagttgcacctgaaatgctcttcaattagctagtgtaaattaatcaaggtcttatatccaggatactgaagtattcagagtaataaatgg

SEQ ID NO: 192760 - DNA, 629 bp, Homo sapiens
aatctctgcctccttctcttctgtctgtcaaatatttctctgcttcacttttataaagatacttactgtatatttaaggcctacctaagtaacctaggataaaattctcccctcaagattrttaagttaatcacatctctcatattaggaaatattcactcttttactacataaagtaatattttcaggttgtggggattaggacatgagcatatcttttggaggccaccattgagcccactacatacaatgatatatgctcatttggatatccaaaaatttctttcaaataaacttattcaattgtctcttttgagcccttctttctttgacttccttgtttctggatatttctttcttctttttatatttataaatccctgggttttgtttgtatgtttgtttgttttttgagtcagagtctcactttgtcacccaggctggagtgcagtggcactatcttggctcactgcatgctccgcctcccaggttcatgccattctcctgcctcagcctcccatgtagctgggactacaggcgcccatcagcatgcctggctaattttttgtatttttagtagagacggggtttcttcatattagccaggatggtctcgatctcctgacttc

SEQ ID NO: 192761 - DNA, 629 bp, Homo sapiens
aatctctgcctccttctcttctgtctgtcaaatatttctctgcttcacttttataaagatacttactgtatatttaaggcctacctaagtaacctaggataaaattctcccctcaagattattaagttaatcacatctctcatattaggaaatattcactcttttactacataaagtaatattttcaggttgtggggattaggacatgagcatatcttttggaggccaccattgagcccactacatacaatgatatatgctcatttggatatccaaaaatttctttcaaataaacttattcaattgtctcttttgagcccttctttctttgacttccttgtttctggatatttctttcttctttttatatttataaatccctgggttttgtttgtatgtttgtttgttttttgagtcagagtctcactttgtcacccaggctggagtgcagtggcactatcttggctcactgcatgctccgcctcccaggttcatgccattcwcctgcctcagcctcccatgtagctgggactacaggcgcccatcagcatgcctggctaattttttgtatttttagtagagacggggtttcttcatattagccaggatggtctcgatctcctgacttc

SEQ ID NO: 192762 - DNA, 574 bp, Homo sapiens
tagaacctttttaactccctgagctgcaacattaaaagcagagtccctatttaatgggcccaaatcaataaattcaccctatccaactctgtgtttcttccatcattatcccacgccctgtatatccattcccatgcctgttcttcagatttctgtttatataaatttaaaaactcaagcaggtcttttcgagtgtagcacaccctcctcatgggtcacactgtccacctgggacttcagtctatttataggtctagaagaaaacaggaacgttgggggtggctcctggggagaatcaacattatcttgcctgacaactctcttggggaggccaccactgttgcctcaggcagcgcagggttcacctccttagacaaaggtgggaaggctgatggcagcatgggtcagggagggatgttgccactactggggayggggaagctttttcttctggcaaaagtttcatcagagtttacaaactcagtgtctccagcttcatcagggtcctcccacacatccccattccaagttttagggtcccgttcttttccaatcaatgtcctcattttaacag

SEQ ID NO: 192763 - DNA, 518 bp, Homo sapiens
gaagctgcttgttcctctgccttcaggctggtgtcaccttggatatgcctacagagtttacctgccagagcataacaaatatagagtgcatgtggattatttttcttttcataattttctgtgttgagtgatatttctatttcactgtttctgtacagacagagcttaaaataattttacggttgacttagatgaaggaataagacttgaattttgcgtaggtmacttgcaaacgcaaaagggataagagaatatatggtagagttgaggaaatgcaaataatttagttaaccaaagagaaagagtgaagaaggttgatacattacattgataaaagtatacagatggcatatcctaaggtgctagaaataaatttttatgttaggcacatatttctggaaactatgaactagatagagaaaaggctagtttgagtattacatttttctaggcaataaatgatgaaaatttgaacttgatgcttatattttcgatggataacgtgatagttaattttg

SEQ ID NO: 192764 - DNA, 591 bp, Homo sapiens
tccctctgctgatctcagagtttcctggcttttcctccctcagccacttctcacccctttgctgtcctgtgtagtgatttggtgagaggaatcgttgctgcccccttcccctagcaccatatatgagtctcaagttttattattgcaataaaagtgctttatgctggcttttctcaaaaaataaataaataaataaataaataaaataaaaatacagtatgcacctgttcaccaaaaatctatggaaataaaaaaattamataaataactaaatataaataaaaatatggtatggaaccagcctaattactcatagaactgctgtttatggtttcttttgaataaacataaaaattgagactcccatcttaaaacttgagaaagttacatttgtcttatctgggttcctttctcaggaaaccacacatcaggccttccagacagtatcaaggaaaggaaacttacgagatcaccacatctggacaataagatgaaagactcctcacctatcatgatcgcataagtgaccacctgcttcctgttgaccaactcctcttctttacccctccctaattcctgttttcccacaca

SEQ ID NO: 192765 - DNA, 591 bp, Homo sapiens
tccctctgctgatctcagagtttcctggcttttcctccctcagccacttctcacccctttgctgtcctgtgtagtgatttggtgagaggaatcgttgctgcccccttcccctagcaccatatatgagtctcaagttttattattgcaataaaagtgctttatgctggcttttctcaaaaaataaataaataaataaataaataaaataaaaatacagtatgcacctgttcaccaaaaatctatggaaataaaaaaattaaataaataactaaatataaataaaaatatggtatggaaccagcctaattactcatagaactgctgtttatggtttcttttgaataaacataaaaattgagactcccatcttaaaacttgagaaagttacatttgtcttatctgggttcctttctcaggaaaccacacatcaggccttccagacagtatcaaggaaaggaaacttacsagatcaccacatctggacaataagatgaaagactcctcacctatcatgatcgcataagtgaccacctgcttcctgttgaccaactcctcttctttacccctccctaattcctgttttcccacaca

SEQ ID NO: 192766 - DNA, 411 bp, Homo sapiens
cctcccaacgcccccctcagagcaaggacaagaaaaccaattcctttgctatctcttcatctccttactgtttctcaatttcccaacttttgtaagttcctgtttttctttcaatgcagctacaaggtcacaagcttaaccctgtcactgtttgattaactgtgtttgttctgcttctgtaagcccacttgcctgcaccatgagtttcatgccattagactcccgccamcccaatcaaactagccagcccctttcaggagtatgtataaaagtcaagccctgtctttgttcagggctcagcttttggatgtgaatcttctgggccagtggccacttaaataaaatcctcctgtttcacccattggtctctctggtccttctgattcctgcaacattacaaattcacttgta

SEQ ID NO: 192767 - DNA, 595 bp, Homo sapiens
tgagatatgccaaattggccaaatcttcaaattacactctaaattgctgcatttgtggaaagctagccaaaatattagatggaataatgttaaatatattgtgtgtcatgtgtgattcattttcctacaattatatctttattgtttcaattagtgcttttttcccaattgattcacatttttctgataattgaattgctgaagaagagggatgtgtcactgtccagcttttttaaactgtaagaaataatgtaatgtttctaaatttgaaatatatcagccttcctagattaaaagctccaaatatttatgttcacattttgacaattctctggttttggtaatgtctaaaatgacatcaaaattcaatttcattcaaaacttagccaactattttatagaatttttgagattgtttttgtcatcttatgcaaactgcttgaggaatatgacatatatcaacctccaataatttgtaaaatgttataaaataatgatatcttttgtyttttaatccatacagataaatcatttatttcaagatctctcgtttaaaaatatgctgagactgcctatgtaattcatcaggtcaaca

SEQ ID NO: 192768 - DNA, 595 bp, Homo sapiens
tgagatatgccaaattggccaaatcttcaaattacactctaaattgctgcatttgtggaaagctagccaaaatattagatggaataatgttaaatatattgtgtgtcatgtgtgattcattttcctacaattatatctttattgtttcaattagtgcttttttcccaattgattcacatttttctgataattgaattgctgaagaagagggatgtgtcactgtccagcttttttaaactgtaagaaataatgtaatgtttctaaatttgaaatatatcagccttcctagattaaaagctccaaatatttatgttcacattttgacaattctctggttttggtaatgtctaaaatgacatcaaaattcaatttcattcaaaacttagccaactattttatagaatttttgagattgtttttgtcatcttatgcaaactgcttgaggaatatgacatatatcaacctccaataatttgtaaaatgttataaaataatgatatcttttgttttttaatccatacagataaatcatttatttcaagatctctcgtttaaaaatatgytgagactgcctatgtaattcatcaggtcaaca

SEQ ID NO: 192769 - DNA, 525 bp, Homo sapiens
ttactaaagaaatcagcttagaaatgctgtagccccaattattttgcatgccaactattcagctgaaaattcagcttttggattaaatcaagyattgaatggataatttatccccaatcatgaattatattaggcctaaaaatgacagaaaacaaagagtaaacttacttgcggaatttatttctgtattgtcatggacaataaaaaaacactcgtaaaataaaagcagatattttttctgaattatttggtagaatttgaagtatttttttaaaaaataaaagcacttataaatgttttatttcattgattgaagggaaattttatgagatgtgaaaggaaagttaaatatgaattttgtctgcttttgccactggccctgtactgtgtcctgtcatatgattagcagcagataacaatgctctgtatgaaccatatcacaactcattctggctttattgaattacttttccaccacagtcaagttggatctcacttcaagggttgcttcaatttcaagatttc

SEQ ID NO: 192770 - DNA, 554 bp, Homo sapiens
tctgtgtgtgtgtgtgtgtgtgtgtgtgtgaatctgatgtgaataatgcatttcagaattctttacagtactgtgggcaaatgcaatgtgtaaaatgtcctttcctgttgtaagtacatatcctgaaatagctgtttctgtcctatgaaaatctgcacttattattaacaagaataaagaggtgttgcataactccaactagtatcaaacaaaaaccatgtgatctcttgacattgcaagaattttccctcytgggaatatcagatagctcaaaaaggttaaacgtgctgccaaaattatattcttaaaaatatcccaaaccatataagacagaagccattcaatcagaaactattctgtatggaatctctctccttcctaaaagaaataagtgatgaagtgaaatgagatcattcacatgtcaagaaggtattaactgtcttagctgcaatcttgattaatagtcatcacattggacctaatagcacagtggataacatacttttttaagcatgtaaaagccttcctcagatattaagaagatattctaggta

SEQ ID NO: 192771 - DNA, 594 bp, Homo sapiens
tgaaccctaactcctccaatcctgcctgggtgtgcaccatgttatctgacggttagaaataattaaatctttcccattgctgttcaaattacctgcattctcactagcatccactagagggtcgtagctgcactatgtaaagagatggcctttgcctctttttcttcctattcttttttgtgtacccaaacaagcaaggaaacactgagcaaacagtatagtcctcagagttgaaaagctgcctattagctcgaactgttgccatcgagagactgatgtggcagaaatgtcttgctctgtttccgaggctgccgatccgttcacttggcaaactccagagaaacaaggcccagcacgccccagtttaacaaagttgaataaaaggccatttcatctcagggctacttagtccaaatcaaataatgcytaagctatttggtccaagccagctcaagtgctcagacatcatacaaggctttcttggctgagaagaagcaccaccaccaccagtcgctgcacacatttagcttgttcctgctgttttcaccagcctaacttcccagctggagtaggtaccaaattcaaaatcaagct

SEQ ID NO: 192772 - DNA, 556 bp, Homo sapiens
gatgttgacatttgttttacattgttttacatgacactgtttacaatttttgtaatttgtcaccataatgggtagtttgaatcagattccctccattcccacccttttctactaaattaggaaatccaacttacaattatagatcacagaaattttcattaagtgtttgatggctctttctaatagtttagggtttctcttgggaagaggtaagtgtgttcatacgtgggaggaagagttaaataggtatatggcaaccaggaggattgattgtgaccaagactatgtgtttcataaaccctgtttcctcttcttccttgatacatagctagactacgtttcctaacttctctttaagtcaggtgtggccctgttgctgaattttagccaacagaactgggcaaaagaatgcattccacttctggatccagttggtccatgaaagctcccacaggtgatccagctagagtccccaaagtgagcttgggcatcrtaaaaagatgacagtaaaactagaagatggaaagacactgggtccctgaatcactgtttgtag

SEQ ID NO: 192773 - DNA, 598 bp, Homo sapiens
aacgttgtgcaggtgttttgccaaagaacagggtagacagaacactgtttacctattcatctgtatttttatctagcatacctgcctgataacaattgacactcaccttagctggaactgattactaaataatagtgtaaaacggtatgtctagagtaaagggaacagcaagagtacaacttgctgcagttttaaattctattttgaacaaaacattcacaaaaaatatcaataatttaggtactgaaaagtatttgaaacaatgaatgaaatactagrctttcatcctttacccaccaaaaacaggaatataagtcaatggaaaatattcctgcagtggaacatttacaagcagttgttggtgttggtattcttaagaataaacagttcaaattgccctgcaaaggccaagtttggtttgcgttaattaacattgactacttgtgagaccagcttccaagagtttacttagatctttgaagtcaatcaaaataaaatatcctacttgcattaatgtaatgaacatttagaaacagaaaagaatatgaaagtttcctaaattcatcaaaagtagtgctattaacacaagaatggttct

SEQ ID NO: 192774 - DNA, 598 bp, Homo sapiens
aacgttgtgcaggtgttttgccaaagaacagggtagacagaacactgtttacctattcatctgtatttttatctagcatacctgcctgataacaattgacactcaccttagctggaactgattactaaataatagtgtaaaacggtatgtctagagtaaagggaacagcaagagtacaacttgctgcagttttaaattctattttgaacaaaacattcacaaaaaatatcaataatttaggtactgaaaagtatttgaaacaatgaatgaaatactaggctttcatcctttacccaccaaaaacaggaatataagtcaatggaaaatattcctgcagtggaacatttacaagcagttgttggtgttggtattcttaagaataaacagttcaaattgccctgcaaaggccaagtttggtttgcrttaattaacattgactacttgtgagaccagcttccaagagtttacttagatctttgaagtcaatcaaaataaaatatcctacttgcattaatgtaatgaacatttagaaacagaaaagaatatgaaagtttcctaaattcatcaaaagtagtgctattaacacaagaatggttct

SEQ ID NO: 192775 - DNA, 576 bp, Homo sapiens
attcaaagaaatttaagataacacagagaaggaattcagaatcctatcagatatatgtaacaagaaaattgaagtaattaaaaagaattaagcagaaaatctggagttgaaaaatgcaactggagacagagcaagaccctgtctctaaaagaaaaaaaaaagaaagaaaagaaaaatgcaactggcatactgaagaatgcatcagagtctcttaacagcaaaattgattcagcagaaagaaaaaattagtgcgcttaaagacaggtatctgaaaatacaaagtcagaggagacaaaagaaaaaagaataaagcatgcctgtaagatctagaaaatagcctcaaaagaaccaatctaagagttattggccttaaagaggaggtagagagataggggtagaawgtttatgtaaagggataacaacagagaatgtcccaaacctatagaaggctaccaatatttaatattgatacactctatacaagagtgttacagaacactaagcagatttaacccaaaaaaacactatcttatggtatttaataatcaaactcccaaaagtcaagaatgaaaaaga

SEQ ID NO: 192776 - DNA, 517 bp, Homo sapiens
tgcactctacccatcctaggattagtctgctaaaaggaattcatagagtagtatctaggtcatgccagggataaaattttaattgaactcttttggctccttgtaggataccaaattttttatgttaaaaatttcctactatgtagattgtgctttatattattagtcaatcactacaactcttacgaacattatgttcctttaaaaaccattctttttgttccaaatacataaaaagcttttaaaatgctctcagttagttggcttccaacagaaaagcaagtaaagaaaaataacttaaaattwtcacttctttgtaggatttaaagctaatagcacaaatctaatagttcgtctaagtgcaacatcctccaaacagaccttgaacctcaggtaatcgcacactcaccagttttcctgtttcacacctctgaatttaaaatcttctctggtggtaaagactggcaaagctgcctaagcttttctggcttatgcacttcgtagctcctttcactat

SEQ ID NO: 192777 - DNA, 657 bp, Homo sapiens
tgtaaagagtaaataggatttcgaattgacaattatctctgtgcttggagctgtaaagaaccaagatgtcactgacactgttccttatttcatggtccttaaagataaaaggatgtctataatggtgaaatagtattaatcataggataaccaaagaaacagtaaccttataaacattagaaacattaactttgtaaaaacttaaatataatctcgttggtggtcaaaacacactttcaaaatgcatgaatctgcaagctggttttaatgacactatcatggaagcccatgacagggatgctgctgattaatgggctaataaattatttaattggatttttccctccattcrattgtaaaatctatgcatttcttagcttatgtaaggtctgttagtgccttcctaagcattctattttgtcaaaatgtagactgaagaagtaaatagaagacttatacacttaaccacaacttttgacattaaacttttttttttaactcagtactgttaactcaaaacaatgtcatgaatggtgaatacagcaagccttccttgtgtatgtttgtttttaaagatgatgctggtttaactgtaattctaagtcaggaatttcctcacacttcccaatttagaaccttcagttaattaaaggtcag

SEQ ID NO: 192778 - DNA, 657 bp, Homo sapiens
tgtaaagagtaaataggatttcgaattgacaattatctctgtgcttggagctgtaaagaaccaagatgtcactgacactgttccttatttcatggtccttaaagataaaaggatgtctataatggtgaaatagtattaatcataggataaccaaagaaacagtaaccttataaacattagaaacattaactttgtaaaaacttaaatataatctcgttggtggtcaaaacacactttcaaaatgcatgaatctgcaagctggttttaatgacactatcatggaagcccatgacagggatgctgctgattaatgggctaataaattatttaattggatttttccctccattcaattgtaaaatctatgcatttcttagcttatgtaaggtctgttagtgccttcctaagcattctattttgtcaaaatgtagactgaagaagtaaatagaagacttatacacttaaccacaacttttgacattaaacttttttttttaactcagtactgttaactcaaaacaatgtcatgaatggtgaatacagcaagccttccttgtgtatgtttgtttttaaagatgatgctggtttaactrtaattctaagtcaggaatttcctcacacttcccaatttagaaccttcagttaattaaaggtcag

SEQ ID NO: 192779 - DNA, 548 bp, Homo sapiens
ccaggctggtactgcatgccagggactctacagttttggtatctcaagggtagtccygctccacaggtccactaaatattgtcttagtgcagtctttctgcagtgtctctgcctctgtggcaggtctctggttggaactctgaggctgtctatagcatcctttgaaatattcgtgcagaaagccatacctccacagtttgtgcactttgtgtgcctgcagaattagaactgtctggatgctgccaagttttgtagtttgtgccctttggagtgacagcctgagctgtactggtcctgcttgagtcacagcttggtgcctgagaagagctgtgctggaatgtagggaacagagacttgaggtggccataggcagtgagctccaaggacccatgggtaccctaggcccctcctatgaaactgttctgccctcaaggccctagatatccgcaatgcttttggggtcaatttctcattgtcttgatgagtagcactggcttccttccgtccacactaatctccttaataaatggtcattgggccacaccctt

SEQ ID NO: 192780 - DNA, 528 bp, Homo sapiens
ataggcagttgctggaaatactttatctgttcatggaaactactctgctcactgcagcctccacctcctgagttcaagcaattctcctgcctcagtttctcaagtagctggaattatacgtgcatgtggccacacccagcttatagcatatatatatrtatatatatatatatataatttttttttctagtggagatccccatctctactaaacatcttcaccatgttggccaggctggtcttgaactcctgatgattcacttgcctcccaatgaaactactcctaacctagtgtgttatcattctgttctgccatcttatattggcccccattcacatgggtgttacccaatggttgcaagatggcactacatcttcagacaacatgtctgtgttcaaagtcagattagtggtatgggtggttgtatcagctcatatgtccctttggaatgtaaaaactttcccaagaaatccaggagaaatcaatttacatgtcaatggacagaactgtcatatagccactcccta

SEQ ID NO: 192781 - DNA, 624 bp, Homo sapiens
ctgctttcactgtatctcataggtttcagtatattatgtttctgttatcgactgtttcaagaaattttttcatttccttcttaatttcttcattgatccattggtctttcaggagcatattgtttaatttccatgtgtttatgtagtttccaaaatccttcttgatattaatttctaattttatttccttgtggtcagggatggtacttgatggtatttcaacttttttgagtgttttaagacttgttttgtgacctaatatatggtctatccttgagaataatccatgtgctgaggaaaaaaatttgtattctgcagccattggataaaatattttgtaaatatgtgttatatccatttggtctgtagtgcagattaagtctgatgtttctttgttgatttttctgtctgaaagatctgtctaatggtgaaagtggggtgttgcagtctccatctattattgcactgtggtctgtctctttctttagctctaataatgtttgatttatatatctgggtgctccagtgttgggtgcatatatatttataatcgttaactcctctgactgaattgacccctttataattaygtaatggccttctttgtctcttcttgtagttttt

SEQ ID NO: 192782 - DNA, 547 bp, Homo sapiens
ttttgccattatttcctgtttcrttttttgttttggggggtgttttgggggtaaattttaatatacccagtggtagcctctgtttgcatctcatattcaaatacacaattgatcactaattatcatggaaatgcaaatcaaaaccacaataagatatcatctcaccccagttacaatagctctaatcagaagaacaaaaataacaaatgctggtgaggatgtggagaatggggaacattcaggcacagctgataggaatgtaaagtagtatagccattatggaaaacagcatggagtttcctcagaaaactaaaaatagaactaccagatgatccagcaatggactgtttagtatatagccaatactagcttttctttgtagtttcttgacctttatggatttggatatatttgacttccttttttggtatactttcttttttttttttttggattgtgtaaggctggtctctcctggctttctgctaacatcactgactacagcttttctgtctcctttgctgagtctcaattcacttctaattga

SEQ ID NO: 192783 - DNA, 547 bp, Homo sapiens
ttttgccattatttcctgtttcgttttttgttttggggggtgttttgggggtaaattttaayatacccagtggtagcctctgtttgcatctcatattcaaatacacaattgatcactaattatcatggaaatgcaaatcaaaaccacaataagatatcatctcaccccagttacaatagctctaatcagaagaacaaaaataacaaatgctggtgaggatgtggagaatggggaacattcaggcacagctgataggaatgtaaagtagtatagccattatggaaaacagcatggagtttcctcagaaaactaaaaatagaactaccagatgatccagcaatggactgtttagtatatagccaatactagcttttctttgtagtttcttgacctttatggatttggatatatttgacttccttttttggtatactttcttttttttttttttggattgtgtaaggctggtctctcctggctttctgctaacatcactgactacagcttttctgtctcctttgctgagtctcaattcacttctaattga

SEQ ID NO: 192784 - DNA, 547 bp, Homo sapiens
ttttgccattatttcctgtttcgttttttgttttggggggtgttttgggggtaaattttaatatacccagtggtagcctctgtttgcatctcatattcaaatacacaattgatcactaatyatcatggaaatgcaaatcaaaaccacaataagatatcatctcaccccagttacaatagctctaatcagaagaacaaaaataacaaatgctggtgaggatgtggagaatggggaacattcaggcacagctgataggaatgtaaagtagtatagccattatggaaaacagcatggagtttcctcagaaaactaaaaatagaactaccagatgatccagcaatggactgtttagtatatagccaatactagcttttctttgtagtttcttgacctttatggatttggatatatttgacttccttttttggtatactttcttttttttttttttggattgtgtaaggctggtctctcctggctttctgctaacatcactgactacagcttttctgtctcctttgctgagtctcaattcacttctaattga

SEQ ID NO: 192785 - DNA, 550 bp, Homo sapiens
acttaatattgatggcataaagaacaaaaaactaacatacaatcaaaatgaaaactaataaaaaccctacaccttaactttatccacctactttttwagttattgctgtttctacttatatcttatcatactgttcatgtcttgaaaagtagttgttgttataatattatttttgattggttgatctttgtctttctacttaagagtaatttacacagcataagtacaatattatcatattctgtatttttctgtgtatttatattgccagtgagttttgtaccttcagatgattccttattactcattagcattcttttcttcctgattgaagaactccttttagtatttcttgtaggagaggtctggtgttgatgaaatgccttagcttttgtttgccagggaaagtctttatttctccttcatgtttgaaggacattttccctgaatatactactctaggataaaaggttttttccttcagcactttgaatgtgtcatgccactctctgctggcctgtaaagtttccaatgaaaagtctactgccag

SEQ ID NO: 192786 - DNA, 547 bp, Homo sapiens
tatctaccaccagtccccatccatggatgggaagaagattttagaaagactctgggatggtttcagaaagtccagagggcactggactgagtcaacacactcaggtacactttaatgccctctttggaagtcaataccatattcagtttcccaacatagaaaggcttttgaaagatgaaccaattctgcaccacctacaaagcttcggattacttgaagtactcattaattcccatgacattttctgcctgttgaaattgttcaatgcttacctcaaacttggcttttcccaaatatttccccatatcaaatgtttgctttcccaccactgaaaatcatattgcattttgcatctataaacatatctcaatttatcttaacttacatttatttgtatgattgtcttactgtctatgttaatctgctattgccatcataatgctgcaagaaaaaaaccccaaatattaatggcttccaaccacaaccactgagttttctccttttactrtgtttgtcattttcctatgaccggtgactatcaggtgca

SEQ ID NO: 192787 - DNA, 542 bp, Homo sapiens
atcacgaaggtttctttgccaatacatcagtttcaaatatctctctcctcatcctgcttcccagtttgctgttcccaatatatcttctgttcaacaatgtatgccatagggtctgtttgttgggaatctaagacaccaggatgtgctaccacatggagaaaggggtaaaagggagccccatttctgtgcacaggaagggaaaaaggaagtagaaagcatggacctcagtctttaagtcataacatccacctactaataaacatgacccaataaatgctgtgtcttctccatattggaaactctctaccaaaagaaggaatgactatggaggatgcataattgttttaagaatactcaaagtgtagagaaggtgtttggatagaagytctatccttcattgtacaaaaggaaaaacggacactgaaggggaattattttctcccttaaaaattattgtccttgaattataagaagtatgtattcgcattttatggaaagcagaagataatactcagaaagcctttaaggtttttagagcaagt

SEQ ID NO: 192788 - DNA, 674 bp, Homo sapiens
gacctcagtctttaagtcataacatccacctactaataaacatgacccaataaatgctgtgtcttctccatattggaaactctctaccaaaagaaggaatgactatggaggatgcataattgttttaagaatactcaaagtgtagagaaggtgtttggatagaagttctatccttcattgtacaaaaggaaaaacggacactgaaggggaattattttctcccttaaaaattattgtccttgaattataagaagtatgtattcgcattttatggaaagcagaagataatactcagaaagcctttaaggtttttagagcaagttattttttaaacatttaaaaactgtaaaataatttctataatagaagtgggaacaagaagaaaataattgattaaaaccagctagaaattaaaaatcaagrtacagcaagtccttaattaataaaagaattaagctctaaaagtataattgtaaggtcaatgtttaaaattgaatacacttgcccttcagaaatagttttctaagacagcttactaaaacctttttaaactcataatatatagagtatgttgtggctttgaggcagaatattcccatcaccacaatgcctgtctatcctatattgagagtagctctgcagagctaaacctgctgacatgacattcagcaaag

SEQ ID NO: 192789 - DNA, 674 bp, Homo sapiens
gacctcagtctttaagtcataacatccacctactaataaacatgacccaataaatgctgtgtcttctccatattggaaactctctaccaaaagaaggaatgactatggaggatgcataattgttttaagaatactcaaagtgtagagaaggtgtttggatagaagttctatccttcattgtacaaaaggaaaaacggacactgaaggggaattattttctcccttaaaaattattgtccttgaattataagaagtatgtattcgcattttatggaaagcagaagataatactcagaaagcctttaaggtttttagagcaagttattttttaaacatttaaaaactgtaaaataatttctataatagaagtgggaacaagaagaaaataattgattaaaaccagctagaaattaaaaatcaagatacagcaagtccttaattaataaaagaattaagctctaaaagtataattgtaaggtcaatgtttaaaattgaatacacttgcccttcagaaatagttttctaagacagcttactaaaacctttttaaactcataatatatagagtatgttgtggctttgaggcagaatattcccatcaccrcaatgcctgtctatcctatattgagagtagctctgcagagctaaacctgctgacatgacattcagcaaag

SEQ ID NO: 192790 - DNA, 616 bp, Homo sapiens
tcaaattaattttgagtgacattcttttagcctttgtggaagaagggagactggagacagaagataaattttgaagccacgtgggggtctgggtttgagagattagatctgggtaacacaaaggatatagaaaaagaaagaaaggaacaaaatgcattcccttttctgttagagggaaatggtgagattggggtaagcacagttggggaagcttccagcaggttttcaggtcactggagtggcaggtgacagagtggacaggttataaatatgttgraaaaacatgctatttactgcccccatctataataatgtgaatacttttgaagggtacagaaggagggaaatgtgggaatgagatgggcttgttcttaatgggtttgaaattggggtagtgcacatgtctaggtaagatgtgggtctaggtcatggagaatgggatgagaaaatagcggtgaagaaagaaggatttgagaactcacagtaacatcagacgaggtagtgaggagggaaggatgaaagtcatatacaatgttctaattgatcagtaggccttctgggatcatagagactcaaagcctgggaaagtaaaagtgaatgctaggaggttgggaag

SEQ ID NO: 192791 - DNA, 644 bp, Homo sapiens
gatcaacaaacaatcaattcagtattattcctaatgtagaggttctcagctgtattctcatattagagtcacctgagaatattttttaaaacccatgcccaggtcacaccccagaatgatacgtaagtttcctagagggttccaatatgcaggcagggtagacaatcactgcaataacccaacaagcagataacaactcatatgaaaaagctgaaggaaacctctggtctcttattggaatgagagaggtgccaaatgcaaaagccaggtgatctgccaacctattctcakttaggaggaagtcctggggaggaaaaggaaaaggatctcacttttagcgatttataggtaaaattccaatgtttgttgttatgggtggaattgtgtcaccccactaaaaaaacatgttcaagtcataaccctcagtacctcagaatgtaacctcatttggaaataaagtgtctacagaggaaatcaaattaaaatgaaatcattagggtaggccctaattcaatgtgactgatgtccttatacaaaggggaagtttgtatatgcagagacagacaaactcacgaaggaaaatgatgtgaagacgtataggaaaaaggtggccaggggactaaaacgatgcatttacaagcaaa

SEQ ID NO: 192792 - DNA, 622 bp, Homo sapiens
agctttatttcattaagttgatattcaacctctaatatcctttcttttgcttgatcagttcagctattgatacttgtgtatgcttcacgaagttcttgtgctgtgtttttcagctccatcaggtcatttatgttcttctctaaactggttactctagttagcagttcctgtaaccttttctcaaggttcttaacttccttgcaytgggttagaacatgctcctttagctcggaggagtttgttattctgaagcctacttctgtcagtttgtcaaactcattctccatccagttttgttctcatgctggtgaggagttgtgatcctttggaggcgaagaggcattttgtttttttttttccagcagttttgctctattttttcctcatctttgtggatttgtctacctttgatctttgatattggtgaccttcagatagggttttttcatatgcgtcctttctgttgatgttgatgttattgccttctgtttgttagttttccttctaacagttaggcccctcttctgcaggtctgctggaatttgctggaggtccactccagaccctgttttcctgggtatcaccagcagaggctgaagagcagcaaatattgctgcctgct

SEQ ID NO: 192793 - DNA, 483 bp, Homo sapiens
tcattcttttttctctaatcttatcttcaagctttatttcattaagttgatattcaacctctaatatcctttcttttgcttgatcagttcagctattgatacttgtgtatgcttcacgaagttcttgtgctgtgtttttcagctccatcaggtcatttatgttcttctctaaactggttactctagttagcagttcctgtaaccttttctcaaggttcttaacttccttgcactgggttagaacatgctcctttagctcggaggagtttgttattytgaagcctacttctgtcagtttgtcaaactcattctccatccagttttgttctcatgctggtgaggagttgtgatcctttggaggcgaagaggcattttgtttttttttttccagcagttttgctctattttttcctcatctttgtggatttgtctacctttgatctttgatattggtgaccttcagatagggttttttcatatgcg

SEQ ID NO: 192794 - DNA, 612 bp, Homo sapiens
cccctaggaaatcttatgcatgtctaatcctgccttgccatctgcttctcaaaagatctggattaacacggacgtctaggttcttatattaaggcaaattgtattatattctaaagctcttagtgggctaaggagttaattctcctccaaaagaccttcactcacaggtggaagcagagccaaaagatttaaggactttaaagtactaacattaaaagactatattaaatctattaaaataacccatttacaaaggctaatgctagcattagtgaaaataatgacaaatgtatgtttggaattcaaaaataatccttggtcaaggccgtttggcccatgtcttagaatcaatcacagaatgtactttctgaagtgtttctttattatagcaaatgcccaaaagacaayagtagaaatcaataaagctagaatagggttaagtctacatgttctgaataggcataatctttaagagtgtattatcatgaaacaagtttcaggaccctaaactgacactggaagaaaaaaaattcaaattctcatcagatccacagtccaaaacctcaacatttctattactgaagagggttcccaccataccgtcatttaaac

SEQ ID NO: 192795 - DNA, 578 bp, Homo sapiens
ttttttaacagttagaaaatagacgtaatcagggttttttttcatttaacttcacaaaacagtaatatgtaaagtttctagtacacacagcttctgctttaccatatgacagacccgtgacacgttaaggagcaaggaatatgcatatgcctatatcaattaatcacctctagtaagagtggttttttattttacaagaaactcagtaacaatggaagaaagacaaacactaaggtagatcctcaagcagtgggcaaaatatccagaaatctgtctcaaattttcttggaaacattcagtgccatgaaattcttccatcaggaagaatttccatccacagaaatacaaactaccatcagagaagactataaacacctctatgcaaataagctagaaaatctagaagaaatsgataaattcctggacacatacaccctcccaagactaaaccaggaagaagtcgaatccctgaatagaccaataacaagttctgatgttgaggcagtaattaatagcttacgaaccaaaaaaagcccaggaccagatggattcacagccgaattctatcagaggtacaa

SEQ ID NO: 192796 - DNA, 578 bp, Homo sapiens
ttttttaacagttagaaaatagacgtaatcagggttttttttcatttaacttcacaaaacagtaatatgtaaagtttctagtacacacagcttctgctttaccatatgacagacccgtgacacgttaaggagcaaggaatatgcatatgcctatatcaattaatcacctctagtaagagtggttttttattttacaagaaactcagtaacaatggaagaaagacaaacactaaggtagatcctcaagcagtgggcaaaatatccagaaatctgtctcaaattttcttggaaacattcagtgccatgaaattcttccatcaggaagaatttccatccacagaaatacaaactaccatcagagaagactataaacacctctatgcaaataagctagaaaatctagaagaaatggataaattcctggacacayacaccctcccaagactaaaccaggaagaagtcgaatccctgaatagaccaataacaagttctgatgttgaggcagtaattaatagcttacgaaccaaaaaaagcccaggaccagatggattcacagccgaattctatcagaggtacaa

SEQ ID NO: 192797 - DNA, 592 bp, Homo sapiens
tgaaggaggaataatgaaattaggaatttcagcaatagtgttttacatacacctcatgagttaaatatcaaggttattcaacctttgataattatttcagtgtcactggaatcttaatgtataggaaggaatagcaaccctttaatctccaagatcatgccttattagttgctgatattccactgatactatcccatacaataaagctagcaaagtagggatcttaaatatacagagaattcagaatttcctacaatttaggaaggagacattttttactttgaagtctgataaatcattaatgctcayacatttaccccttttctctttctgattagtttttttttcctggtgaagaatgcgggatggaaatagatgatggagtatggagggtgtggagagacatctgtgtctagtgcctatccaaagatgctaaagagatgaaatagaggagtcctaattgcagataatggatttctaaggggctaaataaatggagaggagttggaaaaaagaaagattcggttgacaatttcagaaagaacaaaacagcagcaatatggctatatgggcctcaaagctgaatcacaga

SEQ ID NO: 192798 - DNA, 592 bp, Homo sapiens
tgaaggaggaataatgaaattaggaatttcagcaatagtgttttacatacacctcatgagttaaatatcaaggttattcaacctttgataattatttcagtgtcactggaatcttaatgtataggaaggaatagcaaccctttaatctccaagatcatgccttattagttgctgatattccactgatactatcccatacaataaagctagcaaagtagggatcttaaatatacagagaattcagaatttcctacaatttaggaaggagacattttttactttgaagtctgataaatcattaatgctcacacatttacccctyttctctttctgattagtttttttttcctggtgaagaatgcgggatggaaatagatgatggagtatggagggtgtggagagacatctgtgtctagtgcctatccaaagatgctaaagagatgaaatagaggagtcctaattgcagataatggatttctaaggggctaaataaatggagaggagttggaaaaaagaaagattcggttgacaatttcagaaagaacaaaacagcagcaatatggctatatgggcctcaaagctgaatcacaga

SEQ ID NO: 192799 - DNA, 412 bp, Homo sapiens
ggaagggtttggagagatcagaagaagacaggaagatgagggcaagttttgaacttactagagtcttgttacattgttgtgaccaagctactgatagagacacacaatgaagtccaggctgaggaggtctcagatggagataaggaacttaatgggaactggagcaaaggtcactttagttaggcattagcaaaaaggttggctgcactgtgsgcctgccctagggatctgtggaattttgaacttgagagtatctcaagttctggtgggtatctggtggaaaaaatttctaagcagcaaagcattcaggaggtaatctcactacttctaacaaactattttgatgtgtgtgagcaaagaaatgacctcaaactgaaacttatatttagaagggaagcagagtgtagaaact

SEQ ID NO: 192800 - DNA, 412 bp, Homo sapiens
ggaagggtttggagagatcagaagaagacaggaagatgagggcaagttttgaacttactagagtcttgttacattgttgtgaccaagctactgatagagacacacaatgaagtccaggctgaggaggtctcagatggagataaggaacttaatgggaactggagcaaaggtcactttagttaggcattagcaaaaaggttggctgcactgtgcgcctgccctagggatctgtggaattttgaacttgagagtatctcaagttctggtgggtatctggtggaaaaaatttctaagcagcaaagcattcaggaggtaakctcactacttctaacaaactattttgatgtgtgtgagcaaagaaatgacctcaaactgaaacttatatttagaagggaagcagagtgtagaaact

SEQ ID NO: 192801 - DNA, 412 bp, Homo sapiens
ggaagggtttggagagatcagaagaagacaggaagatgagggcaagttttgaacttactagagtcttgttacattgttgtgaccaagctactgatagagacacacaatgaagtccaggctgaggaggtctcagatggagataaggaacttaatgggaactggagcaaaggtcactttagttaggcattagcaaaaaggttggctgcactgtgcgcctgccctagggatctgtggaattttgaacttgagagtatctcaagttctggtgggtatctggtggaaaaaatttctaagcagcaaagcattcaggaggtaatctcactacttctracaaactattttgatgtgtgtgagcaaagaaatgacctcaaactgaaacttatatttagaagggaagcagagtgtagaaact

SEQ ID NO: 192802 - DNA, 560 bp, Homo sapiens
caggccatattttctctggttgttcctggccaatgactgagcatgctcggagtattgatgaaggccatttttaagatttgtgataaccttccaacagaagactttggactggagactyctattgtctgggccaaaatttcctaaactgtgtttcaggctgtgactctttcattctcatccttcttccttctccccctcctttgacagaagccaggcttgcatcactgaagactccctgcacttagatctgctttttcttcttaatctttaactaacgttcctctcataaccttttgagtgacttataattgcatagtatcagcttcttggaaaacctgacttgataaactatcctatttgaaatacagatatatacgcatttaacaatttttgacattattagcacactgagtattaaatagtatctgaaaagagatacctttaaaaatgaaaacaccttcctattggggttttcttcaaaacagattatttttaaaaagattacaactatagcaacttcagtctctcctgttttatctactagagtggtttgcttcctc

SEQ ID NO: 192803 - DNA, 560 bp, Homo sapiens
caggccatattttctctggttgttcctggccaatgactgagcatgctcggagtattgatgaaggccatttttaagatttgtgataaccttccaacagaagactttggactggagacttctattgtcygggccaaaatttcctaaactgtgtttcaggctgtgactctttcattctcatccttcttccttctccccctcctttgacagaagccaggcttgcatcactgaagactccctgcacttagatctgctttttcttcttaatctttaactaacgttcctctcataaccttttgagtgacttataattgcatagtatcagcttcttggaaaacctgacttgataaactatcctatttgaaatacagatatatacgcatttaacaatttttgacattattagcacactgagtattaaatagtatctgaaaagagatacctttaaaaatgaaaacaccttcctattggggttttcttcaaaacagattatttttaaaaagattacaactatagcaacttcagtctctcctgttttatctactagagtggtttgcttcctc

SEQ ID NO: 192804 - DNA, 560 bp, Homo sapiens
caggccatattttctctggttgttcctggccaatgactgagcatgctcggagtattgatgaaggccatttttaagatttgtgataaccttccaacagaagactttggactggagacttctattgtctgggccaaaatttcctaaactgtgtttcaggctgtgactctttcattctcatccttcttccttctccccctcctttgacagaagccaggcttgcatcactgaagactccctgcacttagatctgctttttcttcttaatctttaactaacgttcctctcataaccttttgagtgacttataattgcatagtatcagcttcttggaaaacctgacttgataaactatcctatttgaaatacagatatatacgcatttaacaatttttgacattattagcacaytgagtattaaatagtatctgaaaagagatacctttaaaaatgaaaacaccttcctattggggttttcttcaaaacagattatttttaaaaagattacaactatagcaacttcagtctctcctgttttatctactagagtggtttgcttcctc

SEQ ID NO: 192805 - DNA, 560 bp, Homo sapiens
caggccatattttctctggttgttcctggccaatgactgagcatgctcggagtattgatgaaggccatttttaagatttgtgataaccttccaacagaagactttggactggagacttctattgtctgggccaaaatttcctaaactgtgtttcaggctgtgactctttcattctcatccttcttccttctccccctcctttgacagaagccaggcttgcatcactgaagactccctgcacttagatctgctttttcttcttaatctttaactaacgttcctctcataaccttttgagtgacttataattgcatagtatcagcttcttggaaaacctgacttgataaactatcctatttgaaatacagatatatacgcatttaacaatttttgacattattagcacactgagtattaaatagtatctgaaragagatacctttaaaaatgaaaacaccttcctattggggttttcttcaaaacagattatttttaaaaagattacaactatagcaacttcagtctctcctgttttatctactagagtggtttgcttcctc

SEQ ID NO: 192806 - DNA, 596 bp, Homo sapiens
agatctattctgattgtgtggcaaaaacttagtatcagacaataggccctatcttcttttcttcaggttttgtgtaagttcccagccagatgagatggttcatgtagtgctaagtggaaagtttgaggagaggttgaggactaaactctgacctgtcttctctcttgctcaattttttttttttttttttttttttttggtaagacggagtttcgctcttgttgcccaggctggggtgcaatggcatgatctcggcatctccgcccaccgcaacctcctcctcctggggtccagcgattctcctgcctcagcctcccaagtagctggaattacaggaatttgccaccatgccagctaattttgtatttttagtagagatgaagtttctccatgttggtcaggctggtctcgaactcctgcccttgtgatccgcctgcctcaccttcccaaagtgctgggattacaagcgtgagccactgcacctggccccaaattyttatctaagggatgtgaggagtcacagcctacaaaccataaaatctcatcagattgtcagaggtgttcaaaccagagcaactccatcttgaataggagct

SEQ ID NO: 192807 - DNA, 584 bp, Homo sapiens
tgcacatttctgcagctggcttgaatttcttctcagaaaagttttgtttttttttctattgcattgtcagactgcaaatkatataaatatatatataatttaaataatatgagccaataaatacataactaatatttaaattattaaagataaatattaattataactattttatcaaaattgtaaatatggaaatgtatataacatacaattattgataaataagttgggggttttacttgtgattttctcaaaacctgaataaaaatatcctttcttttttgagtcctgtattttcttcagtttgaacaaatattggaattattaactctgcaccaaagctaaataactgagtaaggacacatgatgaacctatttgcataaatgtgtaaatgttatttttaaaagcagtgaaaagttaatgaagatatttaattaaactgaagagtccacttactagataattcaatgtcattaattaggtgactcataaagcagaggctttccatttttcgagagtggcctagaaaaaaaagctatgtttacaacatgactctactaagaaacctgaatattatttcatt

SEQ ID NO: 192808 - DNA, 584 bp, Homo sapiens
atggccgctctggaaatagtgatgggcttgttttgcagtgctgtcgagcatgtgtgagtgaggtgtgagttagcttctgcacgtgagagcccagagttgtcttcctgtgtgtatttattcacggtactgaaacattcgaaggacaatgggagaacatgattcccctcgtgttcctcccagatagcctgstttggaacattagcatgtattggaaagtaagttgaagccacatactttggcagtttggggggtatcagcaatttcatttggtccattatggtgtagagaaagctcatgagtctgggcatcagcttatgtgacttctaaccctgctccgccatgagctacctgtgtgatattgggcaaatctctctgctacttggtttacccatgttattagtttagactctaaactggaatggatgaacatcttcctggctaaaacccagtgactgacatgtggacagtagcatacttgtgagtgatgcacacaggaccccgaggacttggaattgcattctgtcttgacccatcacatttctccgactgccaacttcagactctcccactgcaacctcagactt

SEQ ID NO: 192809 - DNA, 653 bp, Homo sapiens
ctttggcagtttggggggtatcagcaatttcatttggtccattatggtgtagagaaagctcatgagtctgggcatcagcttatgtgacttctaaccctgctccgccatgagctacctgtgtgatattgggcaaatctctctgctacttggtttacccatgttattagtttagactctaaactggaatggatgaacatcttcctggctaaaacccagtgactgacatgtggacagtagcatacttgtgagtgatgcacacaggaccccgaggacttggaattgcattctgtcttgacccatcacatttctccgactgccaacttcagactctcccactgcaacctcagacttaaagtaaagggagcttaaaatactggggggaaatatgggaggcagaatctctcagtgcctgtgtagagtttttaaaatgcgacccggttttggtttagtcactgaaaagtttgtgggagcctggyggttccagggtgcacaccactccttgtagcaggtcccctgtcttgtgtgctgtgtccccccgaggtatgctggtgctggtggcccaggcaggaggtgacactctcaaagtgactggtcactacgtaaaatgtgtctttcttttgtttgtttcccacctgctttccgagcccctttct

SEQ ID NO: 192810 - DNA, 539 bp, Homo sapiens
ttttctgctgctattgtaaaagaaattgagttcttgatttgattctcagcttgatcattgttggtgctatgcagtagtactaatttgtgtacattcattttgtaacctaagattttatgaattcattcatcaaatagaagagtcttttggtggaattcttaggcttatctaagtatatgcttaaatcatcagcaaacagagataatttgacttcctcttttccagttcggatgccctttatttcttcctcttgcttgattgctctgggtaggacttccagtactatgttaagtagaagtggtgaaaatgggcatccttaacttgttctagccctcagtgggaakactttcaacttttccccattcaatatgatgttggccatgggtttgtcatatatagcttttattattttgagatatgtttattctatgtctagtttgtttagggtttttatcataaagcaatgctggattttactgaatgtttttatgcatctattgagatgatcatatgtatttggtttttaattctgtttatga

SEQ ID NO: 192811 - DNA, 502 bp, Homo sapiens
ctagaacactcccaggattcactgacctcaaaggcattgtgaaatgtgagagcagattaaactgacccagcaggaattttctgagattagggtagcatctgagtacatttcygggtcggctaatttcataaaaattctgaataccaactggggtccctgccagcataggcacagacctaaggaatgaggtgggtctcctgatggcccctgagtgtgtttccttcagcaactactaatggcagatttagtccagaggaaatgagcactctctcggctgaaattaactgcctcaccctgagccccactttggtgcttccactgcatttcacatcctgatcacataccctgttagcatagcgcccgggagggcaggtatgatggcactcccatccattcagaatggagaaagaggaccgcgtgtcacttttccaccaacgtcaccacagtcccctagatagcacttagtgcatggcaggaaggggcttggatatattgtctgaat

SEQ ID NO: 192812 - DNA, 617 bp, Homo sapiens
tttcattttttaaaattcttcttttctttatttattttctggctgtgttaacttaaataatcagtcttcaatctctgagattcttttcttggcttagtccattctgctgtgaatatttccaatcattttatgaaattcttgtagtgtattttgtaactctacctgctaggtttggtttttgtttgtttgtcttgttttgttttttcaaatggctaatttttttctctttaatcattttamtggattcctcagattcttggaaatagtgttcaactttctattgaatttcaatgatcttcattttcttctacctctcagttctatatctgtcatttcagccatttccttctatttaacaaccattgctgtagaactagtgcagtcatttggaggtaaagtgacactctgatttttgagttgctagagttcttatgttggcttttttctcacctgtgtgggctggtgtttctttaactgtggtataatttgagcatagtcagttgactttgtttctggatgttttcaaagcacctttttgcatgatctttattagtagctgaattattgtcctgggtttcacagaggcttatattagcaaagtaattttagtgttgaag

SEQ ID NO: 192813 - DNA, 617 bp, Homo sapiens
tttcattttttaaaattcttcttttctttatttattttctggctgtgttaacttaaataatcagtcttcaatctctgagattcttttcttggcttagtccattctgctgtgaatatttccaatcattttatgaaattcttgtagtgtattttgtaactctacctgctaggtttggtttttgtttgtttgtcttgttttgttttttcaaatggctaatttttttctctttaatcattttaatggattcctcagattcttggaaatagtgttcaactttctaytgaatttcaatgatcttcattttcttctacctctcagttctatatctgtcatttcagccatttccttctatttaacaaccattgctgtagaactagtgcagtcatttggaggtaaagtgacactctgatttttgagttgctagagttcttatgttggcttttttctcacctgtgtgggctggtgtttctttaactgtggtataatttgagcatagtcagttgactttgtttctggatgttttcaaagcacctttttgcatgatctttattagtagctgaattattgtcctgggtttcacagaggcttatattagcaaagtaattttagtgttgaag

SEQ ID NO: 192814 - DNA, 617 bp, Homo sapiens
tttcattttttaaaattcttcttttctttatttattttctggctgtgttaacttaaataatcagtcttcaatctctgagattcttttcttggcttagtccattctgctgtgaatatttccaatcattttatgaaattcttgtagtgtattttgtaactctacctgctaggtttggtttttgtttgtttgtcttgttttgttttttcaaatggctaatttttttctctttaatcattttaatggattcctcagattcttggaaatagtgttcaactttctattgaatttcaatgatcttcatttycttctacctctcagttctatatctgtcatttcagccatttccttctatttaacaaccattgctgtagaactagtgcagtcatttggaggtaaagtgacactctgatttttgagttgctagagttcttatgttggcttttttctcacctgtgtgggctggtgtttctttaactgtggtataatttgagcatagtcagttgactttgtttctggatgttttcaaagcacctttttgcatgatctttattagtagctgaattattgtcctgggtttcacagaggcttatattagcaaagtaattttagtgttgaag

SEQ ID NO: 192815 - DNA, 617 bp, Homo sapiens
tttcattttttaaaattcttcttttctttatttattttctggctgtgttaacttaaataatcagtcttcaatctctgagattcttttcttggcttagtccattctgctgtgaatatttccaatcattttatgaaattcttgtagtgtattttgtaactctacctgctaggtttggtttttgtttgtttgtcttgttttgttttttcaaatggctaatttttttctctttaatcattttaatggattcctcagattcttggaaatagtgttcaactttctattgaatttcaatgatcttcattttcttctacctctcagttctatatctgtcatttcagccatttccttctatttaacaaccattgctgtagaactagtgcagtcatttggaggtaaagtgacactctgatttttgagttgctagagttcttatgttggcttttttctcayctgtgtgggctggtgtttctttaactgtggtataatttgagcatagtcagttgactttgtttctggatgttttcaaagcacctttttgcatgatctttattagtagctgaattattgtcctgggtttcacagaggcttatattagcaaagtaattttagtgttgaag

SEQ ID NO: 192816 - DNA, 500 bp, Homo sapiens
catatcatgatgacaaggatcttacaaaacaaatcatgtcaaagactaggcatgtgctagttagttttaaacattctttaacaaataatctccagggacactaccttcaacactgaatctttgagaaaatctagtttttaaatggtccacattttrcattaattttttaaaacatattgaagaccataggaaagaactggaaagatttctgagacatctgaaaataatagaaaataatctactttatatcaagaaacattgaacaaaaatgaaataaataaaaaaattctgtggaagaagaaattaattcaacctcatatatttctcagtcaatttattcaataatgaggtcacttgatttacttcatgtgtacatttcaatgaatgactgcatgtctaaaatatattttatacttttttactgagattattcacacttcagtcttcctgttttggtacaaaatattttagacaaactattatacttgttcatgtataac

SEQ ID NO: 192817 - DNA, 524 bp, Homo sapiens
aacatggtaaagcaatttattttagttttcatgagaagttgttcttctagagtatgttatatgactctatgccctcagtttgaactctcattgaaccatatctaaattaactaataaaatgaactttgaattayatatgccactgtgtgcaaattaacattcattgactgtatgtgtatgtaaatattggccagtaaacagagccatttacatcttcataaagagaataacatttccaactaaaattccttctaaaattggactcatatcaattggaagtatttcaaacaattactaaactgatttacttggacaaacatagaaaatattatctaagctatgtgtacctattttttatattcctagaaattagggggaacttttatttcctttgattgaatatgagtttctaacttaacaaaatatataatagtgagtcagtaaaatgaatacttttaccaaggatggaaagtgttctgaattatctaaaagacattttcattgcagttaacatttgcctgtgt

SEQ ID NO: 192818 - DNA, 524 bp, Homo sapiens
aacatggtaaagcaatttattttagttttcatgagaagttgttcttctagagtatgttatatgactctatgccctcagtttgaactctcattgaaccatatctaaattaactaataaaatgaactttgaattacatatgccactgtgtgcaaattaacattcattgactgtatgtgtatgtaaatattggccagtaaacagagccatttacatcttcataaagagaataacatttccaactaaaattccttctaaaattggactcatatcaattggaagtatttcaaacaattactaaactgatttacttgracaaacatagaaaatattatctaagctatgtgtacctattttttatattcctagaaattagggggaacttttatttcctttgattgaatatgagtttctaacttaacaaaatatataatagtgagtcagtaaaatgaatacttttaccaaggatggaaagtgttctgaattatctaaaagacattttcattgcagttaacatttgcctgtgt

SEQ ID NO: 192819 - DNA, 428 bp, Homo sapiens
gtaaagtagagacttaagaatgacaaaacagacccttcatagcaataagatrtcaacatgacagatagcaggccttgaaagaaatcaaagtatttcactacaaaaatacatttctttgacatattttgaaatggccctacaaggctgtttctgtggggaaaatctccattttgtagagaatccccttctctttccaagtctttttcctgatttttcctgattccaagtcctttttcctttttatgtctgataaaaatcatttacaatctattctcagtgaagcctgctacctgcaagcttcatctgcataagaacctcggtctctaaaacaccttatcttaacccatacactcctgtctattgattccagtctttagataaattattttagccagttgtcaaatgccaatcagaaaatctttgaattc

SEQ ID NO: 192820 - DNA, 421 bp, Homo sapiens
gaattcatgcatagctgaacagtgttaacagtaaagtagagacttaagaatgacaaaacagacccttcatagcaataagatgtcaacatgacagatagcaggccttgaaagaaatcaaagtatttcacyacaaaaatacatttctttgacatattttgaaatggccctacaaggctgtttctgtggggaaaatctccattttgtagagaatccccttctctttccaagtctttttcctgatttttcctgattccaagtcctttttcctttttatgtctgataaaaatcatttacaatctattctcagtgaagcctgctacctgcaagcttcatctgcataagaacctcggtctctaaaacaccttatcttaacccatacactcctgtctattgattccagtctttagataaattattttag

SEQ ID NO: 192821 - DNA, 421 bp, Homo sapiens
gaattcatgcatagctgaacagtgttaacagtaaagtagagacttaagaatgacaaaacagacccttcatagcaataagatgtcaacatgacagatagcaggccttgaaagaaatcaaagtatttcactacaaaaatacatttctttgacatattttgaaatggccctacaaggctgtttctgtggggaaaatctccattttgtagagaatccccttctctttccaagtctttttcctgatttttcctgattccaagtcctttttcctttttatgtctgataaaaatcatttacaatctattctcagtgaagcctgctacctgcaagcttcatctgcataagaacctcggtctctaaaacaccttatcttaacccatacactcctgtctattgattccrgtctttagataaattattttag

SEQ ID NO: 192822 - DNA, 580 bp, Homo sapiens
ttattcatgaaggaatatttttaactcatataagttcctgattttacattagatacaatgaccataagcatataagaagagaatgcctgtatatagggagttataggaaattgctgtaaaaagtagaagtaatattaaaacaaaacagaacagaamaagtgaaacactaacttatgaaaaacaagcagtattctgtgaccaaggtatgcagggaatatttaatgcaggactattgaaagtttgtatagaagaatggactctgatggcatcaccaaataattacacagcacctcaattaataaaaataggaaaacaactaccttacttacagacataagaacatttatgaaaccatccattcaaattttagtcaacattttttaagaaatacactgtatgtagttgttcatgtattttatcagagaggtaactagtgttaagaaaattttattgtgtagaaattttcaatctgtttagagtatcaaatgtttaatatttttgtgtatttacaaatgtgtttacaaatatattttatatttgtctggctgtttaaattatgcttttgataaagcttcagtgc

SEQ ID NO: 192823 - DNA, 511 bp, Homo sapiens
ttggggactttttagctgatggaatttatatgagtttctgaaattgagttgatgctgtaatgagttgagatttgggggtctttggagagaagatattttgcatatgagatagatgttagtatttcagaaacaaagaatacccatggttaaataaaaaatgcccctaaaggtacacacagctgatctctgtaagcagtgaacatgttacttttacatggcaaaagggacttgcaggtatgattaagttaagggtcttaatatggagagattatcctatgtcrtatggcccaacgttacaaaagcaatgatgaattaatacatgtaccaattttttctcacaaagtcaatcatgatcaacaagaaaaattattgagtgtttgccaaacatgtcgattaccagaaactttctcaatatttttaactttcttattaaattgttaacattatattatttaaattgcaattggagatggatatcatcatcctcacatataaaaagcaagacaggaag

SEQ ID NO: 192824 - DNA, 515 bp, Homo sapiens
ttgcatgtgtaaattaaggaaaagcctcagatattatctcctccatctactaagttatatatrttcaaagcagtatctttgtataataaaatccagaaaaaaaagacttaatcttaaaaacaaagcgcaaagtaaaacataaaaagcgtattggcctcctttgcctgaattgctcttttgtattgcttattttctgactcacataggattgattgttgatccctttctaggggaggaaaagaaagaggaatagtgtaacattataattatgttatatttcacagcttttgcttaaaatatcttgagttttacaaagttttattaatttcacaaaatgtattaagcagctactaagaataaagaacaggtaagataaaatacaatggtgacccttcagaaagctctctgtccagttaaaatagatattaattgtgtaggttcatcacataaatataaagtaccattttgataaatagtttgcagtgaagtaaacatctaagttactatgagaccat

SEQ ID NO: 192825 - DNA, 467 bp, Homo sapiens
atttagtttaaattccaactgcaaacccctttgatgctcaacatagtagttatgaattctaagagggaattagttttgtgctcatatttcctaaatccatccttaggtatagttttattgcaatsttagtcccaaatgttcactaaatgttttatctatttccataaaaatgaatatatagtaaattataattctttgttctagaacattttgtggttaagtaaaaagaagcatgacataaaatagcatatgtagtttttcctacaaatattgcaatttccatagaaagaagtgacatatgaatatcaagaatgcatatgtatgtataaatgcatatgtgcatataaactaactcactgtaattccatacctaatgcttatgagagctcagagttcttcaaatgatttatgagttccatgacttccttcattgtgcattttctgcttccatattcagtttcgagata

SEQ ID NO: 192826 - DNA, 619 bp, Homo sapiens
ccttgtttttgtaactggtcacatggtcgtagctggtattgataactaccttcttctactatccattctgtattccctttccttcagcaagcacctcagcaggtggtggttttttatctggtggagtggcccaaacattaattcctgaaaggtctgggccatttgtagtcctgcctggattgggctattgtagtttcccaatgacctgaatctacagggcatggtaatgctaaaagactccctaatgatctcctgtattgcatgtatactcttccttacctccattgtggagtagtagactgatttcatcattatagtctgggtcagtcaccccagccaacactgtaactccatccttagcctgttgacttaaaggtaggaggagcacaaagtaaccaggtggtaattttaaactccaggttaatgaaatcattgtagtgtctcctggtggcaacattctttcctctggaaygaagacctctaggccagcagaatgtaatgtcaaaggaacaggagaaagacttttgctagtggatcactagaggttatgttgtgtggtgccacttccacttccaccctttgaatcctggacccataaatcctggctataggagcaaga

SEQ ID NO: 192827 - DNA, 619 bp, Homo sapiens
ccttgtttttgtaactggtcacatggtcgtagctggtattgataactaccttcttctactatccattctgtattccctttccttcagcaagcacctcagcaggtggtggttttttatctggtggagtggcccaaacattaattcctgaaaggtctgggccatttgtagtcctgcctggattgggctattgtagtttcccaatgacctgaatctacagggcatggtaatgctaaaagactccctaatgatctcctgtattgcatgtatactcttccttacctccattgtggagtagtagactgatttcatcattatagtctgggtcagtcaccccagccaacactgtaactccatccttagcctgttgacttaaaggtaggaggagcacaaagtaaccaggtggtaattttaaactccaggttaatgaaatcattgtagtgtctcctggtggcaacattctttcctctggaacgaagacctctaggccagcagaatgtaatgtcamaggaacaggagaaagacttttgctagtggatcactagaggttatgttgtgtggtgccacttccacttccaccctttgaatcctggacccataaatcctggctataggagcaaga

SEQ ID NO: 192828 - DNA, 347 bp, Homo sapiens
tcggcacattactcacgtacttgtgatgttgctctaaacaaactactgtcctacatataaaagtatagcacatacaattatgtacagtagcaaataactttgtaatgagattctgtatggactataccacacttttgaaatcattatttcaagtgtacttttctacttataaaaaaagktaactgtaaaacagcctcaggcaggtacttcaagaggtattcctgaagaagcgctgttatcacagaagatgacagcttcatgcctgttatttcccctgatgaccttctaggggtacaagatgtggaggtggaagatggtgatattgaagatcctgaccttgtgtagac

SEQ ID NO: 192829 - DNA, 469 bp, Homo sapiens
atatatatatatgtgtgtatatatgtgtatagatacttaatacttaacaaactccccatatatgtgagtgtatatatataaatatataatacttaataaactctcctatatatgtgtatatatgtatatatacacatatatracaatatgtgtatatatgtgtgtatatatgacatatatgacatatacatatatgtcatataagtgtttatatatacatatatacttaattcttaaacttgcctctatatatgcatttacataagtacttaaactccactatatatgtgtgtatatgtgtgtatatatacacacatatatatgactatatatagtatgtgtatatatatacatatatatgacatatatatgtgtgtgtgtgtgtgtgtatatatcctattagttctgtccctctaagagaaccctgactaatacagattttagtaccagaagtggggcatgcacagca

SEQ ID NO: 192830 - DNA, 431 bp, Homo sapiens
agctaacaagcaaggttccctataatggcagtagacttccagcagacaccacaacaaagcaccatcaattgctgaaagctaaaaaatagatattattttcaataatatttcattttctattggaaaagttttttaaattacattaaataagtctctttccccccaaagaaatagtctagcttttattatgatgcctgtaaaaagtaggtaacagcaagcagacaaggatcgttaacagcacagtgtaatgatttctatccactcacacctataatcaaactgacaaactgtgccacacctgattatatatagcagcatggttgaaataaccaagcaaaaggtgacacattcaagacttccatttaggtgattgcaagttcatgagggtrtatcagtccaatgaagcagtaacagaacaaatgggacaaggg

SEQ ID NO: 192831 - DNA, 479 bp, Homo sapiens
actctactaaaatacaaaaacttagctgggtgtggtggcgtgcgctgtagtcccaactacttgggaggttgaggcasgagaatcgcttgaacccaggaggcggaggttgcagtgagcggagatcacaccactgcactccagcctgggtgacagagggtgactctgtctcaagagaaaaaccacaaaaagacaattccccctctccaaaaaaaggtctggtaaattctttcttttttttttttttttttttttttgtcttttttcccccctttctgtggagaacggggtctcgctatactgcccaggcaggtctcaaactcctgggctcaaggtatcctcgcgcctctgcctccctgagagctgggattaaaggtgtgagccactgcaccggacaagggtctggtaatttcttcaagggagagggtttggtaatctttaaatgcacataatcactgctcctgcaatttcacttctaggaa

SEQ ID NO: 192832 - DNA, 479 bp, Homo sapiens
actctactaaaatacaaaaacttagctgggtgtggtggcgtgcgctgtagtcccaactacttgggaggttgaggcacgagaatcgcttgaacccaggaggcggaggttgcagtgagcggagatcacaccactgcactccagcctgggtgacagagggtgactctgtctcaagagaaaaaccacaaaaagacaattccccctctccaaaaaaaggtctggtaaattctttcttttttttttttttttttttttttgtcttttttcccccctttctgtggagaacggggtctcgctatactgcccaggcaggtctcaaactcctgggctcaaggtatcctcgcgcctctgcctccctgagagctgggattaaaggtgtgagccactgcaccggrcaagggtctggtaatttcttcaagggagagggtttggtaatctttaaatgcacataatcactgctcctgcaatttcacttctaggaa

SEQ ID NO: 192833 - DNA, 561 bp, Homo sapiens
aaagtactaatcatcacacacaggctacctaagccacctgaccttacctcccattagctgtccctgtaccatctaactaaaatgtacagatacatacttgtggccaggcacggtggctcacgcctgtaatcacagcactttgggaggccaaggcaggcggatcacctgaggtcaggagtttcagactagtctggccaacatggagaaaccccrtttctactaaaaatgcaaaaattagctgggcttggtggtgcacacctgtagtgccagctactcgcgagactgaggcaggagaattgcttgaacccgggaggcgggggttgcagtgagccgagatccggccactacactccagcctgggaaacagagcgatactctgtctcaaaaaaacagaaagacaaaaaaacggatacatgctggaaccctgaaaactttttcagtagcatttagaccttctctcatatacagcattgtaaaatccattgctttgcttttagctgcactatgtgccccaatatcatcaaatggcatttggccttctctttacagactgaaaaggca

SEQ ID NO: 192834 - DNA, 561 bp, Homo sapiens
aaagtactaatcatcacacacaggctacctaagccacctgaccttacctcccattagctgtccctgtaccatctaactaaaatgtacagatacatacttgtggccaggcacggtggctcacgcctgtaatcacagcactttgggaggccaaggcaggcggatcacctgaggtcaggagtttcagactagtctggccaacatggagaaaccccatttctactaaaaatgcaaaaattagctgggcttggtggtgcacacctgtagtgccagctactcgcgagactgaggcaggagaattgcttgaacccgggaggcgggggttgcagtgagccgagatccggccactacactccagcctgggaaacagagcgatactctgtctcaaaaaaacagaaagacaaaaaaacggatacatrctggaaccctgaaaactttttcagtagcatttagaccttctctcatatacagcattgtaaaatccattgctttgcttttagctgcactatgtgccccaatatcatcaaatggcatttggccttctctttacagactgaaaaggca

SEQ ID NO: 192835 - DNA, 298 bp, Homo sapiens
tcagaacaacaggcatgctcctaagataatcaaaagcaaaccgagatgccagatcagcagaggtagctaagtatttgtcctttttattttccrttcccattcttatttgggagagagtatttgagaaaaaatgagttcagggagagaatcagagaatgaacgaaggtacttttccttttggacattcctctcaattctgagatatcaatatatgtgtataatttgtagcccccagaatgggctgtgtgcgagccctcatctgtgcttttgctctctgtctcctttgttaataatgctt

SEQ ID NO: 192836 - DNA, 227 bp, Homo sapiens
ggtgacagagttttcacaagatctggctgtttgtcagtgtgtagcacctcccacttcattcactctctctcctgctctgctgatgtgaagactgtacctgtttctcctttgccttctaccatgatagtaagtttcctgagggctccycagccatgcatcttttacagcttgctgaactgtcagtcaattaattaaacctcttttcttcataatttatccagtctcag

SEQ ID NO: 192837 - DNA, 504 bp, Homo sapiens
gtccccactgggatgctgcctagtggagctgtgagaagaaggccactgaccttcggacctcagaatggtagatccacggacagcttgcactrtgcaactagaaaagctgaactcactcaacaccaacctgtgaaagcagctgggagggaggctgtgtcctgcaaagccaccagggtggagcttcccaataccatgggaacccacctcttgcatcagcaaggcacagatgcaacacatggagtagaaggagaaaaagctcattttacagctttgagacttggctgccctgctggatttcagactttcatggggcctgtagcacctttgtttagccaattcctaccatttggaatggatgtatttacccaatgtctgtacccccactgtatctaaaaagtaactaacttgcttttgatttttacaggcttacaggcggaagagacttgccttgactcagatgagacattggactgtggacttttgagttaatgctgaagtgaattc

SEQ ID NO: 192838 - DNA, 459 bp, Homo sapiens
ctagaattcggattcttggtgcttggctttggttggctcacttgcttttactttcccaaaaggaaattgctgggtgatgggaaccttatttattccctgtttattccatcacttggcaagatttacaggacaattcctaagaaccagaatattgatccaggattctatattacctatccgttttggttttttctgagctgcaatcagagattgctggtaggttcacagaaacaagcagggttagtctaaaatgtaggcaaaaacttacatrtaataagtttagaatttagtgacaaatgtatgataattgttggaacataatttctctctctccagtcttcatttttattaaggaacaaattatcataggactgagttgtttaaatagattttagtcttatacttggcctgattattcgcataaagtgcagcaagaataatatttctacataggccttt

SEQ ID NO: 192839 - DNA, 551 bp, Homo sapiens
acaattcctaagaaccagaatattgatccaggattctatattacctatccgttttggttttttctgagctgcaatcagagattgctggtaggttcacagaaacaagcagggttagtctaaaatgtaggcaaaaacttacatgtaataagtttagaatttagtgacaaatgtatgataattgttggaacataatttctctctctccagtcttcatttttattaaggaacaaattatcataggactgagttgtttaaatagattttagtcttatacttggcctgattattcgcataaagtgcagcaagartaatatttctacataggccttttggattggctttgatggaattctgttccacaaggaatctcagataagacttttttaaagccaagcacaaccacggatttgtatcctcaaacacctgtgggttgggtgatcctctcttcttaaggtcccgagatagttggagagtgacgttctttactggccagaggtcaggaaccctgtacagggactatgtagacagggtatgaggccagtttccccact

SEQ ID NO: 192840 - DNA, 551 bp, Homo sapiens
acaattcctaagaaccagaatattgatccaggattctatattacctatccgttttggttttttctgagctgcaatcagagattgctggtaggttcacagaaacaagcagggttagtctaaaatgtaggcaaaaacttacatgtaataagtttagaatttagtgacaaatgtatgataattgttggaacataatttctctctctccagtcttcatttttattaaggaacaaattatcataggactgagttgtttaaatagattttagtcttatacttggcctgattattcgcataaagtgcagcaagaataatatttctacataggccttttggattggctttkatggaattctgttccacaaggaatctcagataagacttttttaaagccaagcacaaccacggatttgtatcctcaaacacctgtgggttgggtgatcctctcttcttaaggtcccgagatagttggagagtgacgttctttactggccagaggtcaggaaccctgtacagggactatgtagacagggtatgaggccagtttccccact

SEQ ID NO: 192841 - DNA, 525 bp, Homo sapiens
gtagttacagttagaaacacaattgacagagaagcttggttatctctgtggtttacaataacttaacatagaaaccttaattatgattcagagcatatacttagacattagaattttagaaagcccatacaattttgaaacatatattagcattattcamaaaaataaaagctaaagaagattgagcattattttggcaatctcatgtacctaaacatgtcaaataatcctgtttacctctgttttctggacactttgggggccctctgagtattcaaaaaggcagagtccagggaagacaattttgaaactgaagtttgattttgggaaggctgttaaatgtttgaggtttaaaacacttgatattatggaatagaattccagatgaccataagttatttattttgccaaaatgatgactcagaaattttaaaaaagaaaaaaccttttatatccctttacaaattttgccaaagagcagattaccaccttaggaaaactttgttatgattttatgtttatgct

SEQ ID NO: 192842 - DNA, 347 bp, Homo sapiens
acaactcttcttaatagagtctttgtctaataatataagaaattgtctaatacgtcactaattataataaagtgggataaayattacaagaggggtaggccccagcccttggggcacacaagaggagcatggaatcccttctattgctatatatgaatcacatatatgagaatgtgtttatggtaatatgttcttactcttatgatgacaatttcccttcagatacagacaatttcccctcaaatactcttctgatgacaatttcccctcagatatatcacctataaagtgagatggaacagttacattttgttccacagataaagatgtcgatttgtgagtttact

SEQ ID NO: 192843 - DNA, 478 bp, Homo sapiens
caccataccttaaaagaaacctctactagtaacatcgctggtgtaggaaaacttgaactgtaattgacaaattgctggaggttaggagtggacaaatctgagttaaaaattcccagggaatgcagtcatacaagggaaccaacaaatgtgagttttaccttcaatagcttgatcaggtctttataataaatatcagaaaaaaaataccctcatgcttctagcagaggaaagggkaaaggaaccattctgatatatgccagagcattccatccttaacaaggtttgccttcagaagaaactaccttaccagagcctaacctactgggattatatcagagactgatctgagtgaaaggaaatggctcacttcagggcagtgtacccatattgtcccagcgaatggggaaggaaaaaaaccctgagaaacacttacgaaattcacagttcagaagtagaggcacaataaaagattaagatc

SEQ ID NO: 192844 - DNA, 549 bp, Homo sapiens
tataaagaaatgataaatgcttgaggtgatatatatcacaataccatgatttaatcattacacattgtatgcttgtattgaaatatcatatacaccccataaatatatatattacgtatccattattaaaaacaatcgcacataaacctcaaacacatcaattctctccatctgacctattgattcaatgcctttccaatctaaatctcagtatattcttttgtagaattgacaagctgattctaaattgtagagaaactcaaaaaattttaacagggaaaatacattgaatggggaaaaaaagggaaaatctccactayctgaaataaagacctactataaaatgatagtgataaaaagagtgtgaatttggggaaaagatgaaaatatagacaaacgaaatacaatagagggttaggaataatgtaacacacatagagataaatgattttagacaaagacacaaagtcaacttaatagattaaataaaattaggcattcatactcaaataaaacatataataatcatcaattaatatattgtaatac

SEQ ID NO: 192845 - DNA, 282 bp, Homo sapiens
ggcttttgtgttcttaatggagaaaaccaccatgtacttatttttaaaatatcaaatttgggtcttcattttttctggaaaaacaaaagcaaaaagaattaatatatacatctatatcatataaacaacatgtttgttttcacatagacatagttatacaactaattacaatacttagtacaaaaaaaagagaggttgatagaaacaaacaggtaaacaacaraaaaccctacacattttactaatttaatttcgtcaaaaaagcattttatgaaaaagcat

SEQ ID NO: 192846 - DNA, 499 bp, Homo sapiens
tgtttattctcataaatttttcattgaatctaagtcttcaaattattagcaaatttataccattattatatttattttaatttatatttagtctgttagtctgcagtaatagtccttctttccttcatgrtgatagacgtttctaccttctttatttttcttgttcagcatagctaaaggtctgtatacattgtaggtcttagcaaaaatgaaattttggtttcattgatttttttctattattttctgtttcatattttaataagttctggtctgatttctataatttctttccttctgataatatggacttgaattgcattttctttcttaaagtagggcatttgactgttgattttagatctttctttctagtagatatttaaccaaataaatttcccactaggcactgctttatctgcatcctataaattttaatatgctgtgttttcttttaagtccagtatgttttctaatttttcttttaatttcctctttt

SEQ ID NO: 192847 - DNA, 499 bp, Homo sapiens
tgtttattctcataaatttttcattgaatctaagtcttcaaattattagcaaatttataccattattatatttattttaatttatatttagtctgttagtctgcagtaatagtccttctttccttcatgatgatagacgtttctaccttctttatttttcttgttcagcatagctaaaggtctrtatacattgtaggtcttagcaaaaatgaaattttggtttcattgatttttttctattattttctgtttcatattttaataagttctggtctgatttctataatttctttccttctgataatatggacttgaattgcattttctttcttaaagtagggcatttgactgttgattttagatctttctttctagtagatatttaaccaaataaatttcccactaggcactgctttatctgcatcctataaattttaatatgctgtgttttcttttaagtccagtatgttttctaatttttcttttaatttcctctttt

SEQ ID NO: 192848 - DNA, 499 bp, Homo sapiens
tgtttattctcataaatttttcattgaatctaagtcttcaaattattagcaaatttataccattattatatttattttaatttatatttagtctgttagtctgcagtaatagtccttctttccttcatgatgatagacgtttctaccttctttatttttcttgttcagcatagctaaaggtctgtatacattgtaggtcttagcaaaaatgaaattttggtttcattgatttttttctattattttctgtttcatattttaataagttctggtctgatttctataatttctttccttctgataatatggacttgaattgyattttctttcttaaagtagggcatttgactgttgattttagatctttctttctagtagatatttaaccaaataaatttcccactaggcactgctttatctgcatcctataaattttaatatgctgtgttttcttttaagtccagtatgttttctaatttttcttttaatttcctctttt

SEQ ID NO: 192849 - DNA, 619 bp, Homo sapiens
ggataatacttgattttttcagatgaggacactgaattctgagatgttacatgtggtgctcaagagcatacagccagcaaatggcagagccgagagttacaccaaatatctgatttatgarccctactcgtttttcaatacctttcatcctaagcagaagtcaggggacctatgttctaccacttattttgctgttaaatagctgtcacctcttatatggctatatgatcaccagtaaaacacttattctcaagcttccttttgcatgcaaaagtggtgctcagatgaggtcgatctatattttgtggaaatgtctgggagaatatagcctgtagtgggatttttcaaccatctacctctgttccaaatgcacttttccattttatttcctagagtcccacaaactatttcatttgaagaaagaattctgctaccataaaaaaatccattgacaattcatttttgcatttgttgatcatgctcactcttcaaggaagggccagttaattaattcagtgaaacttttctgatcttctctgttagatgaagccacccttgctctgaactgccagagacataactcttaaagtatttattatgttccagctagcaatttaga

SEQ ID NO: 192850 - DNA, 606 bp, Homo sapiens
caatcagttgaaggccttaagaaacagctgcagttttccaagaaggaaagaattctgccttcagaagcccttaggatttgagaatgcaacatcaatttatcctggatctccagcctgccagcctgccctgcagatttttgatttgccagtctccccaagttgtgtgagtcaattccttaaaataaatttccttctctgtcacccacccgcccccccgctcccacwcacctccttctggaaaaccccaaagcaaagagcagaaatgatcttggttatcccctgttgtctcaacattctgtttgattagcctactctttcactttcaaatggagattggttgataaattatgtaaataagtgttcatataaaatgtattaatgaggtagaatatttaaaactggacactgtgtctgggataggagggtggagatgggagctataagggagattaatggaatgagtaacagttttcttaagtccctgggtgtatactcgtggtttttaccaaaataagaaatagaagagcaggagaaagattatgattcagttagagacatattgaggtgaatgtggaacttctagtggaaatctccaacaggaaacag

SEQ ID NO: 192851 - DNA, 606 bp, Homo sapiens
caatcagttgaaggccttaagaaacagctgcagttttccaagaaggaaagaattctgccttcagaagcccttaggatttgagaatgcaacatcaatttatcctggatctccagcctgccagcctgccctgcagatttttgatttgccagtctccccaagttgtgtgagtcaattccttaaaataaatttccttctctgtcacccacccgcccccccgctcccacacacctccttctggaaaaccccaaagcaaagascagaaatgatcttggttatcccctgttgtctcaacattctgtttgattagcctactctttcactttcaaatggagattggttgataaattatgtaaataagtgttcatataaaatgtattaatgaggtagaatatttaaaactggacactgtgtctgggataggagggtggagatgggagctataagggagattaatggaatgagtaacagttttcttaagtccctgggtgtatactcgtggtttttaccaaaataagaaatagaagagcaggagaaagattatgattcagttagagacatattgaggtgaatgtggaacttctagtggaaatctccaacaggaaacag

SEQ ID NO: 192852 - DNA, 606 bp, Homo sapiens
caatcagttgaaggccttaagaaacagctgcagttttccaagaaggaaagaattctgccttcagaagcccttaggatttgagaatgcaacatcaatttatcctggatctccagcctgccagcctgccctgcagatttttgatttgccagtctccccaagttgtgtgagtcaattccttaaaataaatttccttctctgtcacccacccgcccccccgctcccacacacctccttctggaaaaccccaaagcaaagagcagaaatgatcttggttatcccctgttgtctcaacattctgtttgattagcctactctttcactttcaaatggagattggttgataaattatrtaaataagtgttcatataaaatgtattaatgaggtagaatatttaaaactggacactgtgtctgggataggagggtggagatgggagctataagggagattaatggaatgagtaacagttttcttaagtccctgggtgtatactcgtggtttttaccaaaataagaaatagaagagcaggagaaagattatgattcagttagagacatattgaggtgaatgtggaacttctagtggaaatctccaacaggaaacag

SEQ ID NO: 192853 - DNA, 606 bp, Homo sapiens
caatcagttgaaggccttaagaaacagctgcagttttccaagaaggaaagaattctgccttcagaagcccttaggatttgagaatgcaacatcaatttatcctggatctccagcctgccagcctgccctgcagatttttgatttgccagtctccccaagttgtgtgagtcaattccttaaaataaatttccttctctgtcacccacccgcccccccgctcccacacacctccttctggaaaaccccaaagcaaagagcagaaatgatcttggttatcccctgttgtctcaacattctgtttgattagcctactctttcactttcaaatggagattggttgataaattatgtaaataagwgttcatataaaatgtattaatgaggtagaatatttaaaactggacactgtgtctgggataggagggtggagatgggagctataagggagattaatggaatgagtaacagttttcttaagtccctgggtgtatactcgtggtttttaccaaaataagaaatagaagagcaggagaaagattatgattcagttagagacatattgaggtgaatgtggaacttctagtggaaatctccaacaggaaacag

SEQ ID NO: 192854 - DNA, 576 bp, Homo sapiens
gaattctattatgagagaggttttagaattaccacttcacaactrcagagtaacctagatgcctaccttaggaccaagagatatacaaagagaggcagaatgatgaaattcaaactatgatactcaaaaaaacctcaaaactataactccaaaaaaatggtttgtcaaaaaatgctttggagctgactcttaccccagaagacagcatttgtggtgtgtgtttccctcagatacacacagacatcagtggggagacaggcatacatgatgttggatataggaggatggagtttgtctgcaatttgagcatcagccaagtttagtccaaatacaatgagtctagattaatgagttgttgacttgtttcagcgtcttgattgatttggtctttgtttttttaacatgctgtatatttcacatcaactttgtcaatcatttttacgcccatatttaatctccaacttggaacatgacacagtgttttgcttttgccttagatatctgcctttcatagataagtccttgtatctcctctacactttcccttatatattttttcacattacagctttttct

SEQ ID NO: 192855 - DNA, 576 bp, Homo sapiens
gaattctattatgagagaggttttagaattaccacttcacaactgcagagtaacctagatgcctaccttaggaccaagagatatacaaagagaggcagaatgatgaaattcaaactatgatactcaaaaaaacctcaaaactataactccaaaaaaatggtttgtcaaaaaatgctttggagctgactcttaccccagaagacagcatttgtggtgtgtgtttccctcagatacacacagacatcagtggggagacaggcatacatgatgttggatataggaggatggagtttgtctgcaatttgagcatcagccaagtttagtccaaatacaatgagtctagattaatgagttgttgacttgtttcagcrtcttgattgatttggtctttgtttttttaacatgctgtatatttcacatcaactttgtcaatcatttttacgcccatatttaatctccaacttggaacatgacacagtgttttgcttttgccttagatatctgcctttcatagataagtccttgtatctcctctacactttcccttatatattttttcacattacagctttttct

SEQ ID NO: 192856 - DNA, 463 bp, Homo sapiens
atgtgggtcattttttaaatgttatcactataaataaattatacgtattagtcactctgataaaaaaaattcctattccttgcccagttgcaaaaactaagccactgtttaaacccagaacatattgatggaagaagtggtcatgttgctgggtgtttaggttgaaccctccagcaatacagcaaacgtatactgtaatgatttccacagatcttagccaaagataaaacaacctttttttttcaggtagctatacagaggggacatgggaacaccaygtattttttaggaaaatggaccatggaatctgatttgacataaggcctgaagcatcatcatcgtcccctgttagagaggaggcatatgggggccaagtcataaattgagttctggcctgtgtctggcttcagtgtatcccatgggtgggtctatggactaacctagtggttttctcagttcacac

SEQ ID NO: 192857 - DNA, 576 bp, Homo sapiens
gaggctttactagtatatggagatagcttactggaccctaacaaagtaaatttgytattaagaaagatatctccaaaactatgtttctaaaagggacttccagggtcaagctaggtcagcattttggtaggattgatgccagaaaacacagctgctactgaaacattttttcagaaaaggaagttcaccctctgagtcatttcagattaaatcttcatcgcaggcctgtgtatgtgttttaaaggaaggtctataatcagaggtccaattgttagcaactctggacataatctcaggataacaattcaaccattcaaatgctcaaggctgagagtaaataccacttttctgtggttaagaaaataataaattccggaggatccaccacagatagctcaattaccccatcaagagttatcaactacagtcagttctcctctgtgctctctggtgataatgcacacagcatctgttccatttttctctttgcgttgccacttctgggtaatgttattgaagcatcaccaatgggttaaacaaaagctgacacttcaagaggaaggaatgaaaaagttg

SEQ ID NO: 192858 - DNA, 380 bp, Homo sapiens
gaaatatgttaattaacaaaagcattatgtattatttattacaaaggtaataaaatattttagagtctctgaagtacactttttgttgtcatctatctttccctaagagtgaaaacaccatttcctttagagtcagctctatctgagttatctgagctatatggttgggtyacttaatatggttgggttacttaatctccttggatcctatttttccaattttaaatgtgaatactaataccaacatgtgaatattaattaagataatatatattcctagggaagaggagagggccaggaaattcgatctcgcagctgcccttttcctgtcacgtaacagggctattgattgtgatacttgtacttaaggctgataatac

SEQ ID NO: 192859 - DNA, 381 bp, Homo sapiens
ttagaaatatgttaattaacaaaagcattatgtattatttattacaaaggtaataaaatattttagagtctctgaagtacactttttgttgtcatctatctttccctaagagtgaaaacaccatttcctttagagtcagctctatctgagttatctgagctatatggttgggttacttaatatggttgggttacttaatctccttggatcctatttttccaattttaaatgtgaatactaataccaacatgtgaatattaattaagatartatatattcctagggaagaggagagggccaggaaattcgatctcgcagctgcccttttcctgtcacgtaacagggctattgattgtgatacttgtacttaaggctgataat

SEQ ID NO: 192860 - DNA, 403 bp, Homo sapiens
gtaggtggttagcatttatgatgtcaaaagggcaacagattttgaagagattaggagttccagggtttaaccatagggataggtctgggccatgaatgtagagagtcagtaaacatatttaagttaaaatagacaaacagctttgaggttgtggttttaaaaatgtctatcctgaactcaagtcatccaaggctgagattgatctgaagcagaatattgagaactaggtgccaaagctataagggaagaactgtcataaatgtgatagaacagagagaaatatagataaatgagcttatrttttatcatccaaactgagatatgtgcactgaataaatgttaaatctgatagggtccaggacgttagatgtaaactgggactgccccaggaaaaccaggacat

SEQ ID NO: 192861 - DNA, 598 bp, Homo sapiens
acaataactattgacagcatgtcttaactcagtaacatgcagcctattcaaataataattattattggtacagcaagtaaattagtaatatcatgtatggccagctgattctgaattttgttagagtctcttaaacttgaggatttaagtgatttgataacacactgatttaatcttgaatatatccagctgctccaaaggcagcacacatggtacagaagagacaaaaagacgaagatgtgacttcgagtctgaggagctacagagtgtagtcagttacaaaaacaagtcctagagcctgactgcctgggttcaaattccaagggcacctgatctttccaaatttagtgtttttgtctataaaatggggataaaattagtacctattgcaagaggttttygtaaggaatagctgacataatttatgtaacgcctttaaagggtatagtgtaagtgtttaataatgtttacagattatcaacattgccataaaaagcatgtatttgcccacataattatatccaaggaaattaaaataaaaagtggattctataacgagccacacgatcaaaccaaactaaatctcactgcttcatta

SEQ ID NO: 192862 - DNA, 598 bp, Homo sapiens
acaataactattgacagcatgtcttaactcagtaacatgcagcctattcaaataataattattattggtacagcaagtaaattagtaatatcatgtatggccagctgattctgaattttgttagagtctcttaaacttgaggatttaagtgatttgataacacactgatttaatcttgaatatatccagctgctccaaaggcagcacacatggtacagaagagacaaaaagacgaagatgtgacttcgagtctgaggagctacagagtgtagtcagttacaaaaacaagtcctagagcctgactgcctgggttcaaattccaagggcacctgatctttccaaatttagtgtttttgtctataaaatggggataaaattagtacctattgcaagaggttttcgtaaggaatagctgacataatttatgtaacgcctttaaagggtatagtgtaagtgtttaataatgtttacagattatcaacmttgccataaaaagcatgtatttgcccacataattatatccaaggaaattaaaataaaaagtggattctataacgagccacacgatcaaaccaaactaaatctcactgcttcatta

SEQ ID NO: 192863 - DNA, 559 bp, Homo sapiens
cttcagcacccagaaacattcagtattcacttcccaggtctggtgaaacaaattatcagaatcaaggtggcttaaaataacagaaktgtattctctcatagttctggaggctagaagttcaaaaccaaggtgtcatcaggactggttccttctggaggctctgagaaagcagctgctccaggcctctctcccaacttctgctattccttggcttgtagctccaacactttactctctgctgcctttgacacatggccttcttccctctgtccctccatgtctttgtctctctatgacaaaatcttcccttccttataaggacaccagtcattggatttagggatgcatcctaatccagtacgatgcatctcaacttgattgcataggcaaggaagctattttcaaataaggtcacattcccaggtttcagacgaacatgaatttggggaggtcattattcaaccagtctactacagtgcctaacataatagccattcaataaatatttgttgaatacagaactgatacaaaataggaagtgttataagggagaagacat

SEQ ID NO: 192864 - DNA, 559 bp, Homo sapiens
cttcagcacccagaaacattcagtattcacttcccaggtctggtgaaacaaattatcagaatcaaggtggcttaaaataacagaattgtattctctcatagttctggaggctagaagttcaaaaccaaggtgtcatcaggactggttccttctggaggctctgagaaagcagctgctccaggcctctctcccaacttctgctattccttggcttgtagctccaacactttactctctgctgcctttgacacatggccttcttccctctgtccctccatgtctttgtctctctatgacaaaatcttcccttccttataaggacaccagtcattggatttagggatgcatcctaatccagtacgatgcatctcaacttgattgcataggcaargaagctattttcaaataaggtcacattcccaggtttcagacgaacatgaatttggggaggtcattattcaaccagtctactacagtgcctaacataatagccattcaataaatatttgttgaatacagaactgatacaaaataggaagtgttataagggagaagacat

SEQ ID NO: 192865 - DNA, 435 bp, Homo sapiens
ggcattatatggttacctatagtaaacctttaaaatacacagtgtatagacaaacattgcacaatgtatgaactctcagctcctttaaaatcttyagcaatctcatgattagactgatagcaaaatttgtggttgatattgttgtccacctgatctttcctagatacgctgtttttcatttctggtgtaattaagtggatatttgttcatgagtcacattctgttctatgtgtagacacacacacacacatacacacacaagaatgaggtgatgggaaaagattatctgaaattgaggctaatgacattgtcaaaataaaacttggccatagactgccaggttaatttcaggtaaacatgttatgaaaaacaaatccaattaaaagaaaggtgtaaagatattaacttttctttttaagatttttgttttccaat

SEQ ID NO: 192866 - DNA, 435 bp, Homo sapiens
ggcattatatggttacctatagtaaacctttaaaatacacagtgtatagacaaacattgcacaatgtatgaactctcagctcctttaaaatcttcagcaatctcatgattaractgatagcaaaatttgtggttgatattgttgtccacctgatctttcctagatacgctgtttttcatttctggtgtaattaagtggatatttgttcatgagtcacattctgttctatgtgtagacacacacacacacatacacacacaagaatgaggtgatgggaaaagattatctgaaattgaggctaatgacattgtcaaaataaaacttggccatagactgccaggttaatttcaggtaaacatgttatgaaaaacaaatccaattaaaagaaaggtgtaaagatattaacttttctttttaagatttttgttttccaat

SEQ ID NO: 192867 - DNA, 435 bp, Homo sapiens
ggcattatatggttacctatagtaaacctttaaaatacacagtgtatagacaaacattgcacaatgtatgaactctcagctcctttaaaatcttcagcaatctcatgattagactgatagcaaaatttgtggttgatattgttgtccacctgatctttcctagatacgytgtttttcatttctggtgtaattaagtggatatttgttcatgagtcacattctgttctatgtgtagacacacacacacacatacacacacaagaatgaggtgatgggaaaagattatctgaaattgaggctaatgacattgtcaaaataaaacttggccatagactgccaggttaatttcaggtaaacatgttatgaaaaacaaatccaattaaaagaaaggtgtaaagatattaacttttctttttaagatttttgttttccaat

SEQ ID NO: 192868 - DNA, 575 bp, Homo sapiens
aatcaatgcctttcaatctaaacatttcaatttctgatcccaacacatcctagttactaaagatgtttttctagtcttttctggaggtggcatttcctcccacatgaagcagcaagagtgagcaatggccaggaggtttgacaagacccagcagacttcatgacatgttgatagtccattatcttccctgagcactacataatactgctctatcacttgacytaggtcaccggtttcagttaattctcaaatgttttctacaacgcctttttgcataatctgcctgttcccttttctaattttctctacttccatggctgatgtcaacttacaacagagaaatgattgttggttttgtcctctttttgtgccatcttcatctgaagagtttaaccattttgaatcacatcaacttactccaatttaatgctctctaaggcattccactacatttaaaattaacaccccacttcttaccatggcgtacaagatcctatatgatctgccttctgacctcgtcttcttttgctgattctccttactcatcataatctaaactccttggctttcttaca

SEQ ID NO: 192869 - DNA, 504 bp, Homo sapiens
taaagaaaaaataaattacattattgttaaaactgctaatatttttcatttgccacttgtcgtacagtaaaaagcaagcaagtacacagatgaaaaactccgttattctttaacagactacgttaactcaatttttattcattaaactttcacagactctacaaattttgatactgcaaaatttttagaccctcaccatggttaatgggggttaactatatttggcgccatcacctttctgctttgtagacacatcaatttcatgagtacagtcatagcattttggagctcaatggtacttagggaacacctaagtagtccagactttacagactcaatacctacaggtttggggtagtaacacaactaagtgaagctgttgggcacaagtgacttatataaatgctcaatgtcagtgagacattgagaagtggggactacagygaagtaatgaagtagcatatatattgctgttcagctccagcctagagaatgtgggtgagg

SEQ ID NO: 192870 - DNA, 481 bp, Homo sapiens
cccttggtgatgagtgagttactctgagttcatgtgagatctgattgtttaaaagtatgtagcacctctcccctctttctcttgctcctactctcaccatgtgacatgcctgctcccccttcaccttctgccatgacgataggcttcctgaggccctcatcaaaagcttagcaaatgccagcactgtgcttcctgtacagtctgtggaactgtgagccaattaaacttcttctctatataaattgcctggcctcagatatttatttataacaacacaaaaatggcctaatacaacagcttatcttagatcacaaaaaagatacaaaaaaaagcaacaacaaagtttattctttagctgcaccccagtccttctccagtccatttgactttttgtcatctcratttacatttttttttgagacagggtctcactctgtcatccaggctggagtgcagtggtgtgattatggctcactgaagc

SEQ ID NO: 192871 - DNA, 591 bp, Homo sapiens
gattttagttgctcttgagcatattaaaaatatttaagttatcgggaatgctatcatatcagcaaaatggcaattagagttacctcccagcccccaaaaggaccaaaacaattattaaactacattttgatgacagtaaatgaagaagtacactagagggcaccaggggaatcgaaaaattcctgtacagtatggaatcccaggatagaccatagttaagggagccaaacattctgcctctgccagcagctgtgtcctctgccagaatcagctctgagtcagtgtgtacttttycttaaaggaaaaaggtaagctggaaatccctcatgatccccactgctgccacaaatgccagcaaaccttgcgaaaggaaagtcttccagttttcccagaacatgaatctagtttgtagagtagctgagttcacacaactgcattgcctcagagtacgtgcctagcttgagcacacatgacccttgtgacaaaagctgctatagctaagtgccatcttaaagccagacccattactagggtgcatcctgtgccagaggccagtagcaactgactatctgtcatccctgaggcctcacc

SEQ ID NO: 192872 - DNA, 588 bp, Homo sapiens
tacaatgggatgtctagtaagcacttatatttgtaaaaatgaataatatttgtgagtagaaaaatttctgataaatgaactctaatattttaatattgttcaactctgattagtgagtattattttcttctttttactaagttatattttctttttttatacaattactatgatttactttttaacttaaaaaccatcacatttaggtttaaaaagaaaaatatgagcaagataaattttaaaaaatatggctaatgttgwacatgctcaccataaccagagaacatgcacgagcaagcagaaacttgttttcccctaattgctgtgaatcattatcaacacatggcaaatttgctgagaaccatccatcactcagggtaaaagataggttaaaaataattcattccctaaatatttcagaggaacatagatagatcagaaaatctcaagctctaccattaaccttatactctacagtttaaagccatgcctctgggaagacacaagctcaaataatttataatatatagcattctctttttcagcacataattaagaaagagtctatgagctatttctctaataagt

SEQ ID NO: 192873 - DNA, 609 bp, Homo sapiens
ttctaacttatgacctagatctctggtaatattcagatcctcagaccccatacctgacctcctgaatcagaatctctagaagtagaacctgagaatctgtatccttggaattcttatgatcaaagaaattgatcaaataaattgatcaattgaaacaattttctaaattttaaagtctggaagagtattaagtttgcatcaggttaaaagyctcaccttcctacttaaagcaaagctactctcatacaaagaaaaaaataatgagaattttatgcctttgacaaaaatagctttactgtgtacctcaaaacatcaacagtagaatttcattgggccagtatagaatgacaagttggaagagagcagaggcatactccttatgtgaatgttttccaagctcagagcctagagacaaaagcaggcagcttgtgtacttcaagagcctgcaatgacaaaattaatttataagtcaagatgaaggccaattttaaaccctttaaacctttttttaagatatagaaacaaaaataattacatgcaaaagaacaaagttacctccctgcatttcacctctcctttgagaggaccttgaatactgttagtcaatat

SEQ ID NO: 192874 - DNA, 609 bp, Homo sapiens
tcaatttaaatccatctgctcctacagtgttcttacaaaataatatttgttatgtcatctcatgtctttcatagccattttagtgtactcagacgtaaattgtagtctggtgactttaaacatacttagaatcctgaagacatacagattgtcaaatttgggacaatagataaaaaatgaatatcatttgtcttagtccatttgaggggctataacaaactaccatgaaytgggtggcttataaacaacagaaatttactcctcacagttctggaagctgagaagtccaagatcaaggtgctggcagattcaatgtctggtgaagacctgcttccaagttcagattggcccttctcgatgtgtcctcacaaagtggagggagacaaagcagcactctggggcctcttttatgagtactaaaaccatccatgaatagttctctagcctcatgacttaattaattcccacaggccctacctcctaataccaccatattagagattaggtgtcaacatatgaattttgtgaggacataaacacttaggctatagcaccattcaatatatgaggcaaaaagaaaagggaaaaacaaataagtcaaggccaaaa

SEQ ID NO: 192875 - DNA, 609 bp, Homo sapiens
tcaatttaaatccatctgctcctacagtgttcttacaaaataatatttgttatgtcatctcatgtctttcatagccattttagtgtactcagacgtaaattgtagtctggtgactttaaacatacttagaatcctgaagacatacagattgtcaaatttgggacaatagataaaaaatgaatatcatttgtcttagtccatttgaggggctataacaaactaccatgaactgggtggcttataaacaacagaaatttactcctcacagttctggaagctgagaagtccaagatcaaggtgctggcagattcaatgtctggtgaagacctgcttccaagttcagattggcccttctcgatgtgtcctcacaaagtggagggagacaaagcagcactctggggcctcttttatgagtactaaaaccatccatgaatagttctctagcctcatgacttaattaattcccacaggccctacctcctaataccaccatattagagattaggtgtcaacatatgaattttgtgaggacataaacacttaggctatagcaccaytcaatatatgaggcaaaaagaaaagggaaaaacaaataagtcaaggccaaaa

SEQ ID NO: 192876 - DNA, 568 bp, Homo sapiens
atgctcaacatcactaagcatcagagaaatgcaaatcaaaacaacaatgatatatcrtctcaccccaattagaatggcttttatcaaaaagataaggagtaacagctgctggtaaggatatggagaaagggggacccttgtatactgttggtgggaaggttaattaatacagccactaaggaaatcagtatgaagtttcctttaaaaactaaaactagagctaacatatatccagctgggtatatatccaaaagaaaggaaatccatatatcaaagagatatctgtacttccatatttattggagttgtatgtataatagccaaaatatgaaatcaaccgttgtgtccatcattggatgaatggataataaaaatgtgatatatatacaatggaatatcattcagccatgaaaaatgaaatcctgttatttgcagcaacatagatgaaactggaggtaattgtattaagagaaataagtcaggcaaagaaaaacaaaaacaaacattatatgttctcatatgtgggaactaaaaaagtggatctcatgaagactgagagtagattggt

SEQ ID NO: 192877 - DNA, 568 bp, Homo sapiens
atgctcaacatcactaagcatcagagaaatgcaaatcaaaacaacaatgatatatcgtctcaccccaattagaatggcttttatcaaaaagataaggagtaacagctgctggtaaggatatggagaaagggggacccttgtatactgttggtgggaaggttaattaatacagccactaaggaaatcagtatgaagtttcctttaaaaactaaaactagagctaacatatatccagctgggtatatatccaaaagaaaggaaatccatatatcaaagagatatctgtacttccatatttattggagttgtatgtataatagccaaaatatgaaatcaaccgttgtgtccatcattggatgaatggataataaaaatgtgatatatatacaatggaatatcattcagccatgaaaaatgaaatcctgttatttgcagcaacatagatgaaactggaggtaattgtattaagagaaataagycaggcaaagaaaaacaaaaacaaacattatatgttctcatatgtgggaactaaaaaagtggatctcatgaagactgagagtagattggt

SEQ ID NO: 192878 - DNA, 573 bp, Homo sapiens
ttccagtcacttttttttttcaagatgagtgattgacctcaaaatcaaattccaggtgttttcttatgcaggcacagaaaaacaaaaacaaacattatatgttctcactcatatgtgggaactaaaaaaaatcraattccaggtgttttcttatgcccttcaggattacacatttgatccaaaccagtcaattctttagaaatttattttagagtaaacaacctgtcatgggcagaataccaagtaattctgttgaaactaaaagaacactttgcttggtcattgaataaatgtgttaattgctcttttctgccatagattttagtctaacttttgtccttcactctggcatatctgaaatgctgcttataaatctaaagaactagaaatgtagagctgatggctgtaatattcaatttacagtacctaatactaacaacataggtcttccagaagtggcttataaatattgattttacaatggaaacctccagaaagaacataaaaataattctacacacaatattctagagatttttttaatgtgaggacccaaagcaatctactctgagt

SEQ ID NO: 192879 - DNA, 539 bp, Homo sapiens
gagctttaaagttataaaatgttatcatcactagcaataattttggaggggcagggatagtgtctccttattacttttgacttccctatagtgcccacacatttgcaactagtgggccttcaatcactcctttatacaagagggaataaagaaaaaaaattttgaactcctttcaagggctgcagcatgctgcaggctataatttgcgtgagccctggcctctcctcaccaatcttgagtttacatcctgggagaatgggtgaggctactgcagaatcaatagttggagaaggcagtgaagtctcaygagatttgctctctctcattccctgtgtgaggcttagaattcagctgggagtaagaggttactcatttgtccctatgagaattaatcacttttgtggccagcctcaccttatttagttgactttcatctcatgctcctcctcactgtcttcttcccattagctgctgtgtgcgtggggaataccaagcaaccttcacagtgatcccagtgaagtgcaatcaagaagggaact

SEQ ID NO: 192880 - DNA, 539 bp, Homo sapiens
gagctttaaagttataaaatgttatcatcactagcaataattttggaggggcagggatagtgtctccttattacttttgacttccctatagtgcccacacatttgcaactagtgggccttcaatcactcctttatacaagagggaataaagaaaaaaaattttgaactcctttcaagggctgcagcatgctgcaggctataatttgcgtgagccctggcctctcctcaccaatcttgagtttacatcctgggagaatgggtgaggctactgcagaatcaatagttggagaaggcagtgaagtctcacgagatttgctctctctcattccctgtgtgaggcttagaattcagctgggagtaagaggttactcatttgtccctatgagaattaatcacttttgtggccagcctcaccttatttagttgactttcatctcatgctcstcctcactgtcttcttcccattagctgctgtgtgcgtggggaataccaagcaaccttcacagtgatcccagtgaagtgcaatcaagaagggaact

SEQ ID NO: 192881 - DNA, 539 bp, Homo sapiens
gagctttaaagttataaaatgttatcatcactagcaataattttggaggggcagggatagtgtctccttattacttttgacttccctatagtgcccacacatttgcaactagtgggccttcaatcactcctttatacaagagggaataaagaaaaaaaattttgaactcctttcaagggctgcagcatgctgcaggctataatttgcgtgagccctggcctctcctcaccaatcttgagtttacatcctgggagaatgggtgaggctactgcagaatcaatagttggagaaggcagtgaagtctcacgagatttgctctctctcattccctgtgtgaggcttagaattcagctgggagtaagaggttactcatttgtccctatgagaattaatcacttttgtggccagcctcaccttatttagttgactttcatctcatgctcctcctcactgtcttcttcccattagctgctgtgtgygtggggaataccaagcaaccttcacagtgatcccagtgaagtgcaatcaagaagggaact

SEQ ID NO: 192882 - DNA, 556 bp, Homo sapiens
actctaggggagggttttccagagggtcaaaagggtgatatattctcactttaaggccaggtccagattaggacttctacagasccggcgtacactctgtggatgattgtattatttctctcaagtatgtgctctctccttctctattatacgtgcccttttatggccatgggacttgtagtcctcctgagggagcagcttacatccctctttacttggccatgtgacaggctttggccaaagggatgtgagcagaagtgttgtctgccttgtgtaaaagttgctttaaaaggcaccatgggttccatgaattctgctctgtttcctcttccacaagtatgccatgtcccgaatatgggctgcttcttcagcctgggtcttagagagagaaaacatggggaacagggctgggaagaaccaccacaaatgacctgcaccagccaacaattaaaattcatgatcaataaatgctggttattataagccagtggaatttgggggttcttactgcagtaaaactgactgatattctcatgtataattcaaactaagaact

SEQ ID NO: 192883 - DNA, 556 bp, Homo sapiens
actctaggggagggttttccagagggtcaaaagggtgatatattctcactttaaggccaggtccagattaggacttctacagagccggcgtacactctgtggatgattgtattatttctctcaagtatgtgctctctccttctctattatacgtgcccttttatggccatgggactygtagtcctcctgagggagcagcttacatccctctttacttggccatgtgacaggctttggccaaagggatgtgagcagaagtgttgtctgccttgtgtaaaagttgctttaaaaggcaccatgggttccatgaattctgctctgtttcctcttccacaagtatgccatgtcccgaatatgggctgcttcttcagcctgggtcttagagagagaaaacatggggaacagggctgggaagaaccaccacaaatgacctgcaccagccaacaattaaaattcatgatcaataaatgctggttattataagccagtggaatttgggggttcttactgcagtaaaactgactgatattctcatgtataattcaaactaagaact

SEQ ID NO: 192884 - DNA, 556 bp, Homo sapiens
actctaggggagggttttccagagggtcaaaagggtgatatattctcactttaaggccaggtccagattaggacttctacagagccggcgtacactctgtggatgattgtattatttctctcaagtatgtgctctctccttctctattatacgtgcccttttatggccatgggacttgtagtcctcctgagggagcagcttacatccctctttacttggccatgtgacaggctttggccaaagggatgtgagcagaagtgttgtctgccttgygtaaaagttgctttaaaaggcaccatgggttccatgaattctgctctgtttcctcttccacaagtatgccatgtcccgaatatgggctgcttcttcagcctgggtcttagagagagaaaacatggggaacagggctgggaagaaccaccacaaatgacctgcaccagccaacaattaaaattcatgatcaataaatgctggttattataagccagtggaatttgggggttcttactgcagtaaaactgactgatattctcatgtataattcaaactaagaact

SEQ ID NO: 192885 - DNA, 556 bp, Homo sapiens
actctaggggagggttttccagagggtcaaaagggtgatatattctcactttaaggccaggtccagattaggacttctacagagccggcgtacactctgtggatgattgtattatttctctcaagtatgtgctctctccttctctattatacgtgcccttttatggccatgggacttgtagtcctcctgagggagcagcttacatccctctttacttggccatgtgacaggctttggccaaagggatgtgagcagaagtgttgtctgccttgtgtaaaagttgctttaaaaggcaccatgggttccatgaattctgctctgtttcctcttccacaagtatgccatgtcccgaatatgggctgcttcttcagcctgggtcttagagagrgaaaacatggggaacagggctgggaagaaccaccacaaatgacctgcaccagccaacaattaaaattcatgatcaataaatgctggttattataagccagtggaatttgggggttcttactgcagtaaaactgactgatattctcatgtataattcaaactaagaact

SEQ ID NO: 192886 - DNA, 245 bp, Homo sapiens
taacataccaaaggcccttaaaagtcctataaatcctctagcaaacaaaggttgtttattatttgctgttgtttaacccagaacttytaaaatgtatttggcattgaaacacttatttttcaagaagcactactaacatcctggtttcatgtggtgagtgaatctgaccttcaaaaaccccactcgcacttcacctccatgaaagaaggtttggcgagagttctcaaccttggctgtgcactaga

SEQ ID NO: 192887 - DNA, 581 bp, Homo sapiens
cctgtgtgcctctgagcattggcggcagctgctgtcctcacccatgaaagcctaaaacaatctctccatgacaacctaatagttcattcaactgttaacaccaaagacatgctagctcacagcagtgtactaagactcatctctgccccatggctcccccaactgtatactctattcatagaagctccccacatcaccatgctaaccagctcctgtctaaacccagccatgctcttacctgaagctacaaccacccaagaccctacacacttctatgtaaacactgttcaaacctttcttataccttttccaaacctgacagaccaaccccttccagatgcctcctttacttggattgtagatggcagctccttcctacatcaaggatgagggcatgctggctatgctataatgtcaccccccccccacattattgmagccaatctgctccccctaggcaccacctcccaaaaagctgaactcatcaccctcacttaagctctcactcaagcagccagacaacagatcaacatatattcaaattctcattatgttccacctagtgcactcacacttgtcca

SEQ ID NO: 192888 - DNA, 602 bp, Homo sapiens
agtgatacaatatcagaaatgatatactttcaaagcaatgctagatatataattcaagagtctcctttataggttgttgaggggaaggtttccagagctttgtcagtgtcaacaaccatcaatacrgtgtttgtcataggatcagaatatttaactgggagctgttattcagacctacgctggaaattcttagttgagagttaataaggcagtgaaaacagaatggttcaacagagtgaaaaaaaaaagactatttccagcaaaagtaagggtgtgaacaaggaaggaatggttgggataaagttaggggtcatggaaacagattttcctggtgggaaagaaatgaggttgaagtggctccaactggggtagcttaataacttaggccttgtcttgtgccctctgcctttccagatggttattagctgtcagacaaaatttaacccaagggtcaatgtgccttaattattacctttgtaaagtcttgatgacttgctatttatttttaataagcttgtcattcattatatttcttacttgaatgtcaagatgatgaggaaaggaggggaggcttgccttagttctctctcctgtcattactg

SEQ ID NO: 192889 - DNA, 583 bp, Homo sapiens
tcgaccgtttatccagatgagagatgatgctggcttggactaggatggcagaagtgaagagagatggtcagagtctacttctgaccaaatgtgatccaaaagaatacagtaataaattaggtgtaggttaagagagcgagaagagtcaaatatggctaccgatttttggcctgagcatcttrgaatagatgcagttgccatctttctcatagaaggagaccagggtggggtagagatgtgtatctggggcaggaggagaatttaatgtggggtgtgctaagttgaggatttctaacagatgtgcaagtgacaatgttgagtatagggagattgtggaacaaatctggagttccagggaaacactggggccagagacataatttgggagatgtcagtgagtagatggtacttatggccgtgaggtcgagtgagataaccaagaaagggaaaatacggatgaaatgtgagaattgagattgcaggggggtggggggcattaatgagatggtatatgtaaggcactcagagcaagcattatttagtgagtgttaacagcacattattttaagggtttgttaaagca

SEQ ID NO: 192890 - DNA, 568 bp, Homo sapiens
atacattgcagtatctgtatcactctctgcttctcatcttggaaaactgagcaaggttaaaaataccttcactccaaatgatgttagctgcaaagcagatccaaccatagctctgccccccactcggtcctagccagctgtgaaagggsctaatgagcaggctctgggagagagctgctgggggcgtgtggctggagtcctccacgtccatccactagccgatggtcatcagcaggttggaggaaggtaattgcccttgcaacttcttttagcagccacagtaaaggtcctgcataaatacccaggtctggatgcaggaatagaattgccacactgcaaaagtcaagtgagtttatcaactgggtcagcttctgtctttccctatgggatccaggagatattaataaatttgagaaattattaggtaccaaatgtccaatgggccttccctcaagtctgtatcagcccacctatgttttccagtgtggaatcccactcctcactaactgcatcctctacaggcagccttggaggataccctgtgctcctgcagcaggtctactcccta

SEQ ID NO: 192891 - DNA, 634 bp, Homo sapiens
ttgttcatgggtacagagtttcagttttataagatgaaagagttgtggagatggatggtggatatggctgtaycacattataaatgtatttaatacaactgaatggtatatttaaaattggcaaagagggtaaatcttacatgtattttaacacaataacataaaattgtgataaaaagagataatgcactaagagagaaaaaagtcagatgcagaggatctccaggtgcgaatgagtcatgcacagattaaagaccgtgacctttgttaatgcagacaaatgaggaacaaagatgaacaagacacaaacaaaaagtacccttgttaattatttacatttccacttgttgcatttatttttctctaaggatttagtgtttctgtaaaatattttgcaatatttcttttaatggtgtaaggtaagctaaatgtcaagttcgagagtttttatccttgctttctacgtattgctgccataatcacttctcctaagttagctgtatgtaaatcctcatttctgaaaatgatgctcacttgcacagaaatatcaaacataaaatattttttatagtagataacacataaaatgcaatgaactgactataaacattcaaccatctctatatcccacaga

SEQ ID NO: 192892 - DNA, 634 bp, Homo sapiens
ttgttcatgggtacagagtttcagttttataagatgaaagagttgtggagatggatggtggatatggctgtaccacattataaatgtatttaatacaactgaatggtatatttaaaattggcaaagagggtaaatcttacatgtattttaacacaataacataaaattgtgataaaaagagataatgcactaagagagaaaaaagtcagatgcagaggatctccaggtgcgaatgagtcatgcacagattaaagaccgtgacctttgtwaatgcagacaaatgaggaacaaagatgaacaagacacaaacaaaaagtacccttgttaattatttacatttccacttgttgcatttatttttctctaaggatttagtgtttctgtaaaatattttgcaatatttcttttaatggtgtaaggtaagctaaatgtcaagttcgagagtttttatccttgctttctacgtattgctgccataatcacttctcctaagttagctgtatgtaaatcctcatttctgaaaatgatgctcacttgcacagaaatatcaaacataaaatattttttatagtagataacacataaaatgcaatgaactgactataaacattcaaccatctctatatcccacaga

SEQ ID NO: 192893 - DNA, 482 bp, Homo sapiens
aacatggtaaaaagtgtcctgcattctataaaataaagcagtaattgtcttaatacaggaatggtaaacagtgtcctgcatagtatgaaatgatgcagttattgtcttaagatgattaaggtacatgaggcaaagtgatactgctccgggtcagagtgtacactgggatgggatggagaagtggtaggcaggtaaggtatttgatgacttggctacagctgaggtggtttttatcttaactagaattccttgtaaatattgaccaatgaaacttagtaattgaaagataattgagtgcctcatgggcactttactgattactgatctaggaatgattttaaatgatatgcctggtcccttgaagttgtttattgtaaataaactwgtaacttatgcactacatacacctgactagtgaagtgtataagctgagagacactaaaacctagtagcatccctgggttaactcatcctgcagaagt

SEQ ID NO: 192894 - DNA, 638 bp, Homo sapiens
gaagtatttttttttaatttgcttctgccagttttctacatacaccatcaatctaagacaccatcatccaatcaagtttcacatgaacatctcagttagggggctcaacctactgagatagtggaatttaaactctattctcccatgtacactattcagatttagtcttcaagtgagtgactcctttattcactcagaaataagcaagaccaagtcttatgctgagcttctatgcagttgtgcaaggtatgcctaatcctaatttgataaatgaggcagggcttcctcttagctttacataaaaagctcatttctataagcaccttgagtttcygtaggtttatagatgatcccaaatctccaagagccatacttttgctcctgattactcttctggctttgaggttcttatttatttctgcatgtcttttctaaaactatgtctgttataaatgtcaagaatgtgtaatcacaaataactgtagcaaatttgtatataatgggcagcatggataactttcaaactgcatgtgattccatctggaataagtttttgcttgtttgtttttaacatcttgggtttcctttttacagtagaataccattttaacactactttctgtgtgtgttgtaggatt

SEQ ID NO: 192895 - DNA, 534 bp, Homo sapiens
cttaagatcttttctccacaattctgagggatggggaaacaaaaggcamaatcaaaacacatgtgattcgaaagatataacttactagcatcagcagaaaaaacaaagatagacccttttctttttgtggacacatgctgccggacagtcagatgcagaacactacagaaattatagtgggtaatatttctcatatgtgaaataaattcatattccagaaattatttatttttgatctgatattaaaattattaagtatttgaacttatttttatttctatattattatgagacctgaattatccaattttaatggtaatttccaagcacagtaaaataagtgtacttagaaaaaaattacaatctagattaagaatgaactgactcttcagagaatcaggtgaccctttagactgaaaatacctaattattgcagttcttacataaggaatgtaactaaaagtaatttaattgtgtaaaaaatgcttagcaaaaatataatcaaatgtttacctatttgctatcatctgtagt

SEQ ID NO: 192896 - DNA, 442 bp, Homo sapiens
aatgaactgctttacctgagaccaagaactattataaagctagtacaattggtatagcaaaaacaaacaaacaaacaaacacacaaaaattgtaattaagacagttcatttgagagagaactcattatattaaccaataaaaccattcagaaaggacaggaagggtctcatgaacatayaaaaattcattacctgaacatagaagaacaaatcagattgggaagtgtgcattgtttaacaaatagtgttgagctcactagggtgaaatgaaccacatctctaccacaccacattcaaaagaaagtccatacttagtatggaaaacaaagcttgcaaagtgttataaaacagtactggagatgatattagtaaaataaaagatgagaatggaattttttttttttttttaagaccaagtcttgctcttgtcctccaggctgga

SEQ ID NO: 192897 - DNA, 410 bp, Homo sapiens
gtttctacccttaaacctgcagaaggaacatggccagccaatcaatttgaaactctgatcttcagaatcatactacaataacagcggtgcattaagtcactatatttgtggtaatttcttaaaacagtaataaggaagaaatgcaatcacagctaatcagagagaaaaaaagacatagtagatgctttttaggaaatttcagtttgaaaactaaagagatacttgacttaaaattttgatatagtgtagtgagtgctatgatcattatcytatcccatttcttcctttgttacttaatttttctatacaccctgtatatatggtatattctatatttgtatatcttcttttttccccactagaatgattgcttcacggaggtggtattttctttttctttttttttaagt

SEQ ID NO: 192898 - DNA, 474 bp, Homo sapiens
gcaaaacagctaatttcatatgtgagactttctagggttttatttttctcctggaataatcatgtaaaattccccttaacaagaggatagaccyataggcctgtatgcttgaaatgcattcaaatgttgcttgaagttacgaacaactttgcatggttaaaaataaagctttcttataataagtaattgctatgtagatttttgttgttttgttttggtttggtttgggtttaaacttaagcataaccttatagctattcagaataataaatagtgggcaccaacaacagtttgcatgtccttcttaaaattgtagaaattaatttaaaaaaaaatttatgatatttacacctttaagatcaattttaaagataaaacatattatattcctcctagattcacttgttctttatttatgttatttatttttttctttccccaacatgaacacctattattcagtggttgttatgt

SEQ ID NO: 192899 - DNA, 620 bp, Homo sapiens
cacaatgccttaatctctcattctctctaccttacatattcaaaattttcctattctagtgtaatattctcacaaacatataaatatgacatagtatagcctttctagctagcacaccaaaaatttgtttgactacaccccactattccctcagctcactttacttttaaactgactcaggcttggactagttcctgtcatttgactcatgatgttattattatgcttccatttaaccaaataatttccttgataccatcttatttttgttttrtgtctctctagctgctattttctcttttagttttttagtttcttctcctctaattcctttgaaacaacttcggaggtgaaacttttcacctcagttttctaagcattttctagatcattctcaagcttttaatttgtattattactctagttattcattgattgaaatccaatctagaaatcttttctgagcccagacactcgtataatactgcctatttgaaatctgaacttaatcaaatttaggtattgtaaatgcgacattttcaaaattgtacttttgtccttcccattaactttcgtcctcacttcacctctttcatttagcccacctactgctcaagata

SEQ ID NO: 192900 - DNA, 524 bp, Homo sapiens
tctcttgctctcttagagaaatattttaaccttattttatttttagagatagggtcttgctatattacccaggctggtctcgaaatcctagcctctagcaatcctcccttttcagcctcccaaaatgctaggattacatgtatgggccaccacacccagcttttacaccttccttttacctgaactccaacccctctttcctatcttcactgtaactaataacctcatttctaattgactgaacaaattgaagcaatcaaaaaagaatacttattgacttatactactacatcgaccacttggcctgcacctacacccacatattttgcatttgcatctyacacttggctaaactacataaagcaaatatcttcaggcctcgtatctttatgactatgaatactccacaaaaaattagttccattctcccttgcaccactagtttttgttaaactcacatgtaaattacataacataatataaattacataacactaaattcacattttttaaatgtagaattc

SEQ ID NO: 192901 - DNA, 580 bp, Homo sapiens
cttatatgatgaaataattgaagaaaatctccctggtcttgctaaagatctagatattcaaatacaagaagytcgaagaactggaaaattcattgcaaaaagatcatcaccaaggttcatagtcatcaggctatctaaaggctaaacaaaggaaataattttaaagctgtgagacaaaagcattaggtaacctttaaaggaaaacctataagactaacagcagatttctcaggcaaaaccatacaagctggaaggaactagggaaacaagaataaactaaacccaaactgagcagaagaaaagaaataacaaagatcagtgcagagctaaatgaaattgaaacaaaaaaaattacaaaagataaaacagaaaggtgattctttgaaaagataaacaaaattgacaggccattagtgagattaaccaagagagtgagagagaggttccaaataagctaattagacttgaaactggggatattacaagtcacagaaatacaaaggattgttcaaggcaactatgaatacctttacattcacaaactagaaaatctagagtaaacagataaattcctggcaat

SEQ ID NO: 192902 - DNA, 545 bp, Homo sapiens
taatattttaagactgaagttgatcatgtgttacttagcctgtcgaaagtgaaactgcaaattaaggggacttctatacacacacacacacacacacacacacacatttaggtatgaaataagttatttttattttactttggaatcttctaaataataatgatcatgatattgcccataaactctttattgttagaagacaacaatatattatctatgaatgacaaaaaagtttaatgctaatggtgaatttattttatacttaggggaaaatctatctagttcatccactctgattaagcaatatagtctttttgcatttttcatttgtataaattaaggaggcacaagtgcaattttgtgtatggatatattacatggtgataaagtctgggttttaatgtaaccatcacctgaatggtgtacttcrtatttattaagtaatttctcatagctcactcccactctgaccctcccacactttagaatatccagtgattattatcccacaccctatgtccatgtatataatttattttgctctc

SEQ ID NO: 192903 - DNA, 521 bp, Homo sapiens
aatggaagctgcagcccctgacagcctctggtgatgagtgccggggtgctctggccagggccccatgaggaaagctgtatctctgggtcatcagtggctactcccagaggaatcactgactctagcaaagtcctgatgataaagacctcttgggtgggactggagggcccccagctgggcatctccatgaccaacagcctccagctggcctacttgtcctaacaggattatgtgatgttcaggccaggctgaggtcagaggagattgatgctaaagccatgatccggccctgctgagaggggagaggcatgtgaggaaacgagtgcccaggagccagcagcaatcatcccagggaggacaagcatgctggtacattgtctctgggtgtctttggggcatggaatggctctcgtgactgcagatgtcctctgggattcagtcgtgctcaagagcccagcctgattytacaccctgagatgacatatgggaggggtggggaccatgcagggctgtgatgaggg

SEQ ID NO: 192904 - DNA, 508 bp, Homo sapiens
gagtaagcatgtgagcgctaaatctgcatcattcaggcaatattcattgagcacctactgtgtgcctagcccctgctaygcatcaaggatatgacagtgaccaaggcaagtgtggtgcctgccccatggagtgtaggcagcccatgttctagaatgtgctgaggattcaccacagctccattcacccagctcctgcagcaaagctgttcgcctgttggtgtgtgttcagggaacatacaccaccatgacactcggctaggctgagggttctgcaacagctctttgcagttgtatccttcctcagtccaggccttgtgtctttaggatgaatcagaggccttgctcattcgtctgctcagggcccactgcctgaaaggctcaacaccctcccaactgtccccagggctgggaagcctgagacctccagatgttgcagggcctgagagggcagggggcctgactgatccctaggagaagctggctctgtctgtggaggagcagcagaggg

SEQ ID NO: 192905 - DNA, 508 bp, Homo sapiens
gagtaagcatgtgagcgctaaatctgcatcattcaggcaatattcattgagcacctactgtgtgcctagcccctgctatgcatcaaggatatgacagtgaccaaggcaagtgtggtgcctgccccatggagtgtaggcagcccatgttctagaatgtgctgaggattcaccacagctccattcacccagctcctkcagcaaagctgttcgcctgttggtgtgtgttcagggaacatacaccaccatgacactcggctaggctgagggttctgcaacagctctttgcagttgtatccttcctcagtccaggccttgtgtctttaggatgaatcagaggccttgctcattcgtctgctcagggcccactgcctgaaaggctcaacaccctcccaactgtccccagggctgggaagcctgagacctccagatgttgcagggcctgagagggcagggggcctgactgatccctaggagaagctggctctgtctgtggaggagcagcagaggg

SEQ ID NO: 192906 - DNA, 521 bp, Homo sapiens
tgacctttaaggaccagaaaaagaatagaaatgggccaagaaaaaggctgaaaactcagttgaaaagtgtgcaaaagacgtcaacaggcacttcaaaaaagagaatattcaagtgcccaatagcacacaacaatgtgctcaatttcactaattatcagggaaatgcaaatacaatgctccataaaagaccactatacacatgcaccagaaaagagtcatgaaaggatgaaaaatactgagttggtgagaatattgaccaagtcatgcactgctggtaggatgtaaattggtgaacccatttgaaaaatggtctagcaaaatctactaaaactgaatatatgtatacattgtggcacaaatattcaactytaagttatactcaagagaaacatgtgcatatgtttatcaaaagacatctactagagtacatagtataaatatatccataatagacaaaacttaaatacaacaatagaagagacagtttatgatgtatttgcccaatggtatactatacagaa

SEQ ID NO: 192907 - DNA, 517 bp, Homo sapiens
ttttaacaattacaaccaaaactaattattttggaaaacttgaaagacgaacttttagcaaaaccaataaaagaaaacggagaaaataaaccaataaggcagagaaaaggagaacacaggtagataaatggcaaagactttaaagatactattagcaacagtttttcaatacctttgttamtttagatgaatagacaattttcttgaaaaaagcaacacaaggaacagttgttgcaactagcaaacatggtaaaaccctaaggtgaaataattagtattatgataaataattagtgtgatgagtgttacatgagtaatttattacactaccttctgatgttgaaattcagtgaaggcaacctaactttttctagaggtttgaaccaaatttacatcatgctctttacttacaaaaccataacaatatttaaagtagacagataagctataaatataaatttaatatgttattcgatcaacatttttgttttgatctcttgaccaagcaggaaaggtg

SEQ ID NO: 192908 - DNA, 356 bp, Homo sapiens
aaatatttttccaatactatactgctgtctctaaacctacactttgaaatcagaatatttaccatttcaaaagggtgtgcagttctccattaatctaatgagtttttacttttcaatatttcaaaaatataaacacattttttcatgtaaattatctctactttgaatataatagcaacaattatactaacactacattaacyaaacgaaatgtattactgataaaaaaaatgtgcacagaatttttctgcttttgaaacattgtttccgaattattttctcacaactaactggcttagttttactgtaaacagaaggtcactagaaccatgacatcaactatgctaactacttag

SEQ ID NO: 192909 - DNA, 356 bp, Homo sapiens
aaatatttttccaatactatactgctgtctctaaacctacactttgaaatcagaatatttaccatttcaaaagggtgtgcagttctccattaatctaatgagtttttacttttcaatatttcaaaaatataaacacattttttcatgtaaattatctctactttgaatataatagcaacaattatactaacactacattaaccaaacgaaatgtattactgataaaaaaaatgtgcacagaatttttctgcttttgmaacattgtttccgaattattttctcacaactaactggcttagttttactgtaaacagaaggtcactagaaccatgacatcaactatgctaactacttag

SEQ ID NO: 192910 - DNA, 576 bp, Homo sapiens
gttggggcagagtgttggcagagtccatcttttgttgttgtagaatagaggttcatgttacctagtggactgttgrcaggagatggctcttagcacccagaaactacccagaatccagaatttcttactatgtggccattttccataagtcctcatcaaacacggcagcttactccttcaaaaccagaaatggagtgttccctaatatgctaagagagtcttatataacaacataattgtggaaatgacatcccatctcctttgctatcatctgttggttagagacaagtcatggttctcagtcacatttaagaaaagggaattatgcaagagtatggattgcctgggctcacttccatagttcaccttctggcttccatgaattcatgtccctctctccaaaaaaatatattttctcccacttcaaggtccctcaaatgtttgtgagtcttccatgggttttatgaagatttacttcactagataaaagacacatccatagatattttagagattatctcttctcaacttttggttcctcctaagatagctgaggaacaacacccttcagcttcc

SEQ ID NO: 192911 - DNA, 576 bp, Homo sapiens
gttggggcagagtgttggcagagtccatcttttgttgttgtagaatagaggttcatgttacctagtggactgttgacaggagatggctcttagcacccagaaactacccagaatccagaatttcttactatgtggccattttccataagtcctcatcaaacacggcagcttactccttcaaaaccagaaatggagtgttccctaatatgctaagagagtcttatataacaacataattgtggaaatgacatcccatctcctttgctatcatctgttggttagagacaagtcatggttctcagtcacatttaagaaragggaattatgcaagagtatggattgcctgggctcacttccatagttcaccttctggcttccatgaattcatgtccctctctccaaaaaaatatattttctcccacttcaaggtccctcaaatgtttgtgagtcttccatgggttttatgaagatttacttcactagataaaagacacatccatagatattttagagattatctcttctcaacttttggttcctcctaagatagctgaggaacaacacccttcagcttcc

SEQ ID NO: 192912 - DNA, 389 bp, Homo sapiens
ttcattctgagaaaagcagtttcttaatggatttttttaaatctccacttccagcttttggaaaacttaacaataaaaatattgaaaagcaagcaatataaaaaatattgttttaaaataatgtagcacttttagtattgtttcagatttcttcacatatcaaacatccaattggaaagaagaggattttgttacttkataaaatgagttacagtgattcacagggtatttaaatcatctatatacagattggaagatttatttctcactttgcattatcacaagtatctattccttttacagcttttctaacagcctctgcaaaattccttgcaaaatcttcaagatggttcaggatggagaatatagacatccaaattttcttcctg

SEQ ID NO: 192913 - DNA, 650 bp, Homo sapiens
ccaggtactcgggaggttgaggcaggagaattgcttgaacccagaaggtaaaagttgcagtgggcccagatcacgccattgcactccagcttgggtgacaagagcaaaacttcatctcaaaaacaaacaaacaaaatacagataggtagattaatggaacagaatggaggacccagaaacaaattcacacacctatagtgaactcatttttgacaaaggtatcaataacttacactggggaaaagacagtatcttcaataaatgtttctgggaaractggatgtccatatgcagaagaatgaaactagatggctatcattcaccatacacaaaaatcaaataaaaatggattaaatacttaaatctaagaccttaaaccatgaaactaatacaagaaaacctccaggaatatttccaggatattagtctgggcaaagatttcttgagcaataccctataagcacagacaaccaaaacaaacatagacaaatggaatcacatcaagaactagaaataccatttgacctagccatcccattactgggtatatacccaaaggactataaatcatgctgctataaagacacatgcacacgtacgtttattgaagcactattcacaatagcaaagacttggaaccaacccaaatg

SEQ ID NO: 192914 - DNA, 536 bp, Homo sapiens
agttcttggaaagtacattagtgtgatttggttccagaataactttatctgcatttgtatagaaagattctgcagaacttttataggtaagtactacactaaatgaaaagactagcaagtttggcagcaggaaacctggtcttctctgtattctcctttacagtattcatccccttctgacccatcatttctttgtatgtttaatgctactaaagctaatttatagctagatgaggtttacataaaatggtatgacatgtaaagtaattatkgaaatgcctgatgcatagctggttcttagcaaatgatagctggtactatgatgaaattagtgatgatcacctataattacaaaaatgtttgtttctttaaatcaagtcttaacctcagaaaaattattgtatctcaaattggagggcttatttttaatctttatccactgttttaaagagatttttaccctctaatgttctctgctaaataactattacacagtcttactactaaaggtatcatttcttcgctcctgatacctt

SEQ ID NO: 192915 - DNA, 561 bp, Homo sapiens
aaacctggtcttctctgtattctcctttacagtattcatccccttctgacccatcatttctttgtatgtttaatgctactaaagctaatttatagctagatgaggtttacataaaatggtatgacatgtaaagtaattattgaaatgcctgatgcatagctggttcttagcaaatgatagctggtactatgatgaaattagtgatgatcacctataattacaaaaatgtttgtttctttaaatcaagtcttaacctcagaaaaattattgtatctcaaattggagggcttatttttaatctttatccactgttttaaagagatttttaccctctaatgttctctgctaaataactattacacagtcttactactaaaggtatcatttcttygctcctgatacctttgcgacccaacttttggctcaataattggggaaggtggattaccctgctctgatttttatgaaaaagtcttcctctggttggggttgaaatgaaaaatatgctgtatatgtacaaacatgcctcccatgacatttcctaagtttcttgatttaata

SEQ ID NO: 192916 - DNA, 570 bp, Homo sapiens
tgtctgctttctgctcatagaaatgcggaatctgtgtccttaaaaacagatacatctaaacttattttaaaacattatatcatttaaatgcattgtttcctttcctaatttggggtttstccaccaaacgaaattgcgtataagaaaatctataaatcaccttcatataagatatttaatttaaaataaaccttcaaaaaagtgagaaactgacttatacactatcatttgagcatggatacattttctattattacataaacattttctcaaccatattgtcctttcttaaacattcctttaaaaggaatttcatgatgagaatgccatataattaatttaatgcctatatttttctcacgtacatgtaattacatacatatttcaaataaatacttggttgtttattttccttccacttaagcatatttaaaacaaagctgaatattcacctaatttcccctaaacaaaatgagcattggtatacaagggtaaaatgatgaaagtcatatttttaacaatatttccttatatgtgtcatcgaggaaattatctaatcttttttagtct

SEQ ID NO: 192917 - DNA, 570 bp, Homo sapiens
tgtctgctttctgctcatagaaatgcggaatctgtgtccttaaaaacagatacatctaaacttattttaaaacattatatcatttaaatgcattgtttcctttcctaatttggggtttctccaccaaacgaaattgcgtataagaaaatctataaatcaccttcatataagatatktaatttaaaataaaccttcaaaaaagtgagaaactgacttatacactatcatttgagcatggatacattttctattattacataaacattttctcaaccatattgtcctttcttaaacattcctttaaaaggaatttcatgatgagaatgccatataattaatttaatgcctatatttttctcacgtacatgtaattacatacatatttcaaataaatacttggttgtttattttccttccacttaagcatatttaaaacaaagctgaatattcacctaatttcccctaaacaaaatgagcattggtatacaagggtaaaatgatgaaagtcatatttttaacaatatttccttatatgtgtcatcgaggaaattatctaatcttttttagtct

SEQ ID NO: 192918 - DNA, 594 bp, Homo sapiens
tcccacagatgtgttttgtcagtaaagtgtttgtccagtttatttttaaatttggacatatgtagacaaatggagtccactatacctggctccagtggcatggaaagaggattggggatcccttaaaaggccaaggttaaactttctcatcaaattaactgtgtggaagccaaaataaaaatttagagaaattataaagttatcaatagctaacacatagcacttcaaatgtgctaagcattgttctaagcacttactaaattatttaatctccacaacaaccccataagatagatgctatgattatgaccatcccaatatgaggaaactgaggtatagaaagatgcttatttgccraaagttccgcagctagtgcaatatatgacagagttgaattttgaacataagtaatattatggtgtcagtccttgaaaaactatgttagacctacagttatatttcctgcacataagaagttctgggctcatgtttttgaatctgacatgtgcttcttctcctttatagtgcagtgtctatagtagaggaatccagcactattgcagtcctagtgattcaatagaaatgacacacaga

SEQ ID NO: 192919 - DNA, 408 bp, Homo sapiens
agatcttagaacatatgcctgacatatagtaggctctcagtaaatatttgctaaatgaatagttgtattgaaatggcaataatcaccttatatgtgtrttttatccaggaacattcaactgttcagaactagccttagaaaagtaagaagataattaggcccacacaagtttggatttgtgtgtggaagaagacacatgcataggagtaaaggatgtttttaaaaggatgattttaatagttaactatggaatttaaactagtcatgatggcaagtgaagatgaacatagtgatggataatgaaaacttatgaaagtcaagggacttgcggtcttgaggagtcaaagcattgatgtaagattgctagagttggaagctggagagcctggtggtgttgtttatagtggg

SEQ ID NO: 192920 - DNA, 408 bp, Homo sapiens
agatcttagaacatatgcctgacatatagtaggctctcagtaaatatttgctaaatgaatagttgtattgaaatggcaataatcaccttatatgtgtattttatccaggaacattcaactgttcagaactagccttagaaaagtaagaagataattaggcccacacaagtttggatttgtgtgtggaagaagacacatgcataggagtaaaggatgtttttaaaaggatgattttaatagttaaytatggaatttaaactagtcatgatggcaagtgaagatgaacatagtgatggataatgaaaacttatgaaagtcaagggacttgcggtcttgaggagtcaaagcattgatgtaagattgctagagttggaagctggagagcctggtggtgttgtttatagtggg

SEQ ID NO: 192921 - DNA, 408 bp, Homo sapiens
agatcttagaacatatgcctgacatatagtaggctctcagtaaatatttgctaaatgaatagttgtattgaaatggcaataatcaccttatatgtgtattttatccaggaacattcaactgttcagaactagccttagaaaagtaagaagataattaggcccacacaagtttggatttgtgtgtggaagaagacacatgcataggagtaaaggatgtttttaaaaggatgattttaatagttaactatggaatttaaactagtcatgatggcaagtgaagatgaacatagtgatgrataatgaaaacttatgaaagtcaagggacttgcggtcttgaggagtcaaagcattgatgtaagattgctagagttggaagctggagagcctggtggtgttgtttatagtggg

SEQ ID NO: 192922 - DNA, 408 bp, Homo sapiens
agatcttagaacatatgcctgacatatagtaggctctcagtaaatatttgctaaatgaatagttgtattgaaatggcaataatcaccttatatgtgtattttatccaggaacattcaactgttcagaactagccttagaaaagtaagaagataattaggcccacacaagtttggatttgtgtgtggaagaagacacatgcataggagtaaaggatgtttttaaaaggatgattttaatagttaactatggaatttaaactagtcatgatggcaagtgaagatgaacatagtgatggataatgaaaacttatgaaagtcaagggacttgcggtcttgaggagtcaaagcattgatgtaagattgctagagwtggaagctggagagcctggtggtgttgtttatagtggg

SEQ ID NO: 192923 - DNA, 311 bp, Homo sapiens
ttagtttgattaggtcctatttgtcaatttttgtttttgttgtaattgcttttggcatcttcatcatgaaatctttgtcaggtcctatgtcacatggacaaaaagaagtgaacaacagacactggggcctacttgagggtggagtgtgagagcggggagaggattttaaaaatacctaccaggcactatacttattactgggtgactaaataatctgtacaccaaactcccacaacatgcagttcaccagccaagtatctgttccccttcaagagactcccccaacacawaaggactcacataaacttaag

SEQ ID NO: 192924 - DNA, 628 bp, Homo sapiens
ctagtgccatatacccacatccacttccctctggccatgtgtgcccctgtcatctctgctgaaaaagcctaccatgaacggttttctgtagtagagatcaccaatgcttattttgagccagccaaccagatggtaagatgtgatccacaccatggtaaatacataacttgcagcctattgtaccctggtgacgtggttcccaaagacttcagtgctgccactgacaccatcaaaaacaaatgcagcatccagtttgtggattgctgtccctctagcttcaaggttggcattagttaccaacttcccactgtggtacctgttggagacccagccaaaggacagagagctgtgtgcatactgagcaacatcacagccattgctgaggtgtgggctcacctggaccgcaagttttacctgatgtatgccaagttcctttgttcagtattccgtgggtgaasgggtggaggaaggagagttttccgaggcccaccaggacatggttgtccttaagaaggattatgaagtggttagtgtggattctgttgaagaagagggtgagaaggaaggagaggaattctaattatccattgccttcagccctccagcatgttatacccccagaatttca

SEQ ID NO: 192925 - DNA, 542 bp, Homo sapiens
  misc_feature (1)...(542): n = A,T,C or G
nnnnnnnnnnnnnnnnnnnnnnnnnnnnnnnnnnnnnnntagagccacagtttcattcaccggttttcctatgagatayacacacacacacacacacacacacacacacacacacacacacacgtattatgaatagatcaatttttgacctatcaactataagataacattttaatatatgcattatggcagatataccctaaaataaaataaaaattgtgtctactcagtttttattttgctagcaacaatatgatgtagaatttatgtgtgttagcatgtaagcctgcttgtctagtttcagaaacctggcaagctacttagttactagatgatcttaggtaactcttaattattcttaacctgtatttttattgctgtttatctcacctttacctactaagttttttttcttgtaccagaggaaattattaatgaaagtggcaaagcaccaatgaaccaaaattttgaatatgttgaaatataatgaaaaacagaaaaaagaagttaaaactcccagatttcaatttccatatgaatta

SEQ ID NO: 192926 - DNA, 559 bp, Homo sapiens
ataggttgattaaaaataaagttagaaggattaaacacaggtttaatttttaaaaatttaatataaaaactaataatgttaatctagttacactttctccagtcccaggcttgaaataacatgctttggaaaaagaatatacttccactgtaaaaaaaaaaaaattgtacaatgtaaatatacttcttttttcctcaaagtacagatgtattctactagagacatttgcagtcttaaaggacttttattttaatcactagkaagcaagagaatttcccttatggtttatgacaaggcaacataaaaatgacaatcctgatactagtatttttgtcttccaaaatatatagctattagatgaaattccatcttttgagaaaatactcacatgaattttagctttaccaagtatttacaaatacttcataaaggcaaccttccgtcttcacgggttgtgagggattctgagttcaacttcaattgaggccacaattacattcaacaaaatctggatttactgtttggatgtgtgtttgcgtttgtgtttgacagggttgtt

SEQ ID NO: 192927 - DNA, 446 bp, Homo sapiens
gttataatcaaagtgatttcgaaggctaaggaggtattatggaaagtgctctggaaagcttactagaaacaaatgttctcaatgaactaaagatgaagaggatggatgatcccatagcagcacactgtgataatttttaactgactttgtgagtaatctattctgaaccacacataaaagaaaagaataaagcattttgttcyctacttttgtcattcctcggttaatgttttttacagagagaaaatgcaaatcaaagttacctaggttttttgtattgcagctgtctttaaattaattttttaaaatatcttcacacacttacctataaaactatagaaaaataatagggttagatggataatgggtaaatgagataattataaattatctttaataatgaaccaatactgccatctatcgcttccaacacaagtccattacac

SEQ ID NO: 192928 - DNA, 603 bp, Homo sapiens
gtggctgtggccagcctcttcattaacccagcattcattgtttcaggccccaataattttacagagaccatataaataaaatcacatgttacaaaagatttgggtatcacttatttatgcattatgatgttgtgtatatcaatagtttgtactttttgtcatttagtagtattctattgtaagcaaataccattttttgtttgtttgtttgtttttatttctcagttgaggtacatttgttttgcttccagtattggtatattaaaaataaatatggtataaatattctgatataggtttcttagtaagcttagtattttgtttcacttggagaggtatctaggagtgggattatagagtcatatcgcaagtgtatgcttgatgctctaagaagacttccaaattactttycaaaataactgtaacattctgcatattcagtaatagtgcatgagaatttctgaactttgtgttcctatcaacacttctcattgtgaatttgtttgtttagacgttttaataggggtcttttgatacatttgtccagtttttcttttgggataccttatgacaaatgatgttgaacatctattcttgtactta

SEQ ID NO: 192929 - DNA, 603 bp, Homo sapiens
gtggctgtggccagcctcttcattaacccagcattcattgtttcaggccccaataattttacagagaccatataaataaaatcacatgttacaaaagatttgggtatcacttatttatgcattatgatgttgtgtatatcaatagtttgtactttttgtcatttagtagtattctattgtaagcaaataccattttttgtttgtttgtttgtttttatttctcagttgaggtacatttgttttgcttccagtattggtatattaaaaataaatatggtataaatattctgatataggtttcttagtaagcttagtattttgtttcacttggagaggtatctaggagtgggattatagagtcatatcgcaagtgtatgcttgatgctctaagaagacttccaaattacttttcaaaataactgtaacattctgcatattcagtaatagtgcatgagaatttctgaactttgtgttcctatcaacacttctcattgtsaatttgtttgtttagacgttttaataggggtcttttgatacatttgtccagtttttcttttgggataccttatgacaaatgatgttgaacatctattcttgtactta

SEQ ID NO: 192930 - DNA, 471 bp, Homo sapiens
caaagtcacgtcttacatggtggcaggcaagagagcttgtggaggggaactctcctttatgaaaccatcagatttcgtaaggcttattcactatcaggagaacagcacaggaaagacccatcaccatgattcagttacctcccrtgtggtccctccatgacacgtgggaattacaggagctacaattcaagatgagatttgggttggggacacagccaaaccatatcactgcagagagccaatttctattttttccatgtattctatttttctcatatggttgggtttggaatagtaataaaaacaatatatatatctagatcataaaacatgctctatgtaaaattatttacagactcataagacatgcaaaacttttaactcacatacaaaagacacaaatatggtgattcagtgaccactataaatatatttatgtaagcatggttatgatagatacgtagacaaaat

SEQ ID NO: 192931 - DNA, 621 bp, Homo sapiens
gatgagcaatggttccctttaatttcatatgccaagggctggcagccaactgctctcctcttacccaygatcaggctcagcagtggctacaaaggtcagccacagaatggcaggagatcttgtttatcatgcttttgattcttgaagataagacatttattttggaactatcaataaccaaacagactttctctgtgtagaactaaaacatagattgaaagaacagagcatcactgaggacttagctactaagagatcatactgagatttagaaaggccatgggagcctccaactcaccccctgtaataactgagaccatgtctaaccacagaggtgtgggtgggtgaaaatatgggctctagagtgtcatggaggccagccacagtggctcatgcctgtaatcccagcattttgggaggctgaggtgggaggatcacttgagcccaggagttcaagaccagtcttgacagcatagggagaccccgtctctacaaaaaatttaaaagttagtcaggtgtggtggcacatgcctctagtcccagctacttgcagggctgagatggggggatcgcttgagcccaggtagtcaaggctgcagtcagctgtgattgtgtcactgc

SEQ ID NO: 192932 - DNA, 589 bp, Homo sapiens
agaattcttttctaggcatgtttactactttccatgttaccatataggaaatcacttatttagaaggacttactagatttgaaacataaaaaacaaaaattttatcgttaacatacggctctttttttttttttttttgcgacagtctcactccgtcacacccaggctggagtgcagtggcatgatcttggctcactgcaacctcccctcctgggttcaagagattctcctgcctcagcctcctgactagctgggaccacaggggcgcgacaccacacccgggtaattttttgtagacacagggtttcaccartgctgcccaggctggtctcaaactcctgagctcaagtgatccacctgctctggcctcccaaagtgctaggattacagtcatgagccactacgcccagccaacatagagctcttaatgcaataggaaaagataagaaaccccctagtaggaaaaaaatgttaaaaatatatacagggaattaacataagaaatatgaatgactaacgagtatatgaatggtacaaatatactaaaataaaaattttagtttaaaatgagatcccatttttctgctta

SEQ ID NO: 192933 - DNA, 571 bp, Homo sapiens
actgacttagctgtgtccaagagattctgatatactttatctttgttctcattagtttcaaagaatgtcttgatttatgccttaattgttcagtcaaaactcactcaggaggargttgtttaatttccatataattgtatggttttgagtcattttcttagtattaatttctgtttttattgtgctgtcgtccaagagtgtggttgggatgatttcagtttttttgaatttgctgagtattattttacgtacaattgtgtggccaattttagaatatgtcctatgtggcaatgagaagaatgtatattctgttgttttggggtggagagttctatagctgtctattaggtcaatttcatcaagtgttcacttcaggtcctcaatatctttcttaattttctgactcaatgatctaatactgtcagttgggtgttgacgtctcccaacatttttgtgtgggaatcaaagtctctttgtaggtctccaagaacttgctttatgaatctggtcactcctgtgttgggtgcatatatatttaggatagttaggtcttcttgttgaattgaatgct

SEQ ID NO: 192934 - DNA, 548 bp, Homo sapiens
ggaatgctagcgatttttgcgcattgattttgtatcctgagactttgctgaacttgcttatcagcttaagaagcttttgccagaccctattttgatcctaattttatttatcttggcttgggtagtaaagtaaaggtgatttaggacacaagtttacattcgttctatattgaaataatagtattttggatattttgagttaaaacatattaaaattaatttcacctattttttattttgttaatgtttgtaatcagaaaaatttaacatatggctcaggtttgtggctgctattatatttccattgaacactgttgccctagatgttttcaaggtctggataaaggatgctgatttaaactgcgcagtaaagaaattaactgaatgaagttaattgcaatctggacagagatgaaractcacatgagatgacagtactgggtcaaagcgtggtgtattggtgaaggaactgtttcttttccaccctctgaaggtttgctgaaattaattaatagacagatcaacaggagaaaaagcacacaaatgtg

SEQ ID NO: 192935 - DNA, 548 bp, Homo sapiens
ggaatgctagcgatttttgcgcattgattttgtatcctgagactttgctgaacttgcttatcagcttaagaagcttttgccagaccctattttgatcctaattttatttatcttggcttgggtagtaaagtaaaggtgatttaggacacaagtttacattcgttctatattgaaataatagtattttggatattttgagttaaaacatattaaaattaatttcacctattttttattttgttaatgtttgtaatcagaaaaatttaacatatggctcaggtttgtggctgctattatatttccattgaacactgttgccctagatgttttcaaggtctggataaaggatgctgatttaaactgcgcagtaaagaaattaactgaatgaagttaattgcaatctggacagagatgaagactcacatgagatgacagtactgggtcaaagcgtggtgtattggtgaaggaactgtttcttttccaccctctgaaggtttgctgaaatkaattaatagacagatcaacaggagaaaaagcacacaaatgtg

SEQ ID NO: 192936 - DNA, 606 bp, Homo sapiens
gataaattgctgttaaaatttagctctgatcagaaacaaaaatacacaaggaagccacaataagcaaattaacattagcactgattctaggcttttgacaaaacgcattttgaaatgggtatgtttagatgtttacacctgaagttacagcaaaacaacagcatttcaccaagaaaagaggctctaattaaatactgatattttccatatccttaattataatggcttacagttctgcctaagggcttctctagaagctaatttgctggaatatcaccacttacacttttcatttgttgaagatcttgctccctcgcgaattgccttttttagtttgttgttactgcatttggcattctctttctgggaatgcttcctgccccctgtakagaaaagactagcaagaaacttggcaaacaaagtttcatcctgggtggaattctttcccctcctgcatggcttaaatgtgttgatatctgtttctgtactgcagctgcaaagcaatggtttttggcaacgtgaatacaaacacatttcttattctctcctgaagccctggtttctagcaacatatccccaagcaagtgtttctgaagctacagctag

SEQ ID NO: 192937 - DNA, 516 bp, Homo sapiens
cggatataatagagatggtatgtggagtcattgcatgtgttttgccacaaggaggggccgtggttacaaccctggacgtgtccttaacttgtattaaaccagtagsctttcctgtttgaaaaacaaaacctacttaaaagagatttttgttgttgttgttgtttgttttgtttctttctttctttctttcttttttttaaaaatgtgctcacatccagaaagaatggtatggtcttttatgagtaacataaacatactgtgatatccttatgttactaaatgcacattacaaagcataacaaaatcatagtcacacacaaaaaataaggacaagctacagtgttgactggaaataaaaagggggaagctttttcacatgttgttgcgcaaaggtaaccggcagcttcagaattctcctgtcttctcagcaagagttattctctaaaggacatgatgaactttttgtccttccaaacacagaagtcaaaaaaatgtatccttgaagctcaatttagc

SEQ ID NO: 192938 - DNA, 585 bp, Homo sapiens
aaaatattgagaaaggtgcagtttgttgcttatgcaactgcaaactggagcaaggacattctcccttaaatctagaccatggaaccaatgatgactagcaaataaccatatttcaatggctccaaaggtccttaagagaaaatccaaagtcagttattaatgcagtaaagctctccctcctcatcaatttttaccattgtttttttttctgtccatccaccctgacctactttcagtccctcagacctgccattcctctagagctgcccacttayggcttctcctgcttagaatacttccctgactaccccagccactccctttcatatggatgaatcctattcatcctttaggtctccttaaatgcacatcctctatgtagtgaggtcacattgctcaccccaatttgtcatacttcactgtattcacacacttcttttggatgactttgaaatttcttccaataatgagttagagaatatttccccagactttacatttgagttcagccccatgactttctttaaccaatagatcgaggcagaagtaacaatgtcccagttctgagcctaagtcttaagaggt

SEQ ID NO: 192939 - DNA, 585 bp, Homo sapiens
aaaatattgagaaaggtgcagtttgttgcttatgcaactgcaaactggagcaaggacattctcccttaaatctagaccatggaaccaatgatgactagcaaataaccatatttcaatggctccaaaggtccttaagagaaaatccaaagtcagttattaatgcagtaaagctctccctcctcatcaatttttaccattgtttttttttctgtccatccaccctgacctactttcagtccctcagacctgccattcctctagagctgcccacttatrgcttctcctgcttagaatacttccctgactaccccagccactccctttcatatggatgaatcctattcatcctttaggtctccttaaatgcacatcctctatgtagtgaggtcacattgctcaccccaatttgtcatacttcactgtattcacacacttcttttggatgactttgaaatttcttccaataatgagttagagaatatttccccagactttacatttgagttcagccccatgactttctttaaccaatagatcgaggcagaagtaacaatgtcccagttctgagcctaagtcttaagaggt

SEQ ID NO: 192940 - DNA, 584 bp, Homo sapiens
ggtggagccagagtttgaaatcaggcagtcaggctgcctgtcttttttttactgtcttcacaaaatacagctattttttttcatgtttttaaagaaatagcatcttgactccttgtctaactgaacagatgacttcactctggcgtttacttggctttcctagtaaaggtccaacccctcttctctttccctaagaaggaaactgcaaaggcagcttctctgtgagtcagtgcaggttctacaaacagagaagtgaacgtcccagggaaggtgataaagaacaatcaggtatacgaacccccataacttacattaaatcgtcaaaagaggtgaactcatagagacagtgagtggatgagagatcatcaagggctaatgggagaagagaatgaagactgatgtcttaatggttaccaagtttctgtttgaggtgatgaaaaagttttacaagtagatagtgatagtggttgtgcaacatcgtgaatgcaattaatgccactgacttrtacacttaaaaattgttaaaatggcaaattttatgttacgtgtacatttccccaatttaaaaaaataaaaaccttcat

SEQ ID NO: 192941 - DNA, 506 bp, Homo sapiens
tgtgttctgagatttgaacatcactgtggggactccccattacctctcaggccagttccccatccctgcatcctggggagagaacaaaatgataatcaagccttttcttagattgccatttgcaaggtccaagtagaaaaatggaattcctctgcttctatggcctgaaattttttcaaatcttatggcaaggctgggggaaaagttttaaaatattggttatagagacagaaagagtggttgggggccaggaggtaccatgcacagaatctggagaagaatttggtgataactgctcaatttggcatctttaccaaaaataaagcacaagtagctgttgtatgagtctccttggacttgatgtggcttggttctgtgtccccacccaaatctcatcttgaatcrtaaaccacatgatccccacgagtcaaggaagagacttggtgggaggtgattggatcagggggcaaggttcccccaagctgttctcatgatagtgagtgagt

SEQ ID NO: 192942 - DNA, 540 bp, Homo sapiens
gctccccactttcttcatcagtgatctggaaatttacttatttccagacaccaactgtattgttacagtgttaacgtattcttttatgttccctgctgggaatgactttcaataatgaccaactatcctaataggatgatttcctggtttaagttgactcatgtcaataggcaggtaagaaataggatcctttatcagggtaatggttttttaaaaatacataatcctagaaaaaaaatatggatgttaaaatccacagggcttggttattcatyggatttggttgaagactaggggactgtgaattgcgggactgaacagaggacggtgacaccagttgaagtagaaaatagacttacacgtagaactcaaggtacctgagggtcactatattggtaaagaaaggtcaagcttttctgtggcaacaaatcacctcaaatctctgtgacttaaacttttatttcttgctcctactatagcccagtggagtttagacagctctcctggaaagctctccttaaaggagtggctcaggaatcc

SEQ ID NO: 192943 - DNA, 566 bp, Homo sapiens
ttctgtcctttcattagtcttcttggtgactaagatgatattggcaagaggagaaattcagccttggccaagatgaacagtttttaagcattatattcttaccaactatgtatcgttcattggttgagtcagttgttcactgatcagacacttattgaacactgagcatacatcaaacagtgtaggatgctggggcttcaaatataaagatgatgtggtacattttcttaaggaacttatagattattggtattgagagtcatctaaataaaaaattatattacctagtgatcagtgcttcaatagaggcacgttcaacatgctgtgggaagaaataggcytgagaaacaagcactggatgttatgggaagagcttcacaggggaggtaaaatttcagcttagttttattttcaggatgagaagttgtttaccaggtggatgaagaaaagggcaggccagactgaggggcagagctcgtgggtgtaaaatgactgtaaagcaaaatctagccattatagccagtggggtggcttgatggtgcagcatagagatgtgtccttgggga

SEQ ID NO: 192944 - DNA, 395 bp, Homo sapiens
atgggggaagctttttgaaaagaggcagggagkccatgaagggatgtgaagcggaagatgttctcagaggaaaagagggcagagtgtgtacctgcaagaacaccctcaactcccatgaaggttttacaattttatattttccccttggtttatgaggacaatcatagattatgtatggttttaaaaatcagctttattgaggaataattgttttataattagctgtgtatttttaagggtacgacttaatatgtttgacctatctacatacctgtgggaccagcgccacaatcaaaataatatccatcatctccccaaatttactttgtttctttgctcctttgtaattcatctctctccccatgccatacccagacagccaccgatctgcttcc

SEQ ID NO: 192945 - DNA, 445 bp, Homo sapiens
gaaagatttttaaaacttttatgtttggagttttttcacatgtttgactggggagccaggagagttgggttttagtgaaaggccagaaccataatgggctctgaagttggaccgttgggtttgaatcccatctctatcactttctgactgtatgattttggccatagttaacaccctctgtgcctcagtttcctcctctgcataatgggttgttgggagctgcaaatagatgaatgtttataaagcagttagaacagtccctagcacaaaacaagcactcataaaatgattattggtcatggttcaagtactggttggccatatgactttctctatctgggcttcagaatcytaatctattaatgaagagattgaataataatttctatgatctcttccagtctaaaatggtccaaatgacttctttggtgaggaagtataagaa

SEQ ID NO: 192946 - DNA, 597 bp, Homo sapiens
tttatgtatctacaggggtaatacccaccccctccacagccattctctaccccttccacatcaagcagtcattggcttatctgtttgaataagcacacacacatgactagatattaaagggtaatttttataaatcaaatcagaaaaccttgaggctgtaccaggtatgccccagttccattcactttgcaactgaaccatctattgatccatccgcctagccattcatctaacaaaactttattgagtacctacatgtgccactgtgtcaggcactggggatacaaagatgaaaaaacacgtatttgcttcccctggagcttgyactttagtggaagagagaccgcgtatttcatgatattcaggtaagcattttgacagagttaatcacagggtgtcacagaagcagagaagaggggccaggctttgggaaccagaaaagccttcctagcaaaggtgacaattgggattaactgctgtgaatcactgtggcagatactaattactccctggtacctgtcctctttcttccttctggtaatagaacctacaaggttttagctgggcccagtgaccaaagatccattttccagcctc

SEQ ID NO: 192947 - DNA, 513 bp, Homo sapiens
tttgtgaaaacacaaggtccctgccctggagaggcacaagggtcagtggagacaatgcaggagtaagggctctcctatccattatcttttcacagttccaagaatcctgtgagaaagatgttgtcaccaccrtttcaagagggaggcactgacactccccagttaaatgccctcttacctgcaagatctctgctttgatccagtttaaactcctggcctctgccccacactgtgttccccaacatcatccagagcttactctgcagacctgaccttcctggtttcagactggcagtacccaggcactcctctagctctttacttgtcttcctctctgcactgactgtattacagtgtcaccagctatttgcccatcaagagctgcaccaccctccaccccttcttagccacacgtctctggcatttacaggtaggcttcaaggcattcaagaaccctataatttcaagcaaaaaccttggtcaaatggggacaagtacattttaagggagaga

SEQ ID NO: 192948 - DNA, 515 bp, Homo sapiens
ccctgccctggagaggcacaagggtcagtggagacaatgcaggagtaagggctctcctatccattatcttttcacagttccaagaatcctgtgagaaagatgttgtcaccaccgtttcaagagggaggcactgacactcccyagttaaatgccctcttacctgcaagatctctgctttgatccagtttaaactcctggcctctgccccacactgtgttccccaacatcatccagagcttactctgcagacctgaccttcctggtttcagactggcagtacccaggcactcctctagctctttacttgtcttcctctctgcactgactgtattacagtgtcaccagctatttgcccatcaagagctgcaccaccctccaccccttcttagccacacgtctctggcatttacaggtaggcttcaaggcattcaagaaccctataatttcaagcaaaaaccttggtcaaatggggacaagtacattttaagggagagaggctaaattgttcatcagat

SEQ ID NO: 192949 - DNA, 515 bp, Homo sapiens
ccctgccctggagaggcacaagggtcagtggagacaatgcaggagtaagggctctcctatccattatcttttcacagttccaagaatcctgtgagaaagatgttgtcaccaccgtttcaagagggaggcactgacactccccagttaaatgccctcttacctgcaagatmtctgctttgatccagtttaaactcctggcctctgccccacactgtgttccccaacatcatccagagcttactctgcagacctgaccttcctggtttcagactggcagtacccaggcactcctctagctctttacttgtcttcctctctgcactgactgtattacagtgtcaccagctatttgcccatcaagagctgcaccaccctccaccccttcttagccacacgtctctggcatttacaggtaggcttcaaggcattcaagaaccctataatttcaagcaaaaaccttggtcaaatggggacaagtacattttaagggagagaggctaaattgttcatcagat

SEQ ID NO: 192950 - DNA, 525 bp, Homo sapiens
atattttagactccgcagaccatatcgtctctgactcaactattcttctgccgttggagtgaaaaggcagccaaaaatatatacaaacaaatgaacatggctgtagtccaataacactcttcacacgttagaaaatacaattatccttttgatttttttgttgaaccaaaatccattcttagctcacagactgtacaaaaacaggtggcgagccacatttggctgtgggctatagtgtgccaacccccagatccagaatatatgattgtcaaacttcagtgtgcataacaactacctgggatacttgttaaaatacagctttgccagattctgcagccaaggactccatttcagtagggatgggatgaagcctgggcatctcacttttaagaaagcaagtgactctgatgcaagtcatcctgagatcatactttaagaaactaaccatattaattagagcaggttaggccatcatagcaaatagaccccrgaatttaggaggcttagcataatggaagtttatta

SEQ ID NO: 192951 - DNA, 575 bp, Homo sapiens
gacaaaatgaagatgtcgaccccacaggtcctttgcaagtctattcttatgactcaatccttatgaaatagaataaacccatccacaaagaaagaaagaaagaactgacagtgcagggaaagaggactagaagcagcaagagcacaatgcaggagaggccagcagcaaggatargaaaaaggagtattagaaagagcatggacttagagtcgtagagacaggtctgaatgctggcttagcttcttatttaggagctgtgtggtctggtccaataatgtgattgcatgggctccagtttccttgtctgtaaaatgaagccaatatgactgagcccgaaggtgtcatgaggactcatcgtggtgaatgtctgtgtacagagactggctcaatacacgcagactttattcttctgatcctggtttgtcactgactctgtgggatgctggtccccagtagcctccctgcagtcctgcaagaggccagaagtccagccacttgagaagcacagaatgagctgggaaacttgggagactgtaggtgtctagtttcagacaccccttccagtagactcacca

SEQ ID NO: 192952 - DNA, 519 bp, Homo sapiens
atccttatgaaatagaataaacccatccacaaagaaagaaagaaagaactgacagtgcagggaaagaggactagaagcagcaagagcacaatgcaggagaggccagcagcaaggataagaaaaaggagtattagaaagagcatggacttagagtcgtagagacaggtctgaatgctggcttagcytcttatttaggagctgtgtggtctggtccaataatgtgattgcatgggctccagtttccttgtctgtaaaatgaagccaatatgactgagcccgaaggtgtcatgaggactcatcgtggtgaatgtctgtgtacagagactggctcaatacacgcagactttattcttctgatcctggtttgtcactgactctgtgggatgctggtccccagtagcctccctgcagtcctgcaagaggccagaagtccagccacttgagaagcacagaatgagctgggaaacttgggagactgtaggtgtctagtttcagacaccccttccagtagactcacca

SEQ ID NO: 192953 - DNA, 470 bp, Homo sapiens
acttataagaataccagccattagggcctaccctaatccagtatgactttatcttaacttgataacgtctgcaacggccctatttccaaatcaggtcacattcgcagctactggaagttaggacttcaacatatgtttccagggagcacaattatactcatgacacccctggctttgcctcagtctgaagtaggagtcttttctaatgaacgactttrgcatcctatatttctacaacatgtattacgttgaatatatatgtccatttacacaccatgtcttctaatacactagctccttgagggtagggaattggtcacattcattctgacatccccagtgcagtgcagagtacatgataggtggaaaatccatttcattgtggttaatcaaacaaacgaataatatataaatgcatttcttggattttcattgacttaaagcatataccaggtaactactgtatattt

SEQ ID NO: 192954 - DNA, 592 bp, Homo sapiens
agcctccacaacatctctaacaagtcttccttaatcttctcctaacaatgtcccagattctgatttgctgctcataatatgagagctgaaatggactttagaagttatcttgtccactatccttattttatagatgatgaaaaatacatagaaagggtgtatggccttccagaagggatargattatttgcagaatgggacctagaactcaagtcacctgctttttccaagtgaacttcatccttctactctctcccacctactgtcttcctgatcttttacaacttgatcagcattggtcattttatagaaattattctctcaaaggtcacctaaaaacatcttggtcaagcattcaatcatgagttactttttgagttctcacctcttttggcttccatgagaccacagaggtctggtcctggcttctcttagtcctccccctgcactaagcaaaaagttttttacaatatcccagagactcagttctttgcctttgcccttttcctgacatctaagtccttgatggacttatgtggtctcaggactttgacgatcacctctccttgccttgaccttgagttgcactcaa

SEQ ID NO: 192955 - DNA, 403 bp, Homo sapiens
acatcccagcttaatcctcacttctccaccagccttctctaaccacctgagccatagcaactttcctcatccagtgtaggagaaaaagcttgaaccacactatctgagagctatggatcaacatttcaaccatcgactagttgtgctgctttgggaaagttatataacttcttaggcttagcaaaatgggaataataraacctatctcatagggctgtggagaggatgaagtaggggaatatatgtgctgaaaggaagttccagttggtgatctaagttatggcatcctaagattcagatggaaccaggcacacctgggggttcatggagtagacccacaatgccatcctgcaccaagaggaagaactcatcatccatgatgtctaagagtccaagccactgg

SEQ ID NO: 192956 - DNA, 423 bp, Homo sapiens
ggcgtacctcttgacattatttctttaaacacattcagttcattttctctaagctgcttcccatcattgcccatagatcaacagccaagatagagaggagacccagcacacatttatgagtcaccttagccgctccctctggggcaaggaagaggggcaccaatgggtgcaacaacacttccccatctgtctctgccagacaaggcatgggctccctctttctctgatgtctctgattcttttttattaccatactttaagttatggggtacmtgtgtaggacatgcaggtttcttacataggtatatacgtgccatggtggtttgctgcacccatcagcccatcatctacattatgaatttctcctaatgctatccctcccccagccccccacccctgacaggccccggtgtgtgatgttcc

SEQ ID NO: 192957 - DNA, 551 bp, Homo sapiens
attttgtcagtttgaccaccttacttcttgaggcaattctacccacactgaggaatcagagagtgtcaaggggcagagcatgaaccacccagaatggagccagcaggaaggatgggtgaggcggaggggaggcctgcagggacagcccacttccctgggcctgcagacaaacccatcattcatgggagggcctgcagctgctagccctctgaacmagctgaggaagcctctggggtttagagtccagatgttctctgtctaggaattcactaaatatcagaggaacagggggcttccctgcctttcaagcaaagctggtggccacaatgtttagctagcagagaaggcagtgaaggagcatgtatagaacatgtatatgtgtcatgcatatgatcacaacaatctctgatgaagctatcattcaaaatttagaaagtgagaaggaaactgaggcactggaaaaagtgacatgctcaagatcacgcagctgtaagtggacttgactcccagatctactggcttcacagcctctatgccatgcatagagcaga

SEQ ID NO: 192958 - DNA, 551 bp, Homo sapiens
attttgtcagtttgaccaccttacttcttgaggcaattctacccacactgaggaatcagagagtgtcaaggggcagagcatgaaccacccagaatggagccagcaggaaggatgggtgaggcggaggggaggcctgcagggacagcccacttccctgggcctgcagacaaacccatcattcatgggagggcctgcagctgctagccctctgaaccagctgaggaagcctctggggtttagagtccagatgttctctgtctaggaattcactaaatatcagaggaacagggggcttccctgcctttcaagcaaagctggtggccacaatgtttagctagcagagaaggcagtgaaggagcatgtatagaacatgtatatgtgtcatgcayatgatcacaacaatctctgatgaagctatcattcaaaatttagaaagtgagaaggaaactgaggcactggaaaaagtgacatgctcaagatcacgcagctgtaagtggacttgactcccagatctactggcttcacagcctctatgccatgcatagagcaga

SEQ ID NO: 192959 - DNA, 546 bp, Homo sapiens
ctggttcaaatgcctctgacacatgtatgtgcttgtgtgagccaaaagaaagcattgctgaaagcaagaggctcrcagggagaggtcacacaacacatggcccaggaagccactgaaaaactacaacaaaaaataattgagctctttgaggcctgatgggaatcttactaaaaccttcctttcctccttgaggcttgattttcacatcttgactctgccactgactcatctgtgtgacgtagtcttattcactttcccttcacctgtgggatggacatactggtgctcatcagggccagcagaggaattcaaacgatgtgacatgtctgaaaacactcgcaaactataaatatactttgggatttttttttttaacagggagagggtgaaaataaaagagaaaagcaaatttcaaagcagtgtgtgcttcctctttgtgtgaatgaggtctactgggactctaatccttagagattgttctttagggctctgagaagattggctccagagcctttaaaatgatttggaaattgaaaagagaaagtt

SEQ ID NO: 192960 - DNA, 546 bp, Homo sapiens
ctggttcaaatgcctctgacacatgtatgtgcttgtgtgagccaaaagaaagcattgctgaaagcaagaggctcacagggagaggtcacacaacacatggcccaggaagccactgaaaaactacaacaaaaaataattgagctctttgaggcctgatgggaatcttactaaaaccttcctttcctccttgaggcttgattttcacatcttgactctgycactgactcatctgtgtgacgtagtcttattcactttcccttcacctgtgggatggacatactggtgctcatcagggccagcagaggaattcaaacgatgtgacatgtctgaaaacactcgcaaactataaatatactttgggatttttttttttaacagggagagggtgaaaataaaagagaaaagcaaatttcaaagcagtgtgtgcttcctctttgtgtgaatgaggtctactgggactctaatccttagagattgttctttagggctctgagaagattggctccagagcctttaaaatgatttggaaattgaaaagagaaagtt

SEQ ID NO: 192961 - DNA, 546 bp, Homo sapiens
ctggttcaaatgcctctgacacatgtatgtgcttgtgtgagccaaaagaaagcattgctgaaagcaagaggctcacagggagaggtcacacaacacatggcccaggaagccactgaaaaactacaacaaaaaataattgagctctttgaggcctgatgggaatcttactaaaaccttcctttcctccttgaggcttgattttcacatcttgactctgccactgactcatctgtgtgacgtagtcttattcactttcccttcacctgtgggatggacatactggtgctcatcagggccagcagaggaattcaaacgatgtgacatgtctgaaaacactcgcmaactataaatatactttgggatttttttttttaacagggagagggtgaaaataaaagagaaaagcaaatttcaaagcagtgtgtgcttcctctttgtgtgaatgaggtctactgggactctaatccttagagattgttctttagggctctgagaagattggctccagagcctttaaaatgatttggaaattgaaaagagaaagtt

SEQ ID NO: 192962 - DNA, 540 bp, Homo sapiens
ggtttgggtaaaggagaaattggtaatctcagttctggacagattaaatctggccgttgtaaaacattcagatgtgagcattagaaggcagattaaacggtggatgtagagctcaggaaaggagctggaggtaaatatgtggacttggacagcatctgagagagtgtgagattgtcaagtgaggaaagaccctggacacaccacaagagaatgctccattaaggatctagaagaaacagtgtgcaaaggatgagtcaagaaagagggagaaccaagatagtcrtagaagcatacaaggggtgactcttctaagaaggagggggcagtaaagtgtccagttgcatgcagagactaaagagtgagatggaagaaagaactattggagtaaataattccttgatgactttaccttcctgagagcatatcccatgtcatcaaccctccatagtggtcttgctgtggctgtctcgtttgtaatgattatggaaccaaattatttaatttgtagactatcaagttgctttgatatttttcacttct

SEQ ID NO: 192963 - DNA, 624 bp, Homo sapiens
ttgttccttaatgatttaatatcaccagttaataaatatgtgtcatcagtatgcataaagacattacrtctaagcttagtgtggttggaggattgcattgtgccctagacagataaaattttaaaatgaatcacagtttaattcaaataatcagagtcaaaagacaagtcagattctggagaataaaggctgtttcctttttcatctatgaattcccagggaagggactggttcgcatcagaggcactttaaaagtttcttgcctggacgggcagataaattaattagttatttgacaaatgacctgacagatagtaaaagtctttgagagtcagaaaagagagaatttatctgggaagtgcaatgttttgatttttttttaaagaggaacctaattaattgacctgggttctttcaggatgaaataatcttttgggtaaataaaaagaaaaataaagagaagacagttctctaggcagggaaaacagaacaggtgaaactctggaagtggaaaggtcttattgttttgaggacagatggagaggcctcttgctgaaacagtgtggaatgtgaaaggccggctataggtctggaagataggcacgtgggaccacactccccatt

SEQ ID NO: 192964 - DNA, 543 bp, Homo sapiens
cacaactggggggcatgtgggtgggttgcagtgggtcaccaaagcatttctggagaaaagtaatctttaacttgagactaaagaatacatggagttagctttgaaacaaatacagaaaaaatgtattcccaggagaagaaaaaacatgtacaaaaccccacgtgtaaaaaatcaacatggtagggtcagggaactgcaattgattcagtgggaccactcggtgacgtatgattggcaagagtggtgaggaatgcgcctggacagataagaaggggtcagaccagacagcacctctctgatgccatgataagcagtgtggactttttcctgagggcaggaggagccactcactgaagggttttatgcaggagtgtgatctgattaaatctccgcattagtgagcagtgctgagaatggcttggagatggacagcagtgaaaacctgaaraccatttaggagggtgctaggatgatccagatgagagatgaaggtagcctgaactaccttcggggacgggggccagtggggaagaaggaatgaat

SEQ ID NO: 192965 - DNA, 368 bp, Homo sapiens
gttcaagcgatccacccaccttagcctcccaaagagctgagactataggcrtgagccaccatgcccagccagaaaactatctttagtaaaaacttaaacataacttaaatgtaagctagaagcaatcaggaacgagataaggacatttattatcactaaatattataatgacagatccagccaattagagagaaaaagaagtaagtacttaaagattgatgagaaacttatttgcaggttatatgctgtctccatagaaaatccaagcatagttggagaaagtattagtaataaaagagcataacgacatggttatattcaaaattcaatatcagtatataaactgtttattccttttaaagttgtat

SEQ ID NO: 192966 - DNA, 368 bp, Homo sapiens
gttcaagcgatccacccaccttagcctcccaaagagctgagactataggcgtgagccaccatgcccagccagaaaactatctttagtaaaaacttaaacataacttaaatgtaagctagaagcaatcaggaacgagataaggacatttattatcactaaatattataatgacaratccagccaattagagagaaaaagaagtaagtacttaaagattgatgagaaacttatttgcaggttatatgctgtctccatagaaaatccaagcatagttggagaaagtattagtaataaaagagcataacgacatggttatattcaaaattcaatatcagtatataaactgtttattccttttaaagttgtat

SEQ ID NO: 192967 - DNA, 539 bp, Homo sapiens
tgcaaaagtcaaccacttccacacgtctttattgcccacatcaaatgcatctaagatgaaatgcacagaggaatgcagcatcccccgcaccaccaccaccactcagagatcatcccaaaggcagtaccaagaggcaactccatgcactcagagttggactctgctggggttctcgacaggtgatgagctacactgttgaccgaggggctccagtaatttaatcctctaaagtgcagatttaggaatacttcagacttacaagtggttttggtacaaaggacttctgatctaaagatgagatttcaagtccrtagataagtacttatttgccagaggtaaagtcccataacttacctgaattttagtctctttacctgaaaaacccagctattaatgtcagctatactgcctcacaggattcatgacagcataaagtgaaatggtgcacacgtatatatctggtgagttgtttgctgacataacaataaaaagtactgtgaatcatgagtgatggtaaatacaagctaatgagagaggaa

SEQ ID NO: 192968 - DNA, 534 bp, Homo sapiens
acccattactgttcctggtgaagcaaaaatatggttataaagctgccactaatttttataagcttcctatgacccttaataataagaaaaacctattttttatataatggattatttatactatttggagtatcatatgaatctctgattgacacagagtctagccaaatgccacacaatttttcttggtctctacaagtgttcatatgatattttaagattagcaacttgaaaattatttctaacaagaaatataaaagaacattaaacattctgcttgatcacttttctctgcawtttttaaactgcttgttttctaagcccctgttctctagaatttttaaattggactctcaggtacattgataaaatagactcaacatctatcgagtcttctaaagaacatttgacacatgtcaaaggaatactggcagaaaagcagatggcagaataggctgaagtattataggaaatttgatgctggggaaaaacatttatcattcttgatacaggacaagtaatacattatacaaa

SEQ ID NO: 192969 - DNA, 472 bp, Homo sapiens
  misc_feature (1)...(472): n = A,T,C or G
tatgtgaattactagtcaagatacatttttttcctatgtgacattcacttcmccttgcatcattcattgaaaagaccacttttctcactgcattgatgtcacttttgccataagtcagctgatctgtatgtttttatattattttctattctgttccattagttcatctcactgttttgaacaaatatgtctcaattactaattctttatgatggtacttcgaatccattgaatcctccagctttgctctccttcaaaattggcttggctatttgtggccttttgtatatctacgtgaactttaagcttgnctttttttttttttttttttttttttaaaaccaagtcatgctttgtcacccaggctggagtgcatggcgcaattctggctcactgcaatctctgcctcccagggtcaagcaatcgttccacatcagcctcctgagtagctgggactacaggcaggtgccac

SEQ ID NO: 192970 - DNA, 486 bp, Homo sapiens
  misc_feature (1)...(486): n = A,T,C or G
atgtgaattactagtcaagatacatttttttcctatgtgacattcacttcaccttgcatcattcattgaaaagaccacttttctcactgcattgatgtcacttttgccataagtcagctgatctgtatgtttttatattattttctattctgttccattagttcatctcmctgttttgaacaaatatgtctcaattactaattctttatgatggtacttcgaatccattgaatcctccagctttgctctccttcaaaattggcttggctatttgtggccttttgtatatctacgtgaactttaagcttgnctttttttttttttttttttttttttaaaaccaagtcatgctttgtcacccaggctggagtgcatggcgcaattctggctcactgcaatctctgcctcccagggtcaagcaatcgttccacatcagcctcctgagtagctgggactacaggcaggtgccactaccccttgctattt

SEQ ID NO: 192971 - DNA, 482 bp, Homo sapiens
  misc_feature (1)...(482): n = A,T,C or G
tatgtgaattactagtcaagatacatttttttcctatgtgacattcacttcaccttgcatcattcattgaaaagaccacttttctcactgcattgatgtcacttttgccataagtcagctgatctgtatgtttttatattattttctattctgttccattagttcatctcactgttttgaacaaatatgtytcaattactaattctttatgatggtacttcgaatccattgaatcctccagctttgctctccttcaaaattggcttggctatttgtggccttttgtatatctacgtgaactttaagcttgnctttttttttttttttttttttttttaaaaccaagtcatgctttgtcacccaggctggagtgcatggcgcaattctggctcactgcaatctctgcctcccagggtcaagcaatcgttccacatcagcctcctgagtagctgggactacaggcaggtgccactaccccttgc

SEQ ID NO: 192972 - DNA, 486 bp, Homo sapiens
  misc_feature (1)...(486): n = A,T,C or G
atgtgaattactagtcaagatacatttttttcctatgtgacattcacttcaccttgcatcattcattgaaaagaccacttttctcactgcattgatgtcacttttgccataagtcagctgatctgtatgtttttatattattttctattctgttccattagttcatctcactgttttgaacaaatatgtctcaattactaattytttatgatggtacttcgaatccattgaatcctccagctttgctctccttcaaaattggcttggctatttgtggccttttgtatatctacgtgaactttaagcttgnctttttttttttttttttttttttttaaaaccaagtcatgctttgtcacccaggctggagtgcatggcgcaattctggctcactgcaatctctgcctcccagggtcaagcaatcgttccacatcagcctcctgagtagctgggactacaggcaggtgccactaccccttgctattt

SEQ ID NO: 192973 - DNA, 482 bp, Homo sapiens
  misc_feature (1)...(482): n = A,T,C or G
tatgtgaattactagtcaagatacatttttttcctatgtgacattcacttcaccttgcatcattcattgaaaagaccacttttctcactgcattgatgtcacttttgccataagtcagctgatctgtatgtttttatattattttctattctgttccattagttcatctcactgttttgaacaaatatgtctcaattactaattctttatgatggtacttcgaatccattgaatcctccagctttgctytccttcaaaattggcttggctatttgtggccttttgtatatctacgtgaactttaagcttgnctttttttttttttttttttttttttaaaaccaagtcatgctttgtcacccaggctggagtgcatggcgcaattctggctcactgcaatctctgcctcccagggtcaagcaatcgttccacatcagcctcctgagtagctgggactacaggcaggtgccactaccccttgc

SEQ ID NO: 192974 - DNA, 514 bp, Homo sapiens
tgagccagcttggtgtgttcctagtaagagttggaaggacagcatgrctaggccagtgttaaggggacagcagtataagatgaagccagaatggtatgtaggcccttaggccaaggtaaggacattgagccatattccagatgtgatgggaaaccattcaaaagttttgggctgtggagtaacaggtatgttccaatttacataataaatatatcactctggcttccatctagagactgagtgataggtaatggttgggtaaaagcagacaggcatttaggagacaacttcaataggtcaggtgagagataacagtaacttggattagggtggtagcagtcaaggtttcaacaagtgtctggacttagaatagactttgaaagtgtccagcagtacttgctgataggctgaatgtggatgtgaaggaaagaagaaataagaatgttttaattttatccatcttccaagatggagataacaagctgacacataagttctagtagggctatgttaa

SEQ ID NO: 192975 - DNA, 645 bp, Homo sapiens
catcattttgtcaacagtgatttggttaagtctgagattttagagyagttcaatagaattttgaaatctaaaatgtggtgttatttaactgcttagggcacattttaatacatcgatataattcagcactttatcactagttacaacaaccaatctgaaaaaaatatatatatataaatgccacagccacaaattctttagatgtttaagagaaaaaccacaaaaccccattttattaaaaaaaaaaacaactatgtcaaaagtggtttcaagaaacaagtgagatatatttagtaacagaaagtggtaaccaggagttagcaaccagtttataattaaaataccatgaggatgcaaagattagctgtgtttttatccagaagaacaagaaacaataaccctttgtcaagagccagtacacagtattgaaaaagaaattgtcccaagcgacaagattggaatgaaattatcatcaaatgattgggctgacttaaaaatagtcatagtcgtaaggtgttgatgattcaggattactacatggtagaaggtaggtgaatgaaaatgttttctatttgaactacccagcaatacttcagtattaccttttacctgcagtttaaggatatataagtgggatttgaccat

SEQ ID NO: 192976 - DNA, 645 bp, Homo sapiens
catcattttgtcaacagtgatttggttaagtctgagattttagagcagttcaatagaattttgaaatctaaaatgtggtgttatttaactgcttagrgcacattttaatacatcgatataattcagcactttatcactagttacaacaaccaatctgaaaaaaatatatatatataaatgccacagccacaaattctttagatgtttaagagaaaaaccacaaaaccccattttattaaaaaaaaaaacaactatgtcaaaagtggtttcaagaaacaagtgagatatatttagtaacagaaagtggtaaccaggagttagcaaccagtttataattaaaataccatgaggatgcaaagattagctgtgtttttatccagaagaacaagaaacaataaccctttgtcaagagccagtacacagtattgaaaaagaaattgtcccaagcgacaagattggaatgaaattatcatcaaatgattgggctgacttaaaaatagtcatagtcgtaaggtgttgatgattcaggattactacatggtagaaggtaggtgaatgaaaatgttttctatttgaactacccagcaatacttcagtattaccttttacctgcagtttaaggatatataagtgggatttgaccat

SEQ ID NO: 192977 - DNA, 645 bp, Homo sapiens
catcattttgtcaacagtgatttggttaagtctgagattttagagcagttcaatagaattttgaaatctaaaatgtggtgttatttaactgcttagggcacattttaatacatcgatataattcagcactttatcactagttacaacaaccaatctgaaaaaaatatatatatataaatgccacagccacaaattmtttagatgtttaagagaaaaaccacaaaaccccattttattaaaaaaaaaaacaactatgtcaaaagtggtttcaagaaacaagtgagatatatttagtaacagaaagtggtaaccaggagttagcaaccagtttataattaaaataccatgaggatgcaaagattagctgtgtttttatccagaagaacaagaaacaataaccctttgtcaagagccagtacacagtattgaaaaagaaattgtcccaagcgacaagattggaatgaaattatcatcaaatgattgggctgacttaaaaatagtcatagtcgtaaggtgttgatgattcaggattactacatggtagaaggtaggtgaatgaaaatgttttctatttgaactacccagcaatacttcagtattaccttttacctgcagtttaaggatatataagtgggatttgaccat

SEQ ID NO: 192978 - DNA, 559 bp, Homo sapiens
aatgttacaataaatgggcaatttctcacgtggatttaaattctctcataatgacctctggaccaaatgccctgttgatgtctatattggttagcctgaaacaaaaaatattatatctataactttgcatttcttcatgttcctgcctttccccaaattgtactatttacaaaactagggacagaaaatctggtttaggacagctgctctaggagcatgggatttgctcatgcttcctgttttttggctcagcatgagtaatctgtagttgggttcgttcaactttgtcgttgctgaagagtctatagacattctagtgctccaragatggccccaaacatcacagctggtgaagaaaatctggcaccacgagactgagcccaatccaacaaaattagaaagcaaagtcagaaaaagttcaaatttagcttacagaaggaaggggaatttgatttcaaactttagggctttttctcacaatttaataatcaaataacattcaaattcaggtgtttgaatagtgtatccgcaatgtattttttgagtatttttttaaatg

SEQ ID NO: 192979 - DNA, 559 bp, Homo sapiens
aatgttacaataaatgggcaatttctcacgtggatttaaattctctcataatgacctctggaccaaatgccctgttgatgtctatattggttagcctgaaacaaaaaatattatatctataactttgcatttcttcatgttcctgcctttccccaaattgtactatttacaaaactagggacagaaaatctggtttaggacagctgctctaggagcatgggatttgctcatgcttcctgttttttggctcagcatgagtaatctgtagttgggttcgttcaactttgtcgttgctgaagagtctatagacattctagtgctccagagatggccccaaacatcacagctggtgaagaaaatctggcaccacgagactgagcccaatccaacaaaattagaaagcaaagtcagaaaaagttcaaatttagcttacagaaggaaggggaatttgatttcaaactttagggctttttctcacaatttaataatcaaataacattcaaattcaggtgtttgaatastgtatccgcaatgtattttttgagtatttttttaaatg

SEQ ID NO: 192980 - DNA, 441 bp, Homo sapiens
attatttccacttgtccacctaaaatacaacatgttcaagactggactcttccctgtgcawatctgcttctcttcctctagtccctgtcatgtggtgactccactgctcctctaaagctggagacacctgggctaatcctagactttgtactcccctttccctgacttatacatttaaatccaaagtcctgtcaattctgtgtctgaatagctcttttatctttctttcttcctctccatctttatttgccaaaccgctaaagacattcagttcaactatttactgaagggttccaatttgctgtttattaagtagctaagacatggcccattgaggaaccaggctaggtgatgaattaccatcatcactcaactccttgcctccatcttgtcccctttttatcacatcgctgcttcccaaaaagtttcaatggctgtcgt

SEQ ID NO: 192981 - DNA, 458 bp, Homo sapiens
ctctttacaaaggtttgggcagagcataaggaaaccacaaagagagaaaggtgttcagggctaggaaggaaagagcagagagcagaagccaaagaaaggaaggctgtgtggagaggggcttctagaggaggtaagggaggaaaagccagcctgtaacaaacctgtaagaagggaacccggaatatcaacgcaccactctcatcctgctctccagcctcctaccagtatgccccatcggccaaacccaaccagaggtcaaatggcaagagaacctattgatacgattcatataggtcagcctccagaggagagagaaggcaggggaacatagagagtrgatagagaaggtgcaaaaggaagatgccagccacagtattctatctaataaggctgtggtccccaacctttttggcaccagagagaggtttcatggaagaaaatttttccacggacctgag

SEQ ID NO: 192982 - DNA, 499 bp, Homo sapiens
taatataatttattttctttgctccagtagacacctggggtatttgaaaccttgagcagatcattttttcayacttccctcgtcttatacaacaaaattatcttctgtaaaatttataaaatgaaaccaataataataatgtctaaaaaagaaatgtaaactatgaaaattttattttactgaagtttaaatttataattgttcaggtaaaggaaaaataaagaattctaaataaatagagattatagtacaaaaaatggaaataatgaattaatagtctgagtatattaatgcatttttttgagaaaagggaaaaatattgtgtctacatatcagtctgttgcagtaataaataatattataatttctgcttttcaccttgagctataatttctgcaaatttgtcagtgactttgtcaaaattgatctttacacatttatattcaatagataatatagtcagacttatcctttccctttgttgattaaagaacacttt

SEQ ID NO: 192983 - DNA, 492 bp, Homo sapiens
ggagtaggcactcgataaatatttgttgagtaaattaatgartaaatgaacatctattcacacagtcgtgcattgctcagcaccagggatatgttttgcaaaatgcatcattagacaattttgttattgtgcaaacatcataaagtatacatacacaaaccttgatggtgtagcctactacacaccttccttactgcaactaagacatatgctacatgagagtgaggcctacatctaggctctgtggtatagcccattgctcctaggctataaacctgtacagcatcatactgtgctgaatactgtaggcaattgtaacacaatggtaagtatttatgtatctaaacatagaaaaaaacacagtgaaaatacagtataaaagattttaaatggtacacacctgcataggccacttaccatgaatagagcttgcagggctggaaggttccctggctgagacagtgagtgagtgggagtgaatgtgaagcctga

SEQ ID NO: 192984 - DNA, 547 bp, Homo sapiens
aaatgcattaacaataagaaactatcaaaatgacagtaggtttgaaaatgaaccaaatagtacttttattttttcaaactgattgagaaataatttaatacaatacagtgcacccattttaagggtacagttcaaagagttttgacaaatgtatatatgctggtgaaaccatcaccaccagcagaatgcagactatccccatcaactgaaaatggtamctcatgcttctttgcagtgattcctccctccactcctggtcccaggcaacccctgatttggcttatgtcactataacacaccttgcattttctagaatattatataaatggaatcatacaatttgtacatctttggatctggtgtctttgactcagcatattgatttttgagtttcactcattttgttgtgtatatcagtagttcattcctttttgttactaagtaatattccattatttggatataccatgttttgtttatccattgcccaattagtggatgtttgagttgtttccagtttttgcctattataaataaaagtgtaaag

SEQ ID NO: 192985 - DNA, 547 bp, Homo sapiens
aaatgcattaacaataagaaactatcaaaatgacagtaggtttgaaaatgaaccaaatagtacttttattttttcaaactgattgagaaataatttaatacaatacagtgcacccattttaagggtacagttcaaagagttttgacaaatgtatatatgctggtgaaaccatcaccaccagcagaatgcagactatccccatcaactgaaaatggtaactcatgcttctttgcagtgattcctccctccactcctggtcccaggcaacccctgatttggcttaygtcactataacacaccttgcattttctagaatattatataaatggaatcatacaatttgtacatctttggatctggtgtctttgactcagcatattgatttttgagtttcactcattttgttgtgtatatcagtagttcattcctttttgttactaagtaatattccattatttggatataccatgttttgtttatccattgcccaattagtggatgtttgagttgtttccagtttttgcctattataaataaaagtgtaaag

SEQ ID NO: 192986 - DNA, 455 bp, Homo sapiens
tttttaaatgtttcagttctgaccccagtwaactgtaactgtgcaacgagatttgcagtacattcagaatagtttgcacaaagctattttaattggaggagtatttgggtagaaataaataatatctcaacctaaaagtcacagattcttttttttttttttgattgccaatgagtaaaacaaaattcaatggtgtatataccaaataataaaagcaaataggggctgagtatggtggctcatgcctgtaattccagcacttcgggaggccgaagtgggcagatcacttgaggccaggagttcgagaccagcctgggcaacatggcaaaacatcgtctctactaaaaatgcaaaatttttccaagtgtggtggtgcacacctgtagtcccagctactcaggaggctgaggcacgagaatcacttgaacccagaaggtggcggttgcagtgagctg

SEQ ID NO: 192987 - DNA, 455 bp, Homo sapiens
tttttaaatgtttcagttctgaccccagttaactgtaactgtgcaacgagatttgcagtacattcagartagtttgcacaaagctattttaattggaggagtatttgggtagaaataaataatatctcaacctaaaagtcacagattcttttttttttttttgattgccaatgagtaaaacaaaattcaatggtgtatataccaaataataaaagcaaataggggctgagtatggtggctcatgcctgtaattccagcacttcgggaggccgaagtgggcagatcacttgaggccaggagttcgagaccagcctgggcaacatggcaaaacatcgtctctactaaaaatgcaaaatttttccaagtgtggtggtgcacacctgtagtcccagctactcaggaggctgaggcacgagaatcacttgaacccagaaggtggcggttgcagtgagctg

SEQ ID NO: 192988 - DNA, 455 bp, Homo sapiens
cactgcaacctctgcctcctgggttcaagtgattctcctgcctcagtctcctgagtagctgggattacagacacccaccaccatgtctggctaamgtttatatttttagtagagacaggatattgccatgttggccaggctggtctgaaactcctgacctcaggttatctacccaccttggcctcccaaagtgctgaaattacaaggcgtgagccaccgcacctggcctcttccaataatctttagatttctaagcctgtagtggaagaatccaaagagactgatccatggtctagctagggattggcctcaactccacggtgtagatatttaaaaacaaaaccagaaaaccctacataagctctgaatctaaggtgtgggatgggccttaaggtcccagaatgataagttattgctaattctatgaagtcttatctttcattgaagaaaaacct

SEQ ID NO: 192989 - DNA, 455 bp, Homo sapiens
cactgcaacctctgcctcctgggttcaagtgattctcctgcctcagtctcctgagtagctgggattacagacacccaccaccatgtctggctaacgtttatatttttagtagagacaggatattgccatgttggccaggctggtctgaaactcctgacctcaggttatctacccaccttggcctcccaaagtgctgaaattacaaggcgtgagccaccgcacctggcctcttccaataatctttagatttctaagcctgtagtggaagaatccaaagagactgatccatggtctagctagggattggcctcaactccacrgtgtagatatttaaaaacaaaaccagaaaaccctacataagctctgaatctaaggtgtgggatgggccttaaggtcccagaatgataagttattgctaattctatgaagtcttatctttcattgaagaaaaacct

SEQ ID NO: 192990 - DNA, 368 bp, Homo sapiens
gaaaagtcactgagttgatactttcagtgctataaatttctaagtactctctcagctgcatattaccaaagttgatatacaatattctcatttgcattcacttcaaaacattttgtaaattcacatytgatttttttttttttaatttagagacagagtcttgctatgttgctcaggctggagtgcagtggagagtagaacacagtatgctccagcctcaaactcctgggctcgagggatcccccctgcaacagcctcccaaggagctgggaccataggcacgtgccaatgtactcggctcttcatttgatttccagacccatggttaatttagatatatgttatattatttttcaacattcaccaag

SEQ ID NO: 192991 - DNA, 538 bp, Homo sapiens
acagttcataaggtcaataaatccccaattttccacatgtgctgtgtgtgtttgtgtgtgtgtgtgtgtgtgwgagagagaaagagactgagagacagtgagaggaagagagaatatatgtatcccagtggttctgctttccttctgataaaattcttacagacacagtatagaaaagggagcgttacaaaatgtttattgtttaaaagagtaccattggctctcaggattcagtcccactgttttagggcactctttggccacaccatatggtcctaatagagctgtcaatcataatgattctcattatgtccaattcttcagccacagtgattgttcatggggctaacaaactagctgtgccaaccttgcatgaaattgcctatatggatgttaacaaagaggtttttcttctcttattttcataaactataaggatatcagtttaggttagccagagccatctttctagccatttccagtaagtccgttttgtttttttcagcagaagtacatgagattgacagaaaagaggaga

SEQ ID NO: 192992 - DNA, 576 bp, Homo sapiens
gctgcaatgcctctggcatggtgatgtcatgactccagctagccatctggccttctctgccagaccctctctgtttgctcccattcctcagagggcagattccttatcctcttccctcttgccctttgataagctcatttgtccttttccactgtcaataagacagcactttctctctcctgtccactctcctgtgaggcaggtccgatcactgtgatttacctttagatttttcaggtatgccataaagactccccagttctgaggagtcataaagctccataagtgggcctcttcaagcccctctcacttggtttgagcacctacctatactcccatcttcaaaggtatctttccttcttccaggcctctccaatttgtgtcctttcagcagctgggcctggggatggtcagtgctggcagaactagttttcaaagcyttagcttgtccagtggaggcaaggtggtttggcatcttgtttaggaatgggaaacatttggtagcttgttcttggtctctagagtctcagctaaagctaaggtggagatagtcccattttaatatcctgttacaca

SEQ ID NO: 192993 - DNA, 533 bp, Homo sapiens
gatcctgcattgtgaggaagcccccytaagtcattaccaagtgcagatctgggtttgatgggcctctgtcaaaagttgttttgcatccgcatttctgtgttccctgaaaacaccatgaaatactgaactttaatcagtaatgcaacaaatgagaaaatgctcagtgttttagaactattcagagtagaaaacgctggaacataaaatgaggttacgccttagttggtgagttgctaaaacttgagatcaggcgaaacaaagctgataggtctaatgccttttggaacatgtaacaccagcagttcttcaagtttggcctctggccctcctgtattagaatcatctgggagacttgctccagtgcagatctcctctacaaaacctacatttaacctagtgaagcagaaccccctggttttccctaggagtctgcatttgtcacaagcttactggatgtttctgattcacagtaaagcttgagaacactatatgtgaccaccccactggcaaggtgattaacttcttatgcatat

SEQ ID NO: 192994 - DNA, 533 bp, Homo sapiens
gatcctgcattgtgaggaagcccccctaagtcattaccaagtgcagatctgggtttgatgggcctctgtcaaaagttgttttgcatccgcatttctgtgwtccctgaaaacaccatgaaatactgaactttaatcagtaatgcaacaaatgagaaaatgctcagtgttttagaactattcagagtagaaaacgctggaacataaaatgaggttacgccttagttggtgagttgctaaaacttgagatcaggcgaaacaaagctgataggtctaatgccttttggaacatgtaacaccagcagttcttcaagtttggcctctggccctcctgtattagaatcatctgggagacttgctccagtgcagatctcctctacaaaacctacatttaacctagtgaagcagaaccccctggttttccctaggagtctgcatttgtcacaagcttactggatgtttctgattcacagtaaagcttgagaacactatatgtgaccaccccactggcaaggtgattaacttcttatgcatat

SEQ ID NO: 192995 - DNA, 601 bp, Homo sapiens
gtgactgacctggctcattctccgaaagtggttgacaggccactacgagagctcttgagagaagctttgtgacatgaaattcatcaaatgaagcaagattcatttttaaagaataatacaaagctccagagtaatatgcttaatccaaatgtttaaatagaatttaaaaccacattttaagtaaatttaaaattaatgaaatatcaatagtttgccttaacaaggacttgcttgaaccatattctccttttaaaatcacacacacagaatcagtgtacatttagagaaatttccccagctgaataacatttttgacatgaattcattcaaaagacaccaaccattatgaatattttaggccrtgataagctgtaaccacctccggcttatggtggttaggatgttgcagcttaatgttgacatctggcatgaaaagcttatggtctgagtcatgtttcttttttatgtaattctggcttgggaatccgatacagagcagctgagaaataaattatgttgctgaggctgaagatgatgcacagaagtatggctccagctatctgagagaaagagaagggcttggaggtggccaggagccatt

SEQ ID NO: 192996 - DNA, 485 bp, Homo sapiens
ggccataaagacattctttgatgtaccttgtcataagaccctcgttccaaaagggtcttgccctacactcaggaagaaggaaagctgcacagakaggccaagaagaatctgaacagacaggacttgctggattcctccttcagtctgttactattagatcatactccttttgtacaatcacatttctacacagctgtccattcttcatctcatctaagcataaaaatggacagctttccctgggtctttgggtcttcatttctgaaggcacttacatcccataaaactgtgattcaataagttatccatttatcttgctaacctgttttttgttatggtagtgtcagctgtgacccttaagatgggtaaagaaaagtatcacaccttttccacccctacattgcacattaggatggttccaacttttcctattacagatacagctatagtgaatgaatgtggaaatttatacaatgcaggtaaat

SEQ ID NO: 192997 - DNA, 485 bp, Homo sapiens
ggccataaagacattctttgatgtaccttgtcataagaccctcgttccaaaagggtcttgccctacactcaggaagaaggaaagctgcacagagaggccaagaagaatctgaacagacaggacttgctggattcctccttcagtctgttactattagatcatactccttttgtacaatcacatttctacacagctgtccattcttcatctcatctaagcataaaaatggacagctttccctgggtctttgggtcttcatttstgaaggcacttacatcccataaaactgtgattcaataagttatccatttatcttgctaacctgttttttgttatggtagtgtcagctgtgacccttaagatgggtaaagaaaagtatcacaccttttccacccctacattgcacattaggatggttccaacttttcctattacagatacagctatagtgaatgaatgtggaaatttatacaatgcaggtaaat

SEQ ID NO: 192998 - DNA, 592 bp, Homo sapiens
ggggccactcaggcaggaaagcctggggcagatgaaagagggcagggaggagtcagaggtgagactgggacagcttgcaccttcacaaaacaagcaaagctgcgtggagctggtagcttcggggctgacagggatgagaaagaaggacaagggggtctgcagtggtgtcaagagggcattggtacaagtggctgggggagatgaaactaggagcagattagcagttggtgggagtccaaattccagaacacgtgcaatgtgtctcttgccctgtgcgcagtgcaaagggaaaggtataatatatcacaatcaaaagacagaagatttcaatctccccagaaagttctctgtgtcctgttttacccgccctccatctgcttttgattctgatagcaagagtgttatttggtccctcttcccattcttttttctctccctctccctccatctccttccatcattctctctgttccttcygctgtgcccctttctactctcctaagcttgctgggagcctggctcacctgctgaactacactggatgctctttgagagtagaagatgcaccgtgttagcttttccatctgctccc

SEQ ID NO: 192999 - DNA, 548 bp, Homo sapiens
atttttcggggttgcatagtattccataatatgtatataccacattttatttatctagtccaccattgatgagcatctaggttaattcttgtctttgctattatcaataatgctgtaatgaatgtacaagtgcatacgcctttttgatggaataatttatrtttctttggctacatatccagtaatgggattgcttggtctaatggtagttctgtataaattctttgaaaaagagtttgcagactatttttgagaaatctccaaacggctttctatagtggctgaactaatttgaaattgcccagattatttcaatgtgcatctcagtttgaaaactgcttcttaagagttcctgtttcctccttcaagctatatgctctcttcctaattcctactgaaagaaagaagaaatctacatggcaccctgtttgctgaataaccctctgatgttttgttgttgttgtttttcagctagagagtaaccaatgcagcagcaaaacaagtttatagtcagaagttaacctagcggtacctacaccctcttgaga

SEQ ID NO: 193000 - DNA, 548 bp, Homo sapiens
atttttcggggttgcatagtattccataatatgtatataccacattttatttatctagtccaccattgatgagcatctaggttaattcttgtctttgctattatcaataatgctgtaatgaatgtacaagtgcatacgcctttttgatggaataatttatgtttctttggctacatatccagtaatgggattgcttggtctaatggtagttctgtataaattctttgaaaaagagtttgcagactatttttgagaaatctccaaacggctttctatagtggctgaactaatttgaaattgcccagattatttcaatgtgcatctcagtttgaaaactgcttcttaagagttcctgtttcctccttcaagctatatgctctcttcctaattcctactgaaagaaagaagaaatctacatggcaccctgtttgctgaataaccmtctgatgttttgttgttgttgtttttcagctagagagtaaccaatgcagcagcaaaacaagtttatagtcagaagttaacctagcggtacctacaccctcttgaga

SEQ ID NO: 193001 - DNA, 560 bp, Homo sapiens
cattgagcttctatgccagacagccagcaaatatttcttaaaataaaaaagaaacataaataacacatgccatctgctaataaataacatatgaaaatatgtaataaatatatgccaatatatgataaatataatacaccaattcgttttaaagacataaaccttgttgcaaaaatactagaatgcaattggattttagagaggtactttctctgtacctcagtgtcgtactttagtatttcctcaaattctccaaaatagatgtcgacattaccagaccttttttttccacaaatgaaaatagatggtacactgaaaaaataaaatctattgataatatttatatattttatttataatggtttataaatagtcttaagatctgcttaaattaatagtttgcagatttccacaaagcataaaaattattttctctgatactaaccacagtattatagctmatgtttatgaagtagaattcttctaataaagtaatattttaatttttttcaaacaaaagtgataatgctaaaaccaaaattcagtgactagggaaagat

SEQ ID NO: 193002 - DNA, 464 bp, Homo sapiens
aaaattaatggaggggagacttcctcctattctatgactctttgaagcatagttccttatatcctacttttgaaagctcttcgctaagatgtaattgtccctctatacaagattttgttttttcaaataactttgtttcttcctcggaatggtaattaatgaaaggatgaagcacctagtattctatagtggtagaggaacattaaaatatagawaaattagaataagtctttccaaagggaaaaaagtggccgtcaaaagcttgctaagttgtctttatttgtaatcacattagaagtttcccaacaataacaatcatttcaagagaaaccaaagcagtccactgaagggcatggccaggagcaggtggtaaatagaacacacagcctatagggcaaagagggaagttgagggagcaaggtcttctaaaattgatcattcttacagcaagcatttctacccac

SEQ ID NO: 193003 - DNA, 544 bp, Homo sapiens
actgattgacccagttaatgtcaaccactctgctactggcacattgtgcacatggaacagagtaggctgggcagcagggatggagagtgtgcaytggccagattgcatggttttccatgatcaagtctgatcttactactgcctttaacgaattccagactgctagcagcagagatcaactctgagcctcaaatacggtatcatctactaaacaaaccaaccagcccatcggtggagaattgaccatatgtaagacccctttaactttgttaatccatgctctttggagtttgtgtttgtctttcctgccagtagggctcagctagcaccatgattagaggactcacagagtatttgacccattgacatgtgattttatataacatcagatgaagtgaccaacctcacagcacagtagatttgacatcagtttatctccatgggatccattagttctatcacattccacttctcataggagttgtctgtctttttagcaatggtgcagcctgctgaatgaacatctgaggcaccagcttggaga

SEQ ID NO: 193004 - DNA, 544 bp, Homo sapiens
actgattgacccagttaatgtcaaccactctgctactggcacattgtgcacatggaacagagtaggctgggcagcagggatggagagtgtgcactggccagattgcatggttttccatgatcaagtctgatcttactactgcctttaacgaattccagactgctagcagcagagatcaactctgagcctcaaatacggtatcatctactaaacaaaccaaccagcccatcggtggagaattgacyatatgtaagacccctttaactttgttaatccatgctctttggagtttgtgtttgtctttcctgccagtagggctcagctagcaccatgattagaggactcacagagtatttgacccattgacatgtgattttatataacatcagatgaagtgaccaacctcacagcacagtagatttgacatcagtttatctccatgggatccattagttctatcacattccacttctcataggagttgtctgtctttttagcaatggtgcagcctgctgaatgaacatctgaggcaccagcttggaga

SEQ ID NO: 193005 - DNA, 410 bp, Homo sapiens
ataaaatattaatttttttctgtaccttataagaaagcgagtccttcaccttcttctttcagccccacccccaccattkctacataactacatacacacttttctatttttggtagatttattctttagaattgctttggctatgataaactttacttaagacattaataattcttggcaagggcttcttttgtgttttaactttgaaaggaaaacttactctgcataattgccccattcttaactgtggtatagattgaaaacagcaaaagctgataacagctttgccccaagtatacaaacttcaggtctgcttttctctctgcagaatttagcttttagctatacatggagaactttttagtaaatttaggcttggagatggaagagagaaaaaggaacaaagacaa

SEQ ID NO: 193006 - DNA, 457 bp, Homo sapiens
caccaaaaatggaagaaattggtcaaaacaaaggggccacaggccccatttaagtccaaaatccaatagtcataaatcttaaagttccagaatgatctcctttgcctcatgtctcamaatcaggtcatgctgatgcaagagatgagctcctattgccttgggcagctctgaccctatggctttgcagggtacagcacccctgctggctgatttcacaagctggcattgggtttctgtggcttttccaggcatggtgcaagatgctggtggatctaccattctggggtctggaggatggtggccatcttctcccagctccactaggcagtgccccagtggggactgtggtggggggctccaaccccacatttcccttttgcactgccctagcagaggttctccacgagggctccgcctctgcagcaaacttctgcctggataacagggcatttccata

SEQ ID NO: 193007 - DNA, 617 bp, Homo sapiens
gaaattcccttactttcccttctgcttctctcaaggatgaaccgcaactattgaatcacacatgatgccttccctgacccccactgaagcctgctcttttgtgctcccatagtgctaggcacatttttcacattgttactatttgcttaaaaagtaacatggccacaaatgaggcccattcatctgtgaggtcctgaaggacaggaatcaagacttttgttaaaatctctgaatggctgattattagttcacrcctcatacataaaaaacacttcatgaatatttggagagtgattatggggtatgcactggaagtaagcacaaatgcttatatgtcctccttagtttaaaaagtaatttgccattatttaacaattgtgatacttcacatgaaaatctatagtcctgattttttgaggaggaaaaagaatgacctgaagactttgaaactttgggtttgatatggtttggctgtgtccccacccaagtctcatcttgaattgtaactctcacaattcccacatgtcgtgggggggaacccagtgggaggtgattgaattatggggatactgttcttgtgatagtgaatgagcttcagtacatctgatggttttaaa

SEQ ID NO: 193008 - DNA, 617 bp, Homo sapiens
gaaattcccttactttcccttctgcttctctcaaggatgaaccgcaactattgaatcacacatgatgccttccctgacccccactgaagcctgctcttttgtgctcccatagtgctaggcacatttttcacattgttactatttgcttaaaaagtaacatggccacaaatgaggcccattcatctgtgaggtcctgaaggacaggaatcaagacttttgttaaaatctctgaatggctgattattagttcacacctcatacataaaaaacacttcatgaatatttggagagtgattatggggtaygcactggaagtaagcacaaatgcttatatgtcctccttagtttaaaaagtaatttgccattatttaacaattgtgatacttcacatgaaaatctatagtcctgattttttgaggaggaaaaagaatgacctgaagactttgaaactttgggtttgatatggtttggctgtgtccccacccaagtctcatcttgaattgtaactctcacaattcccacatgtcgtgggggggaacccagtgggaggtgattgaattatggggatactgttcttgtgatagtgaatgagcttcagtacatctgatggttttaaa

SEQ ID NO: 193009 - DNA, 422 bp, Homo sapiens
tgttgaaatctcatcctttctcaattctaatttgtatacctaaacaccctaataactgtgaaytgaacacgtgaaaattgatatggaactattaaacaaatattccttcatgaaccatctgacatcattgtgctggctgccagtgatgcttacaccacactttgggacaccatgttaggattggtgtgaggttaatattctcaaagtccagcttccgttatatcatctttccaatcagaataattcaagggtttccccatgcctacaaaattgaaaacctgactgagttttagagctccaacttgtcttttcaatcttattttccaatactagtatttaccttatgctcctgacaagctgaacatctcctaaacattccctctgctgacctcatttctatgttacttcctctattgagaaca

SEQ ID NO: 193010 - DNA, 588 bp, Homo sapiens
atgccttcaattatatcaagtattgctaatactcagatgagacttggtgtgttcagggtggtatggctgtagaccattgctgacattcaaaatacagtagactttgaccttattccatcatgctgctttaaagtgctgtgatttttgaattttattaagaggacactccccagttttccacagtctccacctctccatactgcttacatcttaatatttcacatatttaaggctagatcttgagtgtctaagatctgttctagaatgtaattttatacttattcccttctctcttaattaatttcatattttagcagctttggktatcaattgttaaaattacttacagataaaatccttccatttccacctttatccttttcaagcagtgaaaaactaaagaaatttctactgtctttagcagaataaaccaaaacccatgagcataaatccttttgacattattttttgaaagttttgaagtaaagaagcaggcaaatgatgactactgcctttttctttaaagtatttttaaacatgaattttacgtgattggatttgattatggtagtagctttggggaattaa

SEQ ID NO: 193011 - DNA, 577 bp, Homo sapiens
catggattaatcatagcaccccatcctgacacaatgattatcccaaaggataggcatggattcttttgtatgttattaagtgacttctaggggggaaaatctttctgctgatattgctgcactggaggctatggaattgcatgctggttaccattttcaatgatatttgaataaagccaygcagagacagagatcggatataattgaatgagagtgagacagttctgatgaactgggtctcctgaaaccatgtcctgatccctgaagctctttgattctctgtgtgctattttggtatttttccaagtcatacatgtatccccttgttaaattgaaacttgttttaattagatttttagaactcaaaattgaacatcttgcccatcatgagatgagatgattttttagaggtatgttggtaggagtgggtaagtttctcccttagtaaagactctaagattctagggcaggagctttaaatcttttctctgttgaaatacaaacgacagctgatgtgttttggtgagacatattcctatgcatatgttccaagtgaatagtacttgttattccattt

SEQ ID NO: 193012 - DNA, 512 bp, Homo sapiens
tcctcagtattcacatctctttcttatgtctctttctacatttaagggccatcctgattacactggggctgactggttaccaaaggtgctctctgtgtctgctgattagcagccttagtttcatctgcaactttaatccccctccaccatgtattcacaggttccagagattaagacactgacatctttgggggtcattattctgtctacttcatcctcatgtcttccatagtttttaaaagcacacatgggattttacaattgccagaaatgtattgggttttaagtccttgcctgtgatttttttttaatatgaagggtattgtacaaatgcttattctaacattcaagctgtggactctgtatggcactggtggatttatcatgcattccatgcacttcagggtttcagcaggaagaaccaaatartgtgcttacttaaggccatttccttccccagagcagaacatgctcccaaataagttttttcacattgtgtttgcagttcaata

SEQ ID NO: 193013 - DNA, 345 bp, Homo sapiens
gtggggttcatgtattttgaaactctgtttttaggagcaygtatattagggtagtcatgctttctcagagaattgatccctttatcattatgtaatgttctttactgcttatagttttcattttctgaaagccactttgttagaatttaatatttctttagctttctttcagttaatgtttttgtggtatatctttctctatacagttcctttttttttttttttttttgagatggagtctcactctgtcacccaggctagagtgcagtggcagtggtgcagtcttggctcactgcaacctctgcctcctgggttcaagtgattctcctgcctcagcctcttctc

SEQ ID NO: 193014 - DNA, 619 bp, Homo sapiens
ttttgcctttttagatggtagcaagagataggaaacaactttagtgcccatcagaagggacattaatgaatcaaggatgatatttttacgcaaacattaataagaatgaagcagatacagatagctgtgtgtttatatgcacacgcacgcacacacacacacacamaaaattgtccctgacatatggtgtaaattgaaatgtaagagattaatattgcatgcttagaattgtaacattttccttaacatcagtacaatatatactacacacacctgcatatttctatacatgaattatagtagaagagtatgaaaaaactataatgactctgagcggggaaattgcattcttggcattagacatgggagaaataactacattaaaaaatattcactttggtagtatttgacaatgtgtcataataatgctacatcaaaaataatgttttaaaagctttaccttgggagatgggttgttattcaccttgtgatggcatatccctgagccatcacaactgtcttgttgtagacaggaattctagtggtattcttagggctacattaagcctcacaaatttgagtaagtcagatatagcagtagtgttgaaactcagggctc

SEQ ID NO: 193015 - DNA, 605 bp, Homo sapiens
taggattgctggttcacatattagctcaatttttagtttttgaataactctaaactttttcatgtggttgtactaatgtacattcacatctacagcatacaaggtttcccttttctccacatcctcaccagcatttgttattgcctgtcttctgtatataagccattctaacttgggtgagatgatgatatctcattgtagttttgatttgcatttttctgatgatcagtgatgttgggcatttttgtttttttgagatggagtttcactcttgttgcccaggctggagtccaatggtgcaatcttggctcactgcaacctccacgtcatgggttcaagtgattctaccattaaagtgaaaataaggtaattataagggcaactttcacttaatataaaacttctgaatattccactgattttgtactttacaattttactacttcctttactcatttatgatttgaactataagacaaattgagaaaatatgttcagcaaaacatgtttttgttttgttttcattttctgcttattatcccctaagcagaatcataaaatatgtggttttttttttktttttttttttttgagacggagtttcg

SEQ ID NO: 193016 - DNA, 593 bp, Homo sapiens
aatcctggctttaccaatttaaagccttgtaactttaagaaaaatatatgaaatcttaggcctaatttttatctgtaaatcaaaagttaaaatagtttatatttaattggcttgtcatcagaattaaagaaaatgatattcataaagagcttaaaaataacaaatttaatatgaaccgttttcacaataaaatagatttttcaaaaaattaatttaaatctatgtttttattactataaaccatccatatttattaacgtttttcttttattttcaaagaatgtcatttataatttgaaataaaatttaactgaaaataataycgtcaagttttgttttaataggattaaataaaaacataacagaattttaagcatattggtatcactttaaaataaaaggagggagtctttatggaacatgctccggtatctgcacatttgcatcttcaactttaaatagtccgtatgtaaaggaaagagaggagtatccttctgatatgaacatataagagggtaatcataaagtagggcaaagggatatcaatttaaattggtttctggcatgtaactgaggtttaaaataggagagat

SEQ ID NO: 193017 - DNA, 457 bp, Homo sapiens
tgtaaaactgttcctatttctccacatcctctccagcacctgttgtttcctgactttctaatgattgccattctaactggtgtgagatggtatctcaaatatagaagtctagtatctcaaatatagaagtctagtataactaatttagggagggttgagtggtttaagagattacttaaggaatacaatgcttctcaccttggcctctgtaataccacatagaagcatagaaggagcctcttaaccctggattcyactcccttctgtcctccaccatttcctggttacttttatgttagctcttctctgttacctccaacatcaatacattgtttgtttactattgttttaaccagtgtatctagccatcctaaaatgggctaatcttgtttgaagagttgtggagagtgcagtagttattagaacatgtgctgtattactggtaatactttgtctc

SEQ ID NO: 193018 - DNA, 457 bp, Homo sapiens
tgtaaaactgttcctatttctccacatcctctccagcacctgttgtttcctgactttctaatgattgccattctaactggtgtgagatggtatctcaaatatagaagtctagtatctcaaatatagaagtctagtataactaatttagggagggttgagtggtttaagagattacttaaggaatacaatgcttctcaccttggcctctgtaataccacatagaagcatagaaggagcctcttaaccctggattccactcccttctgtcctccaccatttcctggttrcttttatgttagctcttctctgttacctccaacatcaatacattgtttgtttactattgttttaaccagtgtatctagccatcctaaaatgggctaatcttgtttgaagagttgtggagagtgcagtagttattagaacatgtgctgtattactggtaatactttgtctc

SEQ ID NO: 193019 - DNA, 538 bp, Homo sapiens
atcttctactccaggtcatggatctaattcatggagttatctgaaattgatctcagtgggttcttttgtttgtttttttgctttttaattgagaaacatatttgtcagtgtgctattcataatacatagaaatctccaataagtaataagtggatgtgtctttccatcacaatagtactgaaataattasatattattattacatttttagttcaacaaagaacgttcagttacaaaacactaagcactattagcaatatcaagacaatagcacagaaagcaaaaaaaaaaaggcactaaacacctatattgtattagacattgggttttgtacagtggagaataatatgcagagaacacatagctttcctgtattcttattctaggatagaagctaagcatacacaaataattgagtttaagcaattatatatagcagtataagaaaagaataagggagtcttttaaaaagcagcagagagaatttcctttatcacaaggcaatttttgaaggctgcttagatgaagtttcttcaca

SEQ ID NO: 193020 - DNA, 642 bp, Homo sapiens
tatgtaggtctatgagttcccgttagacccgttagactagataatattaaccaagatgcaccagctgatactatcaggactgccaaatcaattgacaaaaaattaataattacctaatgttatgtatcactgacatttatggtattctgttatggatcaaatttataacttatatgaaaatcaagattgtagtgaatgacaaattcagatttcaaaatgtctatttctaaaatatgtggctattttcattttttgatatattgtgtacaatgatcaaataaaattttatgttaaccaatacaattttaccaaaccatattctggactttgtgggcagacttacgccttatacacatttataatataccaatgtgccctatgtggaattaaataaatattacttttaaacttagtgtctgagtgctgaacatgtctyagtttactgtattgcatttgctatatcttccttcatggtaagctataatttttcagaacaaatctacaagcccattctccaacaactgaaaaagaacagaaggttaactgagcaacaatagggtaatgtatattaactcagaaatctttacatgacaaattctgagtttaatgataagttaaatcattagagattaaattactgtg

SEQ ID NO: 193021 - DNA, 550 bp, Homo sapiens
tagaaatttctttggttaaattgmaaaatctgggaataattagcctaattagtctcggttccttagctctcacctctggacttttggtgccacggtctgaatcatcctttcttctcatgaaatgtgggacatatttgcaacttagcaggtttcttagcttgttttcttctaatagaattttgataactcataggcccctttcaatgtttttcagtcactgtgtctttcaatttaaggtagtgatctctctctctctctctctgtgtgtgtttgtgtatatatgtgtgtgtgtgtgtatacatgtacacatatatacataaatgaactttgtggatcttctatgaatcttattgaattccactatattagagataaaaacacatccttaagtcttttagatataagtctttccctaccttgggcttctatgagatggctcagagatggcacacttaaggttcctaaaagccttgttgttgatagaggaggtggagcacttttaatctcttttgagagtcttttgtgtgaatatactctgagataccacttt

SEQ ID NO: 193022 - DNA, 276 bp, Homo sapiens
attaattatattgaggttcatgactttgyatctaaccccactgcccccacaaaaaaatctcctgttaacagggcctaccctccttagaaagttgtgggttttatatctaatttcctgttctgctgcctcataaacatcctgatatttttcagctgattcgtaagaaagacactatgttttggggcactctgtctgtaggagccatttaactggacattgtcagatacgaagtggaaaggaaatacaaattatggaccatgtaaaatgtaaaacaca

SEQ ID NO: 193023 - DNA, 485 bp, Homo sapiens
ctcaagcctgcctcagcctctcaagtagctgaggttacaggcwcgcaccaccatgtctgggtaatttttgtatttttagtagagttggggtttcatcatgttggccaggctggtgttgaactgctgatctcaggtgatccacccacctcagcctctcagagtgctgggattacaggcgtgagccactgcacctggcccagccattcttttaagtcaggtttgctggtggcaaattctctcagttttcttcaactgagaacatcttgatttccccttcattcctgaaggatatttttgctagatatggaattctggattgacagttctttccttcagcagatgaaaaatgttgtgccacttacttcttgcctccatggttttttggtgagaaattctctgtgatcgaaattgtttttcccctatagacaaggtggtgtttctctcttactgccttcaagattttgttttcaaaagttagactatga

SEQ ID NO: 193024 - DNA, 444 bp, Homo sapiens
agcttctcaaatggtcatatgagggtttctggtgtgtgaaggtgatgaagtctcaggggaaacccagtggctctttcgggaacgtccattttcattccatatttgtatggggagtggcagtgggtatttgtatgtmatagatgatgcaggggatggcgaacggcacgggcatttttaagatggaatatgagagttcaaggccatgtcttgccagtgactgctttaggagacccggggaaaggtgtgagaatccctgactgagatgggaaggccagagttttcacacgagcttggactgcaaacgcttgggtttcctgggctgggggaaggaggctggggaaggcctgggcgctggcccagacaagtgcagggaggtcccaggttcccaggactgggcatccagtatcctcgagggacaccatgagacagaaagataaggaggca

SEQ ID NO: 193025 - DNA, 586 bp, Homo sapiens
gatgcttccatctcagcctcctgagtagctggggctacaggtgtgtgccaccacactcagctaattttttttgtaaaaatttgtgtagagacggaggtcttgctttgttgcccaggctgatctcacactcctggccttaagtgatcctcctaccacagcctcctaaagtgctgggattgcaggcattagtcactatgcccagcccacatccagtaatatatagaaaggattataaccataaccaagtgggatttatcctaagaacataatgttgattttatatcagaaaataaattaatatgatacatcttatcaatagaattaaggaaataaaccgcattattatctcaaaataattttacaaaattaaactcttgatgataaaaacactcaaaaactaggaatagaagggaacttccttaacctcataaaaggcatctatgaaaaacctacagctaacattacacttaatggtgaaaagttgaaggcttttgtgctaagattggacmtaagaaaaggatgaccactcccaccactttattcaacattgtattggaggttctagcaagcacaattaggaaaaact

SEQ ID NO: 193026 - DNA, 515 bp, Homo sapiens
ccatgaattctacccaagcaccctaaacagatctggggacagatttgccctccctgtctggaggaagaaaacggagtgtagagggcttagcaggggccactcaggaagcagaatccaattcattcagcacaagtgaagaaacgttaaygaaggaactctttgcagaagtgaaggtcagtctaaggcagtccgtgggatattgcaggaccccaggacaagcaatagcaggaagctgttatcatccccagacttaaaggggcaagggaaggaaagcgtgttcctggagccctagagagaaagagcagggagtgggcaggacaccaataccccggcttcctcctgccttctgagcttggcgcgtgcctcaagacagcaaaaattagggagatagggtggtgtgttccctgggggccagcctctgggggtacagagcagggcaaggaagggcagagagcaagggggatgcgtgagtgggggcggaatagccagcccagaggagtggatgtcttgaaaag

SEQ ID NO: 193027 - DNA, 593 bp, Homo sapiens
gcactatgcatgaagactatgtggcagagaaggaatatagggcatattctaaagaaagtgaagcttctcggaacaaagtgaaagaggggaagatagtctgtgcaaagtgaggttggaggggtaaacagggatgagaacgtatagagacgcgtgggtgggccctagtagtcagcatgggtgggcgcaatggggagtctttgaaagattttaagctacagagacatgtgatctgacgtatttctagaagattgctcttactactgtgtgtggattggatgagtgttggactgtaggaagggtaaactgttaggaccacagtcctgttcaaagatacttatttcataaagtgactcatgtgccggctttatttagtgcctacatagagttggtagaatttagctatgctcagtgacttattcctgtaatcccagtgctttgaaaggctgargtgggaagattgcttgatccagcctgggcaacatagcaaaaccatatctctagaaatcgatttaaaaagtagttgggtttggtggcatgtgtctattgtcctagctactcaggaggctgaggcaggaagatctcgagcccaggag

SEQ ID NO: 193028 - DNA, 545 bp, Homo sapiens
ggaggctgaggcccttgctttgagttggatgtggtttgtaacatgttagttttcactttaagtactagctaaccagtttcattttaggaatagacagtgcttctttctaccatgctgccacctgaagtgtggtgctttaagaattcagatactctgcaatataatttcaatatctgaattaatttgaataggaagaacagttaaacatggattgttcacagattatttcaaaargcaagaccttattattgccatcccacatgtcactagctgctgaatgacaccacacatcacatttcatggaaataaaaggagaaactcttttgttgtaaattcattcatacactcttgggaaattaggacacacaacagatgtaaatcagcctttaatccaagtcccagtgtggactggggagaagagagaggtggcgggagtcaggggaaaaagagaactatgatataccaaagaatagaagagaatatcttgtttcttcagttaggcagaccatttatatgtagtcttggacaccaccttatctccacgt

SEQ ID NO: 193029 - DNA, 527 bp, Homo sapiens
aattcagggattgggttcaagttctagctttttcattaggtaatatacaatctttaacaaattccctaaacttttaaggaacatattctcttagtaaaaccaggagttgagttaaatcatctttgaggttgcattttaatatgtaactttattgtaataagtcaggactaggttagtacgaaacctttgatattataagtatgtttaataaaaaccacacttatacttccaaagatactggaaatttttaaacccttcagaatggaacagataytagggtacttgttttccatgccacaatgatgatcagagcggagaaaatatagtattagatatgtgatttgttaacttatttgtgtttcaggtgggggatggtggtgagaaatttatacataattactgaagccaagggatgggtagtcattggaagccatacataaatgacagcagtagatactaaccatgacacaggtgacaaaccagtgactgcttgtaataatgtggatatttttttatctctttttact

SEQ ID NO: 193030 - DNA, 513 bp, Homo sapiens
gttcaagttctagctttttcattaggtaatatacaatctttaacaaattccctaaacttttaaggaacatattctcttagtaaaaccaggagttgagttaaatcatctttgaggttgcattttaatatgtaactttattgtaataagtcaggactaggttagtacgaaacctttgatattataagtatgtttaataaaaaccacacttatacttccaaagatactggaaatttttaaacccttcagaatggaacagatactagggtacttgttttccatgccacaawgatgatcagagcggagaaaatatagtattagatatgtgatttgttaacttatttgtgtttcaggtgggggatggtggtgagaaatttatacataattactgaagccaagggatgggtagtcattggaagccatacataaatgacagcagtagatactaaccatgacacaggtgacaaaccagtgactgcttgtaataatgtggatatttttttatctctttttact

SEQ ID NO: 193031 - DNA, 582 bp, Homo sapiens
tgaattatcttgcacacgcccttagaatgcattcactccattttggatgttcctaaaatattctggcagagtcaaaagaaatttcataaaaatgaaaaccaatagaagacattgaagaaagaaaagaacatctggaaatgaagagaaaagataatcacagagagaataacacgtaacgtgaaaactacctggtataactggtaaacttatagccagtgtggaaaggactaacatatgaaataatgtgagtatcacaaggcaaaatgtggcatataataacacttaaacatatgaagcatactttcatcatagaaaggctttacttgacccccacacaggctgagacagcttccttgttgggaaatgtgactttagagttgaaaagtgaagccaacaaattacagagaatgcatactccagagccagcaatgatcttccagaccatgaaagccaagagtacatttccaccagtaatcatttatgaatgaccrtgtattatcctctcaggagttggcttgttggactctgtgcctgagaacaagattgttaattgtccttacaaagaaatatatgggtaattat

SEQ ID NO: 193032 - DNA, 532 bp, Homo sapiens
gggaggctttctgctacaacctgacctctggctagaagtctcagagaaggccaaggttactgatttggatattatttgtttagaaacccttccattactattttaactattgaaattgtaattatgattgccttataatagggaaattaagatttcagttacggaatctttttcaatcagggaaaattaatggtgaggaataaactggtctaccacgagcaaacctttcaagctaaggactttgggttgaactttcctttcatcactgctattctatctcccatcatacattctttacatcattcatatttctgattcaattttcctaattttcacacggtttatagcagtaacttttaacattcttctgaagcatactgttcttaaagggcaagagtttttttctgttttgttcatttctttattctcagtacctggaatagtgagtgcctggarcattgtaggagctgttaaattaatggataaagtttaacataaacattgaaataggagataaatcaactgttttatc

SEQ ID NO: 193033 - DNA, 599 bp, Homo sapiens
ttaggaaagaattttggagtacagtttgggctcatagttctagcccctgcctgattctattctcttgggcaatttgagtrggatcttacagcaggaaggccctggagaccacctatcccagcatagtagatatgtggagcaacaggactacagccttttaattaaattgtgttaaatcagataacaaatgaggcttgaaggcaaagtatcttcattaaaagagaaggcggcctggcgtggtggctcacacctgtaatcacagcactttgggaggccgaggcaggcagatcacgaggtcaagagatagagaccatcctggccaacatggtaaaaccccgtctctgctaaaaatacaaaaattagctgggcgtggtggcatgtgcctgttgtcccagctacttgggaagctgaggcaggagaatcgcttgaacctgggaggcggaggttgtggtgagccgagatcacgccattgcactccagcctggtgactgagcgagactctatttcaaaaaaaaggagagaagccatttttattaacaatttattcctaaaattcatatccagggggatttattatattatgtgtaaattgggaaatg

SEQ ID NO: 193034 - DNA, 599 bp, Homo sapiens
ttaggaaagaattttggagtacagtttgggctcatagttctagcccctgcctgattctattctcttgggcaatttgagtgggatcttacagcaggaaggccctggagaccacctatcccagcatagtagatatgtggagcaacaggactacagccttttaattaaattgtgttaaatcagataacaaatgaggcttgaaggcaaagtatcttcattaaaagagaaggcggcctggcgtggtggctcacacctgtaatcacagcactttgggaggccgagrcaggcagatcacgaggtcaagagatagagaccatcctggccaacatggtaaaaccccgtctctgctaaaaatacaaaaattagctgggcgtggtggcatgtgcctgttgtcccagctacttgggaagctgaggcaggagaatcgcttgaacctgggaggcggaggttgtggtgagccgagatcacgccattgcactccagcctggtgactgagcgagactctatttcaaaaaaaaggagagaagccatttttattaacaatttattcctaaaattcatatccagggggatttattatattatgtgtaaattgggaaatg

SEQ ID NO: 193035 - DNA, 570 bp, Homo sapiens
tggaatttaaagttaagctcagtaagacagaacagagagaaatactatgtgatagtaaaaggcataatttatgaaaactttaaacctgtatacacgatacaatattaactaaaactattaaaaagaagatagtgcactaaattttcatggagattttaatatacctctttcaaaattgcacagagttagtgtacaaaaataactaagggctctttagtcagttctgtgccatccacacaaggagaaacaggaatagtctttgtggttcctttctggttctttctgcmcttgttccaactgcccgaggaagtgtaccatcaagaggagtaggtggaaacctttgcctcccaggaagtttgcctagtcttttatcatcaatatctcttactcgaataaggaaaataacaaacctctattgtttctgataccctggacaagatttgccattaaagcctaatagacagttccaagttagatggctagtcataaagaactaaaggtagacatcattctcgatctcccagactgatcctaactcttgcagacacgggaattggcatgatcaaggct

SEQ ID NO: 193036 - DNA, 416 bp, Homo sapiens
gaaaaactaactcttgggtactgtgctcattacytgggtgatcagatcacttgtaccccatacctcagcatcatgcagtatacccatgtaaaaaacctgcacatgcatgccctgcatctaaaatagaagttgaaattattttttaaaaaagaatctatggttctgtgatgctgactgatcttacacaaaagcatgtgacacgttcacagctacatgggataccaaactcaggacatctgcaactgctgtgtgcccttttctggtgtgacccagcctttttgtcctggtccctgctttgctgatggccttgaagcagcctcccaagcagatgaatggaatttgtagccagagtcagatgattttttttttttgacactgggcaacttggatgcccaaggtctccaggagagactccc

SEQ ID NO: 193037 - DNA, 416 bp, Homo sapiens
gaaaaactaactcttgggtactgtgctcattacctgggtgatcagatcacttgtaccccatacctcagcatcatgcagtatacccatgtaaaaaacctgcacatgcatgccctgmatctaaaatagaagttgaaattattttttaaaaaagaatctatggttctgtgatgctgactgatcttacacaaaagcatgtgacacgttcacagctacatgggataccaaactcaggacatctgcaactgctgtgtgcccttttctggtgtgacccagcctttttgtcctggtccctgctttgctgatggccttgaagcagcctcccaagcagatgaatggaatttgtagccagagtcagatgattttttttttttgacactgggcaacttggatgcccaaggtctccaggagagactccc

SEQ ID NO: 193038 - DNA, 421 bp, Homo sapiens
aaaactaactcttgggtactgtgctcattacctgggtgatcagatcacttgtaccccatacctcagcatcatgcagtatacccatgtaaaaaacctgcacatgcatgccctgcatctaaaatagaagttgaaattattttttaaaaaagaatctatggttcygtgatgctgactgatcttacacaaaagcatgtgacacgttcacagctacatgggataccaaactcaggacatctgcaactgctgtgtgcccttttctggtgtgacccagcctttttgtcctggtccctgctttgctgatggccttgaagcagcctcccaagcagatgaatggaatttgtagccagagtcagatgattttttttttttgacactgggcaacttggatgcccaaggtctccaggagagactccccaacatt

SEQ ID NO: 193039 - DNA, 422 bp, Homo sapiens
aaaactaactcttgggtactgtgctcattacctgggtgatcagatcacttgtaccccatacctcagcatcatgcagtatacccatgtaaaaaacctgcacatgcatgccctgcatctaaaatagaagttgaaattattttttaaaaaagaatctatggttctgtgatgctgactgatcttacacaaaagcatgtgacacgttcacagctacatgggataccaaactcaggacatctgcaactgctgtgtgcccttttctggtgtgrcccagcctttttgtcctggtccctgctttgctgatggccttgaagcagcctcccaagcagatgaatggaatttgtagccagagtcagatgattttttttttttgacactgggcaacttggatgcccaaggtctccaggagagactccccaacattt

SEQ ID NO: 193040 - DNA, 421 bp, Homo sapiens
aaaactaactcttgggtactgtgctcattacctgggtgatcagatcacttgtaccccatacctcagcatcatgcagtatacccatgtaaaaaacctgcacatgcatgccctgcatctaaaatagaagttgaaattattttttaaaaaagaatctatggttctgtgatgctgactgatcttacacaaaagcatgtgacacgttcacagctacatgggataccaaactcaggacatctgcaactgctgtgtgcccttttctggtgtgacccagcctttttgtcctggtccctgctttgctgatggcyttgaagcagcctcccaagcagatgaatggaatttgtagccagagtcagatgattttttttttttgacactgggcaacttggatgcccaaggtctccaggagagactccccaacatt

SEQ ID NO: 193041 - DNA, 408 bp, Homo sapiens
ggtagacactttggagtttatccagtccaagttcccatcagatgcttatccagtctctacttggtcatttcccatcatggagagctaaagagatagaggggaaaaataaaaaattgctttttctcctctctgctctccactccacatgacacttytgacaccagctgtgtaggggttttccccacataccaagcaattctccagtggacaccagctgggtatcccttaattcaatttaattctgacactgtctacctagaggtaacatcagatcccacaggttaagagcttgatcccacaagactgccagaccccaccccgcttaagaggccaatcaatcacaagtagtaggttgtcagctatatttctaactcactggctataaattgcggatcctaggacctcatc

SEQ ID NO: 193042 - DNA, 408 bp, Homo sapiens
ggtagacactttggagtttatccagtccaagttcccatcagatgcttatccagtctctacttggtcatttcccatcatggagagctaaagagatagaggggaaaaataaaaaattgctttttctcctctctgctctccactccacatgacacttctgacaccagctgtgtaggggttttccccacataccaagcaattctccagtggacaccagctgggtatcccttaattcaatttaattctgacactgtctacctagaggtaayatcagatcccacaggttaagagcttgatcccacaagactgccagaccccaccccgcttaagaggccaatcaatcacaagtagtaggttgtcagctatatttctaactcactggctataaattgcggatcctaggacctcatc

SEQ ID NO: 193043 - DNA, 443 bp, Homo sapiens
ttttccttcaccagagaatcacgagctcttgagattggtagacactttggagtttatccagtccaagttcccatcagatgcttatccagtctctacttggtcatttcccatcatggagagctaaagagatagaggggaaaaataaaaaattgctttttctcctctctgctctccactccacatgacacttctgacaccagctgtgtaggggttttccccacataccaagcaattctccagtggacaccagctgggtatcccttaattcaatttaattctgacactgtctacctagaggtaacatcagatcccacwggttaagagcttgatcccacaagactgccagaccccaccccgcttaagaggccaatcaatcacaagtagtaggttgtcagctatatttctaactcactggctataaattgcggatcctaggacctcat

SEQ ID NO: 193044 - DNA, 532 bp, Homo sapiens
cacaatacacagaaatacacaatcagctgctattattatcgtcataacatgtttcawctcaaggtttttgaaaattgctctcaatgcactgcgtttagctggacatccattattgactgacagacacgttcatacacatttgcccactatccctccaggcttcctcatctcaccccggtagaaaaccacttgacaatgaagatgtggagttcagttcaactctacacctacaccaaagagaaatggatgtaaccatccaatagttagtagaagggtccctgaactaaagatcatgagatgcaagcttcctttgctcacctcctaaaattttgtgacctcaagcaatcattccaccacctcaagtctcacctgcttctaatgtaaaataaggatgataataaaactttgcctacctgagggcaggtggctaggtcaaataagatggttttatgaatctcttcttggtccacagttcatttacttagtcaaaaatatttaccaaactccatataggtgccaggggtgttgggaa

SEQ ID NO: 193045 - DNA, 532 bp, Homo sapiens
cacaatacacagaaatacacaatcagctgctattattatcgtcataacatgtttcatctcaaggtttttgaaaattgctctcaatgcactgcgtttagctggacatccattattgactgacagacacgttcrtacacatttgcccactatccctccaggcttcctcatctcaccccggtagaaaaccacttgacaatgaagatgtggagttcagttcaactctacacctacaccaaagagaaatggatgtaaccatccaatagttagtagaagggtccctgaactaaagatcatgagatgcaagcttcctttgctcacctcctaaaattttgtgacctcaagcaatcattccaccacctcaagtctcacctgcttctaatgtaaaataaggatgataataaaactttgcctacctgagggcaggtggctaggtcaaataagatggttttatgaatctcttcttggtccacagttcatttacttagtcaaaaatatttaccaaactccatataggtgccaggggtgttgggaa

SEQ ID NO: 193046 - DNA, 464 bp, Homo sapiens
ttattgactgacagacacgttcatacacatttgcccactatccctccagscttcctcatctcaccccggtagaaaaccacttgacaatgaagatgtggagttcagttcaactctacacctacaccaaagagaaatggatgtaaccatccaatagttagtagaagggtccctgaactaaagatcatgagatgcaagcttcctttgctcacctcctaaaattttgtgacctcaagcaatcattccaccacctcaagtctcacctgcttctaatgtaaaataaggatgataataaaactttgcctacctgagggcaggtggctaggtcaaataagatggttttatgaatctcttcttggtccacagttcatttacttagtcaaaaatatttaccaaactccatataggtgccaggggtgttgggaaatgcatcagtgaacaatcctgatgaagctccatctatctgc

SEQ ID NO: 193047 - DNA, 580 bp, Homo sapiens
atgacattccacaagcattctggatagccaaggtgccagataggtagaaaaaaatgagctggtttgagtaagcccaaggccacagtacaacttgggatagttcttagttacaaaggggcctatgccacaggcagaatgaagaagagcatcaggatcccctccccaagattatgctatgcctagaagggattctgggaggtgtgcagtgcatacatgctatacatatgtgctgagattgtagtagattcactcccataacctccaaccctcaatacccttacaacagatccatgtgagtttgcaactaacccctacccacgtcagctggtcctggcattctgcacatacctccagggaattttcatccataggagcctggaccacaggtagaaggaccaaggaaaagtacaatgagttattagcatgaccgtcacttgaccatatgtatttagactggcatttrgactcagaatttaaatgaaaaacagttcctgaacaacaacacattttaaattttaactttatttttaaaaagactgtgtgaaggccaccaaccatggctacaaatgctcctccccct

SEQ ID NO: 193048 - DNA, 435 bp, Homo sapiens
  misc_feature (1)...(435): n = A,T,C or G
nnnnnnnnnnnnnnncagcttcctgctccacccttccccacacctatgccctgttttatttcttctctccctaacatctaccttgttgttaacatactgtttagtctagaaggtaagaaactaagggaactcttggctgcaagagtcaaattctggattaagcctagacccagtgtcaagcacaaggcagggttcatgtgaggataagaggctctgttgaggggccagagaactaggatcacattccacagacttcaaagtgtggtccacagatttcaaagtgtggtccacagactagcagcaatggcaccaccaaaaagcttgttaaaaaggcagaatctyggggcccacccagaccttccttatgaattggaatctgcaccttaccaaaatcgcaggtgacttacgtgcatattaaaatgtaagaagccctgt

SEQ ID NO: 193049 - DNA, 639 bp, Homo sapiens
ctttgaaaatgtcagttttcctttcgcttcatcctcattagcctcctgggacactcttaaacatacccagaaacaacagagcagaagaaatgaggtatttttagctgatattctgggcacagattcctattgttccacaatttttggcttggctggatggcacgtggccaatacaatgtatactcttgcaaagaatgtatatttcctggtgtgtgtgtgtgtgtctgtgtgtgtgtgcatgtgtgtgtgataacaggaaggacaagggtattattgatggtattttgatggggaagattctgggatctcagcaagccacaccaaactctccataaatcctgtttgctttggtcaacatcacttttcacttattattaccattgtgctatatgtccaaaaagaaactttttttaaagccatagtgtcacagctgaagagctcctagaatcaactgtttccagcagcactatattaggaactaaatktattctgaaaaccaatgattacattcctaaatcatctggtgcactgcctagcatataacaatgctcaaaacactgacagctatgatgatcatcctcctccttaaacatgactcctgttctcaagggtcacccagtcttgtaggggaggcaaaca

SEQ ID NO: 193050 - DNA, 528 bp, Homo sapiens
ccagcagtcagatatttgcaacaactagggttcaaacccacgaagtcactcctaagccccctttaccactatgcctgtttggattacattttttgggttaaactttcacctttcatcagaccttggccaatggataaaccaacacaacttagaaatggcttcggttatttcttttctcatgatattgagatgggaaaccagcatgggaagagtgcatacttaaggtataatcctgccactcaatgccacacwttctttccctctccaattgttgtttccttatcggtgaatgtggataaagatgcctgctagccagactggtatgatgaatagaagtgcaaaatcagtagctgcctggaatgtggtggcaaatattatagtcactctggatgcaaagcaatgccatggtagagagcaatgggaatgggaatggagataaaagggtactcctttcaggaatcattcagtggcaaaagtcacaggacttgatcactgatcagacaagggaagaagagagggggagagcta

SEQ ID NO: 193051 - DNA, 546 bp, Homo sapiens
ttctctttttacagataaagaaactaaggcataagaggttaataacagggtcacaaaagtggctgagccaagatgtgaagtcaggcacggtggctcatgcctgtaatcccagcactttggaaggcaaaggctggaggttcacttgatcccaggagttcaacaccagcctgggcaacatagagagatcctgtccctacaaaaaatttcaaagttagctgggcatgatggcacatgcctgtagtcccaactatttgggaggctgtggcaggattggttgaacccaggaggttgaggttgcagtgagccaagatcatgccactgcactccagcctaggcagaacagaaagaccttgtctcaaaaataaacaaataaaaatctgaaacaagtttcctcttccagtaatggctgagtagctcctatgagaccaacctcccccagataattacaaaccgtagacaaaatatagaaaacaactatgtgaagatagcagacaayggaccaaaagtaggcagatattgaaagggagtcaccacatggaagaagga

SEQ ID NO: 193052 - DNA, 575 bp, Homo sapiens
ggacaaacgtaaagcaaaaccaccagagatatagggagaaaaggaatgtttgcaactacaggaccatggagttttggattaataaaataataaatattaataacaacatgaattgtttttaatcctaaaggagcatagctctttacagtctacaaagtgttactcaaatttcattatcccatatgatctttataccagccttatcagagaaataatttgcccatttttacaaatgaagaaactgaggttcaaagggcatcttaagcccaggttttctgactycaaatacagtgctcttttgatctcagcatcatttagttaagccagctttcttctttgtgctgaaacatagtaagtaaatgtttaatataagaagattctagaatgccttctataccaatgttataacaaagattcactccaagtttaaagcactgctacaaagtcttccttatgtgagctaaatgtctctccagggagcccctgccactccttagcccccagatgaccaccacatcatcatctctaaaaccctccaaaggctactgcacagaccctaaaagaaactcaagcaa

SEQ ID NO: 193053 - DNA, 509 bp, Homo sapiens
ctatgcccctgtgatccccaactaggagagattctagatgtctagagatatacttgattgttacaagtgcaatcacaattggcatcaagtgggtagagccagggatgctgctaaacaccctacaatgtgcagggcagccccctcacccccagacacacacacagaacaaakaatcatatggcttacaatggcaatagtgctgagacagagaaaccctactacatccaccatggctcaacaactcaattaccttgaaatttccttgatgggcagctgaaaacatgcatctagagactagggtagagatggatttggtaggtttgagatccagaagtcaccctctggagacgccagctgaaactgggagagtggacaagttcattggctggaagaaggtaggcaaaagagatataaggagaggactgtgggaaaggaccacagagggaccgaaaggaggaagcagcagtactccaaggagagaagaaatccaagtgcaacccaaacaatgg

SEQ ID NO: 193054 - DNA, 570 bp, Homo sapiens
gtaaaaatttatattttattatgttaacaaaatatggacatattaatgaaataattgtatatattattttgtttttatgcttagtttctgaaattaagaatgatgaaaaatatcagttaatttttttttttttttttttttttgagacggagttttcctcgtttcccaggctggaatgcartggcgctatctcagctcactacaacctccacctcccaggttcaagcgattctcctgcctcagcctcccaagtagctgggatcacaggcatgcatcaccacgcccagctaattttgtatttttagtagagacagggtttctccatattggtcaagctggtctttaactcctgacctcaggtcatccacccacctcggcctcccaaagtgctgggattacaggcatgagccaccacgcccggccttttaatttcaaatgaataaaaatggggaaacatgaaagatggagcataggatatggggtaatcagcctccaagatgtccctttgggccacctactcttattctctattgacccttcattattttcttctcttatcttctgctttca

SEQ ID NO: 193055 - DNA, 507 bp, Homo sapiens
taacaaaatatggacatattaatgaaataattgtatatattattttgtttttatgcttagtttctgaaattaagaatgatgaaaaatatcagttaatttttttttttttttttttttttgagacggagttttcctcgtttcccaggctggaatgcagtggcgctatctcagctcactacaacctccacctcccaggttcaagcgattctcctgcctcarcctcccaagtagctgggatcacaggcatgcatcaccacgcccagctaattttgtatttttagtagagacagggtttctccatattggtcaagctggtctttaactcctgacctcaggtcatccacccacctcggcctcccaaagtgctgggattacaggcatgagccaccacgcccggccttttaatttcaaatgaataaaaatggggaaacatgaaagatggagcataggatatggggtaatcagcctccaagatgtccctttgggccacctactcttattctctat

SEQ ID NO: 193056 - DNA, 585 bp, Homo sapiens
aaggattgtagtctcatcaaaatctcttagagaataggatcttgaaagatgaaagataaggtccaaatgtctattgcaagctgctrtcagagaatatcattagctttaatttaacagaggtattcagaaaattaaatttcaggaattgggatagccttaataaagtgcttaacaaaaagccaagtccattatttgttatctaagtattatggcaatgaactctttgaaaccttcacatttcttctaattacctcaaatgagtcacagcctatgatattcatagctaggtactggtgttcttaattcattcaatttcttcttttaattccaatattcattaaatcttctctctctctccacccatcctacctccctctttctcttgtgatcaggtacactctgaagttttctcctatagctagctggataatgttacttattgcttctttagaaattactgatcttactacattttccatgccaatgttactcagataacaatgagtatcagattcattctttcaaataagcactgtcattctttccacctgctatcatatctgacctgtatgctaaattgcatcc

SEQ ID NO: 193057 - DNA, 429 bp, Homo sapiens
catgcaaaatgcgttcaggacaaaaaatgcacacagagaaaattactcctctggcgagatattttgacacaaaaaatctttccttatcaaagatgaaaagcaccttgtcactcacttctaattaccgcctcatttctgtcaatgtagagagatgccaactccctgtggcgacgtcacagaagcatttaccaagatgcagagttgaatttggcctgtgagcagtattcactgaactcagctgggtctttggcgatacacactgatgggtgatttttaattataactattaatcttctttaaagtcaaagaaaggacattttgtctttttgcaaaaatatttsctatttcatctttgatatcagtggagaccttccttccccagtcttttctgaaatgcctatggcattaaagtgtaatgattaccaacat

SEQ ID NO: 193058 - DNA, 556 bp, Homo sapiens
gggattcaaacctcagttttctaagactttaggctttttaactgtgtcctgttgcttttctctactgattgtccttttctgtcacttaccattcatttgttagcctttttactggcttctcattccccatcttatttgttccttaaatattatggttgtccagaattccatttttgtaaaactgaaaagaarcatatgagttctatagtaactttctttgaaattatacaagctttgtacttagaaacaaaacaatgtgggaaaaaaatttgaataccttcagagcatcatgatttgattagtgggcacacactaaattgtaagataaaatgcagaaaagtaggtaaatagcctataggtacacatcaaactgtttaattagtgagagaataaaatgattaaaaattaaaattacttaagcaagttctcaggcaaattctcatttctatttctttcttaacgagtctttaattagctgaaattacattagggaagtttcatgccttctatatttttgccaatatgtgaagtaccctctttattcacaaatgatggg

SEQ ID NO: 193059 - DNA, 556 bp, Homo sapiens
gggattcaaacctcagttttctaagactttaggctttttaactgtgtcctgttgcttttctctactgattgtccttttctgtcacttaccattcatttgttagcctttttactggcttctcattccccatcttatttgttccttaaatattatggttgtccagaattccatttttgtaaaactgaaaagaaacatatgagttctatagtaactttmtttgaaattatacaagctttgtacttagaaacaaaacaatgtgggaaaaaaatttgaataccttcagagcatcatgatttgattagtgggcacacactaaattgtaagataaaatgcagaaaagtaggtaaatagcctataggtacacatcaaactgtttaattagtgagagaataaaatgattaaaaattaaaattacttaagcaagttctcaggcaaattctcatttctatttctttcttaacgagtctttaattagctgaaattacattagggaagtttcatgccttctatatttttgccaatatgtgaagtaccctctttattcacaaatgatggg

SEQ ID NO: 193060 - DNA, 496 bp, Homo sapiens
ttgaggtacgagaatcacttgaacccagggggtggaggttgcagtgagccgagatcgccccactgcactctccccttgctgacagagcaaaactctgtctcaaaaagaaagagagagagagagaaagagagagagagaaagaaaatatatcatttgttaattaactaccaataatttcctgaaaagtcatattaagtcagaggttatttgtcagaagatagtactgaaaatgaaggaaagaataaagaaacaaaatacacaggcttctgtgacattgtgatgtttaacaaacaagcaartatcctagttaaaaatgatggcatatgtgtgtaaaatagtgaagagctaaaatgcccaatctcactatgtttacactttctgtgcacgttagtgagaaaaaaagtgtaataacacctaacatacatttcttcaatgattatctatcctttattcttgtataagcagatacaaaatctactgcttacttgccaacatt

SEQ ID NO: 193061 - DNA, 621 bp, Homo sapiens
atatatttattccaccctgttagctccacaagtctacagtccaaattctcatctgaatatcagctaaatcagatatgcatgagtctcaagatatgatttattttgaggcaaattgccttacagctgtgagcctctgaaatcgagcaagttacgtgcttctgaaatgcagtagtacgacaagcatasaacagacattctattccaaaaggaggaaatcagaaggaagaaaggggtaactgaaaccaagtatatatgaaaaaaacttaaaggcagaatgaacaacttggattaaaaatcaaagtacatgaggggatggattcctcatttgccctgatgtgattattatgccttgtatgcctgtgtcaaaatatctcatataccccataaatacatatacccactacatactcataaaaattaaaaatttaaaaaatagacaattaaaaagaaaacctacagggcaaacaacattaaaccgtaagacttgagaataatcttctttggttccatggcccaccttccagacacagtggggcaagagttggacccctgaaggttccagccagccttgccactttggctttgctggaggcagttcatgtagcagctctgacacattaa

SEQ ID NO: 193062 - DNA, 637 bp, Homo sapiens
cacctaaattatgcttcttgagttggtcaaaattggtgaataattgtctgaataattgtcaartttagcacttctttcttataatattattaagactaattaatatcacagaatgacattattatttgtaaggtataagcatattaaatataagtccccaatacatttttgaaataaaacttagtaattctgtttctgtgaagtcatcatattactaaataagaaatctaagaagtgaaataacgtgtctgaattctaggggtgaatatgtccagatataataaaagagttaaatggatgttaaacattaaaatttaagatcaaggcacttgtttcaatcccccataatatgcaaaagtatttatcttccttttttaaatgttttcctattttacattcaatctctctctttgtctctctctgtctgtctttccctctcactttcactctcacttttgctctttcatcacttgctctcccacattctccctgcaagaggtctgcagtaggaatatgataacatctgtactttcctgaattctttctatggtgtaccaactcctggcagactccacgctacagaatggatatcttgcttcacaattcataaatattaccttagtcatatccctgttat

SEQ ID NO: 193063 - DNA, 637 bp, Homo sapiens
cacctaaattatgcttcttgagttggtcaaaattggtgaataattgtctgaataattgtcaaatttagcacttctttcttataatattattaagactaattaatatcacagaatgacattattatttgtaaggtataagcatattaaatataagtccccaatacatttttgaaataaaacttagtaattctgtttctgtgaagtcatcatattactaaataagaaatctaagaagtgaaataacgtgtctgaattctaggggtgaatatgtccagatataataaaagagttaaatggatgttaaacattaaaatttaagatcaaggcacttgtttcaatcccccataatatgcaaaagtatttatcttccttttttaaatgttttcctattttacattcaatcyctctctttgtctctctctgtctgtctttccctctcactttcactctcacttttgctctttcatcacttgctctcccacattctccctgcaagaggtctgcagtaggaatatgataacatctgtactttcctgaattctttctatggtgtaccaactcctggcagactccacgctacagaatggatatcttgcttcacaattcataaatattaccttagtcatatccctgttat

SEQ ID NO: 193064 - DNA, 537 bp, Homo sapiens
agggcgttaacataagaattttggagaaatgcaaacattcagtccatatcagctatttcttagtcacaagtgcaccctgctctggtgaggttcaactccttactggagctgtgactattgccagcagggtacaccttgtgggagagctgacacctcctccaccacagtagtggagacctcggtaggcttctctctccagggatggcgaagtaatcataatccctgtcacaagggccacyaggcctgaggagatcaaggccttctggacacaaaacaggctgagtattggtggagatgagagaagaaaggcaggtgtttgcaataccatatagacacttttgaaaatacattagttcacaatttttgcattacattttcaaaattaattcaattctttgttgataatcaatcgattgttgatcatcatcaattaagcagaattattgcttgcctctcagcacctctactgactttctatatactttatattggaagtcaatatttagaggcagtattcacacaatatgacataatgtg

SEQ ID NO: 193065 - DNA, 597 bp, Homo sapiens
gacgcttctctctgccttgctcaccctccagttgtccacgtacctcattcttcctggacatagaacaagaactcaggacccattgaatggcccgactgaaagagctgtaacasaaacagggctgaaacatgtccctgcttaccatgttgtgggcgatgaaaataagagaagagctgcagtccttctggcagcccagacataggagctccctgagccagggctgtgacaccctctttggggctctgccattcctggcatctccaagcttgtgggcaccaccatgttccccagtgctcacagtgcatgccacttacattacgtctggcccagctgcagcctcacatggagctcgtgactgtgccagtgccaggagctgcctgcctgccttagctggcatgcctggctgtgttcagtggccagacccagtgatcatttacacaccccttgccgctccacacctggctcacccttcgcaggcgtgaggttgaggccggcagcatgagctgagtgcagcatgctgggtgccaccagccacagaggtttccagctgggaaagcgacaacccccagatcccacgacactttgtcctgcatttcc

SEQ ID NO: 193066 - DNA, 581 bp, Homo sapiens
ctgtcttaatctgtgttgtacatgcatggtacatacctctttctattaatggcatttgtcttgtcaatgtcatctgctttatatttcaatttcctgggcaggagcaaagttgatttggcagaagaataaaaaatcttataaccctttggtacgttctaatcaggttccagccacagtgggtatttaactctgtgttttcaaactcaactatgcttcattggagatctgaggttccttggcagatgcctagtctacttggcaggagaacaaaaaagatggttgtaatcttttggcatttcctactcagatgacagcctcagtaacattgaactccatattttcaaatttgatttatatagtagttcactggagaaccttaaatattccaatcaatttgggaaatctatcatgaagagaaatwctgtataggtagattgggaccaaattaggaatcttatgtttgtgtttttaatcgtttataccatcatttatttctgaaaatactaatgcttaggtattttatatatgttataattaaacactataaattagatgaaagaggaaggattttaaaatgaaag

SEQ ID NO: 193067 - DNA, 581 bp, Homo sapiens
ctgtcttaatctgtgttgtacatgcatggtacatacctctttctattaatggcatttgtcttgtcaatgtcatctgctttatatttcaatttcctgggcaggagcaaagttgatttggcagaagaataaaaaatcttataaccctttggtacgttctaatcaggttccagccacagtgggtatttaactctgtgttttcaaactcaactatgcttcattggagatctgaggttccttggcagatgcctagtctacttggcaggagaacaaaaaagatggttgtaatcttttggcatttcctactcagatgacagcctcagtaacattgaactccatattttcaaatttgatttatatagtagttcactggagaaccttaaatattccaatcaatttgggaaatctatcatgaagagaaatactgtataggtagattgggaccaaattaggaatsttatgtttgtgtttttaatcgtttataccatcatttatttctgaaaatactaatgcttaggtattttatatatgttataattaaacactataaattagatgaaagaggaaggattttaaaatgaaag

SEQ ID NO: 193068 - DNA, 591 bp, Homo sapiens
ggtgaaactaaatagaatggcttaagtaaatacatgtataagttggtgtgaaacattgtaatctgaggytgcatgaatttcttggacagcatttatctctatctgccagttatggtggtgggacggggtggttcaagttggatatcgatggattattttcattatcagcctatccataggaaatatgttggtgcattaatattttccaagttgaagttcctaaggagatgtaagaaaactgaatttgcccaaagcaagaggaagaaaaataaggaatatattttagtgtgataatgtaacagatcatataggctttctagtacataaatttttgctagtgtgacacaaggcatccacaggttgaaaacatgcaaacactttcattaatatgaatgtatgcaaaatatctcctatatgatacttgctcagcaaatgttaacatttatttaatatttccgttgtggaaataactcatggaaacagaggaaatatttattttctggagtaagttttgagtataagaaaatttccatccacctctgctcacaaacaagaaatggaactcttagtctgaaggctcagtcacctgaa

SEQ ID NO: 193069 - DNA, 441 bp, Homo sapiens
aaacagactcttgctaatattgatacctaccaaatctcgagtcatctgagtaatgacagcttctttcacttgatctttagccatggtatagaatatgctgagtcgagagctttataatttactctctgttggattaatgaattatactaatcactgtatttcaccaatacctactatgctgtgcacatcttagagaagatcaaccttacacttaaacaaaaagtggtaacagcttagccccgtaaaaagtaaacacacttgcaatggacttgtaactggtataagaatatcccatagagctaggagtcctgaagatgttttggctcaatgttttcctatcgtcagttagtaacttgargctcaggtaaggtcaatggtttttctaaagtaatgcagaactacctaagtaataaaggcttgggaagactccacaaccccttt

SEQ ID NO: 193070 - DNA, 474 bp, Homo sapiens
agaagatgttcaatggcgattgttgagtgtccctttgaatgaacaaatggaaggatgaagattgaatgtgamtatgcaagtgagagaggaaaatattataaaatatctttggattcattttttcacacacctactggtatcagtatgtgcagtttaggatcaggaaatctgagttccatgatcaaattgattagggacttgctattcaaccttcagtaaataatttagcctttctgtgtctcatacattcagcaattcaacaaatatttgttaagcaccttctatctgcccagcactgaaacatttctcactaagcatgttttgacctgattttcttcccggtaatacactttagtagaagattgaaaatgtaccctaatttttcttccttggagtcaaatactttctcacactgagtaggtgagtagctggtatctgcaagactgataaatgagaaaacatgtcataaactga

SEQ ID NO: 193071 - DNA, 485 bp, Homo sapiens
acataatatatcttacagaagatgttcaatggcgattgttgagtgtccctttgaatgaacaaatggaaggatgaagattgaatgtgaatatgcaagtgagagaggaaaatattataaaatatctttggattcattttttcacacacctactggtatcagtatgtgcagtttaggatcaggaaatctgagttccatgatcaaattgattagggacttgctattcaaccttcagtaaataatttagcctttctgtgtctcatacattcagcaattcaacaaatatttgttaagcaccttctatctgcccagcactgaaacatttctcactaagcatgttttkacctgattttcttcccggtaatacactttagtagaagattgaaaatgtaccctaatttttcttccttggagtcaaatactttctcacactgagtaggtgagtagctggtatctgcaagactgataaatgagaaaacatgtcataa

SEQ ID NO: 193072 - DNA, 474 bp, Homo sapiens
agaagatgttcaatggcgattgttgagtgtccctttgaatgaacaaatggaaggatgaagattgaatgtgaatatgcaagtgagagaggaaaatattataaaatatctttggattcattttttcacacacctactggtatcagtatgtgcagtttaggatcaggaaatctgagttccatgatcaaattgattagggacttgctattcaaccttcagtaaataatttagcctttctgtgtctcatacattcagcaattcaacaaatatttgttaagcaccttctatctgcccagcactgaaacatttctcactaagcatgttttgacctgattttcttcccggtaatacactttagtagaagattgaaaatgtaccctaatttttcttccttggagtcaaatactttctcacactgagtaggtgagtagctggtatctgcaagactgataaatgrgaaaacatgtcataaactga

SEQ ID NO: 193073 - DNA, 605 bp, Homo sapiens
  misc_feature (1)...(605): n = A,T,C or G
aagctttaccatcatgaacaaggagaagtttcataaaaccaatggtctgagtatttcatattactgtcagaaagaactgcagtcatggccaggtgcagtggctcatgcctgtaatctcagcactctgggaggctgaggcaggcagatcacctgaggtcaggagttcaagaggcaggcagatcacctgaggtcangagttcaagaccagcctggcccacgtggtgaaaccctgtctttactaaaaatacaaaaattagccaagcatggtggtggatgcctgtaatcatagctactcaggaggctgaggcaggagaatcacttgaacccgagaggtgaaagttgcagtgagccgagatcacaccattgcactccagccttggtgacagagccagattctgtctaaaacagcagcarcaacaacaacaacaacacaacagtcaaagtctgagatcttcttatgtatcaaaaccagaaaaatcagaagaacaacacactgttgagcactttgttgccattatcatagttaattctcacaaaaacccactgtgatggatactgttgttatgccctctttacacatgagaaaaaccaaggcatgggaaagt

SEQ ID NO: 193074 - DNA, 518 bp, Homo sapiens
ggaaataaaatgcactcagtgcctcaggtgggtggatgtgctaggtacttttataggttacatcaattaacccttaggcgcataaaggtggtattacactcacttaaaaaagacataagagaactacctaacactaataaagagtagagttagatctttggattcaaagactaggattctttctgctatgttcagaaggaataatcttttcytgaaggtcacatccaaattgcactctctactagccttttccagaacagcacatggtgtgaaccactgttttcacttgcctgtacctgtttctcctctctttcatgtttcaaatttaaatccagaacccagttttatctaactctggagtttgtattttttccactgtaacattcattgagttcacttttgagggcctcttgtctacagtattgtctgccttgcattttaacatgatgccatcttcataatagtgcattttttgttaataaacatttactgagcacctattccgagtaagacatcat

SEQ ID NO: 193075 - DNA, 566 bp, Homo sapiens
ggattttaaaatctcccccaagtaactatgttccataggagtcttagcactaatatgaaatcctgcctttagctgacaacatgcaacctagcagcacagatttattgagacataaagtgaagggaatgcataatttgcattcaaataatgcatcttatcggtcacttggaactcctttttttcaaataaaaagraaagaataatttagtggtttgccgtcctgatcatgtcttagactcatctgggagacttaaaataggctgatacttggaatctaccctctgagaatctgatccaactggtttgggctggggtcttgttgtcagtgttatttttaaagcccagtgatttttaaatatataatcagtagaggactgcctatctaatttgaaatagtaaataaagaagagctaaagaaatgaatgcatctcatcattgtgtctcatatatatattatatatatgtgtatatgaatgcatcccatcattgtgtctcatatatatatataatgtaaaactagtgtttaaattaggcacaaacttgtattatggcctttcctgcattcc

SEQ ID NO: 193076 - DNA, 423 bp, Homo sapiens
aacatggtgaaaccccgtctctaccaaaaatacataaaatagccaggcatggtggtgcatgcctgtagtccaagctacttgggaggctgaggcaggagaattgcttgaacccaggaggcagaagttgcagtgagctgagatcacaccattgcactccagcctgggcgacagagactctgtctcaaaaaaaagaaagaaaaraaaaagtctccctgaattaatggatgatttaagggaaggaaaaaaattgtggggtcagggaatggagggaagaaaagaacagaagcaaggaaggaagagagaaataaatggcatggattctaatctggtctggtgtgttatgagggaatgaagaggtgagactattctctggcaagaatgataaagcagatacaaaacccctaaatacagtgtgagggtgat

SEQ ID NO: 193077 - DNA, 524 bp, Homo sapiens
gaaagaaatgagttctaaactccaatcaggaagccraacgaagcatcaaaggagaaagtagaggccaggcactgtggctcacacctgtaatcccagcactttgggaggctgaggggtcggatcacctgaggtcagtcaggagttccagaccagcctgaccaacatggtgaaaccctgtctctactaaaaatacaaaaaaattagccgggtgtggtggcgggtgcctataatcacagctactcaggaggctaaagcaggagaatcgcttgaatccaggaggtggaagttgcagtgagctgaaaaatcatgccactgcattctagcctgggcgacagagcaagactctgtctcaaaaacaaacaaacaaacaaacaaaggagaaagcaagagaagagtgtcctggtgctcagcagcacacgccctcctgttcccacagggtaccattattggacacaagtctgtaagccctgtttaatgcaccacactgtagattagaaaagcaagagattttccagaaattgtgt

SEQ ID NO: 193078 - DNA, 524 bp, Homo sapiens
gaaagaaatgagttctaaactccaatcaggaagccgaacgaagcatcaaaggagaaagtagaggccaggcactgtggctcacamctgtaatcccagcactttgggaggctgaggggtcggatcacctgaggtcagtcaggagttccagaccagcctgaccaacatggtgaaaccctgtctctactaaaaatacaaaaaaattagccgggtgtggtggcgggtgcctataatcacagctactcaggaggctaaagcaggagaatcgcttgaatccaggaggtggaagttgcagtgagctgaaaaatcatgccactgcattctagcctgggcgacagagcaagactctgtctcaaaaacaaacaaacaaacaaacaaaggagaaagcaagagaagagtgtcctggtgctcagcagcacacgccctcctgttcccacagggtaccattattggacacaagtctgtaagccctgtttaatgcaccacactgtagattagaaaagcaagagattttccagaaattgtgt

SEQ ID NO: 193079 - DNA, 524 bp, Homo sapiens
gaaagaaatgagttctaaactccaatcaggaagccgaacgaagcatcaaaggagaaagtagaggccaggcactgtggctcacacctgtaatcccagcactttgggaggctgaggggtcggatcacctgaggtcagtcaggagttccagaccagcctgaccaacatggtgaaacccygtctctactaaaaatacaaaaaaattagccgggtgtggtggcgggtgcctataatcacagctactcaggaggctaaagcaggagaatcgcttgaatccaggaggtggaagttgcagtgagctgaaaaatcatgccactgcattctagcctgggcgacagagcaagactctgtctcaaaaacaaacaaacaaacaaacaaaggagaaagcaagagaagagtgtcctggtgctcagcagcacacgccctcctgttcccacagggtaccattattggacacaagtctgtaagccctgtttaatgcaccacactgtagattagaaaagcaagagattttccagaaattgtgt

SEQ ID NO: 193080 - DNA, 514 bp, Homo sapiens
acaacaaaaaaacatgcttaaggggtgggtattgtgcatacacagaaacaggctggccaacttttaattttgccaactaagagcatttttttttcaaaagctcaatttattatcagcaacaatggatcaaagaaatggcatgataatacaaaactatgtgagaacatttagctgtatggaatgaagtaggtctatatctactgacaaagatctccaggataaattaagtcttaaaaaaaggcaaggtgcagaacaatggatygggtggatccatccaatgtgctcccaagagtggactgggagagagggagacttactcttcattgaattcccttttacaccttttgaagtttgtattgtgtcttcaaaaataaatacagataaatttaaagattagctttgtgaaaaattcattccagtgtcttgtttttcatttgtctaggatcagtaaaagctttgtcctgagacgggtactaggctgcaaacaggctttaagaccctccatcctaaccca

SEQ ID NO: 193081 - DNA, 543 bp, Homo sapiens
atctaactaagctcatggaacccaccctcctggtatttatgaactcctgcggtcctcccttaaatatgggctggaccaggtgtttcacacatattcattagaatattgcaaaagtgacaggatatcacttgacattaggttgtaaaaagactgtggcttccacctctttcttggatcccttacccacagagaagcctatcccatgtctttaggcagcccctggatatgtccatatggaagggactgagggctgtccacagccgtgtgcgtaggcataaaagggagcccagcccattccaggagttgagtctgagtcccagcaacaagttaacagcaacttayagaaaaacctcgagggctgaggcaggcagctaaaccatgctcagattcctgacccacagaaaccttgaaataataaatgcttggtattttagcccctaatattgcaagaaatttcctgcccagcaataaataacttccatcttaatttcagggaaaggttgtatgaaccacacggaggaagtaactatacagtgcaacaag

SEQ ID NO: 193082 - DNA, 543 bp, Homo sapiens
atctaactaagctcatggaacccaccctcctggtatttatgaactcctgcggtcctcccttaaatatgggctggaccaggtgtttcacacatattcattagaatattgcaaaagtgacaggatatcacttgacattaggttgtaaaaagactgtggcttccacctctttcttggatcccttacccacagagaagcctatcccatgtctttaggcagcccctggatatgtccatatggaagggactgagggctgtccacagccgtgtgcgtaggcataaaagggagcccagcccattccaggagttgagtctgagtcccagcaacaagttaacagcaacttacagaaaaacctygagggctgaggcaggcagctaaaccatgctcagattcctgacccacagaaaccttgaaataataaatgcttggtattttagcccctaatattgcaagaaatttcctgcccagcaataaataacttccatcttaatttcagggaaaggttgtatgaaccacacggaggaagtaactatacagtgcaacaag

SEQ ID NO: 193083 - DNA, 543 bp, Homo sapiens
atctaactaagctcatggaacccaccctcctggtatttatgaactcctgcggtcctcccttaaatatgggctggaccaggtgtttcacacatattcattagaatattgcaaaagtgacaggatatcacttgacattaggttgtaaaaagactgtggcttccacctctttcttggatcccttacccacagagaagcctatcccatgtctttaggcagcccctggatatgtccatatggaagggactgagggctgtccacagccgtgtgcgtaggcataaaagggagcccagcccattccaggagttgagtctgagtcccagcaacaagttaacagcaacttacagaaaaacctcgagggctgaggcaggcagctaaaccatgctcagattcctgacccacagaaaccttgamataataaatgcttggtattttagcccctaatattgcaagaaatttcctgcccagcaataaataacttccatcttaatttcagggaaaggttgtatgaaccacacggaggaagtaactatacagtgcaacaag

SEQ ID NO: 193084 - DNA, 545 bp, Homo sapiens
acctagcaagaaaccagtagttggaggtggagggttctcttgtctaggaagtcttagataatcccaagagacagacctccaaatcccactgtgatctgccttagaaggaactctacagaagccaggcaatacatggtatttacttcatgtaagaatcgtctactttcaagcgcttcctgtggctgaagtttgtctgctcatttttgcmtactcactttgcatgaatatccatggcaaccaaaagcatgcctaccttgttagcttttccggtgaggtaagaattattatagtaggcagggcaacatgaaagcatctgaagattttttcccaaactacccaaattacacaacaaccatcatgctcatctctagggccagaaagcgagatgcaggataaaactcagtgattatagatggaatccaacactgagaaggcgtgaatgttattcctgttgcacccctctccacttcccattttaaatgctggcccatttaaaatgctgatgaccctgagaacgactgtagattaacaaaagcttattccac

SEQ ID NO: 193085 - DNA, 545 bp, Homo sapiens
acctagcaagaaaccagtagttggaggtggagggttctcttgtctaggaagtcttagataatcccaagagacagacctccaaatcccactgtgatctgccttagaaggaactctacagaagccaggcaatacatggtatttacttcatgtaagaatcgtctactttcaagcgcttcctgtggctgaagtttgtctgctcatttttgcatactcactttgcatgaatatccatggcaaccaaaagcatgcctaccttgttagcttttccggtgaggtaagaattattatagtaggcagggcaacatgaaagcatctgaagattttttcccaaactacccaaattacacaacaaccatcatgctcatctctagggccagaaagckagatgcaggataaaactcagtgattatagatggaatccaacactgagaaggcgtgaatgttattcctgttgcacccctctccacttcccattttaaatgctggcccatttaaaatgctgatgaccctgagaacgactgtagattaacaaaagcttattccac

SEQ ID NO: 193086 - DNA, 371 bp, Homo sapiens
attttttttaaatctggagatgttagggattgattggtgctatggagaatggaagaaagaagggctgatctgtggactcgcaccagmacactaccctgctgcggtcgggcactcatttagaggtgctgctcactatatgaggacgttttggaagaggagagcatgtgaattgtacaatcacctacatgtgatcgacaatggatacatccagatgtgtgaatgagattgaagaggccaagaaggaaagcatcaggatgcttaatacaccatgggcagggagctgtttttttgcataaggaagaaaattttgtcttcaagatgagcagtggatatcagtggttctagaaatgagatcttacaccctgctgagg

SEQ ID NO: 193087 - DNA, 371 bp, Homo sapiens
attttttttaaatctggagatgttagggattgattggtgctatggagaatggaagaaagaagggctgatctgtggactcgcaccagaacactaccctgctgcggtcgggcactcatttagaggtgctgctcactatatgaggacgttttggaagaggagagcatgtgaattgtacaatcacstacatgtgatcgacaatggatacatccagatgtgtgaatgagattgaagaggccaagaaggaaagcatcaggatgcttaatacaccatgggcagggagctgtttttttgcataaggaagaaaattttgtcttcaagatgagcagtggatatcagtggttctagaaatgagatcttacaccctgctgagg

SEQ ID NO: 193088 - DNA, 371 bp, Homo sapiens
attttttttaaatctggagatgttagggattgattggtgctatggagaatggaagaaagaagggctgatctgtggactcgcaccagaacactaccctgctgcggtcgggcactcatttagaggtgctgctcactatatgaggacgttttggaagaggagagcatgtgaattgtacaatcacctacatgtgatcgacaatggatacatccagatgtgtgaatgagattgaagaggccaagaaggaaagcatcaggatgcttaatacaccatgggcagggagctrtttttttgcataaggaagaaaattttgtcttcaagatgagcagtggatatcagtggttctagaaatgagatcttacaccctgctgagg

SEQ ID NO: 193089 - DNA, 313 bp, Homo sapiens
agttttgtgattatgtgtagtaagcgaaacaaagttaagtgtyctcatggtatgttcagttactcttagcctggcaaaatcctcaggtcagttccatcagcctttagccctgtttgagtagggttacgtatgcatgttttgttaaaataacgtacccgggatacgagtttgggtttaaagaattttactagaaaggctctcaaaagtggttggactagtatgttcaagcacaaaggacccctggatgttattaaccgtctggaagagaaatagtgataagcattttaattttccatgcaggacttttagggac

SEQ ID NO: 193090 - DNA, 313 bp, Homo sapiens
agttttgtgattatgtgtagtaagcgaaacaaagttaagtgtcctcatggtatgttcarttactcttagcctggcaaaatcctcaggtcagttccatcagcctttagccctgtttgagtagggttacgtatgcatgttttgttaaaataacgtacccgggatacgagtttgggtttaaagaattttactagaaaggctctcaaaagtggttggactagtatgttcaagcacaaaggacccctggatgttattaaccgtctggaagagaaatagtgataagcattttaattttccatgcaggacttttagggac

SEQ ID NO: 193091 - DNA, 313 bp, Homo sapiens
agttttgtgattatgtgtagtaagcgaaacaaagttaagtgtcctcatggtatgttcagttactcttagcctggcaaaatcctcaggtcagttccatcagccyttagccctgtttgagtagggttacgtatgcatgttttgttaaaataacgtacccgggatacgagtttgggtttaaagaattttactagaaaggctctcaaaagtggttggactagtatgttcaagcacaaaggacccctggatgttattaaccgtctggaagagaaatagtgataagcattttaattttccatgcaggacttttagggac

SEQ ID NO: 193092 - DNA, 313 bp, Homo sapiens
agttttgtgattatgtgtagtaagcgaaacaaagttaagtgtcctcatggtatgttcagttactcttagcctggcaaaatcctcaggtcagttccatcagcctttagccctgtttgagtagggttaygtatgcatgttttgttaaaataacgtacccgggatacgagtttgggtttaaagaattttactagaaaggctctcaaaagtggttggactagtatgttcaagcacaaaggacccctggatgttattaaccgtctggaagagaaatagtgataagcattttaattttccatgcaggacttttagggac

SEQ ID NO: 193093 - DNA, 409 bp, Homo sapiens
acctgggaaatgttcttgatcttccctttccttcttttgctaagccatcttcaaattgtgttgattccacctccaaaatataccactggtccttcctctcacatggacccttatcactctaggaaaagccacaattatttcacacaaaacctaaaattgtttagtaatgtctccrtgtttccactcttgcactaggattagatatttcttacacaaagtgatgttttaaaattaatgcatgaggtcttctcactgccctgacctctaatgccatcccatggacgtcgcatactgctaaacactaaccgttgtctagaggcctctgtgggtcctcctcatggtgtggtcctctttcctgctgttgtacatgctaacctccttctcacgcttcaaatttccagtcaaataa

SEQ ID NO: 193094 - DNA, 530 bp, Homo sapiens
attcagtagttatttctgggcttttctacaaagtactatgtagactagcactacaccaactaaaatgtcagcccctatctactatattgtataacagacacaggacactacctgatttaatgcattagcatcaaagacttatcctttaagagacacaagacaattctagttagagaagtcttaaccgtggggacctatcctaggacagccattttgaaaaaaggtttgttggagctgttggcttttgaaagggatgctggaaatcaaaactgggcaagaaaagaaggaaaaaagggagactgtcaagctggtgtgggtctgacaccccatcctcatgtttaccwctttcttgtgttggaattctgtgtgtaatttcatctggagactttctcttttctgtaaagagaatggtaattttaaaggtcttaaaacatctccattcgtttataccccctcctcctagatgactggtgcttacatgaaacatgagaagcttcccttcactcagtcatttacgaaagaacacaggg

SEQ ID NO: 193095 - DNA, 606 bp, Homo sapiens
agggaaaaattctatcagcattttggtgaatgatctgtctctgcacagtatcatttgacatgttacaattagtaaacagttaatgcaccatattcagagttcttcaaagccagttgaaaaagtgtcctctaacttaatttgacctcgactrttattggtaaaaataaatattggaacctgtttcaaaaatagcaaaatttaatagtacaatttaaaaattatttatttacaaattctattcatatactcctatgttttatgctatattttatggaatacaaaacaaggataattattaaaaataatgagattaaaaacaaatatattagggaaaaattctgtcagcattttgataaatgatctggctctgaacagtattatttgacatgttacgattaggaaacagttaatgcaacataaaatgtttgaaaactttaaatagagcaagtcagtgctcaagtttccctaatgtgatgttgacttttataaactctcaccatttacctatcaacttggttaccctaaaagccagctatttctataggtccatggtgtccccacagataaagattcccacacaaatccaaaataaaatgtgaagaaata

SEQ ID NO: 193096 - DNA, 420 bp, Homo sapiens
cggcatattagctgatactgatcacctgcccaccgcacatagactcaccaggcatattagctgatattgatcatttggaacygacttaaaaccacctttttacttcagctactcatctaccaccaaaaacccagtgttattcaccaagttggaggttttttacgttattttttctaagtggaatggtaacacatttccatacaactcatttaaaaatttaataccaaagaaaattttataaatttttgttttctatgtaagagaaactgtccaggtcttagaaacagttgattttggagaaaaacaaacacaactttttaatattttcaagaatatatttgaaaatattaatatagttcattttatgtgtaataatgtgatttcattataatatgttaggttatattgatgattggttag

SEQ ID NO: 193097 - DNA, 542 bp, Homo sapiens
ggacctgagtgataacttgaggctggaggctgagggtcctggttgggcacgttttactctttcagccccaggctaactggrtggcgatggctgtttgaagctccagggtcctgaagataaggagttggagctgagtttcctccgtgtgtgtcccgagcatttcaaatgcatgatcctcataaaggctgagttcaaacttaaaaatcagcccaccagcaaaaggaaatagcaagggaaatataatatctgtctttgcctgcactgcgcggggaacatgaaaggatgttcttaaatttctaaccacaaacctgcctttattctggtttgggattcctttcagcctgcttatgtgtcctgggaatcccagattgcagaaatgaaaaaaagaggcagggctagtgcctgtggacgcctggcagcaagaaaggaagaagctcaacagagggagggcatcctccaccatgccccggagtttcactctcagatccaagtcaagtgtgagtccacaggctgaaattcacccaagagagtcaaaagcaaat

SEQ ID NO: 193098 - DNA, 551 bp, Homo sapiens
acccagcagcactctatgtggtatgacagggcagtgtggtagagaagacaattgaccacccattgattatctaagtgattttgtctttggtcattgtactcaatagttacttgagggtccctttctcsctgttccaggaattgttctagagaaatgctatgcaaactgtgttatagagcataaaaaagatgcggaaaagaaagcaatattgaggacggtgtgatttcctttccttttattggcgttttcttcactagaccgtacaacccatggggtagcccttggatgtcttcttcactttatattttaaggttttgaatgatatttagcacatatggggcgctgagtgttttataaataatacaataaatttctacttcgtctaaagtgtttccatagttttcaatattatctacattctctcttacaaagattttttgaagaaacatttatgcacggaaaaagtgtttaaaaagtcactttgtagattatttgagtgttcagctctaaattctatgaacatttatttacaagtcaaatgtcctatacta

SEQ ID NO: 193099 - DNA, 551 bp, Homo sapiens
acccagcagcactctatgtggtatgacagggcagtgtggtagagaagacaattgaccacccattgattatctaagtgattttgtctttggtcattgtactcaatagttacttgagggtccctttctcgctgttccaggaattgttctagagaaatgctatgcaaactgtgttatagagcataaaaaagatgcggaaaagaaagcaatattgaggackgtgtgatttcctttccttttattggcgttttcttcactagaccgtacaacccatggggtagcccttggatgtcttcttcactttatattttaaggttttgaatgatatttagcacatatggggcgctgagtgttttataaataatacaataaatttctacttcgtctaaagtgtttccatagttttcaatattatctacattctctcttacaaagattttttgaagaaacatttatgcacggaaaaagtgtttaaaaagtcactttgtagattatttgagtgttcagctctaaattctatgaacatttatttacaagtcaaatgtcctatacta

SEQ ID NO: 193100 - DNA, 551 bp, Homo sapiens
acccagcagcactctatgtggtatgacagggcagtgtggtagagaagacaattgaccacccattgattatctaagtgattttgtctttggtcattgtactcaatagttacttgagggtccctttctcgctgttccaggaattgttctagagaaatgctatgcaaactgtgttatagagcataaaaaagatgcggaaaagaaagcaatattgaggacggtgtgatttcctttccttttattggcgttttcttcactagaccgtacaacccatggggtagcccttggatgtcttcttcactttatattttaaggttttgaatgatatttagcacatatggggcgctgagtgttttataaataatacaataaatttctacttcgtctaaagtgtttccatagttttcaatattatctacattctctcttacaaagattttttgaagaaacatttatgcacggaaaaagtgtttaaaaagtcactttgtagatwatttgagtgttcagctctaaattctatgaacatttatttacaagtcaaatgtcctatacta

SEQ ID NO: 193101 - DNA, 709 bp, Homo sapiens
aaagtttatatattttatttttaccttttaatattatttttccacaaactttttgaggtcccctcatatttccccatctgtgcccaagtgtaggaaaatatgttagatgcagaaagctctgtgtttacaaacgactttatacattatcaaaactgaacattacacaccttctgtgagataggcaaaaaggaaattgtctgttttgttgttgtttttatsaaagataactatgcagtcaaaagcactcagctgatgttacctaattagcaaatgggcaaatcaaatcctaaatccagatgttctgacatgtatgagaagttcttcctctcactctttgtggcctctttatacaaacttgtagatttatgctttctacaaaggacagaaattctaatagctattatcaacaaatagtatttataacttgaaaaatagtgtctgggccgggcgcagtggcttatacctgtaatcctagcagtttgggaggctgaggtgggcagatcatgaagtcaggagatcgagaccatcctggccaagaaggtgaaaacccatctgtactaaaaatacaaaaattaggcgggcgtggtggcacgtacctgtaatctcagctactcgggaggctgaggcatgacaatcgcttgaaatggggagtcaggggttgcagtgagccaagatcgccactgcatccagcctggcgacagaatgagac

SEQ ID NO: 193102 - DNA, 709 bp, Homo sapiens
aaagtttatatattttatttttaccttttaatattatttttccacaaactttttgaggtcccctcatatttccccatctgtgcccaagtgtaggaaaatatgttagatgcagaaagctctgtgtttacaaacgactttatacattatcaaaactgaacattacacaccttctgtgagataggcaaaaaggaaattgtctgttttgttgttgtttttatgaaagataactatgcagtcaaaagcactcagctgatgttacctaattagcaaatgggcaaatcaaatcctaaatccagatgttctgacatgtatgagaagttcttcctctcactctttgtggcctctttatacaaacttgtagatttatgctttctacaaaggacagaaattctaatagctattatcaacaaatagtatttataacttgaaaaatagtgtctgggccgggcgcagtggcttatacctgtaatcctagcagtttgggaggctgaggtgggcagatcatgaagtcaggagatcgagaccatcctggccaagaaggtgaaaacccatctgtactaaaaatacaaaaattaggcgggcgtggtggcacgyacctgtaatctcagctactcgggaggctgaggcatgacaatcgcttgaaatggggagtcaggggttgcagtgagccaagatcgccactgcatccagcctggcgacagaatgagac

SEQ ID NO: 193103 - DNA, 709 bp, Homo sapiens
aaagtttatatattttatttttaccttttaatattatttttccacaaactttttgaggtcccctcatatttccccatctgtgcccaagtgtaggaaaatatgttagatgcagaaagctctgtgtttacaaacgactttatacattatcaaaactgaacattacacaccttctgtgagataggcaaaaaggaaattgtctgttttgttgttgtttttatgaaagataactatgcagtcaaaagcactcagctgatgttacctaattagcaaatgggcaaatcaaatcctaaatccagatgttctgacatgtatgagaagttcttcctctcactctttgtggcctctttatacaaacttgtagatttatgctttctacaaaggacagaaattctaatagctattatcaacaaatagtatttataacttgaaaaatagtgtctgggccgggcgcagtggcttatacctgtaatcctagcagtttgggaggctgaggtgggcagatcatgaagtcaggagatcgagaccatcctggccaagaaggtgaaaacccatctgtactaaaaatacaaaaattaggcgggcgtggtggcacgtacctgtaatctcagctactcgggaggctgaggcrtgacaatcgcttgaaatggggagtcaggggttgcagtgagccaagatcgccactgcatccagcctggcgacagaatgagac

SEQ ID NO: 193104 - DNA, 421 bp, Homo sapiens
tgaaaatcacctctctcatgttgagacgactggttatctacaatcacttcagacacttacaatatgtcaagtaaaaaccccctcttggaagtaattatttaaaaagtgcgttctctgggggtgatgggggtgaagaaaaactttattttatccgacggttttaaatttaaatatttacartgtcttattttattctgatgacttacattacctggcaaaagtatattttctcctataaatttcttacaacgtttcttttttgaagaaaagcacgatctgttttggcaagatcttttaatgttttctgtattctatcaccttcttccctccttatattatcataagtaagaaataggattaacaggagaatatttatttcctacagttcttttattctgctttttaaatggcaaatttaaca

SEQ ID NO: 193105 - DNA, 551 bp, Homo sapiens
gtttggctttctgttcttgtgttactttgctgagaatgatggtttacagcttcatcratgtcctgcaaaggacatgaactcatccttttttatggctgcatagtattccatggtgtgtatgtgccacattttatttacccagtctatcattgacgggcatttggattggtgattcctcaaggatctagaactagacctaccatttgacccaacaatcccattactataacccaaaggattataaatcattctactataaagacacaaacacacttatgtttgttttgtttttcacttatagtatcttcttctttgtatcctctcctcccagtgtgaggtcctagccactctgccaggtccagtttcagcattgcctccttataccagtttctctgtaaattatttatttcccatacacattcatattttcacattttgttttacacacagatctcttatgaagtcttgtcatacgcttatattgagtttttgtctagactctagtctaaatcaatcaaaggcaggaagagtgtcaaacctattttttatcc

SEQ ID NO: 193106 - DNA, 543 bp, Homo sapiens
atctaactaagctcatggaacccaccctcctggtatttatgaactcctgckgtcctcccttaaatatgggctggaccaggtgtttcacacatattcattagaatattgcaaaagtgacaggatatcacttgacattaggttgtaaaaagactgtggcttccacctctttcttggatcccttacccacagagaagcctatcccatgtctttaggcagcccctggatatgtccatatggaagggactgagggctgtccacagccgtgtgcgtaggcataaaagggagcccagcccattccaggagttgagtctgagtcccagcaacaagttaacagcaacttacagaaaaacctcgagggctgaggcaggcagctaaaccatgctcagattcctgacccacagaaaccttgaaataataaatgcttggtattttagcccctaatattgcaagaaatttcctgcccagcaataaataacttccatcttaatttcagggaaaggttgtatgaaccacacggaggaagtaactatacagtgcaacaag

SEQ ID NO: 193107 - DNA, 574 bp, Homo sapiens
ttctcattgctgccaggggtctttctaaaacacctatcctacaatatggccaggtactattttaggtggtagggatacagcaatgaacaaaacaaggttcctgctttcatgagcctgaattctatagctaaatatataaatacacaataaagaagaaaaatatcagtggtaagttccatgcagactggggagctactttagatttgagaggtcaggaaaggttttgctgaagagaagacattaaagctcagagctgaatgacacaccttgagtggcactsaggagacatccacacttcccagatgaaaatcctttagtgacttcccaaagttctcgggatataagtccaaatttcacagcatggcagagaaggtcttctggcatctggccagttgtcttcctctctagcttctttacattacatgacattaatgcatttaatcctcacgagcaccttgcaaaatagcagctaggctggctgagttctctgatggtctgattcatctttgtactgtcactgcgttagtagttggctcaacaaacgttcatgaaacaagcaaggtgttggacaaaa

SEQ ID NO: 193108 - DNA, 555 bp, Homo sapiens
aaacacctatcctacaatatggccaggtactattttaggtggtagggatacagcaatgaacaaaacaaggttcctgctttcatgagcctgaattctatagctaaatatataaatacacaataaagaagaaaaatatcagtggtaagttccatgcagactggggagctactttagatttgagaggtcaggaaaggttttgctgaagagaagacattaaagctcagagctgaatgacacaccttgagtggcactcaggagacatccacacttcccagatgaaaatcctttagtgacttcccaaagttctcgggatataagtccaaatttcacagcatggcagagaaggtcttctggcatctggccagttgtcttcctctctagcttctttacattacatgacattaatgcatttaatcytcacgagcaccttgcaaaatagcagctaggctggctgagttctctgatggtctgattcatctttgtactgtcactgcgttagtagttggctcaacaaacgttcatgaaacaagcaaggtgttggacaaaaagcatgga

SEQ ID NO: 193109 - DNA, 555 bp, Homo sapiens
aaacacctatcctacaatatggccaggtactattttaggtggtagggatacagcaatgaacaaaacaaggttcctgctttcatgagcctgaattctatagctaaatatataaatacacaataaagaagaaaaatatcagtggtaagttccatgcagactggggagctactttagatttgagaggtcaggaaaggttttgctgaagagaagacattaaagctcagagctgaatgacacaccttgagtggcactcaggagacatccacacttcccagatgaaaatcctttagtgacttcccaaagttctcgggatataagtccaaatttcacagcatggcagagaaggtcttctggcatctggccagttgtcttcctctctagcttctttacattacatgacattaatgcatttaatcctcacgagcaccttgcaaaatagcagctaggctggctgarttctctgatggtctgattcatctttgtactgtcactgcgttagtagttggctcaacaaacgttcatgaaacaagcaaggtgttggacaaaaagcatgga

SEQ ID NO: 193110 - DNA, 555 bp, Homo sapiens
aaacacctatcctacaatatggccaggtactattttaggtggtagggatacagcaatgaacaaaacaaggttcctgctttcatgagcctgaattctatagctaaatatataaatacacaataaagaagaaaaatatcagtggtaagttccatgcagactggggagctactttagatttgagaggtcaggaaaggttttgctgaagagaagacattaaagctcagagctgaatgacacaccttgagtggcactcaggagacatccacacttcccagatgaaaatcctttagtgacttcccaaagttctcgggatataagtccaaatttcacagcatggcagagaaggtcttctggcatctggccagttgtcttcctctctagcttctttacattacatgacattaatgcatttaatcctcacgagcaccttgcaaaatagcagctaggctggctgagttctctgatggtctgattcatctttgtactgtyactgcgttagtagttggctcaacaaacgttcatgaaacaagcaaggtgttggacaaaaagcatgga

SEQ ID NO: 193111 - DNA, 564 bp, Homo sapiens
ttaaacaggctagatacattcttgccatgtccaagaaagtctatatatcccaactctcccagctatcaccatcccaggatacaaacttggtcatgattacttttaagggcaacattagaaagcacaagacctcattatcttgactgctggaaacgagcccctcttaaagaaattaccatgcgattatgcaagcccctgaagaatccttgcatgtttggtattactycatgcccatgcattcgtgaaatgtatcccaagtgccagatgctgtactaggtgattgaatctaatggcagacacagctggcaggacccctacactcatggagcagataatccagtggccacagtccagtttgtcagctgtgatcctcaagccctctttcttctctcttctggtttccacttattcatacctcaaaaatgctcttgaagaaaccttacagtggccacatgagaataaatagtcttgtccagtccaagggttctgacaccagatgtgcccacagttcccaatcctcagatgctaggacgtctctgggttctgtgcagcggtgtgggaagg

SEQ ID NO: 193112 - DNA, 571 bp, Homo sapiens
acaccctggtgaacaaagctaataaatgtatgcatatataccaatccatgtatacacacctattctttatttttctatgtatccatttgtatttatattaagctaaatatgatttaagactctgactctaatctagtaccacatgatttattctagccttcagggaggcaattttgatgagaagcaggatattcgcatggtatcattaaaggctgcttaataattacaaaggaaaaaataatacatagactagcaatatcagacaacatactgactggctgatcaaaatatcaccattgaagggcaggtagacatcctgtgcctctgtaagtgaaactctcagacagacatatcacttacatagtataacaactagacgtataacctgaatccaatcataaggaaacatcgcacaaatccaaatgaagactattctgttaaaaaaaggagagaactacattcttcaaaattggcaatgtcaagaaagacaaagatagcctgaagaattgtttcagatttagtcaractaaagaaatatctaattctaaactagattatctactagaagtta

SEQ ID NO: 193113 - DNA, 506 bp, Homo sapiens
ctaagtgattcaattcagttatttcagctaactctcaaaatggcactgtgaaatcgatgtcattttcaccattttataaattaacaaacagtctttgagaggttagatgacgcagtcaaaatcacataactagtaagtagtgtagccaagtctatcagacttctgacattatgctctgagccactatataatactcccaccacagagaacttctcatccttaaaggccaagccaagattttgcaaaagctctgacttctcaaacagatgtgctaccacaggcctcttacaaattgtaaatgtctccctcactagacaattactgaaggcagatactaaacagtacttattttagtaattccagtgctaytggtacatcacagaactcaataaatgtatacccaatgaattaatgatgagattaacaatttcagttgaaacagattcctcatcttccactccatgtttctataattagtttcaaaactgaacagaaaagagagatct

SEQ ID NO: 193114 - DNA, 548 bp, Homo sapiens
atatttttttaaaacattagactgtaattcagtctgacattttctattctctttttttttttttttttttttttttggctaagaacctgttgggatgcacaaagctgatagcacagcttaatggggaatgatcaacacatatgcaaagcacctaaactgtacagkgggttgcacacagttacctttttattgttcttcccatgggactacatatataatctaaaggccaaaaaaatttttaaaccataattggaactcaaaaagtactaaaaaatatttatacctataactttgtaaaattgtaaaattaatggcaaaaatatgactgataaagtcaaatagtgaaagatctgaaaaagctatttcatgataaagggttactataatatacaatacttataaaataaaaaatgaatagaaaatggataaagaatataaaaggaatttcacagaattcaaatgtccagcattttaaaaatgctgaagtttattagtagtactaaaaaagacattaaaataatttataccccagaaacaataaaaaaatt

SEQ ID NO: 193115 - DNA, 548 bp, Homo sapiens
atatttttttaaaacattagactgtaattcagtctgacattttctattctctttttttttttttttttttttttttggctaagaacctgttgggatgcacaaagctgatagcacagcttaatggggaatgatcaacacatatgcaaagcacctaaactgtacaggggsttgcacacagttacctttttattgttcttcccatgggactacatatataatctaaaggccaaaaaaatttttaaaccataattggaactcaaaaagtactaaaaaatatttatacctataactttgtaaaattgtaaaattaatggcaaaaatatgactgataaagtcaaatagtgaaagatctgaaaaagctatttcatgataaagggttactataatatacaatacttataaaataaaaaatgaatagaaaatggataaagaatataaaaggaatttcacagaattcaaatgtccagcattttaaaaatgctgaagtttattagtagtactaaaaaagacattaaaataatttataccccagaaacaataaaaaaatt

SEQ ID NO: 193116 - DNA, 548 bp, Homo sapiens
atatttttttaaaacattagactgtaattcagtctgacattttctattctctttttttttttttttttttttttttggctaagaacctgttgggatgcacaaagctgatagcacagcttaatggggaatgatcaacacatatgcaaagcacctaaactgtacagggggttgcacacagttacctttttattgttcttcccatgkgactacatatataatctaaaggccaaaaaaatttttaaaccataattggaactcaaaaagtactaaaaaatatttatacctataactttgtaaaattgtaaaattaatggcaaaaatatgactgataaagtcaaatagtgaaagatctgaaaaagctatttcatgataaagggttactataatatacaatacttataaaataaaaaatgaatagaaaatggataaagaatataaaaggaatttcacagaattcaaatgtccagcattttaaaaatgctgaagtttattagtagtactaaaaaagacattaaaataatttataccccagaaacaataaaaaaatt

SEQ ID NO: 193117 - DNA, 588 bp, Homo sapiens
aaaaacatagtatacatagggttctgttctatctggagttttaagcatccactgtgggtcttggaacttatccctggcagataaatgtactgtaatgggattttactgccccatctatattatttccttaggtggctggccttcggccaaagtagcacaggtgacctccctgcgatcagcacattacccaggcatctctggctttttggaaccattttttaaaggttaatttcccattaataatttttgacagtttaatttttgtaaaaaatgatgacttaaatgtgttaaagtgcattttatcaacaattaactattgcaaagatcctgagttaaagacaagcatagagatagaaatgttaaagaacaagagtgcttcttatgctcctcaatcatagtaaatatgagccattgccttcattttggcaaaacatcagcctccatgagatatttggaaaatagttttctatccatcagtatgtctgcatcccataaaaataaagtaatattcattcatttatgcataatacatggcacatgatatcaytgcagattaataaatgcttgttgaataaataaatgaataat

SEQ ID NO: 193118 - DNA, 547 bp, Homo sapiens
agaaaccttttaagagatcagaaaatataatattcggtgtagcaggagcttctttttaagcaatgttggagcgtctttttaagyaatgaaaactttttttaacatataaacgaagatccaataattatatcaggaaaaagaaactcctcatttgaacgtattttgtgtctgttaaaatatgaaaataatccacatttacatccaaaattatatttcacggcctttaagtcacaggagtagagaactattttaatatagcaatagcattcaaaagtgcttgagtttaactgagagtctaaagtcaaatttatcatttatcctcctcccaaacaaaaggaatcagttctccttctgtgtttgataagatctgttaatggcattactctttctatgatcaatcaggcagggtctagactctaaaagtcaccagcaatgtgcttttgcacgcctttcttacatcaaatcaaaatatcctttttctgtatcagtcaagtaaccaagcacttattgaatgtattacagcaattgctggaagtagtagagaaca

SEQ ID NO: 193119 - DNA, 592 bp, Homo sapiens
accatgacttcctacccgtttgatgtctctttctccaggcttaaaacatagccttctagtggtagaaccaaaatttaaagagatgttatgtagcccaacaactgtggaatctgatcatctaggcctaaaatatctaatctgaacttctaagtctgaaataaaaccttccagttttgatatttgactgtagacatggaatataattctccatgttcaaaactggccatctataagtaaaacctgaatttttgagtgtggtaaggtagttctccagacattgaacttgaccccccatttatagaactgtgccttgaggtatggaacatgtcacttcatgtgtggaatcrcagtctccaaagatggaaacttatgagcatgaaacttggcatttccagtatgaagtctcaaattccatgcatggaacatgactccacatgcaaggcatatggcaaactatgtgtggccttacaagtatacagcctggcactttgtgtgcagactctcacttatcaaacatggaacactgatattacaagtgtggaaactggcaacctatacatggttggtacctgaattttcagttatagatgct

SEQ ID NO: 193120 - DNA, 414 bp, Homo sapiens
cagatgacaaacaagcatttgagatgttccatatggtcattagggaattgaaaatttaaacagtaatgagatacaaaacctgaaaaaaactgataataccaatttttggctagaaagtggagcaatggaaacattcattactggtagaaaagcaaaataatttagccactttggaagacattttggtacattcttatctagcaatcacattcctaggtgtttatccaacatttgaaaattttttccacttaaaaacctgcctgtgaatgtatatcacagctttgttcataatcacaaaaaatgggaaacamattattttattcatgtctctactgaagtagctcaactgaagtagacgcatggataaaataatttgatacatccacacaatgaaatattatacaatgataaaaa

SEQ ID NO: 193121 - DNA, 593 bp, Homo sapiens
ctcttgtctgattgctctagctaggactgtcagtactatgttgaataacagttgtcatagtgggcatccttgtcatgttccagatctcagaggaaaggctttcagtttttccccattcggtatgatactagctgcggatctgtcatttatggcttttattatgttgaggtatgtgccttctgtctccagttttttgaggatttttatcatgaagggatgctgaatgttatcaaatgcatgaagtttcttatacaagtcacatctatacagctatacataaaaatagraaagtatttaaattctttaaaaattttattcacacaagtgaatgagtattcttgttgtttaataagaacaacaaatacatgctggaaccctatgtgtgttatattgaacattttctgaatgaaggaataaatgaataaaagagatagtagtagtagcaataataacaacgtcacttagtattttccaagtgcttactatgaaccaagcattgttctgaaagaattagaagtaacttaattcttataataagacaattaacagaaaaattttcccaaaaaaacacccatactttgcctacttgtgtt

SEQ ID NO: 193122 - DNA, 593 bp, Homo sapiens
ctcttgtctgattgctctagctaggactgtcagtactatgttgaataacagttgtcatagtgggcatccttgtcatgttccagatctcagaggaaaggctttcagtttttccccattcggtatgatactagctgcggatctgtcatttatggcttttattatgttgaggtatgtgccttctgtctccagttttttgaggatttttatcatgaagggatgctgaatgttatcaaatgcatgaagtttcttatacaagtcacatctatacagctatacataaaaataggaaagtatttaaattctttaaaaattttattcacacaagtgaatgagtattcttgttgtttaataagaacaacaaatayatgctggaaccctatgtgtgttatattgaacattttctgaatgaaggaataaatgaataaaagagatagtagtagtagcaataataacaacgtcacttagtattttccaagtgcttactatgaaccaagcattgttctgaaagaattagaagtaacttaattcttataataagacaattaacagaaaaattttcccaaaaaaacacccatactttgcctacttgtgtt

SEQ ID NO: 193123 - DNA, 593 bp, Homo sapiens
ctcttgtctgattgctctagctaggactgtcagtactatgttgaataacagttgtcatagtgggcatccttgtcatgttccagatctcagaggaaaggctttcagtttttccccattcggtatgatactagctgcggatctgtcatttatggcttttattatgttgaggtatgtgccttctgtctccagttttttgaggatttttatcatgaagggatgctgaatgttatcaaatgcatgaagtttcttatacaagtcacatctatacagctatacataaaaataggaaagtatttaaattctttaaaaattttattcacacaagtgaatgagtattcttgttgtttaataagaacaacaaatacatgctggaaccctatgtgtgttatattgaacattttctgaatgaaggaataaatgaataaaagagatagtagtagtagcaataayaacaacgtcacttagtattttccaagtgcttactatgaaccaagcattgttctgaaagaattagaagtaacttaattcttataataagacaattaacagaaaaattttcccaaaaaaacacccatactttgcctacttgtgtt

SEQ ID NO: 193124 - DNA, 593 bp, Homo sapiens
ctcttgtctgattgctctagctaggactgtcagtactatgttgaataacagttgtcatagtgggcatccttgtcatgttccagatctcagaggaaaggctttcagtttttccccattcggtatgatactagctgcggatctgtcatttatggcttttattatgttgaggtatgtgccttctgtctccagttttttgaggatttttatcatgaagggatgctgaatgttatcaaatgcatgaagtttcttatacaagtcacatctatacagctatacataaaaataggaaagtatttaaattctttaaaaattttattcacacaagtgaatgagtattcttgttgtttaataagaacaacaaatacatgctggaaccctatgtgtgttatattgaacattttctgaatgaaggaataaatgaataaaagagatagtagtagtagcaataataacaaygtcacttagtattttccaagtgcttactatgaaccaagcattgttctgaaagaattagaagtaacttaattcttataataagacaattaacagaaaaattttcccaaaaaaacacccatactttgcctacttgtgtt

SEQ ID NO: 193125 - DNA, 440 bp, Homo sapiens
tcatattttggtgaagcactttttccaagaaaaggtatcttttagtctattttgtgctgttataacagaatacctgagactggataatttattttaaaaaaagatwtatttcttacacctctgtaggctgggaagtccaagattgatgtgcctatatctggtgagggactccttgctgtgtcataagacaacagaaggtatcacaggcaagagagagcaagagaggacctaattgtcttttataactattcacttacaataatgaaccaactatattaatttattcaggagggttttgctcttatgacctaatgacctcttaaaggtatcacctctcaacactgttgcattgagaattaaattgctaacatttgaactttgggggacacattcaaaccacagtgcagtacatagaacatcaagtttttgatgacttactg

SEQ ID NO: 193126 - DNA, 440 bp, Homo sapiens
tcatattttggtgaagcactttttccaagaaaaggtatcttttagtctattttgtgctgttataacagaatacctgagactggataatttattttaaaaaaagatttatttcttacacctctgtaggctgggaagtccaagattgaygtgcctatatctggtgagggactccttgctgtgtcataagacaacagaaggtatcacaggcaagagagagcaagagaggacctaattgtcttttataactattcacttacaataatgaaccaactatattaatttattcaggagggttttgctcttatgacctaatgacctcttaaaggtatcacctctcaacactgttgcattgagaattaaattgctaacatttgaactttgggggacacattcaaaccacagtgcagtacatagaacatcaagtttttgatgacttactg

SEQ ID NO: 193127 - DNA, 516 bp, Homo sapiens
catgggggaaacttgccctcatgatccaatgatgtcccaccagatccctaccctaacatgtggggattaaaattcctcatgagatttcagtggagacgcagagtgaaaccatatcacttgttattgtttactttgttgaagattagatggttgtaggtgtgcagctttatttcagggatctctattctgtttcattgatctatgtgcctgtttttgtaccagtatcatgctgttttgattactgcaaccttgcrgtatagtttgaagttgggtagtgtgatgcctctggctttattctttttgcttacaatttttttggctattaaggctctactttgattcaatatgaactttataatagttttttctaattctatgaaaaatatcagtaatttgatgggaatagagttgaatatgtacattgctttggggagtatggccattttaacaatattgattcttcaaatccatgagtgtgggatgcttccatttttttgtgttatctatgaatttttt

SEQ ID NO: 193128 - DNA, 516 bp, Homo sapiens
catgggggaaacttgccctcatgatccaatgatgtcccaccagatccctaccctaacatgtggggattaaaattcctcatgagatttcagtggagacgcagagtgaaaccatatcacttgttattgtttactttgttgaagattagatggttgtaggtgtgcagctttatttcagggatctctattctgtttcattgatctatgtgcctgtttttgtaccagtatcatgctgttttgattactgcaaccttgcggtatagtttgaagttgggtagtgtgatgcctctggctttattctttttgcttacaatttttttggctattaaggctctactttgattcaatatgaactttataatagttttttctaattctatgaaaaatatcagtaatttgatgggaatagagttgaatatgtacattgctttggggagtatggccattttaacaatattgattcttcaaatccatgagtgtgggatgcttccatttktttgtgttatctatgaatttttt

SEQ ID NO: 193129 - DNA, 611 bp, Homo sapiens
aaactttcatacccatgcctctgttcactattactagtatgctattcaagaaggtgtttttatatttactcttcattaatctaakgatattccagtcatatggctaaattaatggagtcacatttgataaaaagtacatggcataaactttatttttatgagaatttcagctgaaagatgagcagaacagttgttgaggaataataaaatcttgcagttgtcatccagtccggcttctctgcagtgagcacaagccactggtaacaacgtttgtgaaactaaccaaaaagatgtccctggtgacccatatctatttatttatttagagacagagtctcgctctgtcccccaggctggagtgcagtggtgcaatctcagctcactgcaagctccgcctgccaggttcacaccattctcctgcctcagcctcccacatagctgggtctgcaggtgcccgccaccacgcctggctaatttttttgtatttttattacagacagggtttcaccatgttagccatgatggtctagatctcctgacctcgtgatccacctgctttggcctcccaaagtgctgggattacaggtgtgagccattgtgcccggcccacc

SEQ ID NO: 193130 - DNA, 633 bp, Homo sapiens
atagaaaagaaaaacccattttctgaggagaaagtcaagccacctgcacaaatctgcgtaagtaatgaggagccaaatgttaaccaccaagacaatgggaaaatgtctccagggcacatcagaggtcttcacagcagcccctcccatcagaggcccagaggcctaggaggaaaaaatagttttgtggtccagattgagggccttgctgctttgtgyggtctcaggacttggtgcctggatcccagccatggctaaaaaggaccaacatagagctcaggccatggcttcagatggtgcaatccccataccttggtggcttacatgtggttttaggcctgtaggtgcacagaagtcaagaatttaggtttgggaacctttgcctagatttcagagaatgtacagaaatgcctggatggccaggaagatgtgtgttgcaggggtggaaccctcatggagaatttctgctagggcagtgtggaaggaaaatgtgggatgtgatccctcacacagagtctccatggtagcactgcctagcggagctgtgagaagagagccaccatcctccagaccccagaatgttagatccacggacagcttatatcatgtgcctggaaaagccacacacactcaaca

SEQ ID NO: 193131 - DNA, 508 bp, Homo sapiens
actcttactttttaagagtcataacattattacatttctattttacttaatttaaatattatcttacccaggagagactataagccctcttgaaaatagaaattctattaaatttcctgtacatttaaaaaataagtacagtgcctgaaatattggctcttaaagttgcttagagctgactatatartcaacatttataattgctcaataaacacagagtgatagatgagctaattcataggaacaatattggccagaatttaattttattatttttggagaccatagaaagagaaagacataaaagaaggagaagattataaatattttaacaatatttttgtgatgtagtctggattttatatgtctgcgtatgtctccagaaagagctgggattctgtgatgtttacattttgccttaggcttatgtcagacatttattagttcaagagcttctgattcaatatttttctgtttgtgttagtggaattcctatgtaccctgacat

SEQ ID NO: 193132 - DNA, 545 bp, Homo sapiens
ttgaatttgaattagcccaaaatgaataactctacaatatagcagaattaagagtctgggagacctctgggttcccaaatgttcactatcaccccctcatctttgactcagaataaggtatgaagaaagaaaatcagctgaagacacacatttttaaaaaatattatcaagrcattttataaatttaatggaaattgtgtttagtgtaaatgctatgaatagtgtgaaatttctcaaagttcactgaatttttttctacttataaatgatgattgaaacagattggaaagcaaatcgtgttctttaagctacctgatttaagctttaagattacctgagaagagagacctattaaaagaaaagaggaagaatggaagaaaagcaggaaggaaaaaggaagaaaggaaggaaggaaggagggaaggaaggaaggaaggaaggaagggagggaggaagagagggagggaggcaggcaggaaggaagcaaggaaggaaagaagaaagtgggtaaacttcagattcagaaaatcaaatattttcctttc

SEQ ID NO: 193133 - DNA, 545 bp, Homo sapiens
ttgaatttgaattagcccaaaatgaataactctacaatatagcagaattaagagtctgggagacctctgggttcccaaatgttcactatcaccccctcatctttgactcagaataaggtatgaagaaagaaaatcagctgaagacacacatttttaaaaaatattatcaagacattttataaatttaatggaaattgtgtttagtgtaaatgctatgaatagtgtgaaatttctcaaagttcactgaatttttttctacttataaatgatgattgaaacagattggaaagcaaatcgtgttctttaagctacctgatttaagctttaagattacctgagaagagagacctattaaaagaaaagaggaagaatggaagaaaagcaggaaggaaaaaggaagaaaggaaggarggaaggagggaaggaaggaaggaaggaaggaagggagggaggaagagagggagggaggcaggcaggaaggaagcaaggaaggaaagaagaaagtgggtaaacttcagattcagaaaatcaaatattttcctttc

SEQ ID NO: 193134 - DNA, 587 bp, Homo sapiens
caagtttgatttagcatattattttcacaggctgcattattgtccatcatattgatgtacctcaatttatttaggtgtttacatcttatttgaaattcagattgtccccattgcttgcttcactattataaagactaatttgatacacatacattttatgtatgtttaaaaatattatattaaacacagttgtgagagtacaattatatgattaaaacatatgcatatattttattttttcagaataccttgttaattgcatcccagataggttatcccaatttgcactctcaccaatgattaataatattgaaggtaggcttggattccaattgaaaagggataataataacaaaattatygtttaaaacatttttgtgttttgttgacaaactgtccagaatttggtaaaaaaaaattcattggtttaaggagctattgcccttaaatagcacccattagaaaaataatcattttaaagattaaattataatatttgagagaaagataattccggtaaaaactaccctaatagatatagagtgactttttaatacaaaatttcaatatattttatagtatttaag

SEQ ID NO: 193135 - DNA, 501 bp, Homo sapiens
aattgatagttttaatataatcccaatcaaaatcttcgttggcttatttgtagatattgacaagctgatctcagaatgctgccactctttgatagtttcttatacagttaataagggtctactctatgatccagtctactctatgaatcctaggcatttaccagagagagagagagagagaaaaaaaaaaaaactccacaaataattttaaaatatattcattacagctttatccaaaactatccaaaggtctaaatgttggttatagctttattgcctcttggctcacccttttagactaatttstgaagttgaatctgggccctttaaacatttttgccagcccttattccagctggcacagaattagagtgcagggagacattacaggagaaaaaagaaagttttgcttattggttcctgtcagcttgctcagctgggtcctgcaaggacccaggcttcttcagtgcagtttctgtagacctcagtggccagtagcac

SEQ ID NO: 193136 - DNA, 608 bp, Homo sapiens
gtaggtactgctcttgaagggaacttcttctaatccatgtaattggaaagagctacttaacagtatcaataattatggagcacatccttccacctcacacatcaacagcaggttactagttcatttgctggagaccaaaatgattaaaatctgttatgtcattcacagtgttatgatttggctctgtcaagaagatttgacttgaagatgcaatagaaataccaaattatggatggctaaagatgaattataacatacttcamgggcaatcagtaaattgagagaacaccaagatgagtaatggttaaatgcatagctaaagttaccaaaccaaacaaagcaaacaaaaaacaaggtattaaatctgtggattctcctactctatgattcagtaagtcccattttaggtactcatgaactcaggcaaggattgtcaattggtgtgagagtcttcataattattatctatcataatgtagcagtgtagctgctaaagttcttcattctctgtcttatatagtggttggctaactaacatggcctctgaactttctctttttgtgttgccttattaaataccataaaacatgttcatgcaaaatgctttt

SEQ ID NO: 193137 - DNA, 595 bp, Homo sapiens
tagccctgttgctgcttctgaagagtttgaagatgaagaagaaagtcttgttcatttccccatttactaaaggtcacctataaactttgtttcgtttaaatatttattaactttatatgttaaaatcgatctggaaataagaaattctctgagctgtagtgtttccttctcactaccttgtacctttatacttagattggaattcttaataaataaaattatatgaaattttcaacctattataaacgtatatatytgaagacttagagtaagttatggccatcaaataggcaatgagctctggtgaatttctctacattcataaagttttaagttttttaaagagcatgagggtaaattcagcaattttaatatttaaaattggagtttatatatacttatttatacatatggtaagattctcaaatcctaactatgatgtacataaatacagatgtagacatacacacatataggttatgaagttgagccatatgttttgttaaatacctagcaaaatcaaattgagcttaaactatgtaattttgaaaattagtgacattaaattcttggtttaattgttgtctttaaatta

SEQ ID NO: 193138 - DNA, 669 bp, Homo sapiens
ctggtgttttcaaaaatgacaaaaacagcatgcttgattcttggctaatatttgcttattagttgatcagtattttgaaaaattacagatggcttctcctcaggaatagaaaattaaaggacattttattcctgctgtgtttattgtatgtttatctttataataaacacaaaaagaactaggaaaaagtacatttttaaatatcccgtaattaggtatcttttcaattaacaatttatgagtaaatttgcattctctgcttgtgacaatgcaaagacatttgcttaaattttatctctatatgcttgataatttaaaggtatttataaacagtaygattgcatccttgtcttcttatacatatcatgtttgtctctttgtttttggaaatgtgtttcataactttgctctcccagttagcaagcatgtgagttttttcttcctgcttcagctatcaattgagtgagtgagtcggcctctaccttacatagaccctaaaaacaaaatattgcaattattttttcttacctaccaaaataaacatgaaagattttaaactttgatcatactctctttctggtttacgtgatataaatttaaaagtgatactagctttttttgtcctttatagataaatacctaaaataaaataaaaatctcaatctaaac

SEQ ID NO: 193139 - DNA, 669 bp, Homo sapiens
ctggtgttttcaaaaatgacaaaaacagcatgcttgattcttggctaatatttgcttattagttgatcagtattttgaaaaattacagatggcttctcctcaggaatagaaaattaaaggacattttattcctgctgtgtttattgtatgtttatctttataataaacacaaaaagaactaggaaaaagtacatttttaaatatcccgtaattaggtatcttttcaattaacaatttatgagtaaatttgcattctctgcttgtgacaatgcaaagacatttgcttaaattttatctctatatgcttgataatttaaaggtatttataaacagtacgattgcatccttgtcttcttatacatatcatgtttgtctctttgtttttggaaatgtgtttcataactttgctctcccagttagcaagcatgtgagttttttcttcctgcttcagctatcaattgagtgrgtgagtcggcctctaccttacatagaccctaaaaacaaaatattgcaattattttttcttacctaccaaaataaacatgaaagattttaaactttgatcatactctctttctggtttacgtgatataaatttaaaagtgatactagctttttttgtcctttatagataaatacctaaaataaaataaaaatctcaatctaaac

SEQ ID NO: 193140 - DNA, 669 bp, Homo sapiens
ctggtgttttcaaaaatgacaaaaacagcatgcttgattcttggctaatatttgcttattagttgatcagtattttgaaaaattacagatggcttctcctcaggaatagaaaattaaaggacattttattcctgctgtgtttattgtatgtttatctttataataaacacaaaaagaactaggaaaaagtacatttttaaatatcccgtaattaggtatcttttcaattaacaatttatgagtaaatttgcattctctgcttgtgacaatgcaaagacatttgcttaaattttatctctatatgcttgataatttaaaggtatttataaacagtacgattgcatccttgtcttcttatacatatcatgtttgtctctttgtttttggaaatgtgtttcataactttgctctcccagttagcaagcatgtgagttttttcttcctgcttcagctatcaattgagtgagtgagtcggcctctaccttacatagaccctaaaaacaaaatattgcaattattttttcttayctaccaaaataaacatgaaagattttaaactttgatcatactctctttctggtttacgtgatataaatttaaaagtgatactagctttttttgtcctttatagataaatacctaaaataaaataaaaatctcaatctaaac

SEQ ID NO: 193141 - DNA, 481 bp, Homo sapiens
  misc_feature (1)...(481): n = A,T,C or G
tcattctcagcaaacacaggaacagaaaaccaaacmctgcatgttctcactcataagtgggagttgaacaatgagaacacatggacacagggagggaaacgttacataccagggcctgttggggagtggggaatacagggagggagagcattaggacaaacacctaatgcatgtgggacttaaaacctagatgatgagttgttaggtgcagcaaaccaccatggcacatatatacctatgtaacacacctgcacattctgcacatgtatcccagagcttacagtnnaaaaaaaaaaaaaaaaaaaaaaaaaaaaattcaattgctttcttatatacaagcaaggaatatttataatttgaaatttgaaaacaggtcatttataatatcactaaaaaggaaatactcaggtttaaatctaacaaaatatatttaaaacccaatatatgagtaaactataaaatactaatgaaaaaagttgaa

SEQ ID NO: 193142 - DNA, 481 bp, Homo sapiens
  misc_feature (1)...(481): n = A,T,C or G
tcattctcagcaaacacaggaacagaaaaccaaacactgcatgttctcactcataagtgggagttgaacaatgagaacacatggacacagggagggaaacgttacataccagggcctgttggggagtggggaatacagggagggagagcattaggacaaacacctaatgcatgtgggacttaaaacctagatgatgagttgttaggtgcagcaaaccmccatggcacatatatacctatgtaacacacctgcacattctgcacatgtatcccagagcttacagtnnaaaaaaaaaaaaaaaaaaaaaaaaaaaaattcaattgctttcttatatacaagcaaggaatatttataatttgaaatttgaaaacaggtcatttataatatcactaaaaaggaaatactcaggtttaaatctaacaaaatatatttaaaacccaatatatgagtaaactataaaatactaatgaaaaaagttgaa

SEQ ID NO: 193143 - DNA, 600 bp, Homo sapiens
ccgcagcaggtgcctgcactcagccacacaaccaagcatagcacctgtctcccctgggggcaggatgggggtgggattctccaccttgggtgtgatactagcaaaagatctgggaaagaatggagggccctctgcagaagccacacattaccaccatcattaccactattattatccaatccattgccaggcacttgacctgcctggggatgatcacagccacctcagcaggggctctcagggcacagatcccttgactggggacagccaggagtgaggtcaccccagagtcctcagagatcagtctctcgggccctgcccaagagggcaggaggtagagatgtgatgaacagagtatttgtcagcccaggaggctggatgatgtattaacaggactttaatgagctctgggagggggagccacacttcatcgccctgagcactggtgcagggtgggaggtggaggggtraaatgatcaacctcacccccacctgctaactaaacctcttaatatcacccacagcagtccgcccattggaaacaactcagtactgccaagctgctggtcttgcccctggagtccagcgaaggccttatcc

SEQ ID NO: 193144 - DNA, 655 bp, Homo sapiens
gaattcccgcttccaacgaaatcctcaaaactagccaaatatccacttgcagattccacaaaaagagcatttcaaaactgctctatcaaaagaaaggttcaactttgttagttgagtagatacagcataaacaagtttctgagaatgcttctgtccagtttttatgggaagatatttcctttttcaccttagccctgaaakcgctccaaaagtccagttccagatactacaaaaggagtgtttcaggactgctctatgaaagggagtgttcaacttttgacttgaatgcaaacatcagaaagcagtttctcagaacgctgctgtgtgctttttatatgtattcccgcttccagcgaaatccccaaagctagccaaatatccacttgcagattccagaaaaagagtgtttcaaaactgctccttcaaaacggtggttcaattctcttagttgagtacacacatctcaaataagtttctgagaatgcttctgtctagttgttatgggaagatatttccttttccaacataggcctgaaagcgctccaaatgtccacttccagatactacaaaaggagtgattcaaacctgctctatgatagggaatgttcaactctgtgtcctgaatacaaacatcacaaagatgtttctcagaacg

SEQ ID NO: 193145 - DNA, 518 bp, Homo sapiens
ttatgggaagatatttcctttttcaccttagccctgaaagcgctccaaaagtccagttccagatactacaaaaggagtgtttcaggactgctctatgaaagggagtgttcaacttttgacttgaatgcaaacatcagaaagcagtttctcagaacgctgctgtgtgctttttatatgtattcccgcttccagcgaaatccccaaagctagccaaatatccacttgcagattccagaaaaagagtgtttcaaaactgctccttcaaaacggtggttcaattctcttagttgagtacacacatctcaaayaagtttctgagaatgcttctgtctagttgttatgggaagatatttccttttccaacataggcctgaaagcgctccaaatgtccacttccagatactacaaaaggagtgattcaaacctgctctatgatagggaatgttcaactctgtgtcctgaatacaaacatcacaaagatgtttctcagaacgctgcagtctgcaatttgtatgaat

SEQ ID NO: 193146 - DNA, 457 bp, Homo sapiens
tactacaaaaggagtgtttcaggactgctctatgaaagggagtgttcaacttttgacttgaatgcaaacatcagaaagcagtttctcagaacgctgctgtgtgctttttatatgtattcccgcttccagcgaaatccccaaagctagccaaatatccacttgcagattccagaaaaagagtgtttcaaaactgctccttcaaaacggtggttcaattctcttagttgagtacacacatctcaaataagtttctgagaatgcttctgtctagttgttatgggaagatatttccttttccaacataggcctgaaagcrctccaaatgtccacttccagatactacaaaaggagtgattcaaacctgctctatgatagggaatgttcaactctgtgtcctgaatacaaacatcacaaagatgtttctcagaacgctgcagtctgcaatttgtatgaattc

SEQ ID NO: 193147 - DNA, 518 bp, Homo sapiens
ttatgggaagatatttcctttttcaccttagccctgaaagcgctccaaaagtccagttccagatactacaaaaggagtgtttcaggactgctctatgaaagggagtgttcaacttttgacttgaatgcaaacatcagaaagcagtttctcagaacgctgctgtgtgctttttatatgtattcccgcttccagcgaaatccccaaagctagccaaatatccacttgcagattccagaaaaagagtgtttcaaaactgctccttcaaaacggtggttcaattctcttagttgagtacacacatctcaaataagtttctgagaatgcttctgtctagttgttatgggaagatatttccttttccaacataggcctgaaagcgcwccaaatgtccacttccagatactacaaaaggagtgattcaaacctgctctatgatagggaatgttcaactctgtgtcctgaatacaaacatcacaaagatgtttctcagaacgctgcagtctgcaatttgtatgaat

SEQ ID NO: 193148 - DNA, 452 bp, Homo sapiens
gtttctgagaatgcttctgtctagatttcatctgaagacaaycccgtttccaacgaaatcctcaaggctaggcaaatatcctcttgcagattccagaaaaagagtgtttcaaaactgctccttcaaaacggtggttcaattctcttagttgagtacacacatctcaaataagtttctgagaatgcttctgcctagttgttacgggaagatatttccctttccaacataggcctgaaagcgctccaaatgtccacttccagatactacaaaaagagtgtttcaaacctgctctaccaaagggaatgttctgctctgtgacttgaatgcaaacatcccaaagaagtttctgagaatgcttctgtctagattttacctgaagacaatcccgtttcccgcgaaatcctcaaagctatgcaaatatcctcttgcagattctacaaaaagagtgtttc

SEQ ID NO: 193149 - DNA, 452 bp, Homo sapiens
gtttctgagaatgcttctgtctagatttcatctgaagacaaccccgtttccaacgaaatcctcaaggctaggcaaatatcctcttgcagattccagaaaaagagtgtttcaaaactgctccttcaaaacggtggttcaattctcttagttgagtacacacatctcaaataagtttctgagaatgcttctgcctagttgttacgggaagatatttccctttccaacatrggcctgaaagcgctccaaatgtccacttccagatactacaaaaagagtgtttcaaacctgctctaccaaagggaatgttctgctctgtgacttgaatgcaaacatcccaaagaagtttctgagaatgcttctgtctagattttacctgaagacaatcccgtttcccgcgaaatcctcaaagctatgcaaatatcctcttgcagattctacaaaaagagtgtttc

SEQ ID NO: 193150 - DNA, 489 bp, Homo sapiens
aatgcaaacatcccaaagaagtttctgagaatgcttctgtctagattttacctgaagacaatcccgtttcccacgaaatcctcaaagctatgcaaatatcctcttgcagattctacaaaaagagtgtttcaaaactgctctatgaaaagaaaggttcaactctgtcagtagagggcacacatcacaaacaagtttctgagaatgcttgtgtctagttgttatgggaagatakttcctttttcaacataggcctgaaagcgctccaaatgtccacttccagatactacaaaaggagtgattccaacctgctctatgatagggaatgttcaactctgtgtcctgaatacaaacatcacaaagatgtttctcagaacgctgcagtctgcaatttgtatgaattcccgcttccaacgaaatcctcaaaactagccaaatatccacttgcagattccacaaaaagagcatttcaaaactgctctatcaaaagaa

SEQ ID NO: 193151 - DNA, 459 bp, Homo sapiens
gatactacaaaaggagtgtttcargactgctctatgaaagggagtgttcaacttttgacttgaatgcaaacatcagaaagcagtttctcacaacgctgctgtgtgctttttatatgtattcccgcttccagcgaaatccccaaagctagccaaatatccacttgcagattccagaaaaagagtgtttcaaaactgctccttcaaaacggtggttcaattctcttagttgagtacacacatctcaaataagtttctgagaatgcttctgtctagttgttatgggaagatatttccttttccaacataggcctgaaagcgctccaaatgtccacttccagatactacaaaaggagtgattcaaacctgctctatgatagggaatgttcaactctgtgtcctgaatacaaacatcacaaagatgtttctcagaacgctgcagtctgcaatttgtatgaattc

SEQ ID NO: 193152 - DNA, 459 bp, Homo sapiens
gatactacaaaaggagtgtttcaggactgctctatgaaagggagtgttcaacttttgacttgaatgcaaacatcagaaagcagtttctcasaacgctgctgtgtgctttttatatgtattcccgcttccagcgaaatccccaaagctagccaaatatccacttgcagattccagaaaaagagtgtttcaaaactgctccttcaaaacggtggttcaattctcttagttgagtacacacatctcaaataagtttctgagaatgcttctgtctagttgttatgggaagatatttccttttccaacataggcctgaaagcgctccaaatgtccacttccagatactacaaaaggagtgattcaaacctgctctatgatagggaatgttcaactctgtgtcctgaatacaaacatcacaaagatgtttctcagaacgctgcagtctgcaatttgtatgaattc

SEQ ID NO: 193153 - DNA, 638 bp, Homo sapiens
ccacttgcagattccacaaaaagagcatttcaaaactgctctatcaaaagaaaggttcaactttgttagttgagtagatacagcataaacaagtttctgagaatgcttctgtccagtttttatgggaagatatttcctttttcaccttagccctgaaagcgctccaaaagtccagttccagatactacaaaaggagtgtttcaggactgctctatgaaagggagtgttcaacttttgacttgaatgcaaacatcagaaagcagtttctcacaacgctgctgtgtgctttttatatgtattcccgcttccagcgaaatccccaaagctagccaaatatccacttgcagattccagaaaaagagwgtttcaaaactgctccttcaaaacggtggttcaattctcttagttgagtacacacatctcaaataagtttctgagaatgcttctgtctagttgttatgggaagatatttccttttccaacataggcctgaaagcgctccaaatgtccacttccagatactacaaaaggagtgattcaaacctgctctatgatagggaatgttcaactctgtgtcctgaatacaaacatcacaaagatgtttctcagaacgctgcagtctgcaatttgtatgaatt

SEQ ID NO: 193154 - DNA, 633 bp, Homo sapiens
gaattcatacaaattgcagactgcagcgttctgagaaacatctttgtgatgtttgtattcaggacacagagttgaacattccctatcatagagcaggtttgaatcactccttttgtagtatctggaagtggacatttggagcgctttcaggcctatgttggaaaaggaaatatcttcccataacaactagacagaagcattctcagaaacttatttgagatgtgtgtactcaactaagagaattgaaccacccttttgaaggagcagttttgaaacactctttttctggaatctgcaagtggatatttggctagctttggggatttcgctggaagcgggaatacatataaaaagcacacagcagcgttstgagaaactgctttctgatgtttgcattcaagtcaaaagttgaacactccctttcatagagcagtcctgaaacactccttttgtagtatctggaactggacttttggagcgctttcagggctaaggtgaaaaaggaaatatcttcccataaaaactggacagaagcattctcagaaacttgtttatgctctatctactcaactaacaaagttgaacctttcttttgatagagcagttttgaaatgctctttttgtggaatctgc

SEQ ID NO: 193155 - DNA, 351 bp, Homo sapiens
gaattcatacaaattgcagactgcagcgttctgagaaacatctttgtgatgtttgtattcaggacasagagttgaacattccctatcatagagcaggttggaatcactccttttgtagtatctggaagtggacatttggagcgctttcaggcctatgttgaaaaaggaaatatcttcccataacaactagacacaagcattctcagaaacttgtttgtgatgtgtgccctctactgacagagttgaacctttcttttcatagagcagttttgaaacactctttttgtagaatctgcaagaggatatttgcatagctttgaggatttcgcgggaaacgggattgtcttcagg

SEQ ID NO: 193156 - DNA, 351 bp, Homo sapiens
gaattcatacaaattgcagactgcagcgttctgagaaacatctttgtgatgtttgtattcaggacagagagttgaacattccctatcatagagcaggttggaatcactccttttgtagtatctggaagtggacatttggagcgctttcaggcctatgttgaaaaaggaaatatcttcccataacaactagacacaagcattctcagaaacttgtttgtgatgtgtgccctctactgacagagttgaacctttcttttcatagagcagttttgaaacactctttttgtagaatctgcaagaggatatttgcatagctttgaggatttcgygggaaacgggattgtcttcagg

SEQ ID NO: 193157 - DNA, 547 bp, Homo sapiens
tgttctactctgtgacttgaatgcaaacatcccaaagaagtttctgagaatgcttctgtctagatttkatctgaagacaatcccgtttccaacgaaatcctcaaggctaggcaaatatcctcttgcagattccagaaaaagagtgtttcaaaactgctccttcaaaacggtggttcaattctcttagttgagtacacacatctcaaataagtttctgagaatgcttctgcctagttgttacgggaagatatttccctttccaacatgggcctgaaagcgctccaaatgtccacttccagatactacaaaaagagtgtttcaaacctgctctaccaaagggaatgttctgctctgtgacttgaatgcaaacatcccaaagaagtttctgagaatgcttctgtctagattttacctgaagacaatcccgtttcccacgaaatcctcaaagctatgcaaatatcctcttgcagattctacaaaaagagtgtttcaaaactgctctatgaaaagaaaggttcaactctgtcagtagagggcacacatcaca

SEQ ID NO: 193158 - DNA, 547 bp, Homo sapiens
tgttctactctgtgacttgaatgcaaacatcccaaagaagtttctgagaatgcttctgtctagatttgatctgaagacaatcccgtttccaacgaaatcctcaaggctaggcaaatatmctcttgcagattccagaaaaagagtgtttcaaaactgctccttcaaaacggtggttcaattctcttagttgagtacacacatctcaaataagtttctgagaatgcttctgcctagttgttacgggaagatatttccctttccaacatgggcctgaaagcgctccaaatgtccacttccagatactacaaaaagagtgtttcaaacctgctctaccaaagggaatgttctgctctgtgacttgaatgcaaacatcccaaagaagtttctgagaatgcttctgtctagattttacctgaagacaatcccgtttcccacgaaatcctcaaagctatgcaaatatcctcttgcagattctacaaaaagagtgtttcaaaactgctctatgaaaagaaaggttcaactctgtcagtagagggcacacatcaca

SEQ ID NO: 193159 - DNA, 547 bp, Homo sapiens
tgttctactctgtgacttgaatgcaaacatcccaaagaagtttctgagaatgcttctgtctagatttgatctgaagacaatcccgtttccaacgaaatcctcaaggctaggcaaatatcctcttgcagattccagaaaaagagtgtttcaaaactgctccttcaaaacggtggttcaattctcttagttgagtacacacatctcaaataagtttctgagaatgcttctgcctagttgttacgggaagatatttccctttccaacatgggcctgaaagcgctccaaatgtccacttccagatactacaaaaagagtgtttcaaacctgctctaccaaagggaatgttctrctctgtgacttgaatgcaaacatcccaaagaagtttctgagaatgcttctgtctagattttacctgaagacaatcccgtttcccacgaaatcctcaaagctatgcaaatatcctcttgcagattctacaaaaagagtgtttcaaaactgctctatgaaaagaaaggttcaactctgtcagtagagggcacacatcaca

SEQ ID NO: 193160 - DNA, 344 bp, Homo sapiens
ttcctttttcaacataggcctgaaagcgctccaaatgtccacttccagatactacaaaaggagtgattccaacctgctctatgatagggaatgttcaactctstgtcctgaatacaaacatcacaaagatgtttctcagaacgctgcagtctgcaatttgtatgaattcccgcttccaacgaaatcctcaaaactagccaaatatccacttgcagattccacaaaaagagcatttcaaaactgctctatcaaaagaaaggttcaactttgttagttgagtagatacagcatacacaagtttctgagaatgcttctgtccagtttttatgggaagatatttcctt

SEQ ID NO: 193161 - DNA, 344 bp, Homo sapiens
ttcctttttcaacataggcctgaaagcgctccaaatgtccacttccagatactacaaaaggagtgattccaacctgctctatgatagggaatgttcaactctgtgtcctgaatacaaacatcacaaagatgtttctcagaacgctgcagtctgcaatttgtatgaattccmgcttccaacgaaatcctcaaaactagccaaatatccacttgcagattccacaaaaagagcatttcaaaactgctctatcaaaagaaaggttcaactttgttagttgagtagatacagcatacacaagtttctgagaatgcttctgtccagtttttatgggaagatatttcctt

SEQ ID NO: 193162 - DNA, 648 bp, Homo sapiens
gaattcccgcttccaacgaaatcctcaaaactagccaaatatccacttgcagattccacaaaaagagcatttcaaaactgctctatcaaaagaaaggttcaactttgttagttgagtagatacagcatamacaagtttctgagaatgcttctgtccagtttttatgggaagatatttcctttttcaccttagccctgaaagcgctccaaaagtccagttccagatactacaaaaggagtgtttcaggactgctctatgaaagggagtgttcaacttttgacttgaatgcaaacatcagaaagcagtttctcacaacgctgctgtgtgatttttatatgtattcccgcttccagcgaaatccccaaagctagccaaatatccacttgcagattccagaaaaagagtgtttcaaaactgctccttcaaaacggtggttcaattctcttagttgagtacacacatctcaaataagtttctgagaatgcttctgtctagttgttatgggaagatatttccttttccaacataggcctgaaagcgctccaaatgtccacttccagatactacaaaaggagtgattcaaacctgctctatgatagggaatgttcaactctgtgtcctgaatacaaacatcacaaagatgtttct

SEQ ID NO: 193163 - DNA, 622 bp, Homo sapiens
gtgattcaaacctgctctatgatagggaatgttcaactctgtgtcctgaatacaaacatcacaaagatgtttctcagaacgctgcagtctgcaatttgtatgaattcccgcttccaacgaaatcctcaaaactagccaaatatccacttgcagattccacaaaaagagcgtttcaaaacttctctawgaaaaggaaggttctactcctttagttgaggacacacatcacgagtaagtttctgagaatgcttctgtctagtttttatgggaagatatttcctttttcaccttaggccggaaagtgctccaaatgtccacttacacacactacaaaaagagtgtttcaaacctgctctgtgaaagggaatgttcaattctgtgacttgaatgcaatcatcacaaagaactttctgagaatgctgctgtctgctttttatatgtaatcccgtttccaacgaaatcctcaaatctagccaaatagccacttgcagattccacaaaaagagtgtttcaaaactgttctgtctaaagaaatgttcaactgtgttagttgaggacacacatcagaaactagtttctgagaatgcttctgtctagttgttatgggaagatatttcctttt

SEQ ID NO: 193164 - DNA, 622 bp, Homo sapiens
gtgattcaaacctgctctatgatagggaatgttcaactctgtgtcctgaatacaaacatcacaaagatgtttctcagaacgctgcagtctgcaatttgtatgaattcccgcttccaacgaaatcctcaaaactagccaaatatccacttgcagattccacaaaaagagcgtttcaaaacttctctaagaaaagraaggttctactcctttagttgaggacacacatcacgagtaagtttctgagaatgcttctgtctagtttttatgggaagatatttcctttttcaccttaggccggaaagtgctccaaatgtccacttacacacactacaaaaagagtgtttcaaacctgctctgtgaaagggaatgttcaattctgtgacttgaatgcaatcatcacaaagaactttctgagaatgctgctgtctgctttttatatgtaatcccgtttccaacgaaatcctcaaatctagccaaatagccacttgcagattccacaaaaagagtgtttcaaaactgttctgtctaaagaaatgttcaactgtgttagttgaggacacacatcagaaactagtttctgagaatgcttctgtctagttgttatgggaagatatttcctttt

SEQ ID NO: 193165 - DNA, 268 bp, Homo sapiens
accacgcctgctagatacatttttatatctcttcttagtcattgcttcctttctactgtattcccatcttattgttagacacaactcatctttaagtcggtaaaaggaaaaagccctcaagctcatcacatttcctttagcgattttcttgacgcctctcctggttctgaaggtcacatgatatatggctamatgagtttcacaatccatacgccacttggaagactgacagagagacttaggtcaattaagaaacgaagattatgag

SEQ ID NO: 193166 - DNA, 422 bp, Homo sapiens
ccctaaagcagcagttctgaaacctggctgtggaccagaatctcccagctaacctgctataaatagctgaatcaaaactccaagggtggggcccaagagtcttattcttttataagcaccccagggagttttcatgcagctattctggcactggctagttctatttgggaaacactgctcaaaaaatgccctactttggggacactggatgttctggcccaccactgcaaactcgcttggtgcggaagtcatctgcggccagacgggcgttgtcaatctgcagaaggacattggcattgtccactgtggcygtgaggatctgcaggatggaaagggcacaggtaatttgtcaaatggacttcacaagctggacttcactgtaacctacattaagctcttgcttcatgttcttgcctgaattc

SEQ ID NO: 193167 - DNA, 557 bp, Homo sapiens
gacacaaacagtctaaaaaaatttaaccctgataactcccttcccaggaaactacttgaggatgtgcttcactaaaacaaagggaaaaatraaaacaggaaggaggaagacattggatccagaaaacaaggaaagcaacccaggaaaaagaaggatttcaggatgatggtgaagagagattccaggatcacagctgagcaggagacccaaacagcacccagaacagacaagagcaggacagaaggccctaggagacacatcttcatgaggatgaaattgaaggaacacccagggttctaaaatactgaggagatttatgcttccagcagtgaatcaggaaacaaattaatgatcaatacatagaaagtttaggcaaattgaaaaagagatatttattccaaggaaatctaatatagtataaaatgtaatatagtataatatatgatttgactatgaataacatttaaatagtcatgataatgtaaacatttatttaacaaaaatatgaatatattgagaaggtgggaagaagatattttaaaaagaagtggggaggg

SEQ ID NO: 193168 - DNA, 557 bp, Homo sapiens
gacacaaacagtctaaaaaaatttaaccctgataactcccttcccaggaaactacttgaggatgtgcttcactaaaacaaagggaaaaataaaaacaggaaggaggaagacattggatccagaaaacaaggaaagcaacmcaggaaaaagaaggatttcaggatgatggtgaagagagattccaggatcacagctgagcaggagacccaaacagcacccagaacagacaagagcaggacagaaggccctaggagacacatcttcatgaggatgaaattgaaggaacacccagggttctaaaatactgaggagatttatgcttccagcagtgaatcaggaaacaaattaatgatcaatacatagaaagtttaggcaaattgaaaaagagatatttattccaaggaaatctaatatagtataaaatgtaatatagtataatatatgatttgactatgaataacatttaaatagtcatgataatgtaaacatttatttaacaaaaatatgaatatattgagaaggtgggaagaagatattttaaaaagaagtggggaggg

SEQ ID NO: 193169 - DNA, 554 bp, Homo sapiens
acaaacagtctaaaaaaatttaaccctgataactcccttcccaggaaactacttgaggatgtgcttcactaaaacaaagggaaaaataaaaacaggaaggaggaagacattggatccagaaaacaaggaaagcaacccaggaaaaagaaggatttcaggatgatggtgaagagagattccaggatcacagctgagcaggagacccaaacagcacccagaacagacaagagcaggacagaaggccctaggagacacatcttcatgaggatgaaattgaaggaacacccagggttctaaaatactgaggagatttatgcttccagcagtgaatcaggaaacaaattaatsatcaatacatagaaagtttaggcaaattgaaaaagagatatttattccaaggaaatctaatatagtataaaatgtaatatagtataatatatgatttgactatgaataacatttaaatagtcatgataatgtaaacatttatttaacaaaaatatgaatatattgagaaggtgggaagaagatattttaaaaagaagtggggaggg

SEQ ID NO: 193170 - DNA, 550 bp, Homo sapiens
acagtctaaaaaaatttaaccctgataactcccttcccaggaaactacttgaggatgtgcttcactaaaacaaagggaaaaataaaaacaggaaggaggaagacattggatccagaaaacaaggaaagcaacccaggaaaaagaaggatttcaggatgatggtgaagagagattccaggatcacagctgagcaggagacccaaacagcacccagaacagacaagagcaggacagaaggccctaggagacacatcttcatgaggatgaaattgaaggaacacccagggttctaaaatactgaggagatttatgcttccagcagtgaatcaggaaacaaattaatgatcaatacatagaaagtttaggcaaattgaaaaagagatatttattccaaggaaatytaatatagtataaaatgtaatatagtataatatatgatttgactatgaataacatttaaatagtcatgataatgtaaacatttatttaacaaaaatatgaatatattgagaaggtgggaagaagatattttaaaaagaagtggggaggg

SEQ ID NO: 193171 - DNA, 546 bp, Homo sapiens
aggtgtttcctagggtgctcatcagcacgcaattcaccagctgaggggaatgaggaaggaggagttgatggggtgtgaggagaagcaggctgggagaaggaggatttcaggtctgacgaggacatcgttctcaaggcakataccactcccttccaccctccaatgtagaaactgtgtgcagatgtgggggagcccatgggtagagttaagattcaagcgtgggagtcttcgggttaaaatacctgaaaaggtagagtggtgttaaaagaaaggcatggactttgcagacagacagaactgagtttgagctccagccgtgccacttactatctgcatgattttacgcaagttactgaaactctgaattctgggggttgtcaaattccaaaatgggcctgaccacacccacctcacagggttgcaagggcaacctcgtaaaataacctctgtagaatgcctccatggtgtcagtcagcacgtgtggacactcccccatcctgtgtcccacctcccacttccatagagcgtggaggtcttccaggaaga

SEQ ID NO: 193172 - DNA, 547 bp, Homo sapiens
aggtgtttcctagggtgctcatcagcacgcaattcaccagctgaggggaatgaggaaggaggagttgatggggtgtgaggagaagcaggctgggagaaggaggatttcaggtctgacgaggacatcgttctcaaggcagataccactcccttccaccctccaatgtagaaactgtgtgcagatgtgggggagcccatgggtagagttaagattcaagcgtgggagtcttcgggttaaaatacctgaaaaggtagagtggwgttaaaagaaaggcatggactttgcagacagacagaactgagtttgagctccagccgtgccacttactatctgcatgattttacgcaagttactgaaactctgaattctgggggttgtcaaattccaaaatgggcctgaccacacccacctcacagggttgcaagggcaacctcgtaaaataacctctgtagaatgcctccatggtgtcagtcagcacgtgtggacactcccccatcctgtgtcccacctcccacttccatagagcgtggaggtcttccaggaagag

SEQ ID NO: 193173 - DNA, 533 bp, Homo sapiens
tttgggttttgtttttaaatataataatgtttaaacagattaaaccaagtcttaaaaataacaggcacatattacatgaaagaaatcaaggaaatgtctcgggaagaaaaaaatcttagtgttaaaattcctaaatgtcattatagtcattatatattgttcaaaaatagcaatattctgattarttatatgcttgtttgaaaataaaataatttggtaaatttcccacatatttagtctagtacttagtcttaatataaaaagctggatttgccagcagaaaattgtaattacttttttatgaagtaaacacacattatatcactatcattgcatggaagagaaagtgaacaaaaaaagattaaggaataaaaaaaagaatatcactatcatataactacatacattaacaaagagacaaacatttcccactggagattaggagtttagcagaagtctctgaaaatactaaaaactgaaacaaaattaataattgttttttgtttgtttgtttgcttgttttttaactatgt

SEQ ID NO: 193174 - DNA, 533 bp, Homo sapiens
tttgggttttgtttttaaatataataatgtttaaacagattaaaccaagtcttaaaaataacaggcacatattacatgaaagaaatcaaggaaatgtctcgggaagaaaaaaatcttagtgttaaaattcctaaatgtcattatagtcattatatattgttcaaaaatagcaatattctgattaattatatgcttgtttgaaaataaaataatttggtaaatttcccacatatttagtctagtacttagtcttaatataaaaagstggatttgccagcagaaaattgtaattacttttttatgaagtaaacacacattatatcactatcattgcatggaagagaaagtgaacaaaaaaagattaaggaataaaaaaaagaatatcactatcatataactacatacattaacaaagagacaaacatttcccactggagattaggagtttagcagaagtctctgaaaatactaaaaactgaaacaaaattaataattgttttttgtttgtttgtttgcttgttttttaactatgt

SEQ ID NO: 193175 - DNA, 562 bp, Homo sapiens
ctcaggcacattgatggcatacacaaggatgtatgtgtgattggcagcaccaggccatgcttcccagtttttggtggcagtgggttacctgagtggtctggcccttgggcctccaggtggtgtgtgctgggatcagaggtggcaatagcaggccaggccaaaggaccttggtgacacttgtggcactggagatgacagtagcagctgggggccggaccttggatcccttggtagcatgcatgggcactggtagtggtgaaagcaggctgcatgggcatttctctggccccctatgaggaacatttaggtgggtacctaaggcagtgtgtggagcaggcttgtccacaggttaactgaagacacgtgcaggagcctttgccagtggctggtgaggcagccctgtctttatgctyctggatgccacgtgcaggtgccggtggggcagtaggactctccttggtattagtggtagatggggcctgggtaaaggcacagaggcctgggtggggtgggctgctcctcagggtcctggacagtgtatgtgagcactgatagcaacaat

SEQ ID NO: 193176 - DNA, 549 bp, Homo sapiens
tgtctattgctatgcaatagcacagtggttttgaaatagttaaatcaaataaatatttgaatttttaaagtaaagctcacataagttttgtctctctacctggccataactttagtaattgatgactaagatggcaatggtatctagagtccttcaatagcaaatgtgaccaaacagaatcagttctattcttaataccccaaattccatgtaaagctgcacatggacatctcccctggacatgtaacaggaaccttttagtycaaccgtgtggtttcactcagagtaagagtctatttctggggatttcaaaatggatccaaaaatgacgagctgtatcaactatagagttggtaaggaaaaaaaaaacaaaacgtagttcaactatgcttgacccagattaaggtatttgtctaacatttgtccatttttcaactgagggaaaattacaaaaactgggcacagtggcacacacctgtagtcccagctgctcctgaggctgaggcaggaagatcacttgaacccaggagttcaaatctgcagtgcgca

SEQ ID NO: 193177 - DNA, 404 bp, Homo sapiens
tgctaggaacttaagtatttcctataggaaaacatcagctaatacaaggaggaggaggtaacataccatctaaactgagatttacaaaaaaaggtagggggtggggtgggtttctgggtggggygggtttctgggtggggcattacaaaacaggatatttagaaatttttagctacgattttcaaaagcaaaatgttaaaaatagcactaatattggatctgtttatacatctcctttatttgcaagattttaacactttggactattcctactgtgaagtgctatcatactcagcattttctctaacctcaagaaaaatggttataattttgtatgaaatcacacaccagagaaataatatattataactggttgttgaaacaagttttctctacattcatga

SEQ ID NO: 193178 - DNA, 404 bp, Homo sapiens
tgctaggaacttaagtatttcctataggaaaacatcagctaatacaaggaggaggaggtaacataccatctaaactgagatttacaaaaaaaggtagggggtggggtgggtttctgggtggggtgggtttctgggtggggcattacaaaacaggatatttrgaaatttttagctacgattttcaaaagcaaaatgttaaaaatagcactaatattggatctgtttatacatctcctttatttgcaagattttaacactttggactattcctactgtgaagtgctatcatactcagcattttctctaacctcaagaaaaatggttataattttgtatgaaatcacacaccagagaaataatatattataactggttgttgaaacaagttttctctacattcatga

SEQ ID NO: 193179 - DNA, 426 bp, Homo sapiens
ttctagagttgctaggaacttaagtatttcctataggaaaacatcagctaatacaaggaggaggaggtaacataccatctaaactgagatttacaaaaaaaggtagggggtggggtgggtttctgggtggggtgggtttctgggtggggcattacaaaacaggatatttagaaatttttagctacgattttcaaaagcaaaatgttaaaaatagcactaatattggatctgtttatacatctcctttatttgcaagattttaacactttggactattcctactgtgaagtgctatcrtactcagcattttctctaacctcaagaaaaatggttataattttgtatgaaatcacacaccagagaaataatatattataactggttgttgaaacaagttttctctacattcatgacagttagcattta

SEQ ID NO: 193180 - DNA, 403 bp, Homo sapiens
gctaggaacttaagtatttcctataggaaaacatcagctaatacaaggaggaggaggtaacataccatctaaactgagatttacaaaaaaaggtagggggtggggtgggtttctgggtggggtgggtttctgggtggggcattacaaaacaggatatttagaaatttttagctacgattttcaaaagcaaaatgttaaaaatagcactaatattggatctgtttatacatctcctttatttgcaagattttaacactttggactattcctactgtgaagtgctatcatactcagcattktctctaacctcaagaaaaatggttataattttgtatgaaatcacacaccagagaaataatatattataactggttgttgaaacaagttttctctacattcatga

SEQ ID NO: 193181 - DNA, 395 bp, Homo sapiens
cgttccatagcttgaaaaaaatagctcaagaagtctggctctactcttcacttctgccatccctatggaattgtcagccagcacacagaaacggttctcagaaaacagaagcatcatcaayttctcagggttatggtagtgatttttaaggccaaaacatcccagtctcatctagtaacctattcaagcagttacagtttataagcagtcgcttgagaggtaacactttaaatctccagtcatttacagtgtcattggtttacttttgccctcagaaaaagttccaaattccttaacatgtaatataaacacccacattcatttggttcttgtcaagttactcaggcttatctctcaccacttactttactctgcccctttgctctaggatccag

SEQ ID NO: 193182 - DNA, 420 bp, Homo sapiens
atgtgacaccacacctggcttctttwgattttttgtggacctgtataattgaacatatttatggtatacacagtgatattttgatatgtgtaaacaatgcataatggtcaaatcaggctaattaatatattccatcacctcaaacatttaccatttctttgtgttgtgaactttcaaaatcctcccctctagctttttaaatattagctagccaagccaggtgtagtggcacacacctgtaatcccagctgtttgggaggctgaggcaggagaatgacttgaaccccggaggcggagattgcagtgagctgagattgcaccactgcacgccaagcctgggtgacagagcaagactctgtctcaaaaaaaaaaaaaaaattagttaaccatattcaccctacaatgcaacagaacactaga

SEQ ID NO: 193183 - DNA, 420 bp, Homo sapiens
atgtgacaccacacctggcttctttagattttttgtggacctgtataattgaacatatttatggtatacacagtgatattttgatatgtgtaaacaatgcataatggtcaaatcaggctaattaatatattccatcacctcaaacatttaccatttctttgtgttgtgaactttcaaaatcctcycctctagctttttaaatattagctagccaagccaggtgtagtggcacacacctgtaatcccagctgtttgggaggctgaggcaggagaatgacttgaaccccggaggcggagattgcagtgagctgagattgcaccactgcacgccaagcctgggtgacagagcaagactctgtctcaaaaaaaaaaaaaaaattagttaaccatattcaccctacaatgcaacagaacactaga

SEQ ID NO: 193184 - DNA, 514 bp, Homo sapiens
ttggtattcatttctatttttattgcactgtrgtccaagagaatggtgttgtgtgatttcattttttaaaaatttatcatgacttgctttatggtcaaacatgttgttgatcttggagtatgttctttgtgcagatgagaaaaaagtgtattctgtagttgtttggtggagtattctgtagatgtctgttaggtccaattagtcaagtgttaaatttaagcccagaagttctttgttagttttttgtctcaatgatttgccttaacactatcaatgagatgttgaagatccccactgttattgtgtgactgagtcttttggtaggtctggaagtacttggttgtttttgaatgtgggtgctccagtgttgggtgggtatgtatttaggatagggatgtcttcttggcgaagtgaatcctttatcattgtgtaatgcccttcttcatccttttttggctgttgttggtttaaagtctgttttatctaagaataacaaccccttgctttttgcatt

SEQ ID NO: 193185 - DNA, 486 bp, Homo sapiens
atttttattgcactgtggtccaagagaatggtgttgtgtgatttcattttttaaaaatttatcatgacttgctttatggtcaaacatgttgttgatcttggagtatgttctttgtgcagatgagaaaaaagtgtattctgtagttgttkggtggagtattctgtagatgtctgttaggtccaattagtcaagtgttaaatttaagcccagaagttctttgttagttttttgtctcaatgatttgccttaacactatcaatgagatgttgaagatccccactgttattgtgtgactgagtcttttggtaggtctggaagtacttggttgtttttgaatgtgggtgctccagtgttgggtgggtatgtatttaggatagggatgtcttcttggcgaagtgaatcctttatcattgtgtaatgcccttcttcatccttttttggctgttgttggtttaaagtctgttttatctaagaataacaacccct

SEQ ID NO: 193186 - DNA, 455 bp, Homo sapiens
gtgttgtgtgatttcattttttaaaaatttatcatgacttgctttatggtcaaacatgttgttgatcttggagtatgttctttgtgcagatgagaaaaaagtgtattctgtagttgtttggtggagtattctgtagatgtctgttaggtccaattagtcaagtgttaaatttaagcccagaakttctttgttagttttttgtctcaatgatttgccttaacactatcaatgagatgttgaagatccccactgttattgtgtgactgagtcttttggtaggtctggaagtacttggttgtttttgaatgtgggtgctccagtgttgggtgggtatgtatttaggatagggatgtcttcttggcgaagtgaatcctttatcattgtgtaatgcccttcttcatccttttttggctgttgttggtttaaagtctgttttatctaagaataacaacccc

SEQ ID NO: 193187 - DNA, 514 bp, Homo sapiens
ttggtattcatttctatttttattgcactgtggtccaagagaatggtgttgtgtgatttcattttttaaaaatttatcatgacttgctttatggtcaaacatgttgttgatcttggagtatgttctttgtgcagatgagaaaaaagtgtattctgtagttgtttggtggagtattctgtagatgtctgttaggtccaattagtcaagtgttaaatttaagcccagaagttctttgttagttttttgtctcaatgatttgccttaacactatcaatgaratgttgaagatccccactgttattgtgtgactgagtcttttggtaggtctggaagtacttggttgtttttgaatgtgggtgctccagtgttgggtgggtatgtatttaggatagggatgtcttcttggcgaagtgaatcctttatcattgtgtaatgcccttcttcatccttttttggctgttgttggtttaaagtctgttttatctaagaataacaaccccttgctttttgcatt

SEQ ID NO: 193188 - DNA, 448 bp, Homo sapiens
attttggttctgccatgatgtttttagctgtttgctttgtactctcgattgtgtagttgtgtaatagggtctgtgggctatgtacttaggtgtgtttttgtggtagtgggtattgttctttcttttccatatttagaactccttaagaatctcttgtaagtctggtctagcggtaatgaatttctttagtgtttgtctggaaaagattgtatttctctgtcactgatgaggcttagattggagtggtatgaagttcttggctgaaatttctttaaggatgctgacaacaggccccactttctggcttataaggtttttgccrgaaagaggtcagcttttcacctgatgcagctgttatagctgcctgtgagatttttcctttcgtgttgaccttggaaagtctgatgggctgtgtatcttggggatggttgtagaggttctctgaatt

SEQ ID NO: 193189 - DNA, 544 bp, Homo sapiens
agtcaattctataatacataaagtcatagaaacgataggaagtcacttaatatttgcttttggaaggtgtttttttgtttttgttttttgagaccggagtcttcctctattgcccaggttggagtgcagtggcgcaatctcggctcactgcaacctccaccttctgggttccagcgattctcctgcttcagcctcctgagtagctgggactacargcgttcaccaccatgcccagctagttttttttttgtatttttagtagagatggggtttcaccatattggccaggctggtctcgaactactgacctcatgatccacccacctcggcctcctaaagtgctgagattacaggtgtgggaaggtgtcttttaaattgtagtgcatatagttataactaacagctgtgaattcagagctgtaaaaataaagcaaagaaaccacattgtgtttgagtcagcaatctttaggtctctactaagttatcctaaatataatcctatgttagtccctaaacatacttagtccctatattctaaatataa

SEQ ID NO: 193190 - DNA, 544 bp, Homo sapiens
agtcaattctataatacataaagtcatagaaacgataggaagtcacttaatatttgcttttggaaggtgtttttttgtttttgttttttgagaccggagtcttcctctattgcccaggttggagtgcagtggcgcaatctcggctcactgcaacctccaccttctgggttccagcgattctcctgcttcagcctcctgagtagctgggactacaagcgttcaccaccatgcccagctagttttttttttgtatttttagtagagatggggtttcaccatattggccaggctggtctcgaactactgacctcatgatccacccacctcggcctcctaaagtgctgagattacaggtgtgggaaggtgtcttttaaattrtagtgcatatagttataactaacagctgtgaattcagagctgtaaaaataaagcaaagaaaccacattgtgtttgagtcagcaatctttaggtctctactaagttatcctaaatataatcctatgttagtccctaaacatacttagtccctatattctaaatataa

SEQ ID NO: 193191 - DNA, 346 bp, Homo sapiens
gaattctcataccatacagtttacccattgaacgtgtacaattcatggtctcttaatatattcacagagttgcataaccatcaccatcatcaattgtaggacattttcatgaccctgaaaagaatcagcaatctattttgtttccmtagattagcccattctggacaccacgtatcaattggatcacacaatgtgtggtggtcttttgtgactggcttcttctacttagcataacatttttaaggttcattgtgttgtaacatgtatcaatatttaatttcatcttattgctgagtaattttccactgtatggacataccactaatttatttagccattcatccgt

SEQ ID NO: 193192 - DNA, 442 bp, Homo sapiens
ctggtgttcaaagcttacaggtaacgtcccatgggatgggcagagttttcctctgcctcccaggttctgtaagcattgggagcatgacccagcccacagcagatgggatcattggccttgagtgtatggttaccttgcctgtgatcagaggaaggtcagcccagcacgttcaaggggagtttctaaaggctgtggtcagyagtggccagtgatgatgactgccctttggccaggttggaggagtggagcacacacgttaaacttggcttcctcgctgggtgtggtagctcacgcttgtaatcccagcactttgggaggcaaaggcaggattaaaaacttaaatctaaaatgaaaacatattaaaaccttggacgataacctaggaaataccattgcggacgtaggacctggaaatgatcttcatgacaaagatgccaaaagt

SEQ ID NO: 193193 - DNA, 435 bp, Homo sapiens
aagggatccccaacacagcacagctggtctaccaaaaagtagccagaatcattctttaagcaggtcccttatcccatttctcctgactggaggagacctcccaactggggtctccagccacctccttacatgcactttcgagccagcaatargtcagtacgctgctgggctggagcttccagaggaagtggcaggcagccatctttgctgtttcacagacttcactgatgatacctccagctatgggaaaaaccgaggcaactagggtatagtgcgaacccccagcaaactgcagcagccctgcagaagagtggccagactgttaaaagaaaaacaagcaggaaacaacaacaataacaatttaaaaagccacaaaaaccccatcctcaaggtcaaagtttaagatagacccacagagatgagaaataaccccaa

SEQ ID NO: 193194 - DNA, 435 bp, Homo sapiens
aagggatccccaacacagcacagctggtctaccaaaaagtagccagaatcattctttaagcaggtcccttatcccatttctcctgactggaggagacctcccaactggggtctccagccacctccttacatgcactttcgagccagcaataagtcagtacgctgctgggctggagcttccagaggaagtggcaggcagccatctttgctgtttcacagacttcactgatgatacctccagctatgggaaaaacygaggcaactagggtatagtgcgaacccccagcaaactgcagcagccctgcagaagagtggccagactgttaaaagaaaaacaagcaggaaacaacaacaataacaatttaaaaagccacaaaaaccccatcctcaaggtcaaagtttaagatagacccacagagatgagaaataaccccaa

SEQ ID NO: 193195 - DNA, 435 bp, Homo sapiens
aagggatccccaacacagcacagctggtctaccaaaaagtagccagaatcattctttaagcaggtcccttatcccatttctcctgactggaggagacctcccaactggggtctccagccacctccttacatgcactttcgagccagcaataagtcagtacgctgctgggctggagcttccagaggaagtggcaggcagccatctttgctgtttcacagacttcactgatgatacctccagctatgggaaaaaccgaggcaactagggtatagtgcgaacccccagcaaactgcagcagccctgcagaagagtggccagactgttaaaagaaaaacaagcaggaaamaacaacaataacaatttaaaaagccacaaaaaccccatcctcaaggtcaaagtttaagatagacccacagagatgagaaataaccccaa

SEQ ID NO: 193196 - DNA, 573 bp, Homo sapiens
gccttatctttcagagtatgtattttcttcttaaaatctgtgcatattcttttgttacttccaaaactggatcttgattcagattttccttgtgtgtaaatcctagaggagaagctatataggatccaggttcatatttagtagcagctgaaaaaaaaagcaagaattatattattattattattgttattattttaagatagggtctcactctttcacctatgctggagtgccrtggtgtgatcacaggtcactgcagtcttgtcctcccaggcttaagcaattctcctgcctcagccccaagtacttggaactgcaggcatgagccactgtgcctggcaagcttttgtattttttataggggcagggtttcgtcatgttggcacaggctgctctcaaactcctgggctccagtgatctgcctgcctcaggctcccaaagtgctgggactacaaacgtgagccaacatgcctggccaaagaattatattctatatatttcatagttaactaagtgcaaatcagtaaaaaagagttgagagctttttcagtgttaacaagaatgaaaagtatg

SEQ ID NO: 193197 - DNA, 573 bp, Homo sapiens
gccttatctttcagagtatgtattttcttcttaaaatctgtgcatattcttttgttacttccaaaactggatcttgattcagattttccttgtgtgtaaatcctagaggagaagctatataggatccaggttcatatttagtagcagctgaaaaaaaaagcaagaattatattattattattattgttattattttaagatagggtctcactctttcacctatgctggagtgccatggtgtgatcacaggtcactgcagtctygtcctcccaggcttaagcaattctcctgcctcagccccaagtacttggaactgcaggcatgagccactgtgcctggcaagcttttgtattttttataggggcagggtttcgtcatgttggcacaggctgctctcaaactcctgggctccagtgatctgcctgcctcaggctcccaaagtgctgggactacaaacgtgagccaacatgcctggccaaagaattatattctatatatttcatagttaactaagtgcaaatcagtaaaaaagagttgagagctttttcagtgttaacaagaatgaaaagtatg

SEQ ID NO: 193198 - DNA, 459 bp, Homo sapiens
tcaggcaagtaggcaagtacttaggaacatgattactacagcatgccacttttcaattttaatctttaatacataatataaaagtaatgattattacataaaaatgaaaaatagaaaattgtataaaaaggtagaaatctgcaattctrttttcccaaatacctgtgataccagtgaaaaactgttataaatttctttctgattttcatacaagttaaaatgcaaataatatattattttgcacaacttaatttttgtttgttcgtgtatcagtaggccatcaacttctcctcatgtcaatttacatggcttccttcattctttccaaaggctgaaatgtattcagttacaagctgaaacagaaattgctaagttcctcctagggtgaatgccattaagctttggtacttcataatttcaatttttaaaaattatgtaatttttatcatataaaactct

SEQ ID NO: 193199 - DNA, 342 bp, Homo sapiens
acttgagaagagctagtaaccattttgtagattttaaagcrttagtttgcaggaactaattatggttaatacaagtgataataactccaggatacacatgtctaacactgattatttcactcagctccaggctaatggattcacatttctttaagacaataacagacactgaaaaaagtaaaatattcagaaatagctcttgattcttaccaaccaccttaatctatttctttcctattctgttctatattagtatgtatcatccatatacacctcttgtttaagcctaaaacataagtatttgctttgatttttgcctttttctcaaccaccataggtaat

SEQ ID NO: 193200 - DNA, 539 bp, Homo sapiens
accttagtatcctgttccttcggcaacttgctcccactagtttaagcattcactgatgattcttgcctgaataaactattcttatgatggctcttgtgatagacaaaatcatgctctctgcaactgatgtccatgttctaatccctagaacctatgaatatgttagttaacatgataaagatgaattaaagttgaagatgttattaaggttgctaatctgctgaccataaaatagaattatcctggattgtgtgagtaaaaccagtgtaaccagaaaggtcattcaaagtggaagaggggggcagaagagagagtcagtcagarggagatgtgacaatagaagaacatcaggattatgtgataagtaatagatttgctttcactggttttgaaaatggaggaagtggccatgaactgaagaatgtgggctccatctgaaatctggaaaaggcaagaagacagatttttctctacagcctccagaaaagaacccatccatcctaacacctggcttttagcccagtgatatccctgtcaaa

SEQ ID NO: 193201 - DNA, 529 bp, Homo sapiens
gagaacaccagtgaggaaacttcccccatgatccaatcacatctcactagcatcctcccttgacatatggggattacaatttgagatgagccaaaccatatcactctacttctggtccctccaaaatcttatgttcttctcacatttcaaaacacaatcctgcctttccaataattccccaaagtcttaattcattctagcattaactcaaaagtccaagtccaaagtctcatctgagacctggcaaggttcttctgcctattagtctgtaaaataaaaaacaagttagttaattccaacatacaatggatgtattagtccgtttttatgcttctgataaagacatacttgagactgggcaatttgtaaaagaaagwggttcaactggacttacagttccatgtgcctggggaggcctcacaatcatgttggaaggcaaggaggagcaagtcacgtcttacgtggatggtggcaggcaaagagagagattgtgcagaaaaactctcgtttttaagatcatcagatcttg

SEQ ID NO: 193202 - DNA, 399 bp, Homo sapiens
tggttatcattttttgatacttccatctcagatatcaatatgttrgtaaagatggcccaagaaaactattagaaaaaaaaggtggccttaagtcaaattctgataaaagtggcttttctcatttctacttctccaattagttaaagaagatgcctgacaaaacagtaatataatttaagaattaaaaaattgagatatgggttgttttctctctaatattttgaaagttaagtggtaatcttgactcacttatagaagttaagtcatttgaacaaacctacagtttagtcacttattgctgtatgtcacactaactccaaatcttatgccttagaatgataatgatttatcaatgttcatgcttctgtatattgggaaaagctcagctgggtcgtcctg

SEQ ID NO: 193203 - DNA, 374 bp, Homo sapiens
gggagacgatgaagaaaacatcacaacccagttacacaaagagtcagaggcagaggtaaatttgaccttgggtttccctgactccaratctataacttcacaatagcacaatggcttctcagttattatatgctactttctcattattacttgaaaatctaggaataataggggagagtaaaaagatgaaaactatttttccctaggctatcactgctttctacatttcctacaattctgctttcttgaccagtggcttgcatacgactccaaggtaatttttcttaaaattttagtgattatgttctcctttcatatagttattttgtgtctatttttattctccaagattctactaatagaatagacaagaa

SEQ ID NO: 193204 - DNA, 526 bp, Homo sapiens
tcatctcaaaaaaaaaaaaaaaaaaaaaggcgaagcagatgaaaagattcttttcaaaagaagacatacatgcagccaacaatcatgtgaaaattmctcaacatctctgatcattagaaaaatcaaaaccacaatgagataccatcttacaacagtcagaattgctattattaagaaaataaaaaataacagatgctagcaatattgtggaagatagagaatgcttatacactgctggtgggagtgtaaattagatcaaccattgtggaaagcagtgtggctattcctcaaagaactaaaaacagaaataccattagactcagcaatctctttattgggtatatacccaaaggtatataaattattctatcataaagacacatgcacttgtatattcatttcagcactattcacaacagccaagacatgaaatcaacttaaatacccatcaacagtaaactggataaagaaaatgtggtacatatatgccatagattctatgcaatcattaaaaaaagaacaagat

SEQ ID NO: 193205 - DNA, 605 bp, Homo sapiens
aacagtagcaatggctttcaggactttgcctctctaaccttctctcagtgggatagaggaaaatgggtagaaactggccagttggctgaccagaactttgtcaacgaaaaaagctagagggcatttcctgctggtggcaactgtcactggggatgggctgctaaggattcttattcctcaaaatgtcacagtaaggaaattacctaattaatcccccagactcaagaatctgcccttgagacccactaagatgctataaaagtaagagtctctatwcagagactggcaatttgttctctaaagagacaaccagtaaatattttaggcttacaggccatggggtctctgttgcaactacttatctttgccattgcagactgaagtagcaataaacctaaggaaacacatggttgtggctgtatcccaataagactttacttacaaaataatgtggtgggctagatttgaccctttggctatagttaactgtacccggctctatttcatattctctttcatacaaaaatacatctcaccacatggaaattctgagtaagctgtaaaaccaaaacacttcttgcagatttttaaaaatcactgtagcc

SEQ ID NO: 193206 - DNA, 539 bp, Homo sapiens
aaacaatttaatgtgagattgctccattccatgtgactaaaaatcatctgaaaaaaatattttgtggataaaacattaatgaaatttgttagtttgagatacaaatgaggcatcacttaccataccttacttaggtcaytctggctattacccagtctgattgtcttccttccaataaatacaattttaattagcccatgttcatcttattagattactttaggttcatgaatttcttcagagaacagctttgtctctacttgttttattattattggggctgattatacatcctaacataaggaaactgtgaagctaattaacattctactccccttattaatcaaactataattgaggtggccatactgaaccagacaacaacactaacctttaaatttcatcctctgatccacattcccacatgaagtctttccatttttcattagtttttttctgtttacatcttgaagacacttttatatttctgtgacaggctccataaaaagccagtttgcattttaattttagcattgtat

SEQ ID NO: 193207 - DNA, 525 bp, Homo sapiens
tatatttatataattcctcttggcctttgtcagatggatagattgcaaaaattttctcccattctgtaggttgcctgttcactctgatgatagtttcttttgctgagcagaagtgttttagtcatgaagtcttcgcccataccatatctatgtcctgaatggtattgcctaggttttcttctagggtttttatagtttatatatatatatatatatatatatatatatatatatatgtcatatatagtgacatacmgcatatatatacataaacagacatatatacatctatgtgtgtgtatatatgtgtgtgtatatatatatttatatataaaaagatgtatatatttatatatatatacacacacacacatagatgtatatatatacagtatgtcacaatatatttatataatttctcttggcctttgtcaggtggatagattgcaaaaattttctcccattctgtaggttgcctgttcactgatgatagtttcttttgctgagcagaagtgttttagtcat

SEQ ID NO: 193208 - DNA, 565 bp, Homo sapiens
tgttcatatagcaatttcttttgaatctttgtcatgaaatctttgctagagcctatatcaggaatatttgtaggttttcttctagcatttttatagttatatggttccatatgaatgttagattttttttctaattaagtgaaaaatatcactgatagtttgataggaatagcattgaatctgtaarttgctttgggaagtatggccattttaaacatattgattcttcctatccattagcatggattttttttcccatttatttctgtcatctcttatttttttcaacagtgtcttgtaattttcattgtaaaaaattttcaccatcctgattagctgtatttctagttattttcatatgattattgtggatgggactacattcttcatttgtctatcagattggatgttgtagtgtatagaaattctaatttttgtacattgatttttgtatcctgaaactttgctgaagttgtttattagatctaggagcctttaggcaaagactatggggttttccaggtataaactcatgtcatctgcaaacagagatagtttgacttcc

SEQ ID NO: 193209 - DNA, 509 bp, Homo sapiens
tgaagcagagataactactaacactatgctctatctgaaagccacctacttactgtattaagcagtgagtaatattatttgcatcatctcttccaattcttataacaatcctattaagcaagttctattattctcttcatattatagatgagagttaaaaacattaactgacttagccagggttacacagctagkaaggagtgaaacaagagcagacatgtttgtggaaataaaaatactttgtattggaatagttctcacttacatgtagaatcttaaaaagaaaaggtcaacttcatagaaacagagaaccgaaaagtgatcaccaggggcagggtagggaaggaaatggggagatggaggttaaacttgtagttttgtagaataattaagtctttagatctaatgtataggaggaggactacagtcactaatactgtattctatgtcacaaatttgctgagagtagattttaagtgttcttagcacacacatacacacacatgcac

SEQ ID NO: 193210 - DNA, 542 bp, Homo sapiens
tgcaagcattagcctgagagcacccttcttcagaggtctgacatccagcttctctgggccctcctgccagctcctagttgctgaaaattctaccacttccctgggcccccatgtcctaagagtgggagctgcttcctgcagttactacctttatgtcatcttggtgtttccttttccacttctcagtccctccatcctggtttaaccagttctctacattaaataatttctggtaaaataacgaatttctgattgatgcaccgatatctggtgaaatctggtttctgattgatrcactgatatcttgtcccagtttgaggaatttgaaacagaactacaagtgtccttctccctcagattcgcaacttagtggggaaataatagaaaagcacaaatatgtataatacagacagaaatttattggcaccataaaaaacatacaaagaaagaacttgagaactttccttgtttacaaacttaaggaaaaacgttcttgtggctatgagaatcagacagtcttcaaagacaaggggacaatttta

SEQ ID NO: 193211 - DNA, 594 bp, Homo sapiens
aagaattcatctgagagtcagatcccttcctggctggtgcatccgtccgccacatgacaagcagtggggaagtcaatagcaccctcgcccggctccacctgtgatcctggagaacaagagaggagccggctsgagggaagaaaatcctgatcttgtgatttcaattacagggaggtgaaaaattatttgatatctgagcttgctaaaggctcctattccttctgctccaaagatctttcctgctaaactgaacaaaagaggagaaagaagtggagatgcatactgaggggaaggggtagtggaaaagaaagccggcacagcaggaggagagcagatgacaatgcagacacaagaaaggacttctctggattcttcctaagtggaattgacacagcgctggctctttcattagacttctctcatcctttcccctgctctcgatctctcatgccaagaattgcatttggatttttgaatctacattgatagcacagatttggctgttactctccaataataatgtcacttcggcccccgtgtctggggaaagagagcaagtatgatggtggcccccgccagggccccagcccagcc

SEQ ID NO: 193212 - DNA, 594 bp, Homo sapiens
aagaattcatctgagagtcagatcccttcctggctggtgcatccgtccgccacatgacaagcagtggggaagtcaatagcaccctcgcccggctccacctgtgatcctggagaacaagagaggagccggctggagggaagaaaatcctgatcttgtgatttcaattacagggaggtgaaaaattatttgatatctgagcttgctaaaggctcctattccttctgctccaaagatctttcctgctaaactgaacaaaagaggagaaagaagtggagatgcatactgaggggaaggggtagtggaaaagaaagccggcacagcaggaggagagcagatgacaatgcagacacaagaaaggacttctctggattcttcctaagtggaattgacacagcgctggctctttcattagacttctctcatcctttcccctgctctcgatctctcatgccaagaattgcatttggatttttgaatctacattgatagcacagatttggctgttactctccaataataatgtcacttcggcccccgtgtctgggkaaagagagcaagtatgatggtggcccccgccagggccccagcccagcc

SEQ ID NO: 193213 - DNA, 441 bp, Homo sapiens
ctttctgcactacatcatgaaggttaaaaactgtaacagatatattttactacatgaatataattggaaacttttaaaaagtttatsattaattctaatgaatatgtggcaaaagttggtaactaagcaaacattacactaaatcttcatgtttcttcatagagtgctttcttcaaattaatcaaaatcataaatatatgagacctaaagaaatccaactataattaattttaacactggaacagctaatagcaaaaaaatatgctaatgaaaactaaataaaatgatatttcctcttcaaatagtcaataaaacatgtgcatagttgatatggtttggctgtgtccccacccaaatctcatcttgaattgtagttccagtaatccccacatgtcatgcaagggacccggtgggaggtaattgaatcatgaaggcactttc

SEQ ID NO: 193214 - DNA, 571 bp, Homo sapiens
tgtgcatttttctaaggagatgaatcataattctcaaaggattctatgacttgcaaatccatgaaatccatatttttttaaaagtctaggaagtaccttgggataaggcagaaacttccaaatataacatgyatgtgaaggtacctggtagaaagtaaaatataaactgcaaccaggttggaataatgccatagtcactagcttgagaggaaataatgtgggatgggctctgaatgtgtgccttccccaggagagagcatgttggttccaggttagaagcccaaaatatattcctaacatgaaggttgacgtacagtggtttttaaaaatgaagaagtcagtgaaactatctttggaaaactgggagctcagaggaagaatgaagaaatctttgagagcattagattcatagtaagcaagagggttattttgtgttctgaactatttaacaaaatatctgtaggcagcatccaggggcagcagtggggtcatggtctgggtgtgcttcaatctaggaccgagaaagaaaaatattgtgctttccagtaatgaatgaccgtaactctcaact

SEQ ID NO: 193215 - DNA, 322 bp, Homo sapiens
ctgccatgaaaccaggacctatcaagcagccactgattcttttcttctattgaatattccctggatgtggtacttatatgaccttcgacagaaatggaatcacactttgagttacatttaaattacatttaagtaaaattttatttttataaaagtacatacaaagagtcaataacacagggctaataataaaaaccarcattctctggctccatctctcccacccttccctatacccaagtacctgtctccagaagaaaccaagtgcctctctccagaagtaaacaatttcaactgttttaaatgtttccttttgtagtta

SEQ ID NO: 193216 - DNA, 588 bp, Homo sapiens
ggccaggtgtggtggctcacgtgtgtaatcccagaactttgggaggccgaggagggtgaatcacctgaggtcaggagtttgagatcagcctgaccaaaatggagaaaccccgtctctactaaaaatacaaaattagcccggcgtggtggtgcatgcctgtaatcccagctactcrggaggctgaggcaggagaatctcttgaacccgggaagcagaggttgcagtgagccaaggttgtgccattgtactccagcctgtgcaacaagagcgaaaatccatctcaaaaaataaataaataaataaataaataaataaaattacaaagagaaactgacaaattcactatcatagtgggaatcacttaacatttgttattgataagtcaaactaacatccccaatagtagagatacaggaaatttgaacaatacaatttacaggcttgagagagataaatacatagataagtagatagaaaactaagtactcaataattaaagaatatacattttctatctgctttatatacactgtaatatttattacaacattacatactaagctcttaaaaaatctcagcaaatctggt

SEQ ID NO: 193217 - DNA, 532 bp, Homo sapiens
tggggtctatttcctcaccaaaaattcaacaataatcaatcatactgccagacaaactttgtttccctactcctacctcctacattagtcktaaaattattagattttaaaacatttagatactgtaatgtatctactctcattagaaatcagataaagaacacagaaggactcagtttcaaaatactgtaatgtatctattctcattagaaatcagatacagagcacagaaaaattcagtttcaaaacttattaatctctattatgaacaattatatgccaatatatttaaaaacctagaggaaatggctaaattcctggacacatacaacctgccaatattgaaccaagaagaaatagcaagactgaacagaccaaaaacaagtaatgagattgaaccagtaataaaaacttcccaacaaagaaaagtccaggactggatgacttcgtagctgaattctactgaactcttaaagaattaatacaaattcttctattctaggaggccagtgtaactttgataccaaaacca

SEQ ID NO: 193218 - DNA, 571 bp, Homo sapiens
ctaaaaatgtagataaaagagccatcagtttgcaagtaggaatcatccctaagagagcaatcccaacatggatgactggtgccattttgtggtcaaactttaactggttgaagacaaaatgagaaaagtaactataatattgtgttttcaaatacatacatgtaaacttcccaactctggtagtagacataatactatggcataagatgtggctgtctctctattttacctttttagtgttataatgttcagtattaaataaaataatggtaattctagattgtggtttagtaggatttttaaaaattattgtagtgaagcaaactatgtcctcaattttaaggcatgatacgcaaatatctgggaacttgttctctagaaacatgtttgaggggttaggaaaagaaacaaaataaaacatcaacataaatctttcaatcccctagaaattgtagaaaacttacagagggctttactgaagtcaggacccacaagaactgcacagaaagctgagagacaggacrcacctctctctcagggtgaagggtctggagagaggacactgggaccc

SEQ ID NO: 193219 - DNA, 532 bp, Homo sapiens
gatagcattagaatacgaattaatgaatttaggcattgagcaccaacagctactaatatcacaaaaagagagacaactatacattttgtgcctcctgatgaaagaacatcatgccacctgtggtgctgacagcaggattaagcaagtctctggatccagctattgatttacaagaaatactgagaacagaggaacctttttacctacaccaagagaatgcaaaatttagactgagataaactcttgggaggaaaataaattgtaygaaaaatagaagaataggagaatgacttacagattaaaggagacataaaaacatgtctatttgttaatggcaaggctattagcaatttctagggtgcacatgaggataacaaagctatgaagaaagtaaagaagtgaataatggttggtaagctattgattattgccacaatttcagagcctgttattggtctattcagagattcaacttcttcctggtttactcttgggagtccaggaccagatggattcacagccaaattctacc

SEQ ID NO: 193220 - DNA, 385 bp, Homo sapiens
tggaaaggaggaaaggttaattataagttatgaaaatgtacatataaaacaaagaataaaaagagatgtgttatgcaatatgcagttgaygtcaaacttagtaaatatgttgaacagtatattttaaaacagaagattaaatgcttttgataagctgaagcatttttgcaagttcaccgcatacaatttatactttgaaagtgcttttatatattttatgcttttgtaaaatttacaaattatgctctcccaaaacagacctttaggttgaatgagttatgttcttagtcatatactgaatcatgttatgaataaggtatagataaagatgcctaaatagatctcccatttacatataattttaatgatctaaaagcattatatt

SEQ ID NO: 193221 - DNA, 596 bp, Homo sapiens
gaccagcagcatgtttatcatatgggattctaaggccatgctaactatgaggaataattgaataggaatgagtttagggaatcatcaaaaatctttatttcactgataaaaattattttgggataaaattgcttgccaattacatggatataataaattacatagctcgacatttctttgattttcctgatttctactcacagggcatagagtataatataaatatcattattttttattttttctacatgaaacagttgattaataagaatgagaattgcacaaatatttgtacattaaagttcaaattttaaaaaattcatatgaggtaataatggatattttgtaaattggggtataataagttaatgcattaataatttcagaaaaattgatcctaaatataatacaaaagtgctaaataagactaaaaagcatctgaactccttactcaaatatttgtaaccttgagctggggaaagtggttcrctcctctaatctcagctactttggaggctgaaacaggaggaatgtttgagcccaggagtttaaaactagcctgggcatcatggtgagatctcatttcaaaaataaat

SEQ ID NO: 193222 - DNA, 597 bp, Homo sapiens
gtatttaatactatgaagtgtacatttaaaaatggtgaagatggtatattttactatgtgtattttrtcacaataaaaatgtggaaaaataaataaataacaacaaaaacatagtcaacattttacactgaaacagacatcagcttgttttttcaaaaaatttgagatttggtgaaaaatacttattttggtaaagacccaagatcatatataaaaattcttttgttacaaattaaatttatattttctgttgggtaattaaggaatataaactaaaagtcttataacttataaacactttataatagtaattctactgcttggtacaaatcctagggaaataattagaaacaagatatatggtgcttgcttactgatatatcatttaaaatcgctttatttcaaaaatagttcaataaaaataaagagaatggttatacaaactttactgcagagttgccattacatttaatggcaaaaactgaaattacttttgcacaaacctaatactataatataatttaaaaaatactcttaaagaagagacatgttattaaataatactaaataacaaataagaaaaatgtgtatcaagca

SEQ ID NO: 193223 - DNA, 585 bp, Homo sapiens
tttggcatgggcatgggcatgggcaaaatgctgccrgtccctttgctaaagtataacaagagtcacctttgctccatttcctgacaggttacttatctccacctgaaaccacctccacattttaccaaaatcagcattttggtcaaagccattccaaactttccaaactttggaatttggacattccaaactttcccacatcttcctatcttctaaaccttctatgtctctaggaaattccaacttttctatatttttctgttttcttctgagccctccaaactgttccaacctctgcttgttacccagttacaaatttgctttcacatttttgggtatctttacagcagcacccctttctctgtggtaccaatttactgtgttagtccattctcacacagctaataaagacatactcaagatggtataatttatcaaggaaagctgtttaactgagtcacaattaaaatatgtgagagggaggcatggctggggaggtctcagggaacttaggatcatggctgaaggggaagcaaacacatccttctttacatggcagcagcaaggagaaatacagagtgaaga

SEQ ID NO: 193224 - DNA, 462 bp, Homo sapiens
aactgtagtaacagtttaattttaaaaaacaaacaattactattctgtttgaaagtccatatctgtacatgttcaagagatttcacttcagggcaccctcttagaaggatcattttaattaggacatattcagtttcactgactaacgcaaaagcatttttcaaaatggttgctcctactagcrgtggatgagaaaccccaatttccaacataacttccaacatattttaaatctttactaatctgatgtctataaaatggctttgcattatagttttaatttttatttcactgattactaatcagtggaatattggagggagtgatccttagttaaaagtttagatatgtatcttcaagtaaagggttaaaatttatgctagtccgctatatttaacccactcagaaatgcttctgatttcccagttaaaatggaaaatttgaaagttccttcagaaggtt

SEQ ID NO: 193225 - DNA, 462 bp, Homo sapiens
aactgtagtaacagtttaattttaaaaaacaaacaattactattctgtttgaaagtccatatctgtacatgttcaagagatttcacttcagggcaccctcttagaaggatcattttaattaggacatattcagtttcactgactaacgcaaaagcatttttcaaaatggttgctcctactagcggtggatgagaaaccccaatttccaacataacttccaacatattttaaatctttactaatctgatgtctataaaatggctttgcattatagttttaatttttatttcactgattactaatcagtggaatattggagggagtgatccttagttaaaagtttagatatgtatcttcaagtaaagggttaaaatttatgctagtccgctatatttaacccactcagaaatgcttctgatttcccagttaaaatgraaaatttgaaagttccttcagaaggtt

SEQ ID NO: 193226 - DNA, 589 bp, Homo sapiens
ttattatataatgacaacaggtcaattaagtaaaataatggaaccattatcaatatctatgcagtcaacactggggcatcaagatatattaagcaaatactatgagagataaagagagaaataaactacaatacaataaagcctggagacttcaacactccattttcagcactggacagatattctggccaagtaaatcaayaaaaaaacttggaattaatctgcagtatagaccaaataggcataagagatatttacacatcattttatccaacagctacagaatacacattattcctttcagcacatgcaacattctcaagcactgaccatatgtgaggccacaaaacaaatcttacataattcaaaaaagttgaaaacatatcaagtatcttctctgactacaatggaataaaactagaaatcaataccaaggaacattttgaaaactataaaaacattgaaaattaaacaatatacacctgaataacagtgggtcaatgaagaaattaggaaggaaatttaaaaatttcttgaaacaaatgaaaacacaatatatcaaatcctatgagatgcagtaaaagctgta

SEQ ID NO: 193227 - DNA, 589 bp, Homo sapiens
ttattatataatgacaacaggtcaattaagtaaaataatggaaccattatcaatatctatgcagtcaacactggggcatcaagatatattaagcaaatactatgagagataaagagagaaataaactacaatacaataaagcctggagacttcaacactccattttcagcactggacagatattctggccaagtaaatcaacaaaaaaacttggaattaatctgcagtatagaccaaataggcataakagatatttacacatcattttatccaacagctacagaatacacattattcctttcagcacatgcaacattctcaagcactgaccatatgtgaggccacaaaacaaatcttacataattcaaaaaagttgaaaacatatcaagtatcttctctgactacaatggaataaaactagaaatcaataccaaggaacattttgaaaactataaaaacattgaaaattaaacaatatacacctgaataacagtgggtcaatgaagaaattaggaaggaaatttaaaaatttcttgaaacaaatgaaaacacaatatatcaaatcctatgagatgcagtaaaagctgta

SEQ ID NO: 193228 - DNA, 616 bp, Homo sapiens
gtatatgccatgtggcaatgagaaggatgtatattttgttgttttttgtgtggagagtactgatagaaagctgtcatacacatttggtctaatgttgattttaggtcctgaatatctttgtaattttctgcctcgatgaactgtctaatactgtcaatggggtgttgaagtcccccactattattgtatgggagtctgtgtccctttgtagattcctaagaacttkctttatgaatctatgtgctcctcctgtgttgagtacacatataattaggatagttagggttcttattgaacactttaccattatgtaatgccctctttgtcttttttgatctttgttttaaagtctgttttgtctgaaattaggattgcaacctatgctttttaatattttttttgtttttgtttttgttttaattttgagcccatgggtgtaattatgtgtgagatgggccttgaagacatctggcaaggttgtggagaaaagggaacacttatacactgttggtgagaatgtaaattagctcaaccattgtggaaaacagtatggtgattcctcaaagagctatgaacaaaactaccatttgacccagcaatcccattactacgcatt

SEQ ID NO: 193229 - DNA, 517 bp, Homo sapiens
aaaccaaataccacatattctcacttctaagtgggagctaagttataagaactcatgagcacaaagaagggaacaacagacactggagtccacttgacggtagaaggttggaggaaggagaggagcagaaaaaatatatattgggtattaggcttcatacctgggtgatgaaataatctatacagtaaacccctataacacaagtttacctgtataacaaaccttcacatgtccctgctagcctaaaataaaggttataaaaagaaaatttgttgtttagtgtagccaccttcatcaattatcttagctagatcctctggataacttccttcaacttttcatcagcactagaagcttaccttgtatttttatattatggatgtgacatctaatgtggttaggctttatgtccccawgcaaatcttattttgaattgtaacctccataattcccataatcaccacatgtcaagggagagataaggtggaggtaattgaatcatgtgggcaatgtcccg

SEQ ID NO: 193230 - DNA, 570 bp, Homo sapiens
agtcttttttctatcctttgtactgactaaacttgtttctaacatgtctttgaacttctttcttcctttcacttggtgtaacctgtttgtaaaactttaaattcctggctcttctcagatataaaatcgtttcctcacaagtgttatcttttccaaacaaccataaaatacctgccatctactaaatcactaatttaatataatcattctagataacccattacattcaatgagtgtctattcatgacactgtttaatttacttactatgacaagtttctatctgagattatttttattcactaattattttaaatgtattttgtcactcttacamatttagaagggcagataattgcaaatttataaacataaatttggaatatattttaactgctatagaaaatgattagagatccttgaacagaagatataggatttacataatactctctaaataaactcctaaaagaatttaaaacatctcaaacaagtgatacaactttatatgagcaatttgaagacattttctaaaactgtgggacagtaactaggactatagcaactgtca

SEQ ID NO: 193231 - DNA, 570 bp, Homo sapiens
agtcttttttctatcctttgtactgactaaacttgtttctaacatgtctttgaacttctttcttcctttcacttggtgtaacctgtttgtaaaactttaaattcctggctcttctcagatataaaatcgtttcctcacaagtgttatcttttccaaacaaccataaaatacctgccatctactaaatcactaatttaatataatcattctagataacccattacattcaatgagtgtctattcatgacactgtttaatttacttactatgacaagtttctatctgagattatttttattcactaattattttaaatgtattttgtcactcttacacatttagaagggcagataattgcaaatttataaacataaatttggaatatattttaactgctatagaaaatgattagagatccttgaacagaagatataggatttacataatactctctaaataaactcctaaaagaatttaaaacatctcaaacaagtgatacaactttatrtgagcaatttgaagacattttctaaaactgtgggacagtaactaggactatagcaactgtca

SEQ ID NO: 193232 - DNA, 570 bp, Homo sapiens
agtcttttttctatcctttgtactgactaaacttgtttctaacatgtctttgaacttctttcttcctttcacttggtgtaacctgtttgtaaaactttaaattcctggctcttctcagatataaaatcgtttcctcacaagtgttatcttttccaaacaaccataaaatacctgccatctactaaatcactaatttaatataatcattctagataacccattacattcaatgagtgtctattcatgacactgtttaatttacttactatgacaagtttctatctgagattatttttattcactaattattttaaatgtattttgtcactcttacacatttagaagggcagataattgcaaatttataaacataaatttggaatatattttaactgctatagaaaatgattagagatccttgaacagaagatataggatttacataatactctctaaataaactcctaaaagaatttaaaacatctcaaacaagtgatacaactttatatsagcaatttgaagacattttctaaaactgtgggacagtaactaggactatagcaactgtca

SEQ ID NO: 193233 - DNA, 570 bp, Homo sapiens
attgttatttgtattcaaaggcacaggaagttattatcacataatcaaacactcagaagggagtccacttctctattcattcttgaacaaatattctcaaatgcataacacatacaaatggtttattaataaaatttatatactaagatataggataatcatattaccagagaatatatatgaaacaatgtaaacaaaactatataaactgcaaataaagtgataaggaagcctaaaaattcagttcactgaaacatttaataatgaggaagtacattaaaaatccaataaaattaatatactgccacctcagcctgacagatgacaggtttgaaataaaagttaccaattgattcatgctacctaagattcatagcctgataattgtcaactaaagtagatattgtctttgtatttgataattagtgtaatcatctttgcaagaacyaatgaaagcataactaaaagtcatagaatataatatactttgagtaaagttatgtttctggtatcattttttcaggaaaacatatatgtccaatcactgaagattgatgaatgaaattatga

SEQ ID NO: 193234 - DNA, 622 bp, Homo sapiens
gcttgtttggaaaggcctgtgtgttattctttacattatagtcaaggtggttacttagatcatgccagtcccactgggacttccaaccagaaggagagcctagattctgaatgcccctcaatacgggtgatctccaaagatcacccttattgtgctttcctcaccaaatctttgaactatcagcaattacgagtgtcatgttacattatttgagatctcccaaatatggtcctttcccgctgcttttaaagcagaggaaggcatctgttattacctggtcaacttttccaagcctgagggtgtgaaactcacctttggcgagagtgttctttggcactggaaacatgcgtttcctgagaggagttagttacccagttgaaagtgctcccataccatgtcacatttatgcctgataagtccttaagtgttaaaggtgagactaacaaagggaatcctaagacagtaagttctgagtcatttgagaggttccttagtgtgatcgaactgagcaaaccactcaggacagacccagcaattagttttgttgtacaaaaggccaatgctgatattgcaggagctaaaagatgtgatgwatcaccaaacccaataaaaagtcctagca

SEQ ID NO: 193235 - DNA, 472 bp, Homo sapiens
ctaataagcaggcatagcagaaggtaaaaacagatccctaaaattaaaggtgccattttataccgaattttggatctccaaaaagcaggagctactatagaagaagtctgtgtagtgcttctaccatgaatttcactgcaggacaacccaaagccagttggcttattttgtaattagcccatcctccatgggagtcttatctctctgacggrggtggggacgtttccatatcttttgggtggccaagagcatgcctctctgatttataactactatttgccatcccttaaagtgtatttcctacctagttattacacaacaaagctctctcctaatgtgaagtaattggataccccaaaaactcaaaacagataacaaaatgcaaaacagaaccaagcctttgattttgagagagaagtatctgcctttaattccttgggttttaggaggaaaacagagggttttttcccca

SEQ ID NO: 193236 - DNA, 588 bp, Homo sapiens
gaaacaggatggaggcttatagccacgtttattactgaccattctgctgggctggcttgaacagtaggcttatggagtcctgggtctccatcctaacctaaggtatcctttcttttgacagaaccatacagaaagacacacaaagtataccagattggctatagcttaagaccaacctcacaaatcctttttcactaattaaaactgtacagagaatataaacaacaatccttattatcccttttgccggtttgcatggggagagagaaaccaaaagctcgactggttaaaaaaaaaaaaaaaacaaacttttaccttcttgccagcatgtcaggctactaggttcccttcacctgagattaactctaagccaaacattttaaggtttggtgaaattaactctttccatgttgaaagaacattataaaaaagccagttgaaactgtaaaagaaggaaaaacaccatagaaaagcstgcgggttccaattaaggttttcaagaggtactgccatttttcctattgagtatggtgtttcccctatttctttgcctttcctattttctcttttcttttaggcctactatag

SEQ ID NO: 193237 - DNA, 588 bp, Homo sapiens
gaaacaggatggaggcttatagccacgtttattactgaccattctgctgggctggcttgaacagtaggcttatggagtcctgggtctccatcctaacctaaggtatcctttcttttgacagaaccatacagaaagacacacaaagtataccagattggctatagcttaagaccaacctcacaaatcctttttcactaattaaaactgtacagagaatataaacaacaatccttattatcccttttgccggtttgcatggggagagagaaaccaaaagctcgactggttaaaaaaaaaaaaaaaacaaacttttaccttcttgccagcatgtcaggctactaggttcccttcacctgagattaactctaagccaaacattttaaggtttggtgaaattaactctttccatgttgaaagaacattataaaaaagccagttgaaactgtaaaagaaggaaaaacaccatagaaaagcctgsgggttccaattaaggttttcaagaggtactgccatttttcctattgagtatggtgtttcccctatttctttgcctttcctattttctcttttcttttaggcctactatag

SEQ ID NO: 193238 - DNA, 524 bp, Homo sapiens
acacaaaggtgagaatactgagagaaaaagcagtttggtaacttttctaaaatccttagcatggcttgcattttacagtcaaatacacaaaaatgtgggtctcagctttatactttcctgctgtacacagatcattccttttggctaacctgtttctcatttatgttctgattattcacaatgaccttttttttaaaaaaaatcactgttaatgctaaacatagaagttatatatccaatgcaatttgaaggcacccctgcagctgggacccatcaatgttgtcacaactgctratgcctggggtcatgagaattgatggtagtaagaatgtcaccatttcttccctggaaggactcactagctctgtccagcagagatagtttttacttttgttgctcagaatgattaaaaatatgctatttaggttttttgcatttgagtttcctcttgtatggaactaagagtgaggtctaccagagtactcttcaccaagacaatccataatcaagttatatctggaagc

SEQ ID NO: 193239 - DNA, 403 bp, Homo sapiens
tattccatgtatcgtttaattctcagaaaaattctatgaggtggatactttattatctcttgctccttttctatctgctttactgggttttcctgttcttgccattctttaagaaacaacctacagctagtgtttggtaaagtgagaattgaaaccaaagcagttcaagccatatccagatttctcactatrtaatctgttagtctctatgcctatacaaagctcagcatctgagacattctcaacaactaaaaattctctatcagttttatgccaatttaaaaaatggcaaatagtgataattgttatattattgttattattgacataacaccaaaaagacatataactggccaggtgcagtggctcatgcctgtaatcccagcactttgggaggctgagg

SEQ ID NO: 193240 - DNA, 556 bp, Homo sapiens
gacaggaaagaaagatgatctttgaaaaaaaatatggactttgaaattagacagacttgattattctcaacgtgaacttgataggacatagatatcaatatatagacagaaacctaaaatccataattctttcccagatgtctatctaactagctctatgattttgggaaaactatatcacctttcyaagtctcatctgtaatattgaaataaataatcatacctaaattggaaagttattgtgagatcagagggttaaacaagataaatatttagcagtaagcatttaaactcactcaataaatagttactgggaatgtctgcactgcttcttaagaaacagcaggctggacccttcgctgacagtttagccttgtccccaagtacctatgtgaagcttttctttatgttaagatgtgctgaaccactctattcacattagccaggatatggaataaactaagtgtatatcaacagatgaatgaaaatgatatatgtgcatacagaatggatattattaatctgtaaaagaatgaaattctgtcattctcaacaa

SEQ ID NO: 193241 - DNA, 502 bp, Homo sapiens
ctcagaaacggaagagagatctgtaggaaaagctctgtgtttgtagagaatacagaaatagtcctgcacagaatgctggtagaaatgtggacagtgaaggccattctgatgaggtttcagacagaaatraggagcatactattaatgaaggaaaggtgatccttgttataatgtggcacataacttgtctgaattgcatttgtcttctagtgctgtggcaggtagaacttgccagcagaaaaattgtatatttatcttaagaacattctaagcaaagtgttttcggagcagctcggttcctcctggctgattagggtaaaatgcaaggagagagaaatgatttgaatttggaattattaagcaaaagaaatcagaacttaacaatttagacatttatcagcctgtctgtattggcaaaagtcagaaaacatgtttgaaagagaacactaaggccgtgaccaagcaacagtttgacaaggagtttagtgtggatgtgaactat

SEQ ID NO: 193242 - DNA, 524 bp, Homo sapiens
acacaaaggtgagaatactgagagaaaaagcagtttggtaacttttctaaaatccttagcatggcttgcattttacagtcaaatacacaaaaatgtgggtctcagctttatactttcctgctgtacacagatcattccttttggctaacctgtttctcatttatgttctgattattcacaatgacctttttttwaaaaaaaatcactgttaatgctaaacatagaagttatatatccaatgcaatttgaaggcacccctgcagctgggacccatcaatgttgtcacaactgctaatgcctggggtcatgagaattgatggtagtaagaatgtcaccatttcttccctggaaggactcactagctctgtccagcagagatagtttttacttttgttgctcagaatgattaaaaatatgctatttaggttttttgcatttgagtttcctcttgtatggaactaagagtgaggtctaccagagtactcttcaccaagacaatccataatcaagttatatctggaagc

SEQ ID NO: 193243 - DNA, 504 bp, Homo sapiens
tggctttcattcctttgctgtgtccctgcagacccgaggcccacctgggtgaagaacaggtgggtggacattggcagtgttcaccaggggaagcatgccaggtgcaaggaaacatgtgagcacctgtccgtgcccaatgggtctctgtttgtctccctgcatcttcacccaaaccagcttctcacacccccacggccaccaccaccactccaggcctctacctgggccctttaatgccccttccycattcctcaagagcccactggggtcccttccctgatggcctgctggcctcctgcctccctccctgacctcagcctcctcggattttcaacagcctggggttgcaggctgagctcagcatctggcaggggcctggaagaaatgacctctagagggcccacactctctgggtgtcatattttggggctattatcacaaaataccttagactgggtaatttataaatgacagaagtgtgttgctcacagttctggaggctgg

SEQ ID NO: 193244 - DNA, 614 bp, Homo sapiens
accaagagccctgcgagcagctgtccacacctcctggcactctctgtatctgtcccgtccctgccagctccccaccygcccagtgcttcaccagctcacccctcaaacactgtccaggtgggaaccattcccctcaactccctccagaacaaccagatggcacctgccagcagccctgggagccagaatcccacccacctgacccaagggctctatctgatctcagcctaacccatgaatcaggccctttggagagccaaaggaaaattgggcttccctgccagctgactatgtgacagttcagatgtcccagagcacaggaaagaggcagagacagggtcgtgaggagcccttgcttctccttcaacatctcccataaacagctggagaggggctctcacagggtccatgggaagagaccaaggaggggcatggaggagaggggagggctgagaagaccagggtgaaatggatgaggagaaggaagcagatggcagggaccctcccatctcccacatgggcccccttaggtgctactggccttgtgcaaatttgcacactcacattcacacatttctgtctgcttctctccaatctttcagatacctagcaca

SEQ ID NO: 193245 - DNA, 611 bp, Homo sapiens
cctggcaaagtcaccaagagccctgcgagcagctgtccacacctcctggcactctctgtatctgtcccgtccctgccagctccccacctgcccagtgcttcaccagctcacccctcaaacactgtccaggtgggaaccattcccctcaactccctccagaacaaccagatggcacctgccagcagccctgggagccagaatcccacccacctgacccaagggctctatctgatctcagcctaacccatgaatcaggccctttggagagccaaaggaaaattgggcttccctgccagctgactatgtgacagttcagatgtcccagagcacaggaaagaggcagagacagggtcgtgaggagcccttgcttctccttcaacatctcccataaacagctggagaggggctctcacagggtccatgggaagagaccaaggaggggcatggaggagaggggagggctgagaagaccagggtgaaatggatgaggagaaggaagcagatggcagggaccctcccatctcccacatgggcycccttaggtgctactggccttgtgcaaatttgcacactcacattcacacatttctgtctgcttctctccaatcttt

SEQ ID NO: 193246 - DNA, 605 bp, Homo sapiens
tttttccttcagccggttcatgttaggtttctctcatagcccctaaacacagtgctcaaataccaataacctggatcccatcttgcagctctgcaggaagctgtttttgcacaaggttcttccacatttctgggaacccaggagatgtctacttcagctacaatctctcctgctcgtcccctgtcccctcgggagggtctggctcagaacagatttcactgtgggaaccaagccaacctgttagccactcctaccccaggacggktgaaacacagtcttgcagtaacaagacttacttttgaaggatggaattacaatatggaaaaaatacaacttcacaaggtacacgttcagttcatagcagcagccaagactttgaaggaagagttcaagtcgccacaaaaacatagcagagggaatagtacggattttagagccagatagtactggagacttggagactgcagggctgggagggtcacagacagtcctgagttcaaatctccactccaccactcattgcccacgtgaacttgagcaagttatttaacctctctgagcctccatttcctcaaaggcaaattggggataataaacgcagtgtt

SEQ ID NO: 193247 - DNA, 427 bp, Homo sapiens
atgcggtgaaacgggcagcgattccagrgccatcacaactcctggctgaaaccaaacatgacagatttaccattgggcaggctgctccatttattatttaacgctcgcaataaatatttgcatgacccagtgctggagggaacgctctgtgataactcactgcattttcctgccaaacaccagcacagtcggattccgaagctgcagcagagaatattttatgctattctaaaaatccaggtgatggccccttgttagaaaaccttttctcatccatttccatagaggaaaaaaggagcagggagaccttagctccgagaagcaactagaggaggaagaagaggaggaggaagatgctgacaggtgacatttacttagcacttactgagtgccaggccctaagctaaggacttcacactcattcatt

SEQ ID NO: 193248 - DNA, 408 bp, Homo sapiens
gtggatgcggtgaaacgggcagcgattccagagccatcacaactcctggctgaaaccaaacatgacagatttaccattgggcaggctgctccatttattatttaacgctcgcaataaatatttgcatgacccagtgctggagggaacgctctgtgataactcactgcattttcctgccaaacaccagcacagtcggattccgaagctgcagcagagaatattttatgctattctaaaaatccaggtgatggccccttgttagaaaaccttttctcatccatttccatagaggaaaaaaggagcagggagaccttagctccgagaagcaactagaggaggargaagaggaggaggaagatgctgacaggtgacatttacttagcacttactgagtgccaggccctaagc

SEQ ID NO: 193249 - DNA, 608 bp, Homo sapiens
gcttgaacccgggaggtggaggttgcagtgagccaagaatgcgccactgcactccagcctgggcgacagagtgagactctgtctcaaaaaaagaaaaaaaaaaggctaggcatggctgtaatctcagcactttgggatgctgaggtgggcagatcacctgaggtcaggagttcaagaccagcctgaccaacatggagaaaccccatctctactagatacacaaaattagctgggtgtggtggtacatggctgtaatcccagctactcaggaggctgaggcaggacaattgcttgaacctgggaggcagaggttggggtgagctgagatcctgccattgcactccagcctgggcgacaagagtgaaactctgtctcaaaaaaaacaaaaaaacaaacaaatraaaaacataccctagactgagtaattcataaaggaaagagatttaattgactcagggaggcctcgggaaacttacaatcatggcagaagggaaagcaaacatgtccttcttcacatggcggcagaaaggggaagaatgagcaaaagaagaaaaagccccttataaaaccatcagattttgtgagaactcattcactatcataagaac

SEQ ID NO: 193250 - DNA, 608 bp, Homo sapiens
gcttgaacccgggaggtggaggttgcagtgagccaagaatgcgccactgcactccagcctgggcgacagagtgagactctgtctcaaaaaaagaaaaaaaaaaggctaggcatggctgtaatctcagcactttgggatgctgaggtgggcagatcacctgaggtcaggagttcaagaccagcctgaccaacatggagaaaccccatctctactagatacacaaaattagctgggtgtggtggtacatggctgtaatcccagctactcaggaggctgaggcaggacaattgcttgaacctgggaggcagaggttggggtgagctgagatcctgccattgcactccagcctgggcgacaagagtgaaactctgtctcaaaaaaaacaaaaaaacaaacaaatgaaaaacataccctagactgagtaattyataaaggaaagagatttaattgactcagggaggcctcgggaaacttacaatcatggcagaagggaaagcaaacatgtccttcttcacatggcggcagaaaggggaagaatgagcaaaagaagaaaaagccccttataaaaccatcagattttgtgagaactcattcactatcataagaac

SEQ ID NO: 193251 - DNA, 608 bp, Homo sapiens
gcttgaacccgggaggtggaggttgcagtgagccaagaatgcgccactgcactccagcctgggcgacagagtgagactctgtctcaaaaaaagaaaaaaaaaaggctaggcatggctgtaatctcagcactttgggatgctgaggtgggcagatcacctgaggtcaggagttcaagaccagcctgaccaacatggagaaaccccatctctactagatacacaaaattagctgggtgtggtggtacatggctgtaatcccagctactcaggaggctgaggcaggacaattgcttgaacctgggaggcagaggttggggtgagctgagatcctgccattgcactccagcctgggcgacaagagtgaaactctgtctcaaaaaaaacaaaaaaacaaacaaatgaaaaacataccctagactgagtaattcataaaggaaagagatttaattgactcagggaggcctcgggaaacttacaatcatggcagaagggaaagcaaacatgtccttcttcacatggcggcagmaaggggaagaatgagcaaaagaagaaaaagccccttataaaaccatcagattttgtgagaactcattcactatcataagaac

SEQ ID NO: 193252 - DNA, 436 bp, Homo sapiens
cctaattttaaatttatatctataatcttgttatatatatttcttggcatctactgtaagtgggtagtgaacgaataaacaaaatgtgatgaattttagaggactaagargggcctaagtcacaccaagattcatgctggataatttgtcatcgacccagactgtggttctgcactcgccagtaaccagtttttttttttttttttttttgctttttgccaaccatacattttgctttcatggtatcgaagtggtttaagcttatggcttccagcctgcagtggctatgaggggtcagtctctcatcaggaggggttggcagactctgttctcagataggcagcaaggatggaggtggggcaggagcaatttcactacctgcctggcgtctgggtcttgcttagagaaataattccaggctctgctgctttcgact

SEQ ID NO: 193253 - DNA, 395 bp, Homo sapiens
gtcctaattttaaatttatatctataatcttgttatatatatttcttggcatctactgtaagtgggtagtgaacgaataaacaaaatgtgatgaattttagaggactaagaggggcctaagtcacaccaagattcatgctggataatttgtcatcgacccagactgtggttctgcactcgccagtaaccagtttttttttttttttttttttgctttttgccaaccatacattttgctttcatggtatsgaagtggtttaagcttatggcttccagcctgcagtggctatgaggggtcagtctctcatcaggaggggttggcagactctgttctcagataggcagcaaggatggaggtggggcaggagcaatttcactacctgcctggcgtctgg

SEQ ID NO: 193254 - DNA, 592 bp, Homo sapiens
taagcttatggcttccagcctgcagtggctatgaggggtcagtctctcatcaggaggggttggcagactctgttctcarataggcagcaaggatggaggtggggcaggagcaatttcactacctgcctggcgtctgggtcttgcttagagaaataattccaggctctgctgctttcgactctgtctctcatggttccactgattcctgcagagatctagagagaaaatttccagcgaggagtttctggctcgtttgattttgaacacgttttgagtattccaccccttacccccccgcccccactcactactctgtagtttttttttttttaagaaaacagtttgaaagcacaaataaataaataattcaaaacagaggggccatttttatttactttggttgtttcaggagagggaagggagcttacactttttttgaactcttattctatgccagccgatgtgctgcattcttagcttaaaagcctgcttctctttgatttcagaataacttggaaataaatgatcagaccctgcatgctctgatcctggctgtctgctctaactaaatctcctcttccttgcttcctcc

SEQ ID NO: 193255 - DNA, 597 bp, Homo sapiens
gaggggtcagtctctcatcaggaggggttggcagactctgttctcagataggcagcaaggatggaggtggggcaggagcaatttcactacctgcctggcgtctgggtcttgcttagagaaataattccaggctctgctgctttcgactctgtctctcatggttccactgattcctgcagagatctagagagaaaatttccagcgaggagtttctggctcgtttgattttgaacacgttttgagtattccaccccttacccccccgcccccactcactactctgtagtttttttttttttaagaaaacagtttgaaagcacaaataaataaataattsaaaacagaggggccatttttatttactttggttgtttcaggagagggaagggagcttacactttttttgaactcttattctatgccagccgatgtgctgcattcttagcttaaaagcctgcttctctttgatttcagaataacttggaaataaatgatcagaccctgcatgctctgatcctggctgtctgctctaactaaatctcctcttccttgcttcctccagcgagttgttctcccttcacctcccagcacaagctt

SEQ ID NO: 193256 - DNA, 598 bp, Homo sapiens
tgaggggtcagtctctcatcaggaggggttggcagactctgttctcagataggcagcaaggatggaggtggggcaggagcaatttcactacctgcctggcgtctgggtcttgcttagagaaataattccaggctctgctgctttcgactctgtctctcatggttccactgattcctgcagagatctagagagaaaatttccagcgaggagtttctggctcgtttgattttgaacacgttttgagtattccaccccttacccccccgcccccactcactactctgtagtttttttttttttaagaaaacagtttgaaagcacaaataaataaataattcaaaacagaggggccatttttatttactttggttgtttcaggakagggaagggagcttacactttttttgaactcttattctatgccagccgatgtgctgcattcttagcttaaaagcctgcttctctttgatttcagaataacttggaaataaatgatcagaccctgcatgctctgatcctggctgtctgctctaactaaatctcctcttccttgcttcctccagcgagttgttctcccttcacctcccagcacaagctt

SEQ ID NO: 193257 - DNA, 600 bp, Homo sapiens
tatgaggggtcagtctctcatcaggaggggttggcagactctgttctcagataggcagcaaggatggaggtggggcaggagcaatttcactacctgcctggcgtctgggtcttgcttagagaaataattccaggctctgctgctttcgactctgtctctcatggttccactgattcctgcagagatctagagagaaaatttccagcgaggagtttctggctcgtttgattttgaacacgttttgagtattccaccccttacccccccgcccccactcactactctgtagtttttttttttttaagaaaacagtttgaaagcacaaataaataaataattcaaaacagaggggccatttttatttactttggttgtttcaggagagggaagggagcttacactttttttgaactcttattctatgcyagccgatgtgctgcattcttagcttaaaagcctgcttctctttgatttcagaataacttggaaataaatgatcagaccctgcatgctctgatcctggctgtctgctctaactaaatctcctcttccttgcttcctccagcgagttgttctcccttcacctcccagcacaagctt

SEQ ID NO: 193258 - DNA, 453 bp, Homo sapiens
ctaattttaaatttatatctataatcttgttatatatatttcttggcatctactgtaagtgggtagtgaacgaataaacaaaatgtgatgaattttagaggactaagaagggcctaagtcacaccaagattcatgctggataatttgtcatcgacccagactgtggttctgcactcgccagtaaccagtttttkttttttttttttttttttgctttttgccaaccatacattttgctttcatggtatggaagtggtttaagcttatggcttccagcctgcagtggctatgaggggtcagtctctcatcaggaggggttggcagactctgttctcaaataggcagcaaggatggaggtggggcaggagcaatttcactacctgcctggcgtctgggtcttgcttagagaaataattccaggctctgctgctttcgactctgtctctcatggtt

SEQ ID NO: 193259 - DNA, 453 bp, Homo sapiens
ctaattttaaatttatatctataatcttgttatatatatttcttggcatctactgtaagtgggtagtgaacgaataaacaaaatgtgatgaattttagaggactaagaagggcctaagtcacaccaagattcatgctggataatttgtcatcgacccagactgtggttctgcactcgccagtaaccagtttttgktttttttttttttttttgctttttgccaaccatacattttgctttcatggtatggaagtggtttaagcttatggcttccagcctgcagtggctatgaggggtcagtctctcatcaggaggggttggcagactctgttctcaaataggcagcaaggatggaggtggggcaggagcaatttcactacctgcctggcgtctgggtcttgcttagagaaataattccaggctctgctgctttcgactctgtctctcatggtt

SEQ ID NO: 193260 - DNA, 411 bp, Homo sapiens
gaattcattctcttttcctctcagggatagtttgttaagagtctgaaaaccactgctctgggcaaactgccctccggwgtcacacacaaaaaatcaatctcgttactaaagataaattttatttcaataaaaattgtaatgagcttgatcacctacccttttcacctgacttggctacaaatgactgccaactgtttaaaaaaaaaaatccaaccgaccctcagagctaatatgctattacttttaaagattacagacaggccaggcgtggtggctcacgcctgtaatcccagcactctgggaggccaagttcctatttcttagtgttagaaagaaagagagagaaatccctcagaacaatcagcagcctggagcatagtttgagactcccactaacagagccaagagtct

SEQ ID NO: 193261 - DNA, 355 bp, Homo sapiens
aatgagcgtttgctgtgtgaccacattgcggtattaatcataggtggcattataattctctaaaataacagccataaggcatcagggcaattgaggcttgtattaagggaatggtccttttttttcttgctgaagttaggcagcatgaggctggtgtgtttttccttaaggcaccaaggcatctgaggktttgcactgggaatccctgggctctctgggccctctgggtccctagggtcttctacttgccaacacagccttgggttctctgcttcctgttggggtgacaggaacacattggtggtctctgatggatataccaggcgctctgcataatttttcttcttgcttccgg

SEQ ID NO: 193262 - DNA, 504 bp, Homo sapiens
ctcatcttgtggctcccataattcccacgtgttgtgggagggacctggtgggagatgattgaatcatggggacaggtttttcccgtgctgttctcstgatagtgaattagtcttatgagatctgatggtttttaaaaatgggaatttccctgcacaagctctttttgcctgctgccatccacatcagatgtgacttgctcctccttgccttccaccatgtttgtgaggcctccacagccacgtggaactgtaagtccaataaacctgttcttttgtaaattgcccagtctcaggtatgtctttatcagcagcatgaaaatggactaatacagagatatatcctgcaaaatccgtccccagtactcctgaaaactgccaagctctgtagagttagagttagaataccttttgttgttgaagatgtgagggaagtatgcatgtgaattgactgctgaattcactttttttttttttgagacggagtctcgctctgtcgcccaggct

SEQ ID NO: 193263 - DNA, 504 bp, Homo sapiens
ctcatcttgtggctcccataattcccacgtgttgtgggagggacctggtgggagatgattgaatcatggggacaggtttttcccgtgctgttctcgtgatagtgaattagtcttatgagatctgatggtttttaaaaatgggaatttcyctgcacaagctctttttgcctgctgccatccacatcagatgtgacttgctcctccttgccttccaccatgtttgtgaggcctccacagccacgtggaactgtaagtccaataaacctgttcttttgtaaattgcccagtctcaggtatgtctttatcagcagcatgaaaatggactaatacagagatatatcctgcaaaatccgtccccagtactcctgaaaactgccaagctctgtagagttagagttagaataccttttgttgttgaagatgtgagggaagtatgcatgtgaattgactgctgaattcactttttttttttttgagacggagtctcgctctgtcgcccaggct

SEQ ID NO: 193264 - DNA, 504 bp, Homo sapiens
ctcatcttgtggctcccataattcccacgtgttgtgggagggacctggtgggagatgattgaatcatggggacaggtttttcccgtgctgttctcgtgatagtgaattagtcttatgagatctgatggtttttaaaaatgggaatttccctgcacaagctctttttgcctgctgccatccacatcagatgtgacttgctcctccttgccttccaccatgtttgtgaggcctccacagccacrtggaactgtaagtccaataaacctgttcttttgtaaattgcccagtctcaggtatgtctttatcagcagcatgaaaatggactaatacagagatatatcctgcaaaatccgtccccagtactcctgaaaactgccaagctctgtagagttagagttagaataccttttgttgttgaagatgtgagggaagtatgcatgtgaattgactgctgaattcactttttttttttttgagacggagtctcgctctgtcgcccaggct

SEQ ID NO: 193265 - DNA, 504 bp, Homo sapiens
ctcatcttgtggctcccataattcccacgtgttgtgggagggacctggtgggagatgattgaatcatggggacaggtttttcccgtgctgttctcgtgatagtgaattagtcttatgagatctgatggtttttaaaaatgggaatttccctgcacaagctctttttgcctgctgccatccacatcagatgtgacttgctcctccttgccttccaccatgtttgtgaggcctccacagccacgtggaactgtaagtccaataaacctgttcttttgtaaattgcccagtctcaggtatgtctttatcagcagcatgaaaatggactaatacagagatatatcctgcaaaatccgtccccagtactcctgaaaactgccaagctctgtagagttagagttagaataccttttgttgttgaagatgtgarggaagtatgcatgtgaattgactgctgaattcactttttttttttttgagacggagtctcgctctgtcgcccaggct

SEQ ID NO: 193266 - DNA, 597 bp, Homo sapiens
catttgggcaaccccactaggctggcaagccctggtcgatttttagtgacctcttagaagtagatgggagggactgtcagccatgccggaagtgggagagagcagaaggggtcaaagacaagcctcggctgggaagagcatctctgtggtcctgtaattgatgattggggtggggagcattgaaacgtttcccttgaatcacagccttcagtgagaatggctttgcctkctgtttggacggtgtgttgagagtagggtaaccatatgtcctcatttgctgcaacagtccctgttacgactgctttcctggttttgcctgtctcgaaagcattctggtttgggcgataacttataaggtcatcctaattctgggtttcacagtctcagcactgtggacattttgggctagataatcctttgggtgagggttgtcctgtgcactgtaaggtgtgtagcagcatccctaggctctgcccactagatgccagtagcacaaccccctgccccattgtcattgccaaatgtcccctgaggggaggaggaggaatcacccctggatgagaaccatggcccttttttaagggcactgttgaatcc

SEQ ID NO: 193267 - DNA, 597 bp, Homo sapiens
catttgggcaaccccactaggctggcaagccctggtcgatttttagtgacctcttagaagtagatgggagggactgtcagccatgccggaagtgggagagagcagaaggggtcaaagacaagcctcggctgggaagagcatctctgtggtcctgtaattgatgattggggtggggagcattgaaacgtttcccttgaatcacagccttcagtgagaatggctttgcctgctgtttggacggtgtgttgagagtagggtaaccatatgtcctcatttgctgcaacagtccctgttacgactgctttcctggttttgcctgtctcgaaagcattctggtttgggcgataacttataaggtcatcctaattctgggtttcacagtctcagcactgtggacattttgggctagataatcctttgggtgagggttgtcctgtgcactgtaaggtgtgtagcagcatccctaggctctgcccactagatgccagtagcacaaccccctgccccattgtcattgccaaatgtcccctgaggggaggaggaggaatcacccctggwtgagaaccatggcccttttttaagggcactgttgaatcc

SEQ ID NO: 193268 - DNA, 495 bp, Homo sapiens
gagatctgatggttttaaatgtggcagttttttcccgtgctctcacttctccctcctatcgccttgtgaagatgtctgcttctccttctgtcatgattgtaagtttcctgaggcctccccagccatgcagacctgttgtgagtcaattaaaccccttttstttatcaattacccattcttggccagttgtttatagcagtgtgaggatggactaatacaatagacttattgggagcttgtaatattctagctatgttactaaaaatttcacacattatttcatttagtccatccagtaacctagagattaggtattattataattcccccatttacaaaataggataataaggtacaaagacgttaagcatcttgcctaatgaccacagccagtaaatggtggatcttagatttgatgccaggcatctgacttcttcaagcattgtttactgttttagtatgacggagatgactagttggatgtaattccacctg

SEQ ID NO: 193269 - DNA, 576 bp, Homo sapiens
cctaatgaccacagccagtaaatggtggatcttagatttgatgccaggcatctgacttcttcaagcattgtttactgttttagtatgacggagatgactagttggatgtaattccacctgaatggctagctttactgtgtacagatcaccaaagatctaccttgaggaaaaacattgctatacattgcaaataatagycagggctctggtattaatgtttcccagtctctccctcctaaggacattgtcaccctcccagacaggtgtgtggtagaaggaaacgactctctcctgatgctatgaattccaaagaattcccattaaccatatttctaagccagtttgctttctttcaatgtgcactttctgcaaaatgccatctgcacttgtttcctggggaaaccatctctctgaggtgggtaagttctcattgtgaagatggggacttgcctaatgtttggcattccctttttggggcacgtacagtgatttctgaactgacttgaaaggccattaacttggtttttactgccttttctggcttgcaaatttaatgcctggctcccaacatgtgtg

SEQ ID NO: 193270 - DNA, 576 bp, Homo sapiens
cctaatgaccacagccagtaaatggtggatcttagatttgatgccaggcatctgacttcttcaagcattgtttactgttttagtatgacggagatgactagttggatgtaattccacctgaatggctagctttactgtgtacagatcaccaaagatctaccttgaggaaaaacattgctatacattgcaaataatagtcagggctctggtattaatgtttcccagtctctccctcctaaggacattgtcaccctcccagmcaggtgtgtggtagaaggaaacgactctctcctgatgctatgaattccaaagaattcccattaaccatatttctaagccagtttgctttctttcaatgtgcactttctgcaaaatgccatctgcacttgtttcctggggaaaccatctctctgaggtgggtaagttctcattgtgaagatggggacttgcctaatgtttggcattccctttttggggcacgtacagtgatttctgaactgacttgaaaggccattaacttggtttttactgccttttctggcttgcaaatttaatgcctggctcccaacatgtgtg

SEQ ID NO: 193271 - DNA, 499 bp, Homo sapiens
agaattcccattaaccatatttctaagccagtttgctttctttcaatgtgcactttctgcaaaatgccatctgcacttgtttcctggggaaaccatctctctgaggtgggtaagttctcattgtgaagatggggacttscctaatgtttggcattccctttttggggcacgtacagtgatttctgaactgacttgaaaggccattaacttggtttttactgccttttctggcttgcaaatttaatgcctggctcccaacatgtgtgaatggacaaacagcatcagcatcatctgggaacttgctagaaataaaaattctcaggctttaccctagacttacagaaccagcaactctgagggtaggttccagaagtctgtgagtttacaaatcttccaggtgattctgatccgtgctaaagttggatctactgctctaaaccttagtttcttcctttataaaataatagtagtagtagctgtagcagtaataataatattg

SEQ ID NO: 193272 - DNA, 494 bp, Homo sapiens
gtttgctttctttcaatgtgcactttctgcaaaatgccatctgcacttgtttcctggggaaaccatctctctgaggtgggtaagttctcattgtgaagatggggacttgcctaatgtttggcattccctttttggggcacgtacagtgatttctgaactgacttgaaagrccattaacttggtttttactgccttttctggcttgcaaatttaatgcctggctcccaacatgtgtgaatggacaaacagcatcagcatcatctgggaacttgctagaaataaaaattctcaggctttaccctagacttacagaaccagcaactctgagggtaggttccagaagtctgtgagtttacaaatcttccaggtgattctgatccgtgctaaagttggatctactgctctaaaccttagtttcttcctttataaaataatagtagtagtagctgtagcagtaataataatattggcttcatggttatagggggaattcc

SEQ ID NO: 193273 - DNA, 499 bp, Homo sapiens
agaattcccattaaccatatttctaagccagtttgctttctttcaatgtgcactttctgcaaaatgccatctgcacttgtttcctggggaaaccatctctctgaggtgggtaagttctcattgtgaagatggggacttgcctaatgtttggcattccctttttggggcacgtacagtgatttctgaactgacttgaaaggccattaacttggtttttactgccttttctggcttgcaaatttaatgcctggctcccaacatgtgtgaatggacaaacagcatcagcatcatctgggaacttgctagaaataaaaattctcaggctttaccctagacttacagaaccrgcaactctgagggtaggttccagaagtctgtgagtttacaaatcttccaggtgattctgatccgtgctaaagttggatctactgctctaaaccttagtttcttcctttataaaataatagtagtagtagctgtagcagtaataataatattg

SEQ ID NO: 193274 - DNA, 496 bp, Homo sapiens
ccagtttgctttctttcaatgtgcactttctgcaaaatgccatctgcacttgtttcctggggaaaccatctctctgaggtgggtaagttctcattgtgaagatggggacttgcctaatgtttggcattccctttttggggcacgtacagtgatttctgaactgacttgaaaggccattaacttggtttttactgccttttctggcttgcaaatttaatgcctggctcccaacatgtgtgaatggacaaacagcatcagcatcatctgggaacttgctagaaataaaaattctcaggctttaccctagacttacagaaccagcaactctgagggtaggttccagaagtctgtgagtttacaaatcttccaggtgattctgatccrtgctaaagttggatctactgctctaaaccttagtttcttcctttataaaataatagtagtagtagctgtagcagtaataataatattggcttcatggttatagggggaattc

SEQ ID NO: 193275 - DNA, 499 bp, Homo sapiens
agaattcccattaaccatatttctaagccagtttgctttctttcaatgtgcactttctgcaaaatgccatctgcacttgtttcctggggaaaccatctctctgaggtgggtaagttctcattgtgaagatggggacttgcctaatgtttggcattccctttttggggcacgtacagtgatttctgaactgacttgaaaggccattaacttggtttttactgccttttctggcttgcaaatttaatgcctggctcccaacatgtgtgaatggacaaacagcatcagcatcatctgggaacttgctagaaataaaaattctcaggctttaccctagacttacagaaccagcaactctgagggtaggttccagaagtctgtgagtttacaaatcttccaggtgattctgatccgtgctaaasttggatctactgctctaaaccttagtttcttcctttataaaataatagtagtagtagctgtagcagtaataataatattg

SEQ ID NO: 193276 - DNA, 481 bp, Homo sapiens
gaaaaacaacagaactagtattttttgtaagtcagcttgataggcagtaaacaatcctgccaaagcaaagcagaaaatgctgaaaaggttcatgtctcttcaacgactctgaccaagacttcagaggatgctccaaggggagaaacatgctcagggctacagaagcgacaatcatggataccctaagctggtctttcccaggagcaattttaccatgcaattttccctggatcctttctctatcgccccataacacctctcccatttggaaacaaaaatataatctttgaaagaaaaatagaaatcactgtctaaataaaaataatacattcctagcattcattcaccctcttcatcctcctccctgcccctgcgggggggaaaaatctcatktatcatgttgaatttctcatctcttgtgaatgccatgcaattgggtaaataagttctgtgttcaatcttttgtttttttgtttgttta

SEQ ID NO: 193277 - DNA, 523 bp, Homo sapiens
ccaatccagggtaattctggctcacaggtcacacaataccaatctttggtcccaaggttaggagtggctgctctcacaatggactttataataacctctccaacctctgtttgttgagcttagattcttaagcctctaagcttctgatgactcttactagagaaagtaatataattacccatcaatagagaaatggctcattcagcaaggatatatctgttcaatcaaatatatytgttcaatcaaatcactaaaaacaatggccgtttaagagtacatatacaaaaggtacgtgtgcaacagtataataagagcaaacctaaattatgcttgttgttcactgattgtctccccacagtagcatggaagttcagcaagagcagggatctttgtttttgttcaatgctaggtcctcagcacctaggactgtgccaggcacaaaaacatccagcacccaccaaggtaaaatttacaatgtctgacatcccataaaagttactttaaaaatagaggctgggccagg

SEQ ID NO: 193278 - DNA, 414 bp, Homo sapiens
agctgggcagttcttctgctcacacagtatcatctgaggtcactcagtagtattcagagggcttcrgggctgctctgaagggtctagtgcagttttagtgatgtgccaggcaccttggtgggtgtattagtccattttcatgctcttaataaagacatacctgagactgggtcatttttacaggaaagaggtttaatggactcagagttccacatggctggggagcctcgcaatcatggtggaaggcaaggaggagcaagtcacgtcttacatggatggcagcaggcaaaaagagagcttgtgcagggaaactccctgttataaaaccatcagatctcatgagacttactatcatgagaatagcatgagaaagacccacccccatgattcaattacctcccaccgggtccctct

SEQ ID NO: 193279 - DNA, 390 bp, Homo sapiens
ttctgctcacacagtatcatctgaggtcactcagtagtattcagagggcttcggggctgctctgaagggtctagtgcagttttagtgatgtgccaggcaccttggtgggtgtattagtccattttcatgctcttaataaagacatacctgagactgggtcatttttacaggaaagaggtttaatggactcagagttccacatggctggggagcctcgcaatcatggtggaaggcaaggaggagcaagtcacgtcttacrtggatggcagcaggcaaaaagagagcttgtgcagggaaactccctgttataaaaccatcagatctcatgagacttactatcatgagaatagcatgagaaagacccacccccatgattcaattacctcccac

SEQ ID NO: 193280 - DNA, 420 bp, Homo sapiens
ggaattcaagcaggacccagctgggcagttcttctgctcacacagtatcatctgaggtcactcagtagtattcagagggcttcggggctgctctgaagggtctagtgcagttttagtgatgtgccaggcaccttggtgggtgtattagtccattttcatgctcttaataaagacatacctgagactgggtcatttttacaggaaagaggtttaatggactcagagttccacatggctggggagcctcgcaatcatggtggaaggcaaggaggagcaagtcacgtcttacatggatggcagcrggcaaaaagagagcttgtgcagggaaactccctgttataaaaccatcagatctcatgagacttactatcatgagaatagcatgagaaagacccacccccatgattcaattacctccca

SEQ ID NO: 193281 - DNA, 421 bp, Homo sapiens
gaattcaagcaggacccagctgggcagttcttctgctcacacagtatcatctgaggtcactcagtagtattcagagggcttcggggctgctctgaagggtctagtgcagttttagtgatgtgccaggcaccttggtgggtgtattagtccattttcatgctcttaataaagacatacctgagactgggtcatttttacaggaaagaggtttaatggactcagagttccacatggctggggagcctcgcaatcatggtggaaggcaaggaggagcaagtcacgtcttacatggatggcagcaggcaaaaagagagcttgtgcagggaaactccstgttataaaaccatcagatctcatgagacttactatcatgagaatagcatgagaaagacccacccccatgattcaattacctcccacc

SEQ ID NO: 193282 - DNA, 455 bp, Homo sapiens
caaattgaggaatatattcctctcatcacgaggctatggccagggtcgggatgtatactactagtataaggggctgaaggactgggaccagaaytccatcaaacacactcttactttcccccacaccaagttcattatcgaaacaccagaagcaggaatacaagcaggtatgacgcaggtttctgtctcccatcttcctagagggacaggagtatatttaaagacagaaaacaaagaatagcaagtagcaggtgaatgggacagacaggttgggctctggagagggtttagaaacaaggcagaggagcaattgtcctgtttttttttctgcgtcttggagagggatcttgggggtctggacgggttctttccagttgggacacaccccaccagctggtggcttgggagacagtacagggaggaggcatctcctggctctgaatcagagtgagaac

SEQ ID NO: 193283 - DNA, 455 bp, Homo sapiens
caaattgaggaatatattcctctcatcacgaggctatggccagggtcgggatgtatactactagtataaggggctgaaggactgggaccagaattccatcaaacacactcttactttcccccacaccaagttcattatcgaaacaccagaagcaggaatacaagcaggtatgasgcaggtttctgtctcccatcttcctagagggacaggagtatatttaaagacagaaaacaaagaatagcaagtagcaggtgaatgggacagacaggttgggctctggagagggtttagaaacaaggcagaggagcaattgtcctgtttttttttctgcgtcttggagagggatcttgggggtctggacgggttctttccagttgggacacaccccaccagctggtggcttgggagacagtacagggaggaggcatctcctggctctgaatcagagtgagaac

SEQ ID NO: 193284 - DNA, 594 bp, Homo sapiens
actccctgtttggagggatattaatctatgccaagaggttatttatccaatacattcctgccatatggctgcaagctggatactaaagggaaacattaaatttttcataggggcataggtagagtctggaaagttccatgcatgagctctgctggggaggacatggccgggtgggctagcaacaagggaccctggttgataaggaggtgtcaggggttgggggcagaggtcacctgggatgggtcacctggaagatctagggcagcggtcctcaacagagggtgattttgttctccatgggacatttaacaatgtctgaagatattttggattgtcataaccaggggtgggggwgctactgcatctagcagataaggccagacacgttgctgaacttcctacaatgcacagggaggcccctacaacaaaggattatccagcccaaaatgacaatagtggcaaggttgagaactctgatctagaggaaagctgaagtcacacaacatcctcaaagggcttcctagagccaggctctatgaaagaatcacagatgggaggacaaacgtccctgcctgccaggacctgccaccaaaa

SEQ ID NO: 193285 - DNA, 432 bp, Homo sapiens
aatgtatttgtagctagaatttaatarcatcattctgagtttattgtatttatttttaacgttctttctttttataaggaagaaacaccacgtatagcagtgatataaagtattttaaaaccaagttattgaagctttaaaagtgaacaatttagggaaaatgttatgtaagtaaaaggacaggtggtcctcagtgtcagtagaaatcctcagggtggttgtcaaatgctgatgtctgggaagtactgctttaagctctgggaatggtttcagatggacatttcagacatcaggaacaagcttctacagagaaagggatacgttttcaagagaagtcaagtaaggtttctagtacatgtaaaggaaatggcagttagaggttggtttcaaccattaggcactccgaaaaacaacagagaagtaaaggtctcc

SEQ ID NO: 193286 - DNA, 470 bp, Homo sapiens
gaattcttaatgggacctgtttaggattaaacaagtttcattgggggtctgaaaaaactccccaggcctccaatgaagaagtttattgggggtcctgttagagcagtgggagagaagagaaggaagacgaaacaagagagtggctcaaacacttgagactggtttattgagagtaaacctgaraagggcttctggctggcaggatcaggagcaaacttctcttacagcctgaggcatttaaaaagggcccagtgggggcagtgtgctctgggtgtggttcctatgggggaggggttaggggagtgctggctggttgggactgctggggactttgataagcttgcttagggttgttatgctctgttgaagatataggtggggctgacttttgcagtttggtcaggtggcaatggacagttctgagaaatggaaacttgatagtttaaggtggtggagtcttgttaagatgg

SEQ ID NO: 193287 - DNA, 441 bp, Homo sapiens
gggtataattagccacaattatcgctaaagagaatttggggagattctgctctaaagggaaaagctttgtaaaggagaattaccagtagagtgaccttataatttaccatccaatggattttgaatacttytgagagagaaatgagatactgataataattataccaagacaacagacataaattgggattggcctagacgagcaaagatgaatggtcattctgtctgttagtaaaattccatcccaggcacaatatctcagacttgaaacaaaataaaagtgattctttctaggataaactctaaactaagtgtctgataaattctgggaaagtttatccaattgttacaacccagggtcaggaaaactgttttcaattttctgctgtatgaagttgccagtgttaaaccctttcgatagcaagtagaagaaatgttcat

SEQ ID NO: 193288 - DNA, 441 bp, Homo sapiens
gggtataattagccacaattatcgctaaagagaatttggggagattctgctctaaagggaaaagctttgtaaaggagaattaccagtagagtgaccttataatttaccatccaatggattttgaatacttctgagagagaaatgagatactgataataattataccaagacaacagacataaattgggattggcctagacgagcaaagatgaatggtcattctgtctgttagtaaaattccatcccaggcacaatatctcagacttgaaacaaaataaaagtgattctttctaggataaactctaaactaagtgtctgataaattctgggaaagtttatccaattgttacaacccagggtcaggaaaactgttttcaattttctgctgtatgaagttgccagtgttaaaccctttygatagcaagtagaagaaatgttcat

SEQ ID NO: 193289 - DNA, 450 bp, Homo sapiens
ctgttgcagccttagtcagtgggagccactgasctgcattcgtgtaggaactgagcaaggttcatctagtctcggtagctacctaccccgagagctggctgatttttttttccttaaatttaattcaagacttcatgaagtcaacaaaatggtctgttggaaattattcctaacccccaaccactgtcactgccacaatcaaacatattttcattcttttgcagctgcagcccttctacttgaactttcccactcattgcccttataacttgccatttaatatctcttgctttcctacatggctgtgactactcgtgggcagggactgtatctcctgtttttggtagtgcctccagaaccaaacaccatatgtcataaggtctattaataaatatctgctagtttttaaagtttgagaaaaacccgtattgtggaatgaaaatgatactg

SEQ ID NO: 193290 - DNA, 541 bp, Homo sapiens
ctggcaagtcttgggtcacatgatctaccttacagctgttactgcagacctcccaaagctcacgaactgagagtcaggaggcgtggttcccctaactcaaatcagaatttcgttatcaaaagaagagagggatggttctgtggtgtcccacactcaaataaacatcctttaaatacctctagatgcttataattcctgttgcagccttagtcagtgggagccactgacctgcattcgtgtaggaactgagcaaggttcatctagtctcggtagctasctaccccgagagctggctgatttttttttccttaaatttaattcaagacttcatgaagtcaacaaaatggtctgttggaaattattcctaacccccaaccactgtcactgccacaatcaaacatattttcattcttttgcagctgcagcccttctacttgaactttcccactcattgcccttataacttgccatttaatatctcttgctttcctacatggctgtgactactcgtgggcagggactgtatctcctgtttttggta

SEQ ID NO: 193291 - DNA, 541 bp, Homo sapiens
ctggcaagtcttgggtcacatgatctaccttacagctgttactgcagacctcccaaagctcacgaactgagagtcaggaggcgtggttcccctaactcaaatcagaatttcgttatcaaaagaagagagggatggttctgtggtgtcccacactcaaataaacatcctttaaatacctctagatgcttataattcctgttgcagccttagtcagtgggagccactgacctgcattcgtgtaggaactgagcaaggttcatctagtctcggtagctacctaccccgagagctggctgatttttttttycttaaatttaattcaagacttcatgaagtcaacaaaatggtctgttggaaattattcctaacccccaaccactgtcactgccacaatcaaacatattttcattcttttgcagctgcagcccttctacttgaactttcccactcattgcccttataacttgccatttaatatctcttgctttcctacatggctgtgactactcgtgggcagggactgtatctcctgtttttggta

SEQ ID NO: 193292 - DNA, 580 bp, Homo sapiens
aaacacaaaactcatgtatgtctatgtctctatctatgtccacatctatgtctgtatctatgtgatataataagtgccacaaggaatacaaagcaggaaaaggaagagagggtgcaaggctcagagaggcaggctgccattttatagtgagtggtgagaaacagcttcactgagaaagtgtcagttgagcaaagccttttggagaagaacagctcrtggtgctacgtggaagaatactccaggcagaaggagcagcaaaggcaaagcgtctgagacaggaacacacctggcatgtctgaggaacagctgaagaagaacaagaggccagtaggtggaaaaagctcacaggggggaggcaggcgggtcagagggggggaggcaggcagggcatacagagggtttggtgtcctactgtgacgattttgccttttaatcagcctgaaatgggatataaagtcttagatggatgaaataggaataacttttctcgtttccttcctcgtctgactaaattaacagatgaaggaattgtcaaaatacaaaaccttcttccttactgaacccactgacctggcagggc

SEQ ID NO: 193293 - DNA, 580 bp, Homo sapiens
aaacacaaaactcatgtatgtctatgtctctatctatgtccacatctatgtctgtatctatgtgatataataagtgccacaaggaatacaaagcaggaaaaggaagagagggtgcaaggctcagagaggcaggctgccattttatagtgagtggtgagaaacagcttcactgagaaagtgtcagttgagcaaagccttttggagaagaacagctcatggtgctacgtggaagaatactccaggcagaaggagcagcaaaggcaaagcgtctgagacaggaacacacctggcatgtctgaggaacagctgaagaagaacaagaggccagtaggtggaaaaagctcacagkggggaggcaggcgggtcagagggggggaggcaggcagggcatacagagggtttggtgtcctactgtgacgattttgccttttaatcagcctgaaatgggatataaagtcttagatggatgaaataggaataacttttctcgtttccttcctcgtctgactaaattaacagatgaaggaattgtcaaaatacaaaaccttcttccttactgaacccactgacctggcagggc

SEQ ID NO: 193294 - DNA, 580 bp, Homo sapiens
aaacacaaaactcatgtatgtctatgtctctatctatgtccacatctatgtctgtatctatgtgatataataagtgccacaaggaatacaaagcaggaaaaggaagagagggtgcaaggctcagagaggcaggctgccattttatagtgagtggtgagaaacagcttcactgagaaagtgtcagttgagcaaagccttttggagaagaacagctcatggtgctacgtggaagaatactccaggcagaaggagcagcaaaggcaaagcgtctgagacaggaacacacctggcatgtctgaggaacagctgaagaagaacaagaggccagtaggtggaaaaagctcacaggggggaggcaggcgggtcagagggggggaggcaggcagggcatacagagggtttggtgtcctactgtgamgattttgccttttaatcagcctgaaatgggatataaagtcttagatggatgaaataggaataacttttctcgtttccttcctcgtctgactaaattaacagatgaaggaattgtcaaaatacaaaaccttcttccttactgaacccactgacctggcagggc

SEQ ID NO: 193295 - DNA, 430 bp, Homo sapiens
tcttaaataaggtggttgttcaggaaattcctcyagttaattttactttaattccccctacaagaatgccgagacacctctgcctattttctctttctgtgtttgttgtttcttttgtttttgttttcgagactgagtcttgctctgtcgcccaggatggagtacagcagtgcaatctcggctcactgcagcctccaactcccggctccagtgattctcctgtctcagtctcccaagtagctgggattacagggatgcgccaccatgcccagctaattttttgtatttttagtagagacggggtttcaccatgttggccaggctggtcttgaactcctgacctgagttgatctgctcacgtcggcctcccagagtgctaggattaaaggtgtgagccaccgtgcctggcctctttctgtttcaaagaaat

SEQ ID NO: 193296 - DNA, 408 bp, Homo sapiens
tcttaaataaggtggttgttcaggaaattcctccagttaattttactttaattccccctacaagaatgccgagacacctctgcctattttctctttctgtgtttgttgtttcttttgtttttgttttcgagactgagtcttgctctgtcgcccaggatggagtacagcagtgcaatctcggctcactgcagcctccaactcccggctccagtgattctcctgyctcagtctcccaagtagctgggattacagggatgcgccaccatgcccagctaattttttgtatttttagtagagacggggtttcaccatgttggccaggctggtcttgaactcctgacctgagttgatctgctcacgtcggcctcccagagtgctaggattaaaggtgtgagccaccgtgcctgg

SEQ ID NO: 193297 - DNA, 451 bp, Homo sapiens
attttagttaattatttttaaaacaaagaaattgaggcttagagtgattaatgcacttgttcaaggccacagatgccaggcctgtgtgacaccacagcccctttatcccccactgtaattcactgtctcatctctcagcctggcatttctttcctttaactcccttctttaaaaaaagatggctattttcataataatgacgttagtaatagctttaattataactttgttgagtcctcagtctgcaacaagtgttttccctacattatttccttatgcccatctttcttatgagaaaactgagacttggagaaattaagtaaacttttctgagctctcatagagatctcagtaatagcagagctgggatttgaatccaggcagcctggttctatgggttgcactgttagacatcgtctctaaaagtacmtgcaattataaccagaattcc

SEQ ID NO: 193298 - DNA, 419 bp, Homo sapiens
aaagactcttattaatcagaacatggcaggcttcagaagcttcatgttcttgccagttccccttctccyataagtcctgggggagtgatgtggagtggccctgatggacatagtacacacagtgggcttgtatcacactagaggacatccagcttaagaaaccctcaatcttgtaaaaggtctcctggtaaacctgcctgcctttggcacagaagaggacattatttttattttcctcctgagaaaagaaagaaatcttccttctgtcttggtatcttccagggttgttctttgttcaaatattcttgaagagttagtccatgacaaaaactgtcataagatagaatagtttacattgtgaaagaattattatagataatcccttattctccaagcatgtctcagcaaattcctccaga

SEQ ID NO: 193299 - DNA, 526 bp, Homo sapiens
cagcgttttttattttttttggagtgatgcatatattgcataaagaatcctttctatttctgggcattaattagaatgctaaagtaaattctacagaagagaagaagagtgacaaagtccatggttgatgtaggactcaaatttataagctacaagtggttaaacaaaccagcaaatsagaattgggtcaaattcagcaacacattcagttccacttaagtggtggacgtgtggtgattgaatgttagaatatactgaaaggatttaaaagatatcattgactctcccatacgagtcataggattgatctcagagacaaggatatgaccagaactggggtcaccagatagacagaaccccaagaggaggcagtagtaaatgccgtgaggatgcagtatcagagtaaccaccttatgggttcttcctgcccactgaatagacaaaatcaatccactgagaccatggcattgcagttaaagtgaaagtgtaattaatgtgaggctggccactgtatgtgggagacaga

SEQ ID NO: 193300 - DNA, 406 bp, Homo sapiens
aataaagccacacacctacaatcatctgatctttgaaaaagtcaacaaaaataagcaatgaggaaaggattccctattcaataaatgatgctgggatagctggctagccataagccagaagaataaaataggacccttacttttcaccatatacaaatattaactcaagatggatcaaagatttaaatgtaagacctcaaactataygaaaactagaagaaaacgtagaaaacaccatcgtagacatcagccttggaaaagaatttatgactgagtcttcaaaagcacttgcaataaaaacaaaaatcgacaagtgggacccaatcaatcctgcaaaaaaaaaaaaaaaaaaaaaaagagtaagaaaggaaaaaagctgctgcatagcaaaagaaactacaaacag

SEQ ID NO: 193301 - DNA, 406 bp, Homo sapiens
aataaagccacacacctacaatcatctgatctttgaaaaagtcaacaaaaataagcaatgaggaaaggattccctattcaataaatgatgctgggatagctggctagccataagccagaagaataaaataggacccttacttttcaccatatacaaatattaactcaagatggatcaaagatttaaatgtaagacctcaaactatacgaaaactagaagaaaaygtagaaaacaccatcgtagacatcagccttggaaaagaatttatgactgagtcttcaaaagcacttgcaataaaaacaaaaatcgacaagtgggacccaatcaatcctgcaaaaaaaaaaaaaaaaaaaaaaagagtaagaaaggaaaaaagctgctgcatagcaaaagaaactacaaacag

SEQ ID NO: 193302 - DNA, 502 bp, Homo sapiens
actttggaataacaatgctgccaagggcacaactgtgccaatgatcctctgtggttaaggaggtggtcagggattatacttttgtgtcttccatattttcctcagtggcaaaactaaggagacagaattcagctttcttaaygtaacagttctctaaagtcaaacctctaaaactcaggtcaaaccccaggatatcgagcctgcttataggaataggtctagctcatctatctgaattcttttagagttctttaggaccgatgtgaattcaatcaatgtaaacctaagcaactcaccggagattcttccctcctatgcccacagtggtgaactcaatcacccgggtgtttggatccagagctcccccactggaccctcggagctctgggttgcgctgatggccacttatgtagtccgagtctttcagatcaaaatggcagatgggcaaggtgctccgcccttttgctaccaggaccggaccttgctctccaggtggcaggtt

SEQ ID NO: 193303 - DNA, 581 bp, Homo sapiens
gcagttcttcaaataagtcattagtatttgccatgaccacacagctgatgccgccactctggaagccgcagagtttacagagaagacatggcactgctggtcttaacctcccctcagaactgttgcctacctgacaagggtgtcccrtgaatgataatggcgatgcctttccggttcttggccaggcggccttctgcagaaatgtcaatgcccaggtggcgagcgattgctttgctcactgggttgttttccacctctccaacttcctccatggagtggctgtcaatgctctgaagcttgtcagctgcaaatttaaaatatatgtgtgtgcacacatggcatgcatgctacacagccggaatttacatgggtactgatggaaatgggaatggatatttctttttaaatgctgttttttttaaatggcaaatattgcagcagtccccacttgtagtgtacgactaggcccttttgggctaataatttgtttatagctactaaaataaaaaaacagattttttgaccccactttcattttggggaatctctcttgctgaaaagtagaaaggacatttgtgtgg

SEQ ID NO: 193304 - DNA, 542 bp, Homo sapiens
ggcctggcaaacaagcagcaactggggcaactccaaagggccaacccagccccagagcttcctgtgcgattagctgaagtctccattgccatctcatcacagttcatctccctctgcccaactctgctgtcctattcttcacagatgttcctgagagtgcccycaagaaacctcccacatgcaaatctcaagtcttagattgtgctttccacagagcctgactcttgatagaaggtgctgtgccaacagaagccactaaggatctcataaattcctaatgaaaagactctccccaaaggggcagattcccattctgagaaaaacttctgggagcagactgcaaactaagcaggctatcaacactggaagtaaagaagacagaagattcaaaggctgagtgggggagggtccagaggaagcagaacccccactcagctaagccaccttcaaatttctgacccacagaaagcacgagatgacaaatgtttattgttttaagttggtaagtttggggctaatttgttatgcagcaaaagataaca

SEQ ID NO: 193305 - DNA, 446 bp, Homo sapiens
ttagtgttgccacaagaagtcttatgttaccatgattattagytccttttatttcctctagaatcatttaggactttctctttcatcccggttttctgaaacgttgctctaatgtatttagatgtgagtatttttttcattcaccctgtttggcaacttgatggacccattcgattagaagacttgatcttcttaaaaagccctggaaatatttcttcagttattttgttgaatactttcttccttccagtatcttgtttctctttcaggagctcctattacatatatattagaacttcttgatttatacattgtctcatatttcctttcattctgtttttgaaacagctttattgagatataactcacataccatacaatccctcatttaaagtgttctatttagtggtttgtagtatattcacaaggcagggtagccatcacca

SEQ ID NO: 193306 - DNA, 575 bp, Homo sapiens
gaatgtgatctagccagggatgtcaaagcaggcttccttgagaatgtaatgtttcagatgagagctgaagaatggaaaggaataaaccaaatgaagaggggagaatgaatattccagcagtggaaacggtgtattcacaggcctcgtggaggggagggggcaggcctgcctgtttgaaggaggcctggctgagttcacttgctggggtcactcctgccactgggccaccccgggcagcagctactaacctcttttaccgcaggtggtcccacgcagactccagacagggttagactcagaggactgcctccctggatgtagcagagaatktttttacaaaggctctcctttcccacctcggtgggatggtaggtcacttcaaaagaaacctccatgcctgaggtaatatagccttcttctgggctaatggagaaatgaggctcaaattttttgatgtcccatttaaaccttttccaagaaaaagaagaaaagaaagagagtttatggatgttgtaagggtgtcctcaatgctactgagaacaagagactgcctaggctgaggttcacctcccttg

SEQ ID NO: 193307 - DNA, 594 bp, Homo sapiens
cagggatgtcaaagcaggcttccttgagaatgtaatgtttcagatgagagctgaagaatggaaaggaataaaccaaatgaagaggggagaatgaatattccagcagtggaaacggtgtattcacaggcctcgtggaggggagggggcaggcctgcctgtttgaaggaggcctggctgagttcacttgctggggtcactcctgccactgggccaccccgggcagcagctactaacctcttttaccgcaggtggtcccacgcagactccagacagggttagactcagaggactgcctccctggatgtagcagagaatgtttttacaaaggctctcctttcccacctcggtgggatggtaggtcacttcaaaagaaacctccatgcctgaggtaatatagccttcttctgggctaatggagaaatgaggctcaaattttttgatgtcccatttaaaccttttccaagaaaaagaagamaagaaagagagtttatggatgttgtaagggtgtcctcaatgctactgagaacaagagactgcctaggctgaggttcacctcccttgagtctatcctagcacctaggaggagaaagatct

SEQ ID NO: 193308 - DNA, 593 bp, Homo sapiens
agggatgtcaaagcaggcttccttgagaatgtaatgtttcagatgagagctgaagaatggaaaggaataaaccaaatgaagaggggagaatgaatattccagcagtggaaacggtgtattcacaggcctcgtggaggggagggggcaggcctgcctgtttgaaggaggcctggctgagttcacttgctggggtcactcctgccactgggccaccccgggcagcagctactaacctcttttaccgcaggtggtcccacgcagactccagacagggttagactcagaggactgcctccctggatgtagcagagaatgtttttacaaaggctctcctttcccacctcggtgggatggtaggtcacttcaaaagaaacctccatgcctgaggtaatatagccttcttctgggctaatggagaaatgaggctcaaattttttgatgtcccatttaaaccttttccaagaaaaagaagaaaagaaagagagtttatggatgttgtaagggtgtcctcaatgctactgagaacaagagactgcctrggctgaggttcacctcccttgagtctatcctagcacctaggaggagaaagatct

SEQ ID NO: 193309 - DNA, 426 bp, Homo sapiens
agccttcttctgggctaatggagaaatgaggctcaaattttttgatgtcccatttaaaccttttccaagaaaaagaagaaaagaaagagagtttatggatgttgtaagggtgtcctcaatgctactgagaacaagagactgcctaggctgaggttcacctcccttgagtctatcctagcacctaggaggagaaagatctctgccagacagagcagaagcactggggaatgtgggccaaggtcacttcctgggtaggtggacttggctcctttgcagagctgagccaagggcaggaaktggctgcatcttattatccacgagtgacacatcagggaacatatgtatgaacacacatacacatgtgtcgtgtacttaaggtcacacagctaggaagtggctgggctaggacagaaatccttctgggac

SEQ ID NO: 193310 - DNA, 457 bp, Homo sapiens
aaaaaaaaaaaagttttcttcaaccctggtgcccccgacragcaccccatttctctccttcccttcatgcttgtctccacttgctggctttgcctcgtcacccctcatttctgcctccccgtttcctaccctgattcctgtctccaccactccctcgaatccaaggctccagcctctccatttccagatctaatgggcatgggttaggccttgacttgcttgacgtcctcctccatgagcttcacactgtggatcgtaccctccttggatcgctcttctttcctagcatcctggtccgccctttctggctttcctccttctccctggtttctttctggacccgcctccatccatccttagtcactctgcaggtttccagcgtcagcctttgtgtcttcctgcttggtctaaggctgacccccatcccatgcgtgacttcagtgctacctgatcatac

SEQ ID NO: 193311 - DNA, 457 bp, Homo sapiens
aaaaaaaaaaaagttttcttcaaccctggtgcccccgacaagcaccccatttctctccttcccttcatgcttgtctccacttgctggctttgcctcgtcacccctcatttctgcctccccgtttcctaccctgattcctgtctccaccactccctcgaatccaaggctccagcctctccatttccagatctaatgggcatgggttaggccttgacttgcttgacgtcctcctccatgagcttcacactgtggatcgtaccctccttggatcgctcttctttcctagcatcctggtccgccctttctggctttcctccttctccctggtttctttctggacccgcctccatccatccttagtcactctgcaggtttccagcgtcagcctttgtgtcttcctgcttggtctaaggctgacccccatcccatgcrtgacttcagtgctacctgatcatac

SEQ ID NO: 193312 - DNA, 574 bp, Homo sapiens
ccctcttctaaattatatgctaatgtagttatgtatttgaattctcactatatattttttaatgcacaaacattattgattaaaacaatcaatttgcatttatttttacctaaatgcccatttatcaatatttatcaatatgcatttctcagcaccctcctaaacactctttaactgctttctacatctcttgtgtctgttttcttttacctaaagaacattcctgggtgtttgttttttttgttttttgttttttttttttaggtacaggttctttggcaacaaattactcaagttttgcttgtccgaaatgtctttacttcaccttgatgtttcragggtgtttttttctaggcaggcctctaggttgccagccatttttcttcagcactttgatgatattatttttctatctttgtcttccatgtggctgttgagatgtcggctgtcggcatgattgtgctccttctgtgttagccttgatgcagggcaggtgagccccacagtggggcttagcccagagggttcttggctttgcccaggaaagtattcaagggcaagctggaggtggaag

SEQ ID NO: 193313 - DNA, 576 bp, Homo sapiens
ctcctgggtcctgtgccacagcccatcccatcatgattctcagataacactattcatctgggaatccaggaccagcctcctgggagtgtgaagctgcacctcctcccttaggtatatgccctggaaaaatacaactgaagacactagagcaagttctaggaccctgaaggaagcatcccagccatgtctgccagaaatctttggaaaaacttgcaagaaagaaggtagaagtgttacagatgaaggtcttttatttatgtatttgtttttttgagacagactctcactctgttgtggagtacagtggcrtgatctcggctcactgcaaactccacctcctgggttcaaatgcctcccaagtagctgggattacaggcatgtgccaccacacccagctaattttttgtatttttagtagagacggggttttgccatgttggccaggctggtctcaaactcctgaccttaggtgatctgcccgccttggcctcccaaagtgctgggatcacaagcgtgagccactgcaccaggtctcagatgaacaccttttaagtggtgctgtccaatgtgagtggt

SEQ ID NO: 193314 - DNA, 576 bp, Homo sapiens
ctcctgggtcctgtgccacagcccatcccatcatgattctcagataacactattcatctgggaatccaggaccagcctcctgggagtgtgaagctgcacctcctcccttaggtatatgccctggaaaaatacaactgaagacactagagcaagttctaggaccctgaaggaagcatcccagccatgtctgccagaaatctttggaaaaacttgcaagaaagaaggtagaagtgttacagatgaaggtcttttatttatgtatttgtttttttgagacagactctcactctgttgtggagtacagtggcgtgatctcggctcactgcaaactccacctcctgggttcaaatgcctcccaagtagctgggattacaggcatgtgccaccacacccagctaattttttgtatttttagtagagacggggttttgccatgttggccaggctggtctcaaactcctgaccttaggtgatctgcccgccttggcctcccaaagtgctgggatcacaagygtgagccactgcaccaggtctcagatgaacaccttttaagtggtgctgtccaatgtgagtggt

SEQ ID NO: 193315 - DNA, 576 bp, Homo sapiens
ctcctgggtcctgtgccacagcccatcccatcatgattctcagataacactattcatctgggaatccaggaccagcctcctgggagtgtgaagctgcacctcctcccttaggtatatgccctggaaaaatacaactgaagacactagagcaagttctaggaccctgaaggaagcatcccagccatgtctgccagaaatctttggaaaaacttgcaagaaagaaggtagaagtgttacagatgaaggtcttttatttatgtatttgtttttttgagacagactctcactctgttgtggagtacagtggcgtgatctcggctcactgcaaactccacctcctgggttcaaatgcctcccaagtagctgggattacaggcatgtgccaccacacccagctaattttttgtatttttagtagagacggggttttgccatgttggccaggctggtctcaaactcctgaccttaggtgatctgcccgccttggcctcccaaagtgctgggatcacaagcgtgagccactgcaccaggtctcagatgaacaycttttaagtggtgctgtccaatgtgagtggt

SEQ ID NO: 193316 - DNA, 579 bp, Homo sapiens
ggatgctggcaatgatctcacctccttctgaaatattgggctcaataatctaaaacgggaagaagaatgagcaagtcagccactgctgtagctacagaattcccatgattatctaccccattccctattttcatcattgacatgaagccatgttctttatttcactgtcttcgtattattgcgaacactaaaacagagcttactgtgtaccagccaagggtcaacttagccaacttttcctcatgttttcagttccctgctcatcctttgcacttgatgatgggactcagcttccctrcctctgatgctccccaaagacctgggggcacatttcctcactggatctaattctgatgactttgcctgatagttaggacagaaccccggtgtatcctatctggttgccacccaggccagccctccccttttctccctggagcatggattaggtcatgtatccttctttgcaacaggagtcgtacgatcctgccattgaggcagcccctccctttggagctctcttacctgacagcgcagaacaggctggtgctcaatcttcacttccttttttgcatggaa

SEQ ID NO: 193317 - DNA, 447 bp, Homo sapiens
aattctttactctttttgcaacttttctgtacatctaaaattatttcacaactacaaaaaattagtatcaggwgtctggaattttttcctatagcacctcccaccccaagcactgcaggactgccagccccctcttccctcctcagtgcagtgagagctgtggccagtgcctagacggggactgaaggcggaacaggatcctaccagcagctttccagatctagaacatcttggctctttaggaaacttgattagatgccaaaagaaaaaggttggaatttaaaggttattccttaactgagaaaaataagtagtcgatgccaggtagatgcttttctaccctgggttatatgatggtaagttaaatactaagacaggtattgagttggccacttggaggaagactcgggcacagacacagtgcagtcacagtcctttccccaaagt

SEQ ID NO: 193318 - DNA, 462 bp, Homo sapiens
agaattctttactctttttgcaacttttctgtacatctaaaattatttcacaactacaaaaaattagtatcaggagtctggaattttttcctatagcacctcccaccccaagcactgcaggactgccagccccctcttccctcctcagtgcastgagagctgtggccagtgcctagacggggactgaaggcggaacaggatcctaccagcagctttccagatctagaacatcttggctctttaggaaacttgattagatgccaaaagaaaaaggttggaatttaaaggttattccttaactgagaaaaataagtagtcgatgccaggtagatgcttttctaccctgggttatatgatggtaagttaaatactaagacaggtattgagttggccacttggaggaagactcgggcacagacacagtgcagtcacagtcctttccccaaagtcattttttaagcc

SEQ ID NO: 193319 - DNA, 461 bp, Homo sapiens
gaattctttactctttttgcaacttttctgtacatctaaaattatttcacaactacaaaaaattagtatcaggagtctggaattttttcctatagcacctcccaccccaagcactgcaggactgccagccccctcttccctcctcagtgcagtgagagctgtggccagtgcctagacggggactgaaggcggaacaggatcctaccagcagctttccagatctagaacatcttggctctttaggaaacttgattagatgccaaaagaaaaaggttggaatttaaaggttattccttaactgagaaaaataagtagtcgatgccaggtagatgcttttctaccctgggttatatgatggtaagttaaatactaagacaggtattgagttggccacttggaggaagactygggcacagacacagtgcagtcacagtcctttccccaaagtcattttttaagcc

SEQ ID NO: 193320 - DNA, 568 bp, Homo sapiens
accagctctactgccgaggcatctgcacttacccatacatttgccaagacccaaagtaagtgtgtttcattttaaaagaaaaggttgacagatgtgttttcattttmctccatggcactttgaacaaggtggctcttaccataacgtggagctggggcagcaccccagcccctcttgtcatatcagcttccatgtcttgaatattgaccaagagccacagggaggacatgatactaccaggattcctagactgcaataaagagaatgatcataggtgcaaagggggaggaaaaaagtcttcctttggcaaattagtttgctcatttaactattaagcaaatttaaagcagttctatcctgtagtatagaaaccatgtgtgactctgcatgggtgaaatttttccaagctactgaacaccactgtagagctcctacactacagaaaagcacctggctgagcaactggccatattagaccaagggactcagaagctaattcatatctcccagaaccaattttccatagggattctcaggaatgttttcagctgggtgcactgggacagaa

SEQ ID NO: 193321 - DNA, 568 bp, Homo sapiens
accagctctactgccgaggcatctgcacttacccatacatttgccaagacccaaagtaagtgtgtttcattttaaaagaaaaggttgacagatgtgttttcattttcctccatggcactttgaacaaggtggctcttaccataacgtggagctggggcagcaccccagcccctcttgtcrtatcagcttccatgtcttgaatattgaccaagagccacagggaggacatgatactaccaggattcctagactgcaataaagagaatgatcataggtgcaaagggggaggaaaaaagtcttcctttggcaaattagtttgctcatttaactattaagcaaatttaaagcagttctatcctgtagtatagaaaccatgtgtgactctgcatgggtgaaatttttccaagctactgaacaccactgtagagctcctacactacagaaaagcacctggctgagcaactggccatattagaccaagggactcagaagctaattcatatctcccagaaccaattttccatagggattctcaggaatgttttcagctgggtgcactgggacagaa

SEQ ID NO: 193322 - DNA, 568 bp, Homo sapiens
accagctctactgccgaggcatctgcacttacccatacatttgccaagacccaaagtaagtgtgtttcattttaaaagaaaaggttgacagatgtgttttcattttcctccatggcactttgaacaaggtggctcttaccataacgtggagctggggcagcaccccagcccctcttgtcatatcagcttccatgtcttgaatattgaccaagagccacagggaggacatgatactaccaggattccyagactgcaataaagagaatgatcataggtgcaaagggggaggaaaaaagtcttcctttggcaaattagtttgctcatttaactattaagcaaatttaaagcagttctatcctgtagtatagaaaccatgtgtgactctgcatgggtgaaatttttccaagctactgaacaccactgtagagctcctacactacagaaaagcacctggctgagcaactggccatattagaccaagggactcagaagctaattcatatctcccagaaccaattttccatagggattctcaggaatgttttcagctgggtgcactgggacagaa

SEQ ID NO: 193323 - DNA, 568 bp, Homo sapiens
accagctctactgccgaggcatctgcacttacccatacatttgccaagacccaaagtaagtgtgtttcattttaaaagaaaaggttgacagatgtgttttcattttcctccatggcactttgaacaaggtggctcttaccataacgtggagctggggcagcaccccagcccctcttgtcatatcagcttccatgtcttgaatattgaccaagagccacagggaggacatgatactaccaggattcctagactgcaataaagagaatgatcataggtgcaaagggggaggaaaaaagtcttcctttggcaaattagtttgctyatttaactattaagcaaatttaaagcagttctatcctgtagtatagaaaccatgtgtgactctgcatgggtgaaatttttccaagctactgaacaccactgtagagctcctacactacagaaaagcacctggctgagcaactggccatattagaccaagggactcagaagctaattcatatctcccagaaccaattttccatagggattctcaggaatgttttcagctgggtgcactgggacagaa

SEQ ID NO: 193324 - DNA, 520 bp, Homo sapiens
cagtgactttaccccaaacatccaatcttcccatcctaatttctttaataatttatcctttctgcagtggcgcatgtccccttaacttgtgtgtgttgattcttatattcttacacactatgcgaatcaccttagcttcaaaacacatttttatgttttaaaaaagattagatatctttttaagagtgctagttttgcttattttcttactgtggatgtgctgcagrgtaacttgacaagttccctaaaccctccaatggggactgcaaaggttgttaggtgagaatcaatcattatccgtttcctcttaggaggtaggacaagtcagagccagggaaggtgcagttcagggatgctcacatgaggttttcaggtaggatccccaacgagtcaagggaaaataacccagcgagcagaacacctcatgccaggctccatttttggtctggtggagggtgaccttctctccctgcctgctgaagtcctgccaaggttaggagaataaactgctcatgtgtta

SEQ ID NO: 193325 - DNA, 520 bp, Homo sapiens
cagtgactttaccccaaacatccaatcttcccatcctaatttctttaataatttatcctttctgcagtggcgcatgtccccttaacttgtgtgtgttgattcttatattcttacacactatgcgaatcaccttagcttcaaaacacatttttatgttttaaaaaagattagatatctttttaagagtgctagttttgcttattttcttactgtggatgtgctgcagggtaacttgacaagttccctaaaccctccaatggggactgcaaaggttgttaggtgagaatcaatcattatccgtttcctcttaggaggtaggacaagtcagagccagggaaggtgcagtycagggatgctcacatgaggttttcaggtaggatccccaacgagtcaagggaaaataacccagcgagcagaacacctcatgccaggctccatttttggtctggtggagggtgaccttctctccctgcctgctgaagtcctgccaaggttaggagaataaactgctcatgtgtta

SEQ ID NO: 193326 - DNA, 520 bp, Homo sapiens
cagtgactttaccccaaacatccaatcttcccatcctaatttctttaataatttatcctttctgcagtggcgcatgtccccttaacttgtgtgtgttgattcttatattcttacacactatgcgaatcaccttagcttcaaaacacatttttatgttttaaaaaagattagatatctttttaagagtgctagttttgcttattttcttactgtggatgtgctgcagggtaacttgacaagttccctaaaccctccaatggggactgcaaaggttgttaggtgagaatcaatcattatccgtttcctcttaggaggtaggacaagtcagagccagggaaggtgcagttcagggatgctcacatgaggttttcaggtaggatccccaacgagtcaagggaaaataacccagygagcagaacacctcatgccaggctccatttttggtctggtggagggtgaccttctctccctgcctgctgaagtcctgccaaggttaggagaataaactgctcatgtgtta

SEQ ID NO: 193327 - DNA, 579 bp, Homo sapiens
gttttccttgccctttttctaaagatttttaagcatttgaatttacattgctgcagttattgtaaattgataacaactctatagagaataatttggccttatctatcaaaattatactttgacctagaaatttcatttctaagaatttattctacatacacgttcccacatttgcaaaatgatgtgtttataagattatttcctrtataatctgtaatggcaatagcaaaagaccagaaacaaactaaatgtctatcagtaggaaactagtttttaaaaatatgttaaaactatgtaatggaataatatgtagcaactaaaaaggatggagcagctctagatgtactaatattgaattaatcgtaaaatatattgttaggtaaaatgaaaagaaaaggaagacgaaaaacactctgtatgctaccatctgcatttaaatattatatatatatattgctggattcactcagctaacattttacttacaatttttgcacctttgttaagtgatcgttggttcataaatttccttcttcatgctgcatttgatcagtttggatatcagaataaataaatggg

SEQ ID NO: 193328 - DNA, 397 bp, Homo sapiens
tgcacagaaaggcggacacagattctgagcccttattttggcattacacagggtgaaggctaaattagacttgaataattgtcttcccacttacatttcccagttacatctggcccccaggactatccttttgtascagaatatttctgtcttggcagattccgaacctcagctgagcagcccttttagccatagactgtctctggctctttcttcctgacgtcaggtacaggacgatggatcagggaaacctctcactctttatgaatctctattcaagctccttgaaatctactttccctaaaaagcttcagactaagtcctcccacccagcctttcctgttaccccattccctgaagttactaactctcctgttcataatcatccactgaattc

SEQ ID NO: 193329 - DNA, 172 bp, Homo sapiens
gaaacccagtaagatccaaaactgggggtggggggtttgagatttcataagcttcgcactaaaactcatttggcataaaaatctcatctgaactgacatgacaccatttaacytttatttgtacaacttagttttcagagtcaaacattgccaacaactgttaatgtgtttg

SEQ ID NO: 193330 - DNA, 515 bp, Homo sapiens
tcagttttgggatgtcttgccatggcctgaaagaggtaaaaatgaggattcctgaaacaytaatttatgaataagcaaatcacaaaacacaaatggtggtgtcatcttcctcagcattacttcgagtggcttcataacaaaggcttgtccagtgatgggttttagaaagagcactgaaccaggagtcagaattcctgggttttaaggccagcatcgcactagaggcaaaatgatcttgggcaaattgtttaatctttcttggttttgtttctgtaactgaaaaatgaggggatttgataggtgcctccttgctttcctcccaatttttaattctctgacatctgtgggggctaagagattagttcccttgagaagcttgtgccaggaggagcagatattgtcaccttcacattttcagtgatttttctttcttgtcttctagttagaaatttctgagactgattttgctgcaggcagagaactgtgagaaaggaaagaaacattcttgggagttt

SEQ ID NO: 193331 - DNA, 515 bp, Homo sapiens
tcagttttgggatgtcttgccatggcctgaaagaggtaaaaatgaggattcctgaaacattaatttatgaataagcaaatcacaaaacacaaatggtggtgtcatcttcctcagcattacttcragtggcttcataacaaaggcttgtccagtgatgggttttagaaagagcactgaaccaggagtcagaattcctgggttttaaggccagcatcgcactagaggcaaaatgatcttgggcaaattgtttaatctttcttggttttgtttctgtaactgaaaaatgaggggatttgataggtgcctccttgctttcctcccaatttttaattctctgacatctgtgggggctaagagattagttcccttgagaagcttgtgccaggaggagcagatattgtcaccttcacattttcagtgatttttctttcttgtcttctagttagaaatttctgagactgattttgctgcaggcagagaactgtgagaaaggaaagaaacattcttgggagttt

SEQ ID NO: 193332 - DNA, 512 bp, Homo sapiens
caataagccactcccatgaatcaagctgtgaaatggaagggtcagcttttcttgagcatgagaagagataattctgcatgcatagattgcaaaaaacacctccaatcatgaacagtagggtacctggtgatgtctgggtttttcttttcaaacctgcaagtcctttttccaaaatgtaaagattgatagaatctaagataaaagacrttgtcagatactttacatcagttaccttcaaagcctgtctcattctgtaatttaaaccttgagggaaggaggcttgttttccttgttcttgcatccccagaatgcaccacaatatgtacatacatacataaatgtagatgataaggaggatttaatgtatatttgattctcttaaaatggaataatcacaaggggaggagctatgtggtttccaggaagtaccttaagttaccaaagtttttaaaggcttttttgtttgaacctagaaggaatattaagtagacagtaaacagacttcaatacgc

SEQ ID NO: 193333 - DNA, 536 bp, Homo sapiens
ttgtgaaatagtaaattagacagaaagccttttggggaccagcagcagaccagtggcttaatgggtagtaaaaataacaacaacaattacagtaacaaataatacttaagtaacgtgaaaaaaatccctattccctatagagattttgtagctctagctcccagttgactaatttagtctgtgatgctacatacatgtttggcttctacactttttatataggtagacactgagagatcagggctccctcgctcctccacctccaaatcattatttctcakaaataatgtgagctttcaaatcagaatgagtgttgaaaccacctcgacataagacagtagacagttcagaggggccctactctggctgtttttgttgtggtggccaattcagaaaaggaacaggccaaaatggacaaagatgttttgggttcctttgcttaggcaggtcaggcaaagtcctgtggcttctgggacttagcttgcaagtatatagattaagttgttctaaaaatgtattcctcttttgacatcctt

SEQ ID NO: 193334 - DNA, 596 bp, Homo sapiens
tatctgaatgacctccctcctgtccttccactgacctcatccttcctgcccctccaagcccacctccagtcccatggactgcacgaagcctctccagggcactgcagcctcaaggactctcttcttttctgaacttatcctgaaggtctggtaataaggcagagcttcccaactagagggaaagaattatacagaatgagtttttatatcttccaatagtacctacctagcacaacttgtcctatataatataatagagtctccataaacatttgagarcttgattgtctggctcattgggggagtacaacgattatgatgataacagctgccattgactatttactagattccagaccgtgagcgaagttgttcttgtatgttgttttaacaatcctatggaatagttagagttatcccattacagagagaaaacagagagcacctagctagttatgttgcgaagtcttcattcaagcctgagtctgtgtgactccatagggactctctcattcacaccctccatcacctggaacataggcaaacacaagtcctcctgctcttcaattactggcagtcaaacaagttacaaggcg

SEQ ID NO: 193335 - DNA, 270 bp, Homo sapiens
aagaattcaaagaagatattaggcaaataaacatgttacaatcttcactttgcctgtgtaaaatactcttatttttatttccttcagctcacatcagatgtatagatactgtatgcatttattgcctcatggctrttgtttagttgatcagattgaatagttctggtttgaattatattcgacactatgtggtataatgcattattatttaaccagagcagccacacaacagaataatgaaataatgttaccgttaatgcccattgaact

SEQ ID NO: 193336 - DNA, 586 bp, Homo sapiens
ttagtacatagcttttaaaaataaagatatattatttgatttgtttctggtaattggagcttgttttccttgtaacctcatttacctcctataaataattaatgtaactgcattgcgaaarcagcctaggtttcatgttaatcagcacggaaatcatgtcagcttgacttactcacttaataaggcttcctgggtaagcagctttattgaaaacacacattggaacttattggtcaactagctgcccaggccaactcagaaaatcccacttttaatatggatgatagagcttgtgtgctgagctgcacttctaactcaggcagatatccagagggagggtaaagaacctaattaactttctgttaaagtaacacagctcttccagaggcaggtgcactctaaggccaaaaaggatggagtgggcttgggaaacctaatgctccccatgtaattataataacatttgtgtagcattttaaagtttacagagcacttttgtatccattaattcatatgtttcttatagaaaacctttgagggagatagaaatttttatgctcattttatactcaaggtcactgtgggt

SEQ ID NO: 193337 - DNA, 490 bp, Homo sapiens
agcattttgaatagtgtcatacaacatgaatttcatgttaagttttaggtattgttctcctaaacatcaccatgaatttttctggccacttggacaagaataggtataattagaatctgttattaatattgattttgcatcaacaaaagccaatggcttcatttcaacatctatttgaaaaaattccccaatacacctactcctccagtctcctattgaaactgaaatcaaagtttctgttctgtrgcaagaggtaaggaaaccaagccctatcaactgcctccactgagttgactagaactcttccatcatattcaagatggaagttagctcccaaactttcactctgttttataattgggagaaaacagttagcttgacactcctattcaatcacatacattttcagattcatgaaccttctgtattgcgaatacaatttttcccaccaaaaccaaatggcagagctctgaggataatatgcagtgtc

SEQ ID NO: 193338 - DNA, 596 bp, Homo sapiens
tgtgatcacacatactgatcacaacaaaagttgtgatcaaagaaaccaagggttgtctccagaacaggtgcctaaatctaatgttgctttcagcctgttaaggaaccatctcacaggtgtactgaaagaagcatggaaccaagactgtttcatcattcactcattaaaggagcacagaaaaattattgtaattattgtaatttttgtacccttagggcamaatgaaaataagattgtctttgctacatcatttagaagttttcatgaaaaataaggagataatgcaagcacaagtactttgtaaaattgttatgccaatgtgagggttggcaattgttttacagaagctgtttgagaaagtctgtagcactatctcacaaagcatcatgatataccatcttaaggttgcctcaattcctaggaaagaaattagctcacaaattacataggaaataggctcgaacatgacaaaaatcaatgaatactggctcaaggggcagaatctggcccttccctacacatacacataaacacattctggtcttataaagtccatttttagccatttggtatttggattttcttttatacctaca

SEQ ID NO: 193339 - DNA, 627 bp, Homo sapiens
gggattgctggaatgtagggtatgcacaatttttaaatttcctagatgtattaaataacaccccaaccagaagtgtgtgagctttcctattgctcatatccttgccaygttggcactgttagacttttaaatgttcagccaattttaactggtgagttttcccttaaaaaccctgaagagggcagcatatcctggtaattgctgcatcttatacctgcattccagtttatgggtccctcccttctttactggttgaaatcctttgacctcagttactcttcaacccactctctcacctcagtcagctctgggcagtatcttagaaggacagacaatataacactatctcaaagctgaaagttacctccagctttttcattccacattcctggcacacttctgtcctctgacaaggaggaggtagggaaacagaaacaagtcagtctggaattaaaacactttttccagttcaaagtagcacaagagagatatgatgtgagtagagagtagtcttccaccattctaaagcagtggtttgtaatctaaatagaagggcattgcacactatcaaaaactatgcttatgtaaatgggagaaatactgagaagtaggaaaaagtattgcaaa

SEQ ID NO: 193340 - DNA, 561 bp, Homo sapiens
tagaaaggagagtcagggaattctaagctgagaagtctcagagttcactcattccaccagctctgagtgccaactacattctggtgacaggatagatttcatcatcttccattcattcattggacaggtattattgcagcctgtttcccaagcctgcaccccatgctaggattctctgataaacacaacccagctcctgaggcaggagaatagggtctggagacagagaacttaaggccaatttgtgctgacttcctaaaagagaaaacaccaaggtctgggggcagagaatctaaggccaagttctactgacttcccaaagctggatcaaaaggacaacatctgggtctgggggcaggaaacctaaggcctattaacaccttstaaagctgaacctaaaggaaaaaccccatctccccagcggagtagcaaaggatcaaaggctactttccttacagccctctcactctaccatggctcggatggaaagggagagtgccttggattggcagggccaagcagggaccagcccttcatttgcatagggcaccaattcacttc

SEQ ID NO: 193341 - DNA, 530 bp, Homo sapiens
attgtaatttttataatttttttcttgctgttattgtttttttctgaatatgttcaatgcatggagggccatctgtagtgtccttatttaaaatttgatattttgttcatcattggatttttgcattgcttttgattttttaagtcattgccttaaaaatatcatttatctygactacccccttaaattttgtgcccaagaggagtgcctcacttacgtcaccctgttcctagccctgagatgggaagatatcacagagaaatggtgatgtctgagctgttacagttgcatatacaagcatcatagcaacattctgggatgtatgatcttcatcagggtgtttaactcttggttttcccaccatgagatgggggcagtaaaagtacttactttacagggttatactgaggattaattgtagactgctcagcacagtgcccagtacactggttcagtaagtatcttagtccattcagattgcaataacaaactaccatataccgggtggctaataaacaacagaaatttat

SEQ ID NO: 193342 - DNA, 530 bp, Homo sapiens
attgtaatttttataatttttttcttgctgttattgtttttttctgaatatgttcaatgcatggagggccatctgtagtgtccttatttaaaatttgatattttgttcatcattggatttttgcattgcttttgattttttaagtcattgccttaaaaatatcatttatctcgactacccccttaaattttgtgcccaagaggagtgcctcacttacgtcaccctgttcctagccctgagatgggaagatatcacagagaaatggtgatgtctgagctgttacagttgcatatacaagcatcatagcaacattctgggatgtatgatcttcatcagggtgtttaactcttggttttcccaccatgagatgggggcagtaaaagtacttactttacagggttatactgaggattaattgtagactgctcagcacagtgcccagtacactggttcagtaagtatcttagtccattcagattgcamtaacaaactaccatataccgggtggctaataaacaacagaaatttat

SEQ ID NO: 193343 - DNA, 616 bp, Homo sapiens
acaaaggttataactgaatacccatcactccttaattactttactacatttcactattatctctgcttctgaagttatttaaatctatcctatytgtatagtaaaataccatataacagcatgctactgcccatatcttctcactgccacattcattgacatccttttggtaacctgaaactggctgaggtgggagtatttacaccaggaaattggcaagggccgcaaattagggcttgattctttgttgtctatcgcaatgttgataatgcacttaaaagtgtgttgcatctgtagctattatactaaaactgtatgttaaatcaaggtcgaatggctaagaaattataatgagttcagcaaaaaacgaaagcagtctgagaaaatcaattggaacttacagaatattgtatattttgttatttataacttacatgatatatgtccttttatcagtaaaatttgtaataaacttatatttgtataaatgcatactgttggggagtcaattgttgaacatttactagtacaccactgaccatacttttctctgataaagagatttattgtataacatctgtttatattccttctgaaactattccagtcaatagaa

SEQ ID NO: 193344 - DNA, 616 bp, Homo sapiens
acaaaggttataactgaatacccatcactccttaattactttactacatttcactattatctctgcttctgaagttatttaaatctatcctatctgtatagtaaaataccatataacagcatgctactgcccatatcttctcactgccacattcattgacatccttttggtaacctgaaactggctgaggtgggagtatttacaccaggaaattggcaagggccgcaaattagggcttgattctttgttgtctatcgcaatgttgataatgcacttaaaagtgtgttgcatctgtagctattatactaaaactgtatgttaaatcaaggtcgaatggctaagaaattataatgagttcagcaaaaaacgaaagcagtctgagaaaatcaattggaacttacasaatattgtatattttgttatttataacttacatgatatatgtccttttatcagtaaaatttgtaataaacttatatttgtataaatgcatactgttggggagtcaattgttgaacatttactagtacaccactgaccatacttttctctgataaagagatttattgtataacatctgtttatattccttctgaaactattccagtcaatagaa

SEQ ID NO: 193345 - DNA, 473 bp, Homo sapiens
aatgatgcctctgagactgtccaggagtcatttaaattgcttgtttgttatgtatgasaatttgcctaacctccaacctgcaattgtagcttggcaatcttttgtttattgtgctgatgtgctttcttgcatcatcgtcttccttaaacctcttttttggtttgtttttattttgcccatctagaaaatatacgcaggcattgtgttgattttcccaggctcccttgagatcgtgcaggccttccatctcttcatctgatgaaaatgctgccagggtgatgtttacaatctcatttttcaccccaggatccctgcactcagctgtggtgggaatcacagtgtgctcagccagccgtgtcccttcttcccatggaatttttggaatttgggctgctcataggggcacagaagcaccagctacattgctccttctatgctggggaatgacagagtcagtgctcacactatgaatg

SEQ ID NO: 193346 - DNA, 473 bp, Homo sapiens
aatgatgcctctgagactgtccaggagtcatttaaattgcttgtttgttatgtatgacaatttgcctaacctccaacctgcaattgtagcttggcaatcttttgtttattgtgctgatgtgctttcytgcatcatcgtcttccttaaacctcttttttggtttgtttttattttgcccatctagaaaatatacgcaggcattgtgttgattttcccaggctcccttgagatcgtgcaggccttccatctcttcatctgatgaaaatgctgccagggtgatgtttacaatctcatttttcaccccaggatccctgcactcagctgtggtgggaatcacagtgtgctcagccagccgtgtcccttcttcccatggaatttttggaatttgggctgctcataggggcacagaagcaccagctacattgctccttctatgctggggaatgacagagtcagtgctcacactatgaatg

SEQ ID NO: 193347 - DNA, 591 bp, Homo sapiens
ctctgacaaacccttgtttaccacatttttactcccccaccacacaaagaaatatttatgattcaaaaatcagaagttcctttcacktcttgttcattggcagaacacaactagagaagaacctacaagccaaaggtgccctttctcagggtatactataaacacctgggcagcagaggccacttgtttatgagtttttcattcttattccactaaaaaagagtctcatggagacttatgaaaagtactcattgaataaatctgtgtatttttcagtaagaggagaaaaaggtaattctctagtgatgttgctcagaatagtaaattctatagtggctacaggtgtgtgatggactaaactaagaaggtctccctttctattttgtggcttctctaggtttcttgaatggatggtgactttatttcctccctgcaatctaaacctggtttgcctggcatttggttgtcagcagttggaaggttccaccttcaatacacatgctgcagcaattgcaataattctccttgctttttcatctggggatttaaattgttccatgagatgtacagacacccaatttgggttagggg

SEQ ID NO: 193348 - DNA, 591 bp, Homo sapiens
ctctgacaaacccttgtttaccacatttttactcccccaccacacaaagaaatatttatgattcaaaaatcagaagttcctttcacttcttgttcattggcagaacacaactagagaagaacctacaagccaaaggtgccctttctcagggtatactataaacacctgggcagcagaggccacttgtttatgagtttttcattcttattccactaaaaaagagtctcayggagacttatgaaaagtactcattgaataaatctgtgtatttttcagtaagaggagaaaaaggtaattctctagtgatgttgctcagaatagtaaattctatagtggctacaggtgtgtgatggactaaactaagaaggtctccctttctattttgtggcttctctaggtttcttgaatggatggtgactttatttcctccctgcaatctaaacctggtttgcctggcatttggttgtcagcagttggaaggttccaccttcaatacacatgctgcagcaattgcaataattctccttgctttttcatctggggatttaaattgttccatgagatgtacagacacccaatttgggttagggg

SEQ ID NO: 193349 - DNA, 591 bp, Homo sapiens
ctctgacaaacccttgtttaccacatttttactcccccaccacacaaagaaatatttatgattcaaaaatcagaagttcctttcacttcttgttcattggcagaacacaactagagaagaacctacaagccaaaggtgccctttctcagggtatactataaacacctgggcagcagaggccacttgtttatgagtttttcattcttattccactaaaaaagagtctcatggagacttatgaaaagtactcattgaataaatctgtgtatttttcagtaagaggagaaaaaggtaattctctagtgatgttgctcagaatagtaaattctatagtggctacaggtgtgtgatgsactaaactaagaaggtctccctttctattttgtggcttctctaggtttcttgaatggatggtgactttatttcctccctgcaatctaaacctggtttgcctggcatttggttgtcagcagttggaaggttccaccttcaatacacatgctgcagcaattgcaataattctccttgctttttcatctggggatttaaattgttccatgagatgtacagacacccaatttgggttagggg

SEQ ID NO: 193350 - DNA, 624 bp, Homo sapiens
cacacagtgcacagctcaagaataaaaagataacccaattaaaacgtgagctcaaggtcctaaaagacatttctccaaagatacacaaatggccaggtagctcatgaaaagatatgtagcaccctttgctatcagggaaacacaaatcaagaccgtgagaaaccactccacacccactaggatggctaaaataaaaagaagacaataataagcattggcaaggatgtggagaaactggaacattcatgcgttgctggtgggagtgtaaaayggtgcagccactttggaaaacagtctggtagtttctcaacagggtaacagaggtgagacccagcagttctactgtgttccacacacatcagctatctatccaagataagtgatggcagatgtttacacagaaacttgtgctcaaaggcccacagcagcactatttacaacagccagaaagttgcaacaaacccaatgtccaccaagtgatgaacagataaacacaatgtggtctgtccacacggcagagtacgactcagccataaaaggaatgaggtaatgacacaggctatgatgtggtgacccttgacaacgtgatgctgagtgaagaagccggacacaaaaggatgcatc

SEQ ID NO: 193351 - DNA, 590 bp, Homo sapiens
aagcatgacatggaggcctttgctgaccagggcagcccccaaaacaccagctccccaccacaagtttttatagctcttataccccttttttccagagcattgctcaccctggggttcagtcatgatttacatcattagttgttcaatgtccatccccaccaagaaaccatgagctctatgagatcaggggctaggtctgtaccgccccctcactgtggccaaaatatgtagcatcaggctcaggggaataaggccagtttgagctcawtcaaggattgaccacccagaacaagctagctgtggaaggggactgagttatttgggaggaagttccccgtcactgcaggtgtacaccagctaggtatctacacacccagcagagtttagttgcattctttcatccagcaaacatctactacggcatcttctaagtgagggcatgccctagagggcgtcgtaggtgcctcagggatccagagttgctgagagcctcctagacctggtgaggttatttcaacacacagaacaaggatgctggagggcacagtgggggtaaaagccatgttcactcttttgatttatggtgatgg

SEQ ID NO: 193352 - DNA, 619 bp, Homo sapiens
actatatatctgttatgttgtatgcatgttatatgcacatatcatatgcacattacaccatatgcatgtcacattatatgtgcattacatcatatgcatgctatttcatatgcccattacctcttacagacattctatcaaatgcatgttacatcatacccacattacatcataagtacatttacataaagccaaccatctctacttggctcctccaaaaagacaataaaatccccttgttgaccctgttaccctattctccattcaacagccttgccttccactgccccatagctgggaagaccccacagcccaaatgctcagaaaagcaaagaagttaattctcactttttgaacttcccaaggtcccagttctggtagtttcaaagtgatttaaaggactttaaaggataacttttcccttacatggaaattttaatacctaaccctcatgtgagatacacaaattccaaggaagtcaagttcatccttagtccytccctgaccacttcctcagccaccgcatacttcctccagatctgtgtcgccatgttcttattcatgcatttgtccagtaaacatcctgtgagtgccaactatgccctttgcttggaaaaga

SEQ ID NO: 193353 - DNA, 569 bp, Homo sapiens
tttccagcttatttctggggttttggacatgaacatatctttggttgaccaaagcatccctgttcattttcagtcagtagctgattaaagtgaacttaaactctgtagaaagtagattttaagtatgtatgcatgtgtgcagggagcaacatctgtgtatagtgaaaagtaagaakaatcaggacattgagtttctgttttctcctgactctatgatgcaggcctgcctggcctcttcactgttttgggccacaatttcttcattgacaaaatcttcaggagtctagatcaaatgatttctaagaaaggacccttcctgcatttccagttgatctatgaatgcattcctgaggtgctgggtggtttctgattttcttaggagtttcggagccaaccgccatattcttagataggctcaggggaattctattctgagaaccctcacttagggagaacaagtctttaatttgaggatcagctcagctttaaattctccttttctccttcactctctatctttgggcttactctgcattgttaattctatgatagaatgaaaagagaactgt

SEQ ID NO: 193354 - DNA, 632 bp, Homo sapiens
ctcaaaactactccataatatcacaatcaagccaaacaccacccttcttgtagaagcttgctttggaattgaatgaaacattattttttacttgtaaaatttgtatttatctcaggtgtttgaggaaacaggcattaagttcaagagaacagtggtgagggcaacaaagatgactttataaagatactttatagtctctgtaaaataattcaatttccatggcaaaaaaaaagcacataaaaaagtttgtgtattatgtgtgtgtgcatgttttgtgtcctcttctggggagaaagtgtaaatcttcagattctcagagtctgtgacttaaataagactaaaactccctgtcctttgaagggtaaaacattttaaggaatggaattaatgttgagaagaagtaaaattcttcagctgaaaaatgaagaaaaccatgaattkcttctctattcgccaattaataatatagacttctaaaccagaaagtatatgactgcattaaaaatgggcaataacccactctcatttttgaacaagcttttccaaaatcaaaattaagaaatttggataaaaatatttgctttgttagatactgttttcagttttcatattatatgaaaaattgtgtagct

SEQ ID NO: 193355 - DNA, 416 bp, Homo sapiens
aacaaaaaaaaaactcctgcagttagcacagtgtctgcccaaatggccgcctagttttgtgcttgaaacccagggccctggyggtgtaggcacctgagggaacctcctgatctgtgggttgtgaagaccacgggaaaagcatagtatctgggccagaatgcactgttcctcacggcatggtccctcatggcttcccttgactaggggagggagttccccaaccccttgtgcttcctgggtgaggcgacgccccaccctgcttcagctcgccctctgtgggcttcacccaccgtctaacaagtcccagtgagatgaaccgggtacctcatttgaaaatgtagaaatcacctgccttctgcgttggtctcgctgggagctgcagaccacagctgttcctattcggccatcttgcccag

SEQ ID NO: 193356 - DNA, 556 bp, Homo sapiens
actatttctttcccttcctcccacaccaatttctggtttcttttttccatcttttgagactgtctccttctctttttttcttttccttccctctctttattctgttttkccttttccaatttgctatacattctttcctggaagaaacccagtaggccctctagtttgacttcacattagaataacctgagggcacaaaaacaaaaattgacaaatagaacttgattaaactaaagagcttctgcacaacaaaacaaactatcaacagaataaacagacaacgtacagaatggtagaaaatatttgcaaactatatatctgacaaaagatcgaatatccagaatctataaggaacttaaatatataagcaaaaagcaacctgtattagtccatattcatactgctatgaagatatacccaagactgggtagtttataaagaaaaagaggtttaatggactgaaagttccacactgctagggaggcctcacaatcatggtagaaggtgaaggaagagcaacgtcacatcttacgtggcagcaggcaaaagagcgtgt

SEQ ID NO: 193357 - DNA, 554 bp, Homo sapiens
ctcaggcttagctctacagaagatgaaaagaaaactgtggaagaaaagagcaccttcatgcaaagggttcactagcgagttgagccctgagaaagagagacaaatcaaaaattgtgacacttagaaatataaatccaggcttataattatctagaaatgaaagtgtaacttgatgaaccttaaggagcactcttctatcatatttcctaaaataacagactcatatggaaatggaaaatggtggcatggtctgacttaaacacggstttcttttgtgacctgtctccctcccctccctaccctgtcaattcctggcttgatttgcttttcctttcttgccccatctcctcttttcacagatacaaaacagtatccggtgtttgtgggccacaagccaggacggaacaccacacagaggcacaggctggacatccagatgattatgatcatgaacggaaccctctacattgctgctaggtaaggggccttttccccatgtctgccttgagagtgtccaaaagcccaaggtcctaaatttaccagctatgcattat

SEQ ID NO: 193358 - DNA, 520 bp, Homo sapiens
atggaatgcaaaaatcagaatgcagttgyccatttcaaagcaatggctttaagcaggacatgattccaagtgtcctaaaatgacaggttatatgaagtcatttgcagttccaattatgttgaacagaatggtaaatggtaaaattttagatgtgtttttttcagaggttttgttgggtaaagaggtgtaatcaggaagggaatggcagacaaaaaggagagaacaaagatttgatgataataatagctaatgctacattacatttgccatgtgtccagcagtgttcaaggcagaggacgtattttctcatttgctcttcctaatagtcttgcaatacgagtatatttatccccacttgtttacaaagaagaaaacagagggaccagaggtgcccatgccataggacccacagctaataagacctgcaattcaagccacaaggtctggctacagtgctggcaccactaccctctgctgcttttgccatttgggtcctttaaggctgatgtagaagtatcca

SEQ ID NO: 193359 - DNA, 516 bp, Homo sapiens
tcttcttattttgctgagggggcatctgggaccctgaaagggatggggctggcctgtggtcccacaagaaaggagcgagagagacgtggggcttggattgtgaggcagccttttcttcccacgtgctctccctgcctctactttctgcaagcaccaggaggtagaagacaaaggtatatccacagctattagcatccccagggtctgatgtctggcccttgccagtggcgactgcgtcctctttgtctgaacgacctagtctttgagccagggcctacatcgaggtccttccagacaccctagaggcaaaagcaaacctctccctcatcctgctgctttctttagggctgagaaagcctgggccagcagatgccctgtcagagcctagggaaccaggcttggcttgggcagacggcatctcggaaggkcttgtgcatttagggaaaaccagccccaaataactcccagattcagtcctgagctatgcaggtgaaggcaggtaggaaattacagcca

SEQ ID NO: 193360 - DNA, 522 bp, Homo sapiens
cagcgggaagcagcgggcggccctctctcctgcccacttctcctgggggtgggggagccctgtgtcacccgacgctgcgaggggctgccacgggcttctcaggttgtgcccttcgcggggccgtggcccgtgcccccgaggctgctaccctcttgaggtgcccggagccaaagcagagggttgatcccgccggttgggtgaggtagcacccggtgacggcggctatgactgtgccctgggcgcaggaacgagctcctcgcgctgcctcgaaggctcctgaccttccgcgccttgcgctgtccccgcgccgccgggtggacccacacacgccaggagcaaactgcgcaggactcggccgccacctccctgcgcccctccaccgcggagaccctgcgcccctagcccagcgtctcttaccccacctgggcagcgctgcgtctgcggctcgtsggctccgggctcgcccgccgcggactctggctcaggtttcggctccggctggggccccggatccagctctgg

SEQ ID NO: 193361 - DNA, 512 bp, Homo sapiens
aattcaaagaatactggatattctcacataacagcctgtgctgccaatgaacaataaaataaatgcagtttgcaatgccctgacccaaggagtttaagataaattttggatgagttgttgatttagaggaggagctggtatcacttcagtaagtcacagaaaataagattatattaatatttatattgcattattttaaatctgcataatgctgagtcttcactgtgaagaaggaagcccctcacaatgattagtgaggggtagggagggagaatggcaagaagacaccaagttccttgcaggcaagcaaatagatacatcataaaagtgaagtgaaattccagtcctctgagatcttcataaatagaagaaaccctcatttctttcctcctctggttgcagcttggactgatgagctgmagctctgtctgagacctggcactgttaggatgtcccccagggttctttccaccccagttctggagctcaggtggccccttgcctctgaattc

SEQ ID NO: 193362 - DNA, 507 bp, Homo sapiens
gggatgtggggaagcggccgcaccgatgggacccggctcccctgctgaagcccccgagggccggtaacagcccccttctttgtccttccccagcaggtgctctctgggagtcccagaagctgagcttggctgaggcaggggtgggctgggactcttgatatttagaagaccttgtgggctccctcccccttgtcggggtctagggttgttcagtcccctccaagcccccacttcccgtctatcccggtcccacccaccggccccaggttgacgaagccgaatttgcgtgccaggcgctcgacctcccggttaccctgggacacctggacggcccagctgctgacatagatgggggctcggaccggggcccaccccacagcccgggggcggacaagggccagrgccaagaccaggcgcagccacagcgcaatcggggcgggccgcatggaggcggggcgggagcggggcctgcgcaaatcccctccctcccgccaaaccgccgagtgg

SEQ ID NO: 193363 - DNA, 571 bp, Homo sapiens
atgggacccggctcccctgctgaagcccccgagggccggtaacagcccccttctttgtccttccccagcaggtgctctctgggagtcccagaagctgagcttggctgaggcaggggtgggctgggactcttgatatttagaagaccttgtgggctccctcccccttgtcggggtctagggttgttcagtcccctccaagcccccacttcccgtctatcccggtcccacccaccggccccaggttgacgaagccgaatttgcgtgccaggcgctcgacctcccggttaccctgggacacctggacggcccagctgctgacatagatgggggctcggaccggggcccaccccacagcccgggggcggacaagggccagggccaagaccaggcgcagccacagcgcaatcggggcgggccgcatggaggcggggcgggagcggggcctgcgcaaakcccctccctcccgccaaaccgccgagtgggcccaggcgtccgacccgcccccggcgccatagcaacgcagaaggcttcgactcccagggggccttgcggctactcagccaggaggggc

SEQ ID NO: 193364 - DNA, 571 bp, Homo sapiens
atgggacccggctcccctgctgaagcccccgagggccggtaacagcccccttctttgtccttccccagcaggtgctctctgggagtcccagaagctgagcttggctgaggcaggggtgggctgggactcttgatatttagaagaccttgtgggctccctcccccttgtcggggtctagggttgttcagtcccctccaagcccccacttcccgtctatcccggtcccacccaccggccccaggttgacgaagccgaatttgcgtgccaggcgctcgacctcccggttaccctgggacacctggacggcccagctgctgacatagatgggggctcggaccggggcccaccccacagcccgggggcggacaagggccagggccaagaccaggcgcagccacagcgcaatcggggcgggccgcatggaggcggggcgggagcggggcctgcgcaaatcccctccctcccgccaaaccgccgagtgggcccaggcgtccgmcccgcccccggcgccatagcaacgcagaaggcttcgactcccagggggccttgcggctactcagccaggaggggc

SEQ ID NO: 193365 - DNA, 530 bp, Homo sapiens
ggcatctagtaatgttgtatatggatctgcagaaaatctgatgtttcctctgggagaggagttgactggtggtgttggtgggtggggagacaggtgggagaggggtggaaggcaacttttccatgctaccttatgctgttgaacatttggtgaggagaatgcacttatgtaacacttgtgggattcaagaaaaattaaaaataagaagctaaaagggaagagaaaagaatcataaatagaaatagggaaaagtcatgacagttgstttcttaaggactatttggctaccttgtggtataattggggacctcacctgtgaggatagaatcagactataattactcatagtgaatacaaatactgtatgtgttatgaaaaggaaactggtttataacaggtcttttgctttcttctttggagctggtttataacaagtcttttgctttcttcattggcacaaaactgtatctggccacttacaggtatatcaacattgacctcaggattcacaggttgattattgtcattaa

SEQ ID NO: 193366 - DNA, 495 bp, Homo sapiens
tctctaatgcaacactatgaagacaaattgtgccttttgtttatgtgcaaactttggttgtcactccaggccttgggtgtcttaaagaaggagcctggggcttgttagttattgaaagccagttattccaaggtgaacctgcagttctcatatgacctaggaggaggactcaaggatggactcaggcaggagagatggcaggttgcgaaagcacaycaatgctgggtgggcagaatgtcttctgaggcatgggtgggtggtgcaggaatccagccagaaatgcacaccattaaaatcatcaagagaccactcaaaagtgtaggtaatccagagtctgcatttagatggagtgaagtgcagtggaaagagcaataacccaggaattcagagacctgagctctaattccaccttgactagtaaccagtcctatgcctttcacaaaccacctttcttttctagcttcattttctctttctgtaaaatgagggtaactg

SEQ ID NO: 193367 - DNA, 619 bp, Homo sapiens
ctgaataatttcaatctggcttctgaacctctctgagtttcagttgcctcatgttgaagattgcaacactattcacaattgctaagacatggaatcaacctaggtgcctatcagtggattggataaagaaaatatggtatatatacaccatggaatactacacagctgtaaaagagaatgaaatcacatccttcacagcagcatggatgcagttggaggtcattatcctaagcaaaacataggaagagaaaaccaaatactgcatgttcttacttataagtgagagctaagcattgggtacacgtagacataaagatgagaacaatagacactgggggctactggggaggggggcaaggactaacacctatttggtactatgctcactacctgggtgatgggatcatttataccccaaacctcagtgtcgtgcaatatacccatgtaacaaacctgcacatgtaccttctgaatctaaaatgaaagttgraattatttttttaaagttacagctaccatgcagagctggtgtaggaattaaaactatcaagcacctagcatagtgcctgctacagagttcccactcagtagatggtaacagttggtattatagcagccc

SEQ ID NO: 193368 - DNA, 384 bp, Homo sapiens
tatacacttaattttttcccagtattttattgaccaaacgatgattcaggcttcaggccaatgggagaggtatccctgggtagggactggttgtagataaggcaggtgggtagatataatactcaatggtgggccaagatcccagtcttgatgagggtagctgggggagctctcaattagatgtgctgaggtttcatcagggtgaagagggagagctatcccagctcccctgccaggccagcaggaaagctatccacctcacagcctcattcctattttagtgttttggctattcagatcagacaggcacctcttytcatctgtagaaatgttgatgttccaagtagggaggggttgtgactctgcttctcatgcaggtctgac

SEQ ID NO: 193369 - DNA, 565 bp, Homo sapiens
atcatccccgttgaattgttaggtgttttatactgcacaggttttctttgtctgatcttgaatttcctcatttgaaaaatgcatacaaatagaacataccacataagactgttggggatattaaatacaataatgtggctgtgtgtggtggctcatgcctgtaatcccagcactttgggaggccaagatgggtggatcacttgaggtcaggagctccagactagcctggccaatgtggtgaaaccccgcctctactaataataaaaaaactagccaggcgtgatggcacatgcccgtaatcccaactactcaggagactgaggcaggagaattgcttgaacctgggaggcagaggttgcagtaagccgagatgacgccactgcactccagcctggrtgacagagtgaaattgtgtctcaaaaaataataataataaggtggataaactttggcctagtgtctggcatggtgcaaagttcctgacatattgtaaatattatttacgtctttctccttgtctttgcttattgcaaggcatgggttcttggaattcccctagagacac

SEQ ID NO: 193370 - DNA, 581 bp, Homo sapiens
cttcaagatgctctattgatccttcttccttcccacttttctgaattcatctcctattcctccctaccttgtgtagagggggtgtgattcaactctgatcacattggctgatgccattcttggtgatcctcaaatgtaccatactcattctccctgtactcagaccttcccaggcctggcttcctcacttcatctgggattcttagagacaacttattggacctccagtcttaagtatatcctaccctctctcttcctactctgcctcattcttctttagggcgctttatagctctgcctgtgtgatgctctgggaaaagtggggaggagagaaagtcatgtcttttttcactgagcaatcaggagtctccacaggtgcagtgatttccgcatgcggtatccactgttctgttctgagaacacatggatgaaatatgggaaggatattagagcttacaagtkcaagcaagagaacagcaatagatgtctcctctggaccactactgcttctctttagttaaggctaaacataattgcataaattggtgacacacctgaaagactgggagtatgtctgatgc

SEQ ID NO: 193371 - DNA, 614 bp, Homo sapiens
aactgcattaaacaatacctcctaatattttacatgttttttgaatacccgtcctcattccacaccttcaaaaattaaaaaaaaaaaggctataactacgttttttacagcctgaggtgttttgaaattttggctaatcatatcttccttgttatctctgtgttctatttcaggatggaatgggaaacctgaggatcacagaaaaaggtctaaagctagaaggagactctgaattcttacaacctctctacgccaaagaaatccagtcccgaccagtaagtttctgctgagagaaggaggcattattgttgctctagaatctaaatctggaggaattgatcttgctatcagctgagtacagagaattggggtggggagtaatactggtattaagatgaatttgctttctcttctgaatctttgagtatcatcacagcagtggtactgtaagcaagtgagatgacctctctgagcctctttccattcctgctcaacccctgctacccagctttatagattgtgccacaaataaggcaaaacagcaaatgtggaamagccataaataatatatgaatgcagataatattgctgtttattttattcatcaagtactt

SEQ ID NO: 193372 - DNA, 532 bp, Homo sapiens
gctatttcaatgtgattggatatctttttaattgctaagtataactgcaagtttttggcaggaactactagtagatagaacgaatgaatgagtactaaggaaacctttattactactttgtgagtaaaggtctccttaggattcattcattcttagacaaagttgtacatccctacttcttcaaagaggctttttacctcacatcttaggatgctaggattagattatgcttttgcataacttaatgtgaactagcaaaggaaaggaaaatagcatttattaagcamctattattgttccacacctacagcaataggaaagccgtatcatgaatttatcttcatgttcacctcaaactccatttgagggtgggtatagggctcctagcccattgctgtattgaatttagaagttcggaagaggagagggtagaaagaaaacttgaatggatcagaaaaattaacttacattaggagaataaagtggaaaattatgcaaatattgagagtatttatgtcttttaaaatatttt

SEQ ID NO: 193373 - DNA, 440 bp, Homo sapiens
agttagggcataattaagttgtggcttcattctctcagagaacactgttgagatggtctaagtctctgttgagcagagtcgcaggaggacagtatggtggccaagaatccagacctcaaaattagaaccacctcatcggattatagctaagactgaaaacattaaatgtgatagatatcasaatactcacaatctctggggaagggaattgattaagaggagtaataagagaattttctcgggtgatagaaatgttccctctcctgtttgaatattgttcccaaagatgttcagatttgtaaaactcattgggctatgtagctaatatctgtttgttttactagaagtaaattattcctcaatagatgtacatacatatatacatatctacatgaaagcatgcaaagtgcttagaaaaatgcatgctgtttagctatttt

SEQ ID NO: 193374 - DNA, 439 bp, Homo sapiens
ttagggcataattaagttgtggcttcattctctcagagaacactgttgagatggtctaagtctctgttgagcagagtcgcaggaggacagtatggtggccaagaatccagacctcaaaattagaaccacctcatcggattatagctaagactgaaaacattaaatgtgatagatatcagaatactcacaatctctggggaagggaattgattaagaggagtaataagagaattttctygggtgatagaaatgttccctctcctgtttgaatattgttcccaaagatgttcagatttgtaaaactcattgggctatgtagctaatatctgtttgttttactagaagtaaattattcctcaatagatgtacatacatatatacatatctacatgaaagcatgcaaagtgcttagaaaaatgcatgctgtttagctattttt

SEQ ID NO: 193375 - DNA, 558 bp, Homo sapiens
aatagaatggggaaagtttgttagagctgagggctctggaggatgccttgggtccatttggccttaagtcccagtgaccacaattgccatctgtcgatgtgcatgttctgtgatgttgttaatttgtatttcaaaaacttataaattagtaaaacttctctgttgcaatattaaacaggagaatactgaagctagggcagtagtatggaccttgcatttaaagacatttaaaagatggaattgatataccttgacttctggttggatgtagggttgagggatcagaagacattttggaagatttctggttttaggatggtgagatggctgggtggtgggkcctaaaaagcaaaatagaatttattacttttccactagaacttggctagtactcatgtatacctttagtcccctatttgaagctatcctcttaatcccttatttttgtgatttttaccaagactgtcacaaatttaatttgtagaacctgtaagatttaggggtagaggaagtggaaaatatgagctgaaactttgataactgtgatattataccaat

SEQ ID NO: 193376 - DNA, 172 bp, Homo sapiens
gtatatcttatgtgcctttataaatttctaatcttcattcatttaattacttaatgaataattggtctgattatctattgctacacaacaarctaccccaaaacttagtggcttaataaaacagcaataatttgttttactcatgattctgcagattgggcagagctcaggg

SEQ ID NO: 193377 - DNA, 448 bp, Homo sapiens
tgtgagtgtgtatgtttgcttactctgtatctgcttagccaaagatccaatatattaagtgccagggagtatatcttatgtgcctttataaatttctaatcttcattcatttaattacttaatgaataattggtctgattatctattgctacacaacaaactaccccaaaacttagtggcttaataaaacagcaataatttgttttactcatgattctgcagattgggcagagctcaggggagatggcttgtctcttttccctgatgtctagcaccttagctgggagactcaaaggcytggggtatctcaacagctgggactggaattatctccaggtgtgtttacttacatgtgtgggtggttgatgctagctgtcagctggaacctcagctggccagaacgcctacacacagctcttccctatgggctaacttgggcttgccctta

SEQ ID NO: 193378 - DNA, 448 bp, Homo sapiens
tgtgagtgtgtatgtttgcttactctgtatctgcttagccaaagatccaatatattaagtgccagggagtatatcttatgtgcctttataaatttctaatcttcattcatttaattacttaatgaataattggtctgattatctattgctacacaacaaactaccccaaaacttagtggcttaataaaacagcaataatttgttttactcatgattctgcagattgggcagagctcaggggagatggcttgtctcttttccctgatgtctagcaccttagctgggagactcaaaggcctggggtatctcaacagctgggactggaatyatctccaggtgtgtttacttacatgtgtgggtggttgatgctagctgtcagctggaacctcagctggccagaacgcctacacacagctcttccctatgggctaacttgggcttgccctta

SEQ ID NO: 193379 - DNA, 453 bp, Homo sapiens
gagggtgtgagtgtgtatgtttgcttactctgtatctgcttagccaaagatccaatatattaagtgccagggagtatatcttatgtgcctttataaatttctaatcttcattcatttaattacttaatgaataattggtctgattatctattgctacacaacaaactaccccaaaacttagtggcttaataaaacagcaataatttgttttactcatgattctgcagattgggcagagctcaggggagatggcttgtctcttttccctgatgtctagcaccttagctgggagactcaaaggcctggggtatctcaacagctgggactggaattatctccaggtgtgtttacttacatgtgtgggtggttgatgctagctgtcasctggaacctcagctggccagaacgcctacacacagctcttccctatgggctaacttgggcttgccctta

SEQ ID NO: 193380 - DNA, 565 bp, Homo sapiens
tggccttggcttttggagatctgtgttcaagttctgtctccatggttaactttgccttgagcaagccacatctccataaacctgattgtcctcattctgaaaatgaagttagtgataatttggggatttttgtttttgttgtttatttgggtttttttccctgcaaatgagcaatttggttgattcttgggaggaagagaccacctaagaccaaatagaagcrtgtactttctccttttggaagtgtgcacctgaatttgctttttctcagatgacctgaaccacgggaaaaaacagacaagcttggtattggcataggcttggacatctgggccagtggctgatcaagcctttctcctatgaacttaagttcagttcctagttgttgggcaagccagaagagcaggcagagctttgggttcggggacattcatggggctcgtggcccactgcacaggtatgaacattgctcctataggaagactgaattaacaggaaagggccccatttattcccacatgtccaggccgagtcagcatcagataaggagcagtattgcattggg

SEQ ID NO: 193381 - DNA, 565 bp, Homo sapiens
tggccttggcttttggagatctgtgttcaagttctgtctccatggttaactttgccttgagcaagccacatctccataaacctgattgtcctcattctgaaaatgaagttagtgataatttggggatttttgtttttgttgtttatttgggtttttttccctgcaaatgagcaatttggttgattcttgggaggaagagaccacctaagaccaaatagaagcatgtactttctccttttggaagtgtgcacctgaatttgctttttctcagatgacctgaaccacgggaaaaaacagacaagcttggtattggcataggcttggacatctgggccagtggctgatcaagcctttctcctatgaacttaagttcagttccyagttgttgggcaagccagaagagcaggcagagctttgggttcggggacattcatggggctcgtggcccactgcacaggtatgaacattgctcctataggaagactgaattaacaggaaagggccccatttattcccacatgtccaggccgagtcagcatcagataaggagcagtattgcattggg

SEQ ID NO: 193382 - DNA, 616 bp, Homo sapiens
gtgaccaaccatcctggttttcctgggacagtcccaatattagcactgaaactcccacatcccggaaaactcttgggcaaaccagcatgggtttacctacctgccacacagagtaaaatcagaatttgttcagaaaagattgactcgaatgtaagaaaataataaaaacacaactaacaggcgtactttgcagtttacgaagccttttcttttccatcaactcatttttaaagttcgccacaatcctagtgttagacttttgtagtgtcttgtgataactgaggatcaaarttgtgaataaatgccatgtttgctttacctaggaagaaaaagaaaatcattaaataaaaagatggcagcaggcgtgcgtgtttggggcagtgggatggcctcccaactccaggagcaggagggagacaaggggggcagcagtgtgtcctctcctggaccaactgatccatgaggtatgataagaaggcatgggctccacattcacacaccaacacgtcccaccaagacccttcctagctatgcgtgaccttgagtaagtcattatgtctaaactttggatttttcagttatgcaagggggttaaggatccccatgaatttcgcca

SEQ ID NO: 193383 - DNA, 474 bp, Homo sapiens
taattgtcactagatagcttttcttaaagtatttggtacataatgagcactccattaatgacaactattgctatttccattgctattattatggcataatttcagcactggatttgaacttttcagagcagctcttactacactggcagaagacacttcatcagccttctacaataattagtcatgctctgaatctttgctactttaccaaacagctccttcccttcttgtttcccccatytgttctggctaactggattaataatggatatctcctagcccatatcattttctatttagcatccagaccaatgaatgccccaaaatgcctactggagacattggctatgaactggagagggagccacaagcatgctctcccaagggaattctgagatcagtcctatgtgtctctgcagtttctaaattatcttatgagtcttgcctcattaacacactttattgcatccccta

SEQ ID NO: 193384 - DNA, 524 bp, Homo sapiens
aagatgtctaattagtgtatgtatggaatatgtgtgagtgtgagtgtgtgtgcgtgtaaacatgtgagtcaatttcacaagagactaatatatagacacgaatggcaggatataaatttacaataagaaatggagttggcacgggcactaggaactgcatccttatttccccctgaaagtcacgttgtaaaaggaggcaagtgaaacatataaagtgctctgatgtattagggttcttattgcagaccacaaactctactcaagcctatttaagcagagcagagtttataacagaggagtggtttgcagaggatattacaaagctcagtcagctactcaccagatctgtttcatcttttttttttttggacacacatctaggatacattttaaaaacgcttatgtggttagatgtggccatgtgactgaattctagccaatgggatrtgaacagtcacaatgtgctccactcccaggcctggcccataacagccacccatgtgcagaccctcatggtctttact

SEQ ID NO: 193385 - DNA, 525 bp, Homo sapiens
atcatcagaaaattacaagggtttttgaggctctgtaacagatatggacaaagagcagacttttttttaataattctacactgacaaacacaacgagcagcacaaaaccaggaaataatacaatatctatattaattaacagcctgacacacttttataagctttttattgctacaatttttattacaaccatttgaaatgctttttatagagagacagaccagaagttaatttagtttttcctctattatggttcatcaaagttagttttttaaattattggctgtttagaaatctttttcagtttcttttttcttttcttttttttttttttttttttttttgagatatagtctcattgkgtcactcaggctggagtgcagtggcatgatctcagctcactgcaaactctgcctcctgggttcaagcgattctcatgcctcagcctccccagtagctgggattacaggcatgcgccaccacacccagctaatttttatatttttagtaaagatggggtttcat

SEQ ID NO: 193386 - DNA, 557 bp, Homo sapiens
gggaatatgggacaaataaaatagacatagcaagagggtagattgaaatcctacyagatcaataagcacattaaatgcaaattatctacgtagtccaattgaaaggtagaactgtcaaggtggataaaaaacaagaccaaacctttgttatctatgagaaacacactttaaatatacagataaagggagagtaaaaatagtaggttggaaaaagtgatgtgataaaaacattaacccaaagaaagctagaagttgatgtataaaacaaagtagacttcagaacaagaaacactatcatgatattcataattattaaagagtcaattcattaagcacacatagcattgctaaatttctatgtacctaagaaaagcttaactatatacataaaaaaatggatagaactgaaaggagaaatagccaatttcacaattacagacagagatattaactctcagtacttaataaaacatgtagatggaaaattaacaaagatatagaagatataaacaatactcttagcctatatgacctaattagtacttataaagcactcc

SEQ ID NO: 193387 - DNA, 557 bp, Homo sapiens
gggaatatgggacaaataaaatagacatagcaagagggtagattgaaatcctaccagatcaataagcacattaaatgcaaattatctacgtagtccarttgaaaggtagaactgtcaaggtggataaaaaacaagaccaaacctttgttatctatgagaaacacactttaaatatacagataaagggagagtaaaaatagtaggttggaaaaagtgatgtgataaaaacattaacccaaagaaagctagaagttgatgtataaaacaaagtagacttcagaacaagaaacactatcatgatattcataattattaaagagtcaattcattaagcacacatagcattgctaaatttctatgtacctaagaaaagcttaactatatacataaaaaaatggatagaactgaaaggagaaatagccaatttcacaattacagacagagatattaactctcagtacttaataaaacatgtagatggaaaattaacaaagatatagaagatataaacaatactcttagcctatatgacctaattagtacttataaagcactcc

SEQ ID NO: 193388 - DNA, 617 bp, Homo sapiens
agaagttgatgtataaaacaaagtagacttcagaacaagaaacactatcatgatattcataattattaaagagtcaattcattaagcacacatagcattgctaaatttctatgtacctaagaaaagcttaactatatacataaaaaaatggatagaactgaaaggagaaatagccaatttcacaattacagacagagatattaactctcagtacttaataaaacatgtagatggaaaattaacaaagatatagaagatataaacaatactcttagcctatatgacctaattagtacttataaagcactccatccaacaacaatagaatacacactctttcaagtacacgagtcattcactgagatagaccacgaactaaaccaataaatgtcaataaatctaaaataatttacataacttaaagtatgttctctgctcacaatgcggttaaactagaaataagyaacaaaatgttagttggaaagcgttcaaatatttagaaattaaacgacacattctaaataatgtgtgggtcaagaaagaaatcacaagaaaaattagaaaacattcgagccaaatgaaaatgaaaacacagcatatcaaaatttgtgagatgc

SEQ ID NO: 193389 - DNA, 490 bp, Homo sapiens
atctcatctgtgacactttgttatgacagttttagcaaaccaatacactgagtgcagaaccaggatgggagtgagacactcttgggagccacagaagaaccacatactttcctaggttttacctgcaagaaccccaccaggttcttatggtaaacagccaataaaaatccccaagtggctctggcagagacaggggaaagtactccttctgaaataaacccagagcttcctccataaaagtgacccactttccaggggaagtgattamcagagccttgtcccaactttccaaaagccattccctgtgctccagcatctcactagccttcttatctcatataaaaagggagagggaaactctaccactgggtcagcacttgtggaaagacccactaagaagctatgacttaattataaaactatagaaggcttccctttcccacacctcaccatcacacccacagggctccagtgcagtaacagcagagta

SEQ ID NO: 193390 - DNA, 658 bp, Homo sapiens
tatcaaaacccacaaatgaaacacctgggggctggatctggcttgcaggtgccagtttttggtctccgaaccaaacaaattcattcaataatttaaatcagaaaaaaatatagtaagaaaatcaaagtgcttcaatggcattatggtgaaatgtagttgaaaccttccttctacactgcaactcccaaagggcagccaccagtgatgaattatctttaaatgattgtaaattattcattgtttctccccccacaaccatcattacttggggacaaagagccctgaataagtttctgtttctaaaggtaagactgttttccaccaggcaggtgagctcttgtctggtttttgcatgctactcattagttctgtggccaaacatataggycactttttgtggacagtcgaaactgagccacttcagagctgttagaaaaagctgcacagggtgcatgaggctctgttcctgggctgagatgccagagaggtcctgctttttatcctctgatatttgcaagggagggagtctcccaggaagctgagtgcaatttacagcttgggctaactgggctcagcaatgggcaggggactccagtgcttactcaacgggtttctggtcatccctggcagccagggatcaatgatgtggaatctggtc

SEQ ID NO: 193391 - DNA, 463 bp, Homo sapiens
ggggcctggtgaaaatggtgagtagttttccttcatgctgtctctaaattctcccaggactctcgggagcagccaagtcagtctcaccgagctaagtaaatccraaaacatctggggggcccacagagatggttcctacttggggaccacctgggcaaaggccagctctacccacaagcttccaggtccagagctctccattgcagctacttctacttaattggctgaagaaatttctgaagaaatttctaattccttccctgattccaaaaggggaaataagtgcattgttcacacttaagaactgaggatgacagccactgttctgggtaggggataagaaagagtgattttctttttctcatttgccagcagtagagtttttgtttttgttttgttttgttttgttttgttttgttttaagatgatgtgatttagtggaaaaataaaaacagtttgctca

SEQ ID NO: 193392 - DNA, 482 bp, Homo sapiens
ttctttgggctgagatcaggtggatttaactcataaaattgttttatgttacacaaatatatgcacatgacaaaagaaaatccagagagatcaaagagtatagaatgaaaagcaacacccttctgccccgttccccaagttgagaagtttgcctttccagaagcaattactgtcagcatttcctatgaatttgtccacaaatatttcacatatataaaagcatgtgtgggccaggtgcggtagctcatgcctgtaatttcagcactttggaagaccaaagagtttgagaccagcctaggcaacatggtgaaaccccatctctataaaaaaatacaaaaaaaaaaaaaaaaaattagctgggtgtggtggcatgtgcctgtagtcccagctactgcaggggctgaggcagaaggatygcttgagcccaggaggtcgaggctgcagtgagccactgcactccagcccggccgacaaagtgagac

SEQ ID NO: 193393 - DNA, 424 bp, Homo sapiens
tgcataggttgtctgccatgttggaccagttaggaagagccagcccacagctctgggtctgtctggcctctcctccttcctaaggtctctcatcacacgcactagagtcagccactagaatctggactccactctgctttgacacctatgcagggctctgtgaacactgtggttctgggacttcaaatgtgagtttgattaggaccctggtacaagagcaggggaaatccatsctgttcgtgcaaaccgccaccctcaccaagccttaaaatctaattttctttctctttggtttcttcctacaaaaagaaatggagggatttgtaggtaaattatcaagagtcttcacagtatgtcagaagtcctgggtttcagatcttgccctaaaaataatactcaataccttagataagatttttctgct

SEQ ID NO: 193394 - DNA, 514 bp, Homo sapiens
ggaacttcaattttgatacaaacagatgattaaacatttctgtcaccatctcaaaagcttaggatatattttaatcaataaattacatcatatgttttatatgcattttccagaattgcttttgtagtatttttgtatatttgtaccaaaccttagatgcataaaaacaggacatactgggtcaggattatacatcgtatggatttttaaaaggcagctttcctaacatcatctacagttctcttaaagttatccttgtcatgacctcaaatcacttaaattcaatattaaagggcacgtgcctttagtcccagctactccggaggctgaggcaggagaatggcatgaacccgggaggcggagcttgcagtgagctgagatcccgccactgcactccagcctgggcgacggagcgagactcagtctcaaaaataaaaaaataaaaaaatwaaaaaactctaaatgtgataacaggttaactctcaaattccaaataattacaaagaactgactt

SEQ ID NO: 193395 - DNA, 646 bp, Homo sapiens
caactatatgtaacaaattggataatatagaagaaattgatacattctttgatgcatacaacctaccaggagtgagttatgaagaaaatagaaactcgcaagagaccagtaacaagtaaggatgttgaattagtaataaaatgcctcaaatcaaagaacagccaaaaacctsatcacttcactgctgaattctatcagtcatttaaataactaatactaattctcctcaaactctttcaaaaaaaataaagaggaagaaatacttacaaaattattttatgaggccagctaagcctgatgcaaaaccaaatatatcacaaaaaaagaaaactgcaggctgagaccccttgatgggtatagaagcaaaaatcctcagcaaacttctgccaaactgaatttaacaggacagaaaaaagatcattaacatgaccaaatggtactaaatccagggctgcaggaatggttcaacatactgtcacaggatcctttgggtgtcgcttcactagacagaaacctctgtggttggtggggcctctgcctgagttttgatcatgcctgctgggcttgttccacccactcagcccagcaggctgcatctggttcacactactgacctggatcccacacctgccaagggcaagccagg

SEQ ID NO: 193396 - DNA, 526 bp, Homo sapiens
gtgtatggcaacacattcaaaacatgtttaaaatattgctttgaaagcatttcaaaacattttttaaaatttacaactttacataaaaattatttgatgattttcaatgctatctcagtctcacaaagtgaggaagacacacatactctttgttttgaattaaaaataatacctgaatagtctaaattttcttgcatcagattaaaatgtaacttgtyaactttcttgctaaattagtaggaccttgttttgtgggggtgggcgaagagaggcaaaaaaatagtaaaaatataatttccatttttaataatacagtgatgtattgcaattgcagtaacataactatataattttttttttctgaaagtgacccaaatagttccattaccactgtgaataagtcattcaaccattgtggttagagaagtttactttaacaatttccatgcttaaggcctctcactaaacgataattctgtggtggtgactttttggtgtgtctaattgtccacaaaaccatacttaa

SEQ ID NO: 193397 - DNA, 642 bp, Homo sapiens
tgtatactgcatattaatccatctctctcaaatatttttagtaaccatgaaacttaaccttcttttctactaacttataggttcccttcctcttttgaagttctgtaagcataagtgtttacaatgcatcaagcatttaaagattttgaatggttaattattaaaaattcccttttgaattggatggcactcttagaggccatgtggaagaatccaaaattttttcatcactaaaatgaaaatgataagtacattaatcactgtttttggtgagatttgcttatgtaaatcacagtgtatggcaacacattcaaaacatgtttaaaatattgctttgaaagcatttcaaaacattttttaaaatttacaactttacataaaaattatttgatgattttcaatgctatctcagtctcacaaagtgaggaagacacacatactctttgttttgaattaaaaataatacctgaatagtctaaattttcttgcatcagattaaaatgtaacttgtcaactttctygctaaattagtaggaccttgttttgtgggggtgggcgaagagaggcaaaaaaatagtaaaaatataatttccatttttaataatacagtgatgtattgcaattgcagtaacataactatat

SEQ ID NO: 193398 - DNA, 375 bp, Homo sapiens
actcatctccacctatatatctgatagactactcacactcacataacgaaaagtctttaatttttcctccaaggctatcttcccctagttctaatctattcacttgttcaagttcaaaacctaggagttatccttgactcctttccttccttcactcccacccccacatccagtctaagaaatcagatgtcaaacctattgccggaacataattccaaattcattcacttttctccatctccactgacaacctgcctagtccaagcttccatcatctattctctgaagactacagcagccttctccttgttctttctgcttccattmttgtccccatacagtctgttgacaacaactgtcagagtaatcttttca

SEQ ID NO: 193399 - DNA, 535 bp, Homo sapiens
ctgctatttgaggcatgagtgtatactgacatttcaccctatttctgaaaagctgtgtatctgtgtcaakgagactgccccagattatgaatgcctgaaactggagaatgaatatatatatatataaaatatatattcatatgtgtgtatataattgtatatatgcatattatatatacacattcatacacacacacacacacacacacacacatatttcatcactctaggcatttggctgtcttgcttatgcaattcctccattgtgtctaaatacaaattatatttatttccaaaaacatactgatggacaaggaaaccatcttattacttgttgatcatcaactcatattagttcctgggatttagacaaatatgtatttcctcttgggttctgaacaggttcaaggccaggctccaagtaccacttttgttctgcctatttccttctccatattctcctactgttttctatctttcccctcctctctttcattccagatctgtgtctgatgctatcttggtagcattgtgg

SEQ ID NO: 193400 - DNA, 535 bp, Homo sapiens
ctgctatttgaggcatgagtgtatactgacatttcaccctatttctgaaaagctgtgtatctgtgtcaaggagactgccccagattatgaatgcctgaaactggagaatgaatatatatatatataaaatatatattcatatgtgtgtatataattgtatatatgcatattatatatacacattcatacacacacacacacacacacacacacatatttcatcactctaggcatttggctgtcttgcttatgcaattcctccattgtgtctaaatacaaattatatttatttccaaaaacatactgatggacaaggaaaccatcttattacttgttgatcatcaactcatattagttcctgggatttagacaaayatgtatttcctcttgggttctgaacaggttcaaggccaggctccaagtaccacttttgttctgcctatttccttctccatattctcctactgttttctatctttcccctcctctctttcattccagatctgtgtctgatgctatcttggtagcattgtgg

SEQ ID NO: 193401 - DNA, 414 bp, Homo sapiens
atgttactaagatctgatttttcttcatctcttggcttgctctaccttagctatttcttaagaatgctcctctttgggggtgaaatattgtcgtcagcagtctagattcatgtttacctggttccagwtccacacacaaacagcaccaaaaaaagaaagaataaagaataaggagagtgagagagagagggagggagggagagagagagagagagagggagggagagagagagagagggagggagagagagagagagagagaagagaggagagagagagagagacagagagagactataaaatattccttttgttcaacaataagagaaaagattctaacaatgtatgtttttgcctcttcataactcatgtattgttccctgaaccaatcactgtaactagaggcatgcgtgt

SEQ ID NO: 193402 - DNA, 516 bp, Homo sapiens
aatacataagtatgcctgcacacacacaaacacacacacacacacacccacaaacagacacccacccacacacacacttaaaggtcattcttctgcattctgaagcatgtcatagactgataggtttggattacttttctacccgcgaagcctttccacatacctttagaattgaaatgttattacatgcagcaccatatctaaattcctaagggaartgctttgaattatccctatctcctgttctctttgccacatatatttagaattgccaagtatttgctttcatttggcagataactataacaaagaaactctttctgtcatgtcttttgcttttgctaatcagactctgtaaatacatggagaaggaatagtaataacttttgaataatgagatgtcacgaatttacacatgtaaatgtgtgcatttggttttataagaacttatagaaacaggaattttatcaaactatcataagcagaaagcacaaagttattaaaaaaagagaattc

SEQ ID NO: 193403 - DNA, 473 bp, Homo sapiens
gaattcttcctcacacaatacataagtatgcctgcacacacacaaacacacacacacacacacccacaaacagacacccacccacacacacacttaaaggtcattcttctgcattctgaagcatgtcatagactgataggtttggattacttttctacccgcgaagcctttccacatacctttagaattgaaatgttattacatgcagcaccatatctaaattcctaagggaaatgctttgaattatccctatctcctgttctctttgccacatatatttagaattgccaagtatttgctttcatttggcagataactataacaaagaaactctttctgtcatstcttttgcttttgctaatcagactctgtaaatacatggagaaggaatagtaataacttttgaataatgagatgtcacgaatttacacatgtaaatgtgtgcatttggttttataagaacttatagaaac

SEQ ID NO: 193404 - DNA, 489 bp, Homo sapiens
tttctaaatattgtcttttttctgactcagagttgtagatgtctgtgtttatccacacaataacaaactctgcttcactaagagcttggatgacacagaattttataaaagagggctgtactttgccacagagatttccttcaaagctgctaactaccactctrtagatgttaatatacatgctcaggcaatgagagtgtgaaccccgaatatctgagacaggtctcagttaatttaggtttattttgccaaggttgaggatgctcaccgtgacacagactcaggaggtcctgatgacatgtgcccaaggtggtcagagcacagtttggttttatccattgtatacattttagggagtcatgagacataaatcaacatatataagatgaactttggttcagtctggaaaggtgggacaactcaaagcaaaggtgggacaacccaaagcaaggagggggcttccaggtcataggtagataagagacaaat

SEQ ID NO: 193405 - DNA, 569 bp, Homo sapiens
aaacactttcatttgcaaaggagtttttctgggagttaaatgaggcttggtgggtaaagtgcctgcttgacgtctgccacataggcaggagtctgtcgatggcagctgtgacgaagttcccttctacaaagcactcgcattacagttcaagtttccctatttgacttccacatcattgtggagaccagcaatgcagatggctgaaatcatcagcattgtgaatggtcctctatcttctcctgtccctcactcacttcttcctctgggtgaataagtcatcctggtggtggttgttttcgtcattgstatgtttggtcagtgccttcatttattagaagcttttctgtagtagcgtttaatttgattctcccaggagatgggatacactgcagtaccaggactgtgtagggacctcaagcaggcaagtttgcctgaagagctaaggaactcaaagaggaagctgggaattgcccatcacctgaggttcaagcagagggggaccagctggcaggaaggatggaaggacttcagcattatttgggtcttccaggtaactgttgatggcagtg

SEQ ID NO: 193406 - DNA, 556 bp, Homo sapiens
agccccattttcacttttaagtattaaaaataccctttgataataattctttgaattttttttttttttttttttttttttttttaatttatttttttattgataattcttgggtgtttctcacagagggggatttggcagggtcatgggacaatagtggagggaaggtcagcagataaacaagtgaacaaaggtctctggttttcctaggcagaggaccctgcggccttcckcagtgtttgtgtccctgattacttgagattagggattggtgatgactcttaacgagcatgctgccttcaagcatctgtttaacaaagcacatcttgcaccgcccttaatccatttaaccctgagtggacacagcacatgtttcagagagcacagggttgggggtaaggtcacagatcaacaggatcccaaggcagaggaatttttcttagtgcagaacaaaatgaaaagtctcccatgtctacttctttctacacagacacggcaaccatccgatttctcaatcttttccccacctttcccgcctttctattccacaaagccg

SEQ ID NO: 193407 - DNA, 544 bp, Homo sapiens
ggtattttgatacggattgcactgaatctatagattgctctgagtagtattgtcatagtaaaaatattaactcttttgatttatgagcctggattgtcttctgtttgcttgtatcctctttaatttctttcatcagtgttttgttgttttctttgagatctaaaacttccctgtagttttccaagagatctttcattcacttccttggctaaatttattcctaggtgggtttttttggtagttattataaattggattgcctttttgatttccttttcagagttttttgtttgtgtatagaagctctacggatttttatattgattttgtactctgcaactttacttatttgtttatyggttctaagagttttttggtagagtctttagttttctgtatatataagattatctatgattttgtgcaggctgagaagggtaggacagagagctaaaagtactctagtctatcagcccaggttcatccttttttatgagtaacagcattttaccactgtgaccccagtgaattcatggctcattgc

SEQ ID NO: 193408 - DNA, 510 bp, Homo sapiens
caaaaagagtttgagacaaacgcttgttttcaagtagttcatttggaaagaagagagaatggagagtggaagagagaaggaaaaagccaatacaagaatattttaattacctactacaggtggctggggattaatccaatgtcgttgtctgaggagatctatgaaatgtgcctccaacctgtccatccaggggacaaggtagaaagaattgatccattagctcctggtcccattggtcaaggatgggttaatttgcattagttctgcagccttcccagttgtgccagcctgagtgctaagaatgtcctgcagcatcaaagatgccccatagcaaaagcagaacactgggataaatctgagggaggagctgacaaggtgcacctgcatgaaacagtgacggttccgtgaactggtttttgcaggagtagctggagtaagaastggaacaaatctgaagtagtacatagttggctttgaatacactagacaaagccagtcctgataccctga

SEQ ID NO: 193409 - DNA, 551 bp, Homo sapiens
gaacatgttattacatgtgtcaatttggtacaatgatttgttttcttttgggtatataccaagtaatgggattgctggttcaaatggtatttctgttttaagttctttcagaaaacttcaaaatgcttttctcatttgctgaactaatttacattcccaccaacagtgtaataagtattcccttttatctgcagcctcatcagcatttgttattttttgattttttaatactagctattctgacagatatgagatggtatctcattttggttttgctttgtatttctctgataattagtgatgtggagtgtttttttcatatgtttgttggctgtaggtctccttttgagaagtgtctgttcatggcttttgcccattttttaatggggtttcttgtttttttgcttgcaaatctgtttaaattcctaacagattctggatattaggccttggttggatgcatagtttgtaaatattttcttccattctttaggtttctgttactctgtgtatttayttctgctgtgcagaagctccttagtttaattagg

SEQ ID NO: 193410 - DNA, 381 bp, Homo sapiens
ctaaggtcctttcccagctcctggaggttatccacagtccttggttcgtggttcaggttgagtccctctcacactttgaatctctttgacccactcttcttccattttaggggattcatgtgaytagattgggctcactgaaataatccaggataatcccccatctcaatggcatcaatcttaatcacacctgcaaaatttctttattcttttttttcccatgaccgaatgagaaggtaacacctgcaaaaattcttttgccatgtaagataacatatttacaggttccagggattaagaagtggacctctttctgtaactctactcattctgcctactgaagtatctcaccgacatatttcaatatttcctaagcaagtt

SEQ ID NO: 193411 - DNA, 426 bp, Homo sapiens
aagtgaattttttgttggctgtcagctaaggtcctttcccagctcctggaggttatccacagtccttggttcgtggttcaggttgagtccctctcacactttgaatctctttgacccactcttcttccattttaggggattcatgtgattagattgggctcactgaaataatccaggataatcccccatctcaatggcatcaatcttaatcacacctgcaaaatttctttattcttttttttcccatgaccgaatgagaaggtaacacctgcaaaaattcttttgccatgtaagataacatatttacaggttccagggattaagaagtggacctctttctgtaactctactcattctgcctactgaagtatctcaccgacatatttcamtatttcctaagcaagtttcttggttctgggatcttct

SEQ ID NO: 193412 - DNA, 373 bp, Homo sapiens
ctgaactgggatgggcatccttatttcaacagcggcgcatgtttggaagagcacgggcccaactcaggactcggagttgccaagcggaccgtttcccctaacccaggcctgtttcctgtcctgaggtcctggtacctccaggaatctattctgttctcagagtgtccctctcattttgtaatggtagaaaatgakaaaatgaaaaacagaccatttttttctttgaagccatgttctgtaacttcctcctgcttcttttgcattttgggttttgccagtacttgagacttccctttttctgaattttagtcagtttttaatttatcattctaataggggccatggaaattagaataataaaggtttgctactg

SEQ ID NO: 193413 - DNA, 574 bp, Homo sapiens
aagctgatttaatgaagtaaattttttgacattttgactaccaatcaaaatttgcgactaccaatacacaaaatttgtgtatttctaagttaacacattttatctttgaacatttctggatttctttgatcatgctaaattatagtgaataattattttaataatagaaccactgccaacctttattacataagccacaaccgtacctcaattatttattacctcatcrtactcagtttgtattttattactttttttcagttggtcttttatgagacacattaatagtaaacataggaaattattattagttttatattctaaggcagaatatatgtgttttcagttaatcttcctaggaatcttaaaagtttctcttccttcaaccaagaacttaattaatggggaatttattggaggtattgattctggtgggttggaatcaatactcatactggtgtgtgagtattccaagttttttaatatttttttttaagttatgcccttcgtcaaattgtcctactacatagtaacaagaataatgcatgttaattaatgggtattcatgtccccc

SEQ ID NO: 193414 - DNA, 398 bp, Homo sapiens
gatcctcccaacattacagaaaattatgtttcagttcattattatattgctttttgcttaacttaaraaattatatattgtttttgttaaaaaaaaaaaaagaatatttgtcctggcatttaaaaaagtgatacttaatatggatatagttattaattgatatccattaaaagatacctagacaaggggttagcaaacctttttttataaaggactggatagcaagtgttttggctttatgggcatttactttctgttgcagatactcaattctgccactgtagtgtgaaggcatccacagacaaaatggaaacaaatgactggctgtgttcctataaaactttatttgtaaaaaaacactgaaatccagtttcatgtaattttcatgtgccaaaaaa

SEQ ID NO: 193415 - DNA, 398 bp, Homo sapiens
gatcctcccaacattacagaaaattatgtttcagttcattattatattgctttttgcttaacttaagaaattatatattgtttttgttaaaaaaaaaaaaagaatatttgtcctggcatttaaaaaagtgatacttaatatggatatagttattaattgatatccattaaaagatacytagacaaggggttagcaaacctttttttataaaggactggatagcaagtgttttggctttatgggcatttactttctgttgcagatactcaattctgccactgtagtgtgaaggcatccacagacaaaatggaaacaaatgactggctgtgttcctataaaactttatttgtaaaaaaacactgaaatccagtttcatgtaattttcatgtgccaaaaaa

SEQ ID NO: 193416 - DNA, 510 bp, Homo sapiens
gctgtttcatatttacttcttactatwgggttcacttaaacaatgtgactaaagaactgggaaggggaaccatctcatgaatctgtgtggccctgcttggaagaggctctctctgtctccctgttgtttgtgttgctgctcatggttactgcatgaaacttctacttgaattcaacttgtttttattttatgttctacttgtctgaagcaagcattcaacctttccggttaatatgccattacacatctttttggatctactacacccacttctacccaaatgataagggaagcaaaagccctgtcaccaacctttgagagctctgaggtgcaagtcaaggtatgtagctttactgacccacaagaggcacaggtccatctaactgagcccattacagagcacacagcactgctcatactgtaccaggaatgagacagcagagggagaaggaaggaggtgaaacaccttctgcataacatgttgtcagtggcaaaacattaactgggacc

SEQ ID NO: 193417 - DNA, 513 bp, Homo sapiens
gtggctgtttcatatttacttcttactatagggttcacttaaacaatgtgactaaagaactgggaaggggaaccatctcatgaatctgtgtggccctgcttggaagaggctctctctgtctccctgttgtttgtgttgctgctcatggttactgcatgaaacttctacttgaattcaacttgtttttattttatgttctacttgtctgaagcaagcattcaacctttccggttaatatgccattacacatctttttgratctactacacccacttctacccaaatgataagggaagcaaaagccctgtcaccaacctttgagagctctgaggtgcaagtcaaggtatgtagctttactgacccacaagaggcacaggtccatctaactgagcccattacagagcacacagcactgctcatactgtaccaggaatgagacagcagagggagaaggaaggaggtgaaacaccttctgcataacatgttgtcagtggcaaaacattaactgggacc

SEQ ID NO: 193418 - DNA, 586 bp, Homo sapiens
tcttcaatttttggtgaagttttttttttccctagatatacataaaataatrctgcatcttagagttatggcatcttagttttgataaaatatggtagttttagttgggtagcatttgtctatattccagtttccaaactggaataaagaacataactacccataatccttccttcacaaattgtttacaagcagaaggactgtggtatttatgcatgatgcacaaagggaagcagcaaaggattctagaatctacttaaatagcattaattagtgttactaacatatatgggtgatagtaaaaagtagttggtgatttcctaagattggtacatctaaagtggtgtagaattctcatctacaaataaaattaaaatttctctgggtgcaacttaatactactaataattcaactttttttttcctccaaaagtaactagaatgaatgactattgctgcctttattttgattggaattcagttgtatgttgcttttttttcccccccacaggtagcagatatcaagagagttaacaatctcatcagtgatcaagacttttttgcccttaggtctatcaaaattcca

SEQ ID NO: 193419 - DNA, 398 bp, Homo sapiens
ccacagaaactagaatgagttcgtcgtgtcctgcatttattggtgaccttaatgaaatcacttgatgaaagtcatgctaccrcagtcagttattttgaggggtattttgggagttttttgtttgtttctttggaccagttctatagtgaactaaattagttaattaatgtcagctccttcttctctaatttacatataacccatttttgtatgcttatctgggaacaattcattattgacttagcttggaacagatataatgtactcatcttagtcatcagaaatatgccctacttggagaaattttccatttactttatttctcaaatccacagaccactttgaaaagtccttatctacaaacaacagcggggagcagcttcacactctaagaattc

SEQ ID NO: 193420 - DNA, 551 bp, Homo sapiens
gtttaactttattggaagctaccaaagagttttaaagaggtgtatcattttacacatatatcagaaattcatgagagtccaatgattccactttctgctaagaatgatactgtgggggccgggccccagtagctcacacctataatcccagcatttgggagcccgaggtgggcagatcatgaggtcaggagttcaagaccagcctggccaacatggtgaaaccctgtcyctactaaaaatacaaaaaattatccaggcgtagtggtgggtgcctgtaatcccagctcctggggaagctgaggcaggagaatcacttgaaaccagaaggtggaggttgcagtgagctgagatcgcaccactccactccagcctgggcaacaagagcggaactccacctcaaaacaaacaacaaaaaaagaattgatattgtcgtcttttgaattattgtcattctagtaggtatatactgatatctcatttggctttaattttcatttctatgatgactaagaatgataaatacattttcatgtgtttgttggccattcgta

SEQ ID NO: 193421 - DNA, 462 bp, Homo sapiens
taacattaaaatagttaatacttaccagtgacagacacttgaaatgattggttcttgttctgaaaccattgcattacactactcattagttgacctgctaatatttgctttaaatgaaatctgtccacataatttaaaaactgtttatattttaatttctcccatgattattaacttaacatatgtcctactatcaaatcacttcattaaayatattacatactgaaatgcacttccttcaaattgacttatgattatttccaacagctatttaatatattttatttcacaatggtttttgactaggcgcaggtctcccaatcccctttgtagccatgtaatgaactgcagtcaactcaggcccactctttttctaatgccgaatttacctaaccctatgtctcttagccaaaagcaacatctcagatttttcaatgcttgttaaagaaggcaagaataaga

SEQ ID NO: 193422 - DNA, 462 bp, Homo sapiens
taacattaaaatagttaatacttaccagtgacagacacttgaaatgattggttcttgttctgaaaccattgcattacactactcattagttgacctgctaatatttgctttaaatgaaatctgtccacataatttaaaaactgtttatattttaatttctcccatgattattaacttaacatatgtcctactatcaaatcacttcattaaacatattacatactgaaatgcacttccttcaaattgacttatgattatttccaacagctatttaatatattttatttcacaatggtttttgactaggcgcaggtctcccaatcccctttrtagccatgtaatgaactgcagtcaactcaggcccactctttttctaatgccgaatttacctaaccctatgtctcttagccaaaagcaacatctcagatttttcaatgcttgttaaagaaggcaagaataaga

SEQ ID NO: 193423 - DNA, 450 bp, Homo sapiens
atagagagaaagagatttattttagagaaattgtctcatatgattgtgagagctggcaagttcaatatatgtagggcaaactggaagcctggaacatgagataagaattgttcttgcagtcttgagttcaaaatctgcagagcaggccagcaggccaggaactcaggaaggacttctatgctgcagttttgaggcagaattgctgctgcttcagatagctttagtctttgttcttaaggccttcaactgatttaatraggcctacccacattataacaggtaatgcactttactcaaagttaaatgattataaatgttaatcacattgacaaacatcttcacagcaacatctacactagtgtttgaccaagcaattgggcatcacagcctagccaagttgacatataaaataaaccatcacacccacttgcaaattaactagaagttact

SEQ ID NO: 193424 - DNA, 626 bp, Homo sapiens
actcaaatggatctcctgtaaagcttccccttctcactccaatacttgtgagaaaaaatagaccaacatwtttcatcaaatctatactcctgaatactcgcatgtttctgtaaatttgtttggaagatccacatatataaaaaaccaggtttaaaaacaggtttggcacctttttgcattactcagcactaagaatttttggaggaaaaaaagatattcaaactttgatagtcagagaagactaattggagactattaaacactaatggaataattgccttaaaatcatgctaatagcttcctggctgctacatgtttacttggccagttgctacagctcaaattaagtaattatctccatcatttaaaaccactcctggtgcaccacacaagtgtttctgttgagggaaactgctgctcagtcatcctcaaagcttcaggttgtcttaggtaaagcggctggaaaataaagagctgcctaattataaggctacccaactggggcagctgacccagattgcccagagttacagcaaaaaacaatgtgcaactgtgtgatattccccaccagagcacagttccggtgtctttaaatatttctcaaatctctgcagtttgaatggttt

SEQ ID NO: 193425 - DNA, 601 bp, Homo sapiens
  misc_feature (1)...(601): n = A,T,C or G
tacttacgtcaaaggccaccagaagagagaatacttcatagctatagaagagaaagtccttccatgtgcagacagaatcgccaaatatgtcctatgttacctagcaaagaagtgatgatgcaattatttcactagaaaagtagatgggcaaggtcaattcttaaaaagctatcaggtggaagaggattgactgttaggatagttttagacatgcttatttttcaataatgcttatttttcaataatgcttattttattatgaataagataaaattgataataattatggacccatgctcgtttgacaacaacaaagcagattttaggttaggcatatttgagtacaaaaaacggtgaacaactaagagccagatttttttttctggattttgtgaattcacagatgttacagtcacgaaamctaattcaggtataaactgagtgcttcttaaagtatatatttttagctctggcgcaaagcaaagttttctcctgaaattacaatgataattcaatcagacacagtgtaatgactacattaacatttggtgggaatgttaggacangcatcagagtccccagggaaaataaccctcagtta

SEQ ID NO: 193426 - DNA, 543 bp, Homo sapiens
aataagaatttcatctgtgctctgttaaagaccattgaatattttatatgcagttgataaatcaataaaaagttgtagagttactgtacagtgaagggagtatgggatttggagttcaaagacatgcgtttgtgttctggttcacatgaccttggtcagttccctaaccttttttaggctttagtttctgrttataaaacaaagataaagactagttgtaataataccaaatctacatacaccacaggtctgctgtgaggctcagatgagataacatctatgaaaatgttttggaaatacaaatgttggtttattattttggggtatctggtcttgcaaagcatgggaaataaatgcaaaatatggtcagtgtctgtacaaagcttataatttagttgagatgacaagatttattcttatgaaaaatcaaggcactctgagaactgtctgtggagagtgttaattaggggaggctttatataaaagaaatagaaaatcagcaatgctccaaaatgggcatgcaatgaagcctccatatatttg

SEQ ID NO: 193427 - DNA, 579 bp, Homo sapiens
caggaataagaatttcatctgtgctctgttaaagaccattgaatattttatatgcagttgataaatcaataaaaagttgtagagttactgtacagtgaagggagtatgggatttggagttcaaagacatgcgtttgtgttctggttcacatgaccttggtcagttccctaaccttttttaggctttagtttctggttataaaacaaagataaagactasttgtaataataccaaatctacatacaccacaggtctgctgtgaggctcagatgagataacatctatgaaaatgttttggaaatacaaatgttggtttattattttggggtatctggtcttgcaaagcatgggaaataaatgcaaaatatggtcagtgtctgtacaaagcttataatttagttgagatgacaagatttattcttatgaaaaatcaaggcactctgagaactgtctgtggagagtgttaattaggggaggctttatataaaagaaatagaaaatcagcaatgctccaaaatgggcatgcaatgaagcctccatatatttgcatcaaataattttgttcattttaatattttt

SEQ ID NO: 193428 - DNA, 539 bp, Homo sapiens
agaatttcatctgtgctctgttaaagaccattgaatattttatatgcagttgataaatcaataaaaagttgtagagttactgtacagtgaagggagtatgggatttggagttcaaagacatgcgtttgtgttctggttcacatgaccttggtcagttccctaaccttttttaggctttagtttctggttataaaacaaagataaagactagttgtaataataccaaatctacatacaccacaggtctgctgtgaggctcagatgagataacatctatgaaaatgttttggaaatacaaatgytggtttattattttggggtatctggtcttgcaaagcatgggaaataaatgcaaaatatggtcagtgtctgtacaaagcttataatttagttgagatgacaagatttattcttatgaaaaatcaaggcactctgagaactgtctgtggagagtgttaattaggggaggctttatataaaagaaatagaaaatcagcaatgctccaaaatgggcatgcaatgaagcctccatatatttg

SEQ ID NO: 193429 - DNA, 539 bp, Homo sapiens
agaatttcatctgtgctctgttaaagaccattgaatattttatatgcagttgataaatcaataaaaagttgtagagttactgtacagtgaagggagtatgggatttggagttcaaagacatgcgtttgtgttctggttcacatgaccttggtcagttccctaaccttttttaggctttagtttctggttataaaacaaagataaagactagttgtaataataccaaatctacatacaccacaggtctgctgtgaggctcagatgagataacatctatgaaaatgttttggaaatacaaatgttggtttattattttggggtatctggtcttgcaaagcatgggaaataaatgcaaaatatggtcagtgtctgtacaaagcttataatttagttgagatgacaagatttattcttatgaaaaatcaaggcactctgagaactgtctgtggagagtrttaattaggggaggctttatataaaagaaatagaaaatcagcaatgctccaaaatgggcatgcaatgaagcctccatatatttg

SEQ ID NO: 193430 - DNA, 523 bp, Homo sapiens
ggcaataagcttatattagtttattatttttaacttcaatgcctagcatggtatctgacacatattagacattcagtaaacatagagtgactgagtgactaagaaaataaatggaattaatctagttgaccagcatggtaatgctacccatatctatttgtgcttcggactttaactgtgtgtgtgtgtttcaactgataaatttcctaaccactaagtgcttgctggagggtagggagcagaatacagaggcagtacagtcccagcagagatgtattgtagacartggaaatgacttaaaagagctgattttaaatattcaggaattttgtaagccagtggctaaagctggctgttagcttgaaatcagccgctgtgggaatatttacaccatggaaattggaaggcagtacaaatcacgacttttctctcttccagagagatgctctatgagcatatccactgactcctagacataatatgtgtccgtgtgtgtgcttatgagagattgggtgaaggatgg

SEQ ID NO: 193431 - DNA, 537 bp, Homo sapiens
atggaaggaaggaaggaaggaaagaaggaaggaagggagggagggaggggaggaaagaaaaaatagaaaagaaaactgtgtaataagtcatatggtatcataataacaaagagattatccctggggaagatagaaaagagttcacagtagaggtacaatataaaaggtggccttaaaaaatcagcaggagtcgaatagttgtagcaagaacaatgatatgytagggcaaagagaaatgtaggaacatttctctttacgtttcttagtgataactcctgtaggcagattttccatcttagtcttgtttccccaactacatcatatatcacctactatattccgccaagcaattttgggtaataggttgcaaatgaagaatcagtagtcttctaaatgagatgagatgagatgagaagacaaatgtgctattcaagaaagtcaaatgtagttttatcagattgtatataattgaataaaagcatttaatgtgggaaggtttgcagtcctttcctgacaccttttgcctgattattttct

SEQ ID NO: 193432 - DNA, 612 bp, Homo sapiens
aatatatctcctttgtggaagatcactgaaaagaaaaatatacatttcagagaagctcctcctgattccaaattcttccccartcctggtgacttcagcagtagcatatgactgcttctccttaacttatacagcattccttaaatctcaatccaaaattgtccatcttcagatctttcattttcagattaacgtcattagtattttagacatcttcatgaatggtaccaattgagtaatgtactagaatttaattcatatttttgtttctgctggtgctgcttgaggctgaatagcatagtggggaagtgtgagttttaatgtagacaaatgtgggtgcgaaatctcagactttcgtttactatctgtatcactttgggcaattctccttgcttctttaagctttagtatctccatctgtaaaatgggattaatatttatttcttaaagttgttgtgcagattacataatatattttaagttcctgataccagctaagccagtggttctcaagcactaatttgtaagagaatcagtttaagagcttgatttaaaaaaaaaatcactacattcagaagtgctgattcaaaatatctggagaggggtctgaga

SEQ ID NO: 193433 - DNA, 612 bp, Homo sapiens
aatatatctcctttgtggaagatcactgaaaagaaaaatatacatttcagagaagctcctcctgattccaaattcttccccagtcctggtgacttcagcwgtagcatatgactgcttctccttaacttatacagcattccttaaatctcaatccaaaattgtccatcttcagatctttcattttcagattaacgtcattagtattttagacatcttcatgaatggtaccaattgagtaatgtactagaatttaattcatatttttgtttctgctggtgctgcttgaggctgaatagcatagtggggaagtgtgagttttaatgtagacaaatgtgggtgcgaaatctcagactttcgtttactatctgtatcactttgggcaattctccttgcttctttaagctttagtatctccatctgtaaaatgggattaatatttatttcttaaagttgttgtgcagattacataatatattttaagttcctgataccagctaagccagtggttctcaagcactaatttgtaagagaatcagtttaagagcttgatttaaaaaaaaaatcactacattcagaagtgctgattcaaaatatctggagaggggtctgaga

SEQ ID NO: 193434 - DNA, 556 bp, Homo sapiens
ctggtgaccatcattctgttcttttcttctatgagtttgacatttttagatcccacatataagtgacataatgtggtatttttctttctatgcctggcttgtttcacttaacacaatgtcctccaggtttattaatgttgtttcaaatgacaatattttctttgtttttaaaactggatattatttcattgtgtatatgctatattttctttatctgttcatccactggtggagacttatgttaacaccatatcttggctattgtgaataatgctgaaatgaacatgggagtgcagttatcccttcaacatacygatttcatgttctttggatatacatccagtagtggaattgctggatcatgtggtaattctatttttaattttttgaggaagcttcatactgtttccataaaggctatactaatttacactcccaccaacaatgtgcaagagtttccttttgtccatatccttgccaacacttatcttttgtctttttgaaaatagctcttctaataggtgtgaggtgatagcttagtgttcaatttgcattt

SEQ ID NO: 193435 - DNA, 549 bp, Homo sapiens
gacagaactccttttccaaatttacattcaggccaagataagtcatccagctcaaccatgcatttcaaaaccacctggtatcctcaaatgttcttgtgaccaggcttctaaaatcctgtagggcaaaaatctaacaaagagaagtcatccgcaaaggtcactgcttccaagttcatctttggcaggatgtagctctgtgctgatattaaaaaaaaaaatgtatctaaagtacaagatatagttctcttttgtgcaamattcccaaatctgatttggctttcaaatttattgcaacctttaaaggggtgattttggcaatgttctgggggtggggttgataacagtcaaaaagctgtggaaatgatttaatggttcatggctttgaagtgcctatgaaagacatttaactaactttatatttctccctacattttccccaaaacgtgtatgtgtggaaattttccaaattgcttttccttaaagcacagaggacatcattttagtgctggagggcagaaatttattactttacaagctccttgcttgcac

SEQ ID NO: 193436 - DNA, 617 bp, Homo sapiens
cttgtagcattcctagtatatgcctaataaggccaccagaaatgatgcaatggctttttctccttatttcttgatgtttgggcaagaatgccaaggttctcaatttgattgagtcaaagaggtgaggtacagaaaaacctcacagattgtatagttaaccttgaaccaagtaatgatggtcagaccaagttagtraaaaggtcatttgatagtcgtaaccccacttattctacatttggagtacagtaaagtatggctctcacagccaaatgttccttgtgaatgagaacaaatcatagaagacataaattcaggacagagatccgatttcctccccagtatctacttccatctccaggaataagggaatggtcagataaagcatgtagattaaagtgcaagtattttttggaatataaaaattcatttctgagagtaggagtgttgccagataatgccctgaaatatttatctatgcactttctttttccactacctagtcagagtcatacagtgcctcaaggcaaagtataaataaaaataaataataagctaaatttaaaataagacaataaaaaagcaagaaacagcctgtcttagtccattttttgtggctg

SEQ ID NO: 193437 - DNA, 617 bp, Homo sapiens
cttgtagcattcctagtatatgcctaataaggccaccagaaatgatgcaatggctttttctccttatttcttgatgtttgggcaagaatgccaaggttctcaatttgattgagtcaaagaggtgaggtacagaaaaacctcacagattgtatagttaaccttgaaccaagtaatgatggtcagaccaagttagtgaaaaggtcatttgatagtcgtaaccccacttattctacatttggagtacagtaaagtatggctctcacagccaaatgttccttgtgaatgagaacaaatcatagaagacataaattcaggacagagatccratttcctccccagtatctacttccatctccaggaataagggaatggtcagataaagcatgtagattaaagtgcaagtattttttggaatataaaaattcatttctgagagtaggagtgttgccagataatgccctgaaatatttatctatgcactttctttttccactacctagtcagagtcatacagtgcctcaaggcaaagtataaataaaaataaataataagctaaatttaaaataagacaataaaaaagcaagaaacagcctgtcttagtccattttttgtggctg

SEQ ID NO: 193438 - DNA, 530 bp, Homo sapiens
caaaaccccttggagagtatgattttttgcttcaagacaatgacaaaagtcctgatctattactgagggaattaaggaggcctagggttgtaggatggagggcggagtctggataactgtatcacctcccacagcagggcaaatggaagtgagccccagggctggctgtgaaamctgtggtaaagacgttagcctgaggtcattttaaagggatcctgcccagagggcagcctgtcaggggaaggggagcccaggagtacattgctatgggcatattgtcagaagccatattgtcagaagctgaaattgaaggagatctagattagtcagctgaaagagaagcagtcccgcatgttaggattgaagttgatgggtcctgcagtgagacctctgtagagacttaaaattccactacaatgattcagccaaggacatagagaacgaagccatcttatggcagtccagtcaaataagaacctttctaacctcttctcagttctgatcttattcaaccctcaccttgctctgtc

SEQ ID NO: 193439 - DNA, 530 bp, Homo sapiens
caaaaccccttggagagtatgattttttgcttcaagacaatgacaaaagtcctgatctattactgagggaattaaggaggcctagggttgtaggatggagggcggagtctggataactgtatcacctcccacagcagggcaaatggaagtgagccccagggctggctgtgaaacctgtggtaaagacgttagcctgaggtcattttaaagggatcctgcccagagggcagcctgtcaggggaaggggagcccaggagtacattgctatgggcatattgtcagaagccatattgtcagaagctgaaattgaaggagatctagattagtcagctgaaagagaagcagtcccgmatgttaggattgaagttgatgggtcctgcagtgagacctctgtagagacttaaaattccactacaatgattcagccaaggacatagagaacgaagccatcttatggcagtccagtcaaataagaacctttctaacctcttctcagttctgatcttattcaaccctcaccttgctctgtc

SEQ ID NO: 193440 - DNA, 631 bp, Homo sapiens
cactgatattgttatgtgcatgtgtctggaagagcattacaaaaacaatccaatttagatcctgtgttaggcaggagaagtgccaccatgatttttttctcccccctctaatcaactcataaagacatcttttcctacgcatcagtttgcatttgctttctcacaacaccccactgaaatatttaaaataaaaaatagaaaaaatatatatcttaatgatagaaaagggagaagaaaatcatcaataagtcaaatattttgaggaatttctaaaagttaagtgtacacaggacttcattggaagatayagcaaattgctagcagttgaacaaatacaaagaaaacaatctttatggtccagatagctttagaggtaaattttattattcttcctgaaatgggattccaataatacttaaactctttcaacaaccttagaaaagaaattcaacttccaaatatactgtatcgagactataaaattttgcaggatatttaaagtacttatagctgttgtctaggcagttcaagttttaaaaaaaagtaaggtaagttatacatttggggatttaattttttaaccaaatattttcattgttaattaccccttggaaacaaaaagtgagcatta

SEQ ID NO: 193441 - DNA, 516 bp, Homo sapiens
ctatccccatgaagaccttgcttccatggaagaacttgtgtcttttatggtataagaakctcaagaggataaatttcctttcaaaaccaaatgactcaatccagtcagtagctgcaacttgaaagaagaggatttgcttaccctgtcaggttatgtcaatctacctaacaagactgtggtggggccagatttgtcagagaaatcagactatctcagaggaatttgcatgtatgaaatatcaatttattataggttctgctgctattttaattccactgctcatttatcacgattcaaaagaatgagaagttttctataacctcacatatggaaaacagcaaaagtcagaattttttggatggtttgctttttgaggctttttcttagagaagtttaacagctttatagttgcttgttaaataaaaaaattataatagacacaaaatctgcttaaataagtcaaagacttaattctaccattctaattttctgtgaattataacttttctaccatga

SEQ ID NO: 193442 - DNA, 537 bp, Homo sapiens
gagtgagaaataaatgtagattatatgaagcccctgagctgttggggctacttctgcctaatttatacctggacaaatatatgaggtagcccatattgacgtcaaaataaaaaagtcacctgtgttaataattacaaattcaaccagttcataaagtgataattgataaaatagragctccaagggcagtctttcttcacaaaattaaccactattatgtttcaaaaaaatattttatgcaggcacaaatatacatatatacacacattatatatgtttggaaaatacatattttttgagaaaggaaatacatatttcttaaaatttttatgaatccaaaactccacacaccttggcattgtgctttttaaaataatcatgtatcttggctatatagttatatgtcattttttaaaaatgcattgcatagataaaacctagttaaccaagtagttgtgggagttttaggagaggagagcaatcatctttaataaaacctggtaaaataggtctttgggtgtagattttacttagtat

SEQ ID NO: 193443 - DNA, 537 bp, Homo sapiens
gagtgagaaataaatgtagattatatgaagcccctgagctgttggggctacttctgcctaatttatacctggacaaatatatgaggtagcccatattgacgtcaaaataaaaaagtcacctgtgttaataattacaaattcaaccagttcataaagtgataattgataaaatagaagctccaagggcagtctttcttcacaaaattaaccactattatgtttcaaaaaaatattttatgcaggcacaaatatacatatatacacacattatatatgtttggaaaatacatattttttgagaaaggaaatacatatttcttaaaatttttatgaatccaaaactccacacaccttggcattgtgctttttaaaataatcatgtatcttggctatatagttatatgtcattttttaaaaatgcattgcrtagataaaacctagttaaccaagtagttgtgggagttttaggagaggagagcaatcatctttaataaaacctggtaaaataggtctttgggtgtagattttacttagtat

SEQ ID NO: 193444 - DNA, 582 bp, Homo sapiens
agtcgttgctctttccagactaaagcatcatacagccagagtgcatagcatatttgctcaygggcccattccctagatgattctgtccctgcaacccctgcccccacccgactccccccaactcactgccaccaaagaaggcagggctccaaggaagcaaggcacaagttccagagaaggaattatggagaaatgaagattcctgcaaagtcagaggggaaggaataattaggaccaagtctaagcctgctttagaaggttacccaggcctcaactagacagaaccaaccagagaatttgtaggccctagtggaaaatgaaaatgcagaatcccttctttaaaaattgttaagactcagcataaaaacagcagagcattaaatgaagcctggagtccttctgccatggggccctgtgcagttgctcaagttgcaggttcatggcctgccctgactccagagcctccttgcaaacatctaaggagagtcttgggatacttactcagaatagatggtgacggatcaggtttgaggtaacacaggaagtacgttcactaaaagcctcacacaatgctttaatttt

SEQ ID NO: 193445 - DNA, 563 bp, Homo sapiens
ctctttccagactaaagcatcatacagccagagtgcatagcatatttgctcacgggcccattccctagatgattctgtccctgcaacccctgcccccacccgactccccccaactcactgccaccaaagaaggcagggctccaaggaagcaaggcacaagttccagagaaggaattatggagaaatgaagattcctgcaaagtcagaggggaaggaataattaggaccaagtctaagcctgctttagaaggttacccaggcctcaactagacagaaccaaccagagaatttgtaggccctagtgsaaaatgaaaatgcagaatcccttctttaaaaattgttaagactcagcataaaaacagcagagcattaaatgaagcctggagtccttctgccatggggccctgtgcagttgctcaagttgcaggttcatggcctgccctgactccagagcctccttgcaaacatctaaggagagtcttgggatacttactcagaatagatggtgacggatcaggtttgaggtaacacaggaagtacgttcactaaaagcctcacacaat

SEQ ID NO: 193446 - DNA, 586 bp, Homo sapiens
gtttgggtgggctttcatggtgcatgggtcagtgattagatgagagatgggcttggtgcctgggttcacagaagtcagcctggttgatactcgggtctgcaagggcaggcctgaaacttgaatgcttagggctagacctgaagcctgggttcacagggagccaactttagctstggggtaggccttaaccctgtgtctatcggagctgtcctggcactgtgacaagtctggttgctaggttcgatggactgcacctgattgtaagtccacaggaactggcctggtggacttagaatcaaagttcactggggtgggcctggcacctggtgcatagagatggtcctggattctggggttatgaagataggaaagatgatcttaaacaattaaaaacaataaagtttttgggaaaaaaaacagttgctttgcatgattttattttttaaattcatcataaatctttatacctacaagtcacttaatatcatctcattgaaaaaagctagtaacaaaacaaaatattttaaacaggacattgagataaattaaccttgttaggtaaaatgtggttttgcagctaaagtgt

SEQ ID NO: 193447 - DNA, 545 bp, Homo sapiens
atggctatatgctcagtcctgtgagtatacttagcaaatcatcaaacctgggggtggtcttggtgatcaacaacacagtgatattttcccagaaaatttttcatttaatttctrttttctaaattattgtcataagtgtgttcatactacttgtgttatattttataatttaagaacaaaaactgttgttcctttttacatttaatatttcatgttaaatgtttttatttagattttttcttattagcctatattattttgtccatttctttagtattttaaaataaacttcttttagatacattgattttctctactgtatctttgttttctatttcattgttatttaattttatcttaattatctttcattctctttggtctcatttatttgatttctaatctaacttaatatgtatatgtaactccttagttatcagccttttctaacataaatatttaaaactatgtatttctttcttagtgtttattttagtatgttccagcaattttgatttgtgatacattttttactattaagttct

SEQ ID NO: 193448 - DNA, 470 bp, Homo sapiens
agcaacgtagaaaagggttttgttgagtgacaaaacatctcttgtcatgagagggtacctgargtgggtggccctctgtgtgagagggggcccaaaagtgaatagccccacatgtggctgagtctggggtaattatgggctcagaatgggggaatgtgaggtgattggtccatggacaggcctggaaaaagccccatttgattggctaaaaggcatcgaagaagttctcactctgatcatggactctacctggactgccaaccctgttttcaggctttaaattgtccttggtttgaaggttgagttttactggggacctgtccctgtctgcctaggaatttttctccctcctgctgctatcaatctccgctctgaaaaggtacatctaactgacgttaggataaggacagttactgctcttactgcttcatgccgacagggggcattgttttgggaaaatgcagtcagat

SEQ ID NO: 193449 - DNA, 633 bp, Homo sapiens
ttacagcattaactattgtcctgttttccaggatgaagaagatcttccaggacttttctcaggggatcatcctctacattgagaagtagcacaaggaggagataattttaatccgactaatagcaaagtgacatgaactcaaagagggctgtagcctactggttgacctcgtgattggaaattagctcatgaattaatttttgccatagtgacattggatatattcatttgcgcctttcttacttataacttctaatttttttcttaatttcctgactattaaaagtttggtatttctgagaatttccttctctttcctccagctccccaatgatatccaataaatattccagttcatataaaaaaagagtaatttttgcacttagtgagtgcaatttaacttaacatcctttttaaactgagatagattccatataccrtcaaattattctcctaaagtctattggtcagtggattttactacatttacaaagctgtacaaccatcaccactaattctagacccagcaaatgcagtagtttccctgcttcatgcctgtgaaatgtgttgcttttccttagtgtcctcatgagggagcctcagagagtggagaaagtccaggttcatcacgat

SEQ ID NO: 193450 - DNA, 498 bp, Homo sapiens
cccattaatattgatcctagcatgtgtggttttttcctagctatttgttgaattctattatttttaaaatatgctttcttattcattatcaaaaactacttacatgtctcttttcattctagtttactcatattgttttataacaagaaaagagataaaatttgttgatattagaggraagttttgtttaggttaaacggggggtaattttaattgaagataaaatatataaccactctagatatggagttctgaactcctctgattagtagttgggactgaggtggagttgaggtagggactgtaattccacagttctttgatagaacttgacctgcagtgggtgagaaaaaggaaatgcggtcttcttgcagttcaggaagcctgactcctgttcatgcacataactccatctagaacagaagcagggttatttttttattttggattcaggtttctcagtgtattttctgaataaggaatgcaattaattagttc

SEQ ID NO: 193451 - DNA, 417 bp, Homo sapiens
tagttttgttaagagtttggggccaggcacagtgtctcatgcctgtaatcccagcactttgggaggctgaggcaggagaaatgcttgaaccccaggagttcaaggccagcctgggcawcattatgagacatctctacaaaaaataaaaaaaattagccaggcatggtggtgcacacctgtggtcacagctactcaggaggctgaggcagaaggattgtcagagcctgggaggttgaagctgcagtgagctatgatcgcactactgcagtccagcctgggcaacagggtgagaccctgtccccccgcaaaaaaaaagaaggcatgactggtagaggtagcttggatttgtcacagcagatttcctaactatctcattaaccctttggtaacagtatcagtcttcactctccttggctc

SEQ ID NO: 193452 - DNA, 417 bp, Homo sapiens
tagttttgttaagagtttggggccaggcacagtgtctcatgcctgtaatcccagcactttgggaggctgaggcaggagaaatgcttgaaccccaggagttcaaggccagcctgggcatcattatgagacatctctacaaaaaataaaaaaaattagccaggcatggtggwgcacacctgtggtcacagctactcaggaggctgaggcagaaggattgtcagagcctgggaggttgaagctgcagtgagctatgatcgcactactgcagtccagcctgggcaacagggtgagaccctgtccccccgcaaaaaaaaagaaggcatgactggtagaggtagcttggatttgtcacagcagatttcctaactatctcattaaccctttggtaacagtatcagtcttcactctccttggctc

SEQ ID NO: 193453 - DNA, 417 bp, Homo sapiens
tagttttgttaagagtttggggccaggcacagtgtctcatgcctgtaatcccagcactttgggaggctgaggcaggagaaatgcttgaaccccaggagttcaaggccagcctgggcatcattatgagacatctctacaaaaaataaaaaaaattagccaggcatggtggtgcacacctgtggtcacagctactcaggaggctgaggcagaaggattgtcagagcctgggaggttgaagctgcagtgagctatgatcgcactactgcagtccagcctgggcaacagggtgagaccctgtccccccgcaaaaaaaaagaaggcatgactggtagaggtagcttggatttgtcacagcagatttcctaaytatctcattaaccctttggtaacagtatcagtcttcactctccttggctc

SEQ ID NO: 193454 - DNA, 328 bp, Homo sapiens
agcatttatctaatgctatattcgtatagaaaaaaaatcatcacttgacttaatggctacatagtgtacttatgctatactatgtttctctttccttagtgatatgttttattatttttctttttttacatttgtggctgattagggagagatgttttagagatcaytacatccatataaaaaaatgcacttccttctttgaaattgccacatagtattctgtaatgtggacttacatattttattcattcttttgataaatgtttagttttcatttgtccccatttcaaacacttctggagtgaatatgtgttcagatgcaagtact

SEQ ID NO: 193455 - DNA, 447 bp, Homo sapiens
gggtgctcaaaccatcctatacccataccatgaaatatttagaatattaataatcaaacagaatgaatgattgtattgatacacacaacaaccagaataaaccacaacatatgagtgaaagaagtatattttccgagttgtgtacatgtatccctgtagatatacctactctacaattctgsgagactcagctagatcagtgtttgcctgtggatgggtgtgctgaagagggagaagaattttaaaatgccacaggcactcttacgagttgatgggtatattcactctctcgattgtggtgatggttgtatgtttaagcatacattttatagtttctatatgtgtggggtttttatgccaattatatctcaataaaactttttttaaagcttcagtgaatttatatatgttaaaatgcaacagtaagtcatctttccttacattttt

SEQ ID NO: 193456 - DNA, 516 bp, Homo sapiens
ctgctttgtcactctcaattaattgagtatcgttagtggttatttattaaagagcatgctgttatttagagttttcggccagaacagtttacttagtgtagtgactaaaagaataaattcccacactatttagaaaggagctccaagtccgtaagtgaaatcccatttttaagaaaatcctgaccattttgtaatagtttatatattttgtaataagtatttctacttctataccttagcattaatcatgaacactggaaamgatattcaataaaaatagttttagataactatggcaatgactggctctaaatacttcttataaaaattctggtgactgttgtgaattaattgccagtaaaataagttatgcctctttatttgcattttcgaagacacatatttagattagaatttaatatgacgttatctttgatactttatacctttgacaatgtttttagttgtatatcctgagtggaagggaaagaaaattccatgggcaatcagccatat

SEQ ID NO: 193457 - DNA, 364 bp, Homo sapiens
ttttaatatatgtatgagatctctgcatggtytcataatattatagctactgttcaataaaagtattgcactaattccatattccaatggaaaaaatagacacctaacagcatacaaatattttaaggatgcattaaatactggaagacaatactatttaaaacttggcacaattaaatatatacataaacactgaaagcaaaagattaaaaagcataaatggcataacaaatttaactcaataaaattatatattttctagaatcaataacacaatcaaaataaacaaagaaagtgaaggaacaaattgggaggaaatgtttattacatgcacctaacaaagggttctaaaaattgatacagg

SEQ ID NO: 193458 - DNA, 521 bp, Homo sapiens
gatttgccatatattgcttttatgattttgaggtatgttccttctatgcctagtttattggaggtttttatcataaagstatgctgaattttatcgaatgcattttctgtgtctattgagatgatcacgtagttatttgttttaattgtgtttatgtgatgaatcatatttattgactaatatattttaaaccatccctgaatcctcaggataaagcccacttgatcatggagaattatctttttgatgtgctgttggatgtggtttgctggtatttttgcatctatattcatcagggatattagtctgtagttttctttttttgttatgtcctttcctggctttgttatcaagatgagagtggcttcatagaatgagttacagaggattccctatttctcaatcttctggaatactttcagtatgattggtaccaattcgtctttgaatttctagtaaaatttggctgtgagtctgtctggtcctgggcttcttttagctgacaatattttttattactg

SEQ ID NO: 193459 - DNA, 521 bp, Homo sapiens
gatttgccatatattgcttttatgattttgaggtatgttccttctatgcctagtttattggaggtttttatcataaagctatgctgaattttatcgaatgcattttctgtgtctattgagatgatcacgtagttatttgttttaattgtgtttatgtgatgaatcatatttattgactaatatattttaaaccatccctgaatcctcaggataaagcccacttgatcatggagaattatctttttgatgtgctgttggatgtggtttgctggtatttttgcatctatattcatcagggatattagtctgtagttttctttttttgttatgtcctttcctggctttgttatcaagatgagagtggcttcatagaatgagttacagaggattccytatttctcaatcttctggaatactttcagtatgattggtaccaattcgtctttgaatttctagtaaaatttggctgtgagtctgtctggtcctgggcttcttttagctgacaatattttttattactg

SEQ ID NO: 193460 - DNA, 521 bp, Homo sapiens
gatttgccatatattgcttttatgattttgaggtatgttccttctatgcctagtttattggaggtttttatcataaagctatgctgaattttatcgaatgcattttctgtgtctattgagatgatcacgtagttatttgttttaattgtgtttatgtgatgaatcatatttattgactaatatattttaaaccatccctgaatcctcaggataaagcccacttgatcatggagaattatctttttgatgtgctgttggatgtggtttgctggtatttttgcatctatattcatcagggatattagtctgtagttttctttttttgttatgtcctttcctggctttgttatcaagatgagagtggcttcatagaatgagttacagaggattccctatttctcaatcttytggaatactttcagtatgattggtaccaattcgtctttgaatttctagtaaaatttggctgtgagtctgtctggtcctgggcttcttttagctgacaatattttttattactg

SEQ ID NO: 193461 - DNA, 631 bp, Homo sapiens
agaaaaagagaatgttaattggaaggtaattcggaaatatgttttggaagtataattgcatatgtactttgatatatcaaattctatatgtgaagcattctgtcaaaattcttgcacacstgtattaataaaatgatatattgcaactattctcaataaagtactgcttgtgacagcaaaatgtgggagccaacctaaatattcttagcagtactgtctgagtaaacagattatactcataaaacagagccataataaaatcacatttcattgtatactcctttatattttgtgaattttaaattttgtgaactttttgctcaggcaaaaaaaaaaaaaagaattataaactaatgagccagtttcctccaagaataaaaatagaaatatatctaattttgtagcaaaatccattaatattggcatcattttaacttcaaacatattttactcaacacatatgagatagaatgtaaagtcattgttttgaaaaacatttccaattggtgttaatattattactctgggaaacgagagtaattacagaacctcaaaatggtcagcaaactattacaatatcagtttcttcatatgttttccagcgtttaattttgccattgggagggtatta

SEQ ID NO: 193462 - DNA, 599 bp, Homo sapiens
ttatatatgtatattaatacaaatcctttgaaaataagcgttatgtagagtcacatatatcattgcatcaataagaaacatttcaaatgtatttggcaatgacaaattagagttaaattgttcgttcctgtggattagtaaagaataggagttttaatcaaaaaagggtagaaggctaaaagtttggaagtccataaatcagaaatttgatagcagctttactctaatgatttctgatttcttcctcataaatttctaattgaacttttaggggaagttaaattggataagaaaaaatggattacaaaactcactttaaatgttcttctagttcatggttaaaacataaatagcttatagctgggaagttaccaataattatcttcctcacgcagaggcattagataattctgtttaaacttaatttgtatattttataggttcgcttttaactgtgcgtcttaatatgtaagagagtaaatgattctttaatttgtgttcaataacacagaaatttaaatgcrttagtactgctgttctgggatatatttagtttgttattacataaaatgttactttgcctatgacatgtagctctg

SEQ ID NO: 193463 - DNA, 447 bp, Homo sapiens
gggtgctcaaaccatcctatacccataccatgaaatatttagaatattaataatcaaacagaatgaatgattgtattgatacacacaacaaccagaataaaccacaacatatgagtgaaagaagtatattttccgagttgtgtacatgtatccctgtaratatacctactctacaattctgggagactcagctagatcagtgtttgcctgtggatgggtgtgctgaagagggagaagaattttaaaatgccacaggcactcttacgagttgatgggtatattcactctctcgattgtggtgatggttgtatgtttaagcatacattttatagtttctatatgtgtggggtttttatgccaattatatctcaataaaactttttttaaagcttcagtgaatttatatatgttaaaatgcaacagtaagtcatctttccttacattttt

SEQ ID NO: 193464 - DNA, 594 bp, Homo sapiens
ctgatatacaaacagcctttcaatagaaatttagtacagaaccaccagtggaaagaaaaggttattgaaaagtttgagtgggggtgaactgccttcttctgggatggggctggtcatgatagtacacacagagcgtggtccactcatggtgtggtgtgtttctccactagtgctggtccagccagggctccactcagccctgcctccctgtgcacagtggccacagtgctgtgcaggcaacagctgggggatttgctatggactacacagtagagatggagatatacatcaaagtctagaaatgtggrcattttgattcatttgacttccctttcagggcactcagggctcaatttatcaaaacaacaaacagtaattgagtcaataagacatatgctgtagggaaatgttcccaggtattgatccaaaatattggcatgatatttacatctgtttgccaaagtcatacattgtcctaattccatgaacagacaggcagcagggcatagaggcacggaggctgcatggagatccctcactgcattgtccgctgtcttcccacatggcctttggcacatggctccccctgccacc

SEQ ID NO: 193465 - DNA, 374 bp, Homo sapiens
gctgcacgtgcaccacagtccagcagaaacacagctgctttttttcttccagtgctactctgtgaacaggtgcccacctgggaactatgcaacycagtgacaaagacagaagtacagaaattgagaggaagcatttagaaactcttcttacagctgtttaagcttaggttttgtatatctttgtttcattttatttcatttttctactaattcgttttgattataatttgcaaaactatcaggctacaatggattgcaaacaaaaaacctggccttttaatgcagagagtttgagaagcactctacttagtatatataatatatatactatattatatatatatatatataaagtaatatatacttagtaaaat

SEQ ID NO: 193466 - DNA, 539 bp, Homo sapiens
attttacatgaaccatttcatattattcttgtaggtataattatcattgtcctattatagagattgggaggttgaggcttaaggagattaattcacttccccaccatcatacaggaatgagtgggtctggtgttggaatctaagcatgcctggctctaatccccttcctttctcgctacaccacacagcctctgtttgattatttgtacccatsatgaggcaggcacgatgttagattaggaaacttgtgcagagttaccaaacttggggttatatcaagacaagattccagtcttatttttatatagctcagcaagttaaaccttttaacggaatttccacatctccaatgcgctttgctcatcccatcctcctgttagagttagaactagctttcttccctgttttgcagttaagccttctctgcgacaaaagttatgtgaccagcctaaggtcacagagtcggtcattggtggacctgagaagggaagtcagcttttcagtacctttcaagtcccttctaatgcacagcatttgct

SEQ ID NO: 193467 - DNA, 617 bp, Homo sapiens
tttaacctcccctaagcctcactttcttcatttgtaaacataaatctgtaaaaagaggataaaagcaatgctctctcttagagttgttttgaaagttaattaaattcttgcaaaacagcgtactgctgagagaatgaaatattttcaattgtctaagtttttcagaatgctgaaaggcttataaacttgtttataagtaatttttaatttaacattttggttgaaacatatctgaaatgcattacgtagtgtcttcctaaacagtttatgctaattgaattgagccttgataatttatgaccctcgtgtaaaatctaattattgctttatgctgatatacagtgatgtacagtggcttttgagatgtttgaagttttttcccttcttaaatggccccaaattgctctgacttttgagtccttgtttttaatttgttttttctctcttgctctaacactgctatcaagtacatttcatttttatcactgggctacatctggcgacccttccatctcccaaaattttggtttctaatytcttgtggacttaaaatggagaggcaatatgtatagtgcttaagagcataagataatcctaggtgtaaatcccagcccttc

SEQ ID NO: 193468 - DNA, 627 bp, Homo sapiens
aaaaaaaaaaaaaagtataaaacatgaaatacagatttgaacctattaatatgaatgccacaattgcaaattttttatttgcatctttattttatctgccttggatttgtccattgaaagctgttatattgttagttataattcggctgccaccatatttttcttttataatacttaccaaaactgaaatgaaataataaattgtaatagtgtttgtttaatacattctttctcttcccaactctaaaatccaagggacagatctctcttatttattttgtattttcattgtttagcatagttcttggttcccagtrggcacttaacacatatctctcaagtaaataatcaaagaaaatgtagacatagaaacatatcggcattttcatcctttctatctttcctaacaaaagcaaacacacaaattgatgcttgagtaaagttaaaagaaactgcagaaggatctctaaatttatagctcacaagcctatgagaaattatgagctttacagttactaaccatcctactgatatcagtaactcctatggtcagatgcaaaagtgagataggcatgggcttgatgtactcctctccacccttttctatgattatgggaacttttgctg

SEQ ID NO: 193469 - DNA, 627 bp, Homo sapiens
aaaaaaaaaaaaaagtataaaacatgaaatacagatttgaacctattaatatgaatgccacaattgcaaattttttatttgcatctttattttatctgccttggatttgtccattgaaagctgttatattgttagttataattcggctgccaccatatttttcttttataatacttaccaaaactgaaatgaaataataaattgtaatagtgtttgtttaatacattctttctcttcccaactctaaaatccaagggacagatctctcttatttattttgtattttcattgtttagcatagttcttggttcccagtaggcacttaacacatatctctcaagtaaataatcaaagaaaatgtagacatagaaacatatcggcattttcatcctttctatctttcctaacaaaagcaaacacacaaattgatgcttgagtaaagttaaaagaaactgcagaaggatctctaaatttatagctcacaagcctatgagaaattatgagctttacagttactaaccatcctactgatatcagtaactcctatggtcagatgcaaaagtgagataggcatgggcttgatgtactcctctccaccctttyctatgattatgggaacttttgctg

SEQ ID NO: 193470 - DNA, 634 bp, Homo sapiens
attgattgaaaggaatgaaggaagggatccaatgagatgcttcttggaggcaaggaaacacaaatgtacaactttsaatagagtttcaacataaaatagctgtccaacctccatggaaacagagttctttatggacgcattatgcaggcaaacttgctaagctctttgggacattagtgcctttaataatgatgttagcaacttttcctaaactattgcatatgtacagtaggtccttagcagagtgggggttcgtgaattaatccctatttaatgagaaatatttgaaggtgatgagagtcatctgctgctgatgggaaaattctgccttgatagattatttctggaacattaaagaatctactcaatcaagatacttgactatttaggacaggacaattttgtgagaaattgaaataaaatacaggatttatactcaattattttcatcacctataaaatgtcctatatttgctttaagggttttaaattttcacactttcttgctttcatcagacctcagtagcctgtactaaatcaaatggctagatgctgagttttggctgagggtgtttttagtaaggtgataaccaatggctatatttgagaaaatttattttagattaatttgtag

SEQ ID NO: 193471 - DNA, 634 bp, Homo sapiens
attgattgaaaggaatgaaggaagggatccaatgagatgcttcttggaggcaaggaaacacaaatgtacaactttgaatagagtttcaacataaaatagctgtccaacctccatggaaacagagttctttatggacgcattatgcaggcaaacttgctaagctctttgggacattagtgcctttaataatgatgttagcaacttttcctaaactattgcatatgtacagtaggtccttagcagagtgggggttcgtgaattaatccctatttaatgagaaatatttgaaggtgatgagagtcatctgctgctgatgggaaaattctgccttgatagattatttctggaacattaaagaatctactcaatcaagatacttgactatttaggacaggacaattttgtgagaaattgaaataaaatacaggatttatactcaattattttcatcacctataaaatgtcctatatttgctttaagggttttaaattttcacactttcttgctttcatcagacctcagtagcctgtactaaatcaaatggctagatgctgagttttggctgagggtgtttttagtaaggtgatarccaatggctatatttgagaaaatttattttagattaatttgtag

SEQ ID NO: 193472 - DNA, 594 bp, Homo sapiens
ccaaacatctggatgtttggaaatctaaactaaaatttaaaaaacacctattatgttatcattatgattactgctaagcatttgtgtactgcattccaagagtgttctcwacatatttaaaaaactggagacaaaatgaaagaataccttttttctgttccctttgaatctgatatttgaaaacaaagggcaaaggagggggaaagtgtttctagtaaaagacaatatatttcttagtatcagatacccttttaaaaccatcacaatgaaagccacaaaagcatggagtgcgtttgatatcaaccagtttgcaaattaaagattcttcgttaggacatctaagcagccccaagaggacacacctgtggccaccagccctgtacttcaccgcacaagccctgtctgagttctaatgccggaaaggaaaccttcagagagaatagctacttcagaaggagggatgagctgagtcgtggtatcccagcttgagtggtggttgttcatcttcagtggtagaatacagaaactatggcctgcagcaaagctcttctggtgatttctcctccttttcaaaacaatattgggaggccaggc

SEQ ID NO: 193473 - DNA, 543 bp, Homo sapiens
gaattctttagactaagtgtcaacttcagttgtcttattttagagaggaagaaaaggagaaactcaacggtttgatttgcccaagtaagaaacaaaaccaggagcaaacccgggtttcattgattaccgggctagcgctcattgccctgtgcctgaagtatatcctataagcttccttaaggagatttttttgtgaacttaaaattatgagatgggagttggaagtttgaggacacagccaacatttcttcrctaggtaacaggcaccaggcctagaataagacttctcttaaggggcaaaattaaatacattgaagccaacgtttttgtgatattttgggatgtctaaccaacatcagctccagttcttttcgaagtctttattttcactccttaccgacagcttaacatgaaaatactagagagagttcacatttgaaaacattttaaagactccctatctaatgctaaatgtctaaagttgagaaactctcagagaaagtatttagctttaaaaacttttgtacttcgagaaaatagcgt

SEQ ID NO: 193474 - DNA, 528 bp, Homo sapiens
tgtagtctcagctacttgggaggctgaggcaggagaatcgcttgaacccaggaggtggacgttgcagtaarctgagatcacgccactgcactccagcctggcaacagagcaagactctgtctcaaaaaaaaaaaaaaaaaaaaaagttatagattgttaagtaacattttgtaatatttttgatatagatactcataggcatttagtaaattttattatcatgtgtttatactttttatcacacttactagtcaattaaggcctatagcaatgtcactggcttttgtgtgtcttgtatctgacaacactatagaactttcccattagttccaaaagtttatctatagttacccttgaaatttttttgtgtagagtaatgacatttatcagttagtataactttgctctttttttcccaattcttatactattaacttctttttttcttgtttttgtttgttttgctggttggtttttttggtagtggttggaatttctagtataatgttgaatagtcagaatgatatg

SEQ ID NO: 193475 - DNA, 500 bp, Homo sapiens
caatcccacattgtttcaattactctagatttttgacaagtctttcaatatagcagtatgtttaagtaaattatcaagcttagggttcttttttaagatttttttttggctattttggccctgggtattttcatatgtatcttaraaccagtatgttgatttggcaaatattattattctgggtgtggcctatagttgaatttaaaataagcatctttatatcattggattttctagtatatgaatgtaagatacattcttatgtttactttgctcctctttaatttctctcatcaatgttgtgtaattttcaggtactgacctttcattttattttggctgtttaaggcttggtgttttttgtagaactgtaaattgtattatttaaatttttaatatttaaataatatattgtataaacataaaattaaatataaataatatttaaatatttaatattgtttgttttcaaaatatagcttaataatctttttgtgttt

SEQ ID NO: 193476 - DNA, 600 bp, Homo sapiens
atttgtatgtatttcaccttcatgctgaaaaagaaactttggcatcctttgcattctttaccttttttccaaagtctctaaagactggtattatttccccacttatttgtgtccattatatgaacagaactatttactaaattgtttttctgatactgaattgtaaagaacaaagaaaatacagtgtaactatttttaatatcaccatcctactgtaycaaagatttcagaatagtataacctgttgtttttactgtggttagccagtctattacaacattgccaaatggaatttggtgctatttatctaaatgatacatattcaacctttatttccacagaaatcaaaagcatacattgcatattaaatttctgaaataatgagaattattttgtaatctttcgacattgaaatatttattctataaaagtttaataatacgttataagtgtgcattctctctccctctctctctccctccctctagtcatacatcttaacagcagtgatacattctaagaaatggattgttaggtgattttgtcattgtgcgaacatcacagaatgacgatggtatagactagctggtatagtccact

SEQ ID NO: 193477 - DNA, 444 bp, Homo sapiens
aggtgtgagagaattaggtgattcctggagcaaagtctgaaatgtcttacattttcaaaatgatttttaaagttcatgtgaaaaattcaaacctgtgtatttcttagcacagtgtatgttacgttgtacgaygatattttatgtttttaatgtaagtagtattccgtgaaaatacgagctaatacaaaaagatttctctttcatttttatttatttattttttgagacagagtttcactcttgttgccaggctggcgtgtaatggcataatctcagctcactgcaaactctgcctcccgggttcaagtggttctcctgcctcagactcccaagtagctgggattacaggcgcccaccaccaggcctggctaatttttttgtattttttgtagagacagagtttcaccatgctggccaggctggtctcgaactcctgacctcaag

SEQ ID NO: 193478 - DNA, 627 bp, Homo sapiens
aattttcagcatataactttagtcctctcgaatgaatgcagccacaccaggtgatgaatggagtcatctctgaagacctctttgttgtaatccagagttgccctaaatgaacctgtgtatatttactcagttccctgaggacggcagaatgtcaattttgttttaatgttatgatatgcatagaaaaacgagaattcttaaagctctaggtaacaagccaggggttgtggcttccaaagtctctttgctggtgctccatgggctaagaggatcaatatactgcaggacattatatcccagccttagcaaaccactgtgttatggcaatctaactggaagattctgcttcaggaagtagctggaattgatacactcagcagcccacagaacaccacattggcaactttaaatcatgttgtaagaaacctcatagcagaaatgtctaaacacctgttctcatacatcatacctgtaacacacatccacacctttttagatgaaatgtcactagcagagttgattctcacttcgtattggtyatacagtgttttttgttgccagcatctattctgatctttcagcatcaatttgactgtttagtgtccttgcttaacccaatgttgaata

SEQ ID NO: 193479 - DNA, 609 bp, Homo sapiens
gcacctgctcttaggtccataaataactgagggttattttccctggggactctgatgctggtcctaacattcccaccaaatgttaatgtagtcattacactgtgtctgattgaattatcattgtaatttcaggagaaaactttggtttggccagagcaaaaaatatactttaagaagcactagtttatacctgaattaggttttgtggctgaacatctgtgaattcacaaaatccagaaaaaaaaatctggctttagttgttcaccgttttttgtactcaaatatgcctaacctaaaatctgctttgttgttgtcaaacgagcatgggtccataattattatcaattttatcttattcataataaaataagcattrttgaaaaataagcattattgaaaaataagcatgtctaaaactatcctaacagtcaatcctcttccacctgatagctttttaagaattgaccttgcccatctacttttctagtgaaataattgcatcatcacttctttgctaggtaacataggacatatttggcgattctgtctgcacatggaaggactttctcttctatagctatgaagtattctctcttctggtggcctttg

SEQ ID NO: 193480 - DNA, 622 bp, Homo sapiens
aatactattcagcctcaaaaaacaagaaacttctgttatattcaacaatatgaacaaatcttctttttctttttccttctcatctccttcttcctcctttcctcgtcccccatctctcctcctcctcttcctccttctcctccttctccttcttcttctccattttcttctccttcttcttcttcatcttcttctccttcttcttctgacagaatctcactctgttgcccaggctggagcgtagtggcacaatcacagctcacagcagcccctacctcctggactcaagcagtcctcccactttagactcccaactagctgggaccacaggcatgtgctaccatgctcaactaatttttaaaaatttttgtagagatgaagtctcactwtgttgcccaggctggtctcaatctcctgggctcaagcaatcctcctgccctagactcctaaattgttgagatttctggcattgagccactgctcctggccagtatatggataaatcttgagaacattatgctaagtgaaataagccagtcacagaaaaacgaatactgtgctgttttattctacttatatgtgatatctaaaatagtcaaattcattcaagtggttgccaagg

SEQ ID NO: 193481 - DNA, 572 bp, Homo sapiens
gtgtcttggtcagaggcaatgctgtgtgaaataccatgatagtggataaggcattctgtgattccagcgatggtagtcttggcagaaggattgcaygcaggataggcacattcatatccggagtaagtgtctattctagcgaggacaaacccctgccctttctatgatgggaagaggcccaatataatcaacccgccaccaggtagctggctgatcaccctgagaaatggctccatatcgagggcttattgttggtctctgctgatggaaaattgggcactcagcagtggccatagccagatcagacttggtgagtggaagttcatattgctgagcctatgcataacctccattcctgccaccatggccactttgttcatgggtccactgggtgatgacaggggtggctggggaaagaggctgagtggtgcccacagaaggggtcatcctatccactggattatgaggcctctcctctgctgaggtcacacatgggtgagcactcacatacaaatatcttcatggtttttgaccattcagagaagtccatccacatacctcttccccaaatt

SEQ ID NO: 193482 - DNA, 687 bp, Homo sapiens
ctgtaagcctaagtagaaaactggaggaagaaatatgagaaaaaacaaataaatatagagttgaataaaatatataaaagaaattacactgattttaaactattttaaatttattttcttacttcctggaaataaaacacatatcactttctggaaaaacaactgatttaaaaataagttgactttgtaatagggaaaaattacatggagtatatttgtctccaaaagataaatacatgtattggagtacgtgtatgctactgtgtgtatggaggcaaacaagtgtattgcattatcattttatttttgagataatattttttatttaagstattactattctaattaaactttttaatatttctgcaataactacacaaacttcttaaatgtctttcactaatgtaggtgaaatattgctaccaaataatatttatgcctttttatttttattttttgaagtaggatctcactcagccaccctgactggagtgcgcaatcttggctcactgtagccttgaactcctaagctcaagggatgctctcatgtcagctccctgagtagctgagactataggaacacaccaccaagcccagctttttttttttcttttaatttttacttctaggagagataaactcttaccatattgcctaagttagtctcaaactcctgggctcaagcag

SEQ ID NO: 193483 - DNA, 423 bp, Homo sapiens
tgagtctcactaactcatcagaactaaagccatgaaatgcaagttaaatcaacaaaaagattttcaaaagcaaaatcaatatatcatttatgtgtaatttttagttgraaattcagaaaacaagtatttatttttcatagcttggttagcatttaaaaatgtacaacttttaaaaaaatgtaacagcttaaaacaatgcaaatttatatcaactgttctcatggccgagtggttgggcataacctaactgggtcctcagctcaaggtcacactaggcgtttgttcagtgtgctctattcttatctgcaagcttgttcagagaatattctacctccagcatcatgtaggtggttagtagctttcatttgcttgcagccctgtgctgagggccctggcttcttactggttattggctggagactg

SEQ ID NO: 193484 - DNA, 584 bp, Homo sapiens
acttattataaaatttgtctgaatctaacaaaactaagaaaggagtgggaaaggggacttgtcttattaggtataaggacagcctgtaaagatgtagtaatagaaacaatatggtatttttgaaagaaaaaacagccaaggtaacataggacagagctcagaaagagagatcctgagaatctcacacgggaatagaatatacaacaaaggtggtgcctccttaaagtaatagaagataatgtaagtgatgtctttgtaatacagaggtggagaaagacctgtaaatcccaaaatgccataactgaaaaaactattgacgaatttagtattaccatgataaagatttttgttcaatgctgcctgggagaagatatgtgtaatgtctaaaaccattgagtgaaaaataagtagaccataaaaggaaacattgaaattaacaaggaaagggcaaaaactccactagagaaatgagcaaagtatgcaaagaggcaatttacagcagaagaaacatcaaagactkgcaaaaagagagagttgtttaaatccactagtaattaaagaatttgcacattgaaagacactgt

SEQ ID NO: 193485 - DNA, 569 bp, Homo sapiens
agctttaagcctgtagggctaaaatgatgttgcctgtgcacgtggtgtgtagtgtacagcctgagggctggtacaccacggtctatgcctgcatgtggatcttccagcatggagcacccgtgcttaggaggttaacaaccaggagtacgtgcatggcattggagkggggcatgctatagccggagaaggttgggaagtcctggcttaggagacgttattgaaaaattcccagagccagcagggtgctgatatttcttgccaatgctcagacatcacagggctccaactccagtgccgggatgaggcttgggttggtgaggcactgcctcttcctgcctctacttccacagagaagttacttgctccttcattcttcatcaatcatttgaaaaatcccaagtgcatctccctcctgggtgagaattagatgacataatgtgtaaaatactgcgtgggacacattttggaaaatggtaacatgcataccatcctttctttggaattctaactgtggcatgcgggggccttcagactcatagtgataaccccacaggcttcgtcgttcattc

SEQ ID NO: 193486 - DNA, 574 bp, Homo sapiens
tccagtctctgtttgctaatcatgcttaaaagaatgacataccagaatgtagagacaacaggaagaggtaaactaagggaagcactgaaaaataccaggcataacaaaagcctgaacaagctctgcatgcataaagaggtactatgcattaggcatatggacttcacttgagattatgtaccataaacaagtacaacatgacaaaaaagaacatacagacgtggagtaaactactgaccacttaaagctggctgaaaatcccrcaatacggatcctgagttttacttcccttttcttctctggttccccttaccctggtacctgccaaccgagcctttgatttaaacatttttatatatcaaaagatacagaagaaaaaagtaatttagatgtaaacattgaaacagcttatgttacaaaatgagtgcagttttaaaaaataaatacgcaaagcccttggggggaggagaaaaaaacagctttgaagggaatagacaaataaaaagcccactaaagacacagatcattccagaggtgattccttctttctgcctgacacaggctgtgtggccaa

SEQ ID NO: 193487 - DNA, 512 bp, Homo sapiens
agtcctgtagctgcaggcctctctgaaacaaagagctggctctttctgtcttkggcagagacttgattctttttaagcacctcctctggattgtcctgaaattcttttcatccctttctcctctcagtgctttgtgcatttgagattctccataatgtgtcccctgctgactcactcctgcttccccgaagaagaagggtcttctgtaagttttagtcaaataacaaccatttctctgcttttcagttcaaaattttagtgggtcgtaagccttcctttcatgttgtcaccagatctttttaaagctctcagttaatttatttatacacacgtccttgttttagcttctaatattctgagagattgggggaattttagagcctggtttggctgaaaagtcaaatggaatagtcatttttaaataattctcacaatttcttactataagattgcttgattgcagtttaaaacccttctctgttctggcccattcatgttgacatactgcttcc

SEQ ID NO: 193488 - DNA, 614 bp, Homo sapiens
taacatattttgttgccacgcccaaaggtgatattagtgatgttgtgtaaaagaaattggccactctgaggaatatttctgagactgagtgtgcttccctggctcctcttttggcttcaaggatttgcatctgcaccttctcctgtccaaaggatgatgtcacggacttttgaggactctgctgggactggaggattggccgtgctgcacgatatgagggtgcctgggctgctggggcgtctcaggcaggcatgtcccagtgtgttgccctgggtcacccccttgcttcccatgaacataccaaaggcccgtcctggaggaagggagactcatagagaggcagtgccaccttgtacctgttccctggcctctgaaccctagggcttccaaaatggcacttcagcaggtataacattttataaatttccagctgctgtcgttcagttcattttctgcaggcagatggcctcggatcatgactgaagctgaccgtgtgggaatcactgcctagagggacagccagaatgttctgggaagttctttctcccattttcccttcttcagggtggsgaggaagaatgtcagggtgtttcacatttatagcagccagaagc

SEQ ID NO: 193489 - DNA, 428 bp, Homo sapiens
ctgctatagatacgactagacagatagatagatagatagattagattagatagataatagatagaagaagatagattagatagatagatagatatatagatagatagatatagatagatagatatagatagatagatagatagatagatagatagatagayagacagacagacagacagacagacagatgcatacatacatctgcatatgcatacatacatagataacttccctctttggaagttaaacaagctgccatgacttgaaagattattcaaaatatgcttatataaaacaccaaactaaatttgtgttgagtcattcaggcaaaatttcaagatatatgaaattcctgttaattataactatgtgctacatttgggaaatacattatgaaggaattttcaaaggatcaaagttctatcatc

SEQ ID NO: 193490 - DNA, 612 bp, Homo sapiens
gctttggcaaaaggacaaaggagtcaggtgagtgagctgacctagtgaggtggcctcagagatgtctcaggaagtcctgtcccatgcatgccacagcaggacaatccttagtaccaaaaggctgaagcgattgctrcatgtgtgtctcttaattaggaacagttacagattgtcataatgtaaaaaaacaaaacatccaggatttgcaggagaaggagttggaaagcgctttttttttttttttttttttgagacagagtccagtctagttctgttgcccaagctggagtgcaacggcatgatctcggctcactgcaacctctgcctcccgggttcaagcaattctcctgcctcagcctcttgagtagctgggattacaggcacacaccaccacacctggctaatttttgtttttttagtagagacagggtttcaccatgttggtcaggctagtcttgaactcatgacctcgtgatctgcccgcctcagcctcccaaagtgctgggattacaggcatgagccatcacgcccagctggaacgtgcttttcaaatgtttgtttttgcatttgttctttccatttcttagccctgttttaagggatcagatgaac

SEQ ID NO: 193491 - DNA, 466 bp, Homo sapiens
tgtataacaaatttatggggactggacttattagtaaagctactgcaatcctctggtggtgtgaattagagacagtgcttaagctcccaattcatcttgattcttgtctgcagcatcttcttagcaaaaggatacatgactttttattataatawtcatacatgctaatttacattaatcttgcaaaaacaattgccccaaagcattaaaaatgtgcaaagccatatatctcagaatgttctaatgattgggtgtgtttttctccagatgttcattataaccttaaagacctgcattgtcatgtctaaccattattgagtacttgcagtggacctggcactgttctaagtgttttacgttgattaaattattaaatccttacaaaccatatgagaaaggtgctagtattatccccacttgaagatggaagcacagaacacacaaccaggaagtggctgagctggaa

SEQ ID NO: 193492 - DNA, 514 bp, Homo sapiens
tcaaataaatacagacgaaaacacaggctaacaattccacacctaacccagcccaaatcatgctaaacatgccatatatattcacagtttaagtttgattccaggtatgcagtcttgagtcataatggccccaggcatgacaaggttactgggtcakagttggttatcgtagtacttagacaacgtgctcatgggaaacaaacgactccagggtgtgtgccgccgatttgcaatatgaggctgatctactgttcccactgttttattccctgctgctatatctcggctgggaaatgtacgctgtggaccccgcatcttcataatgatggtccctcaatgatcaaccaccttccacgtagcatccatacagtagtctgagcaagctgaaggataacaagcttaaatttatcttttaaaaatgtcagaacttccagaaatttgtattaaaatttctaaattgtatttctgaaccgaaataaagtattacaaagtttgtaattatctccaaagaatt

SEQ ID NO: 193493 - DNA, 440 bp, Homo sapiens
agaggctggtccacctaacagtcctaaggcacacagtggacatatgcgcaatgatctatgcattcatatagcaccttstcacagtgagcatgcaacaagtgatcagctatcaccaacaactacacactgactttaccatgagaagctggttgaatgagggccaacctcttctccaacaggagaataatgatgcatttctaccttctcaagtatattaaagatagcataaagagaatggtgctttttctctgtgtgccagtgcatacacagcgagcactgcctaaacatttaacctaatattaaaataaccaaataaccaaaacatatttaataataaccaaatattttcatttttttgagcaaagtcttctgattgcattatagttgataaactgcaaaagacacttttcctaagaaatcttaaattcatgaactgaatt

SEQ ID NO: 193494 - DNA, 587 bp, Homo sapiens
cttcagtgcataggcacacgtagcaacaaggcttctgacccctcgcagggctgcatttggagtcttcctcttggtgacagatccagttttacagattcctccctacactttttcagttccctttattcactgtttcagaaaacatttctaaatcaatcgtatctaagtacaaacatgacagcagagtgcacgagctgtcatagtaattccagcccctgagaacaaccatgaaccaccttgtayggttattgatgtaaagccccagccagctctcacctttgccatctaactagccagacaagacttaaagccaaggtaagtagttcaagtcacgagctcctttactaattggattatggtttactccctgacagtgggatagagaaaagctaacacgtcccatgaggaaggtaactgaagaatgctcggtaaattcaggcacagaatgaccaaattaagtacagccacacagacttgacactatgtttaaatgactatagagaggaatctgaaaatctgcagccatatgtcagattagatattaagggtgcagttttacaatgtgaaagttaggccgaactggttcc

SEQ ID NO: 193495 - DNA, 599 bp, Homo sapiens
accaaaatgcctttgcaatccacaaccttgctttagatttacttagccatcccaaataaacacccagtgcatgtatttggatctggctcatagaaggggaaaagaatcgatattcaaaatgccgaaagacaaactcagtatacgctagttactctggggagaggttaatgatttagatattttagatattcctggtttctttccactactcttactagtcatagaatcacaataaaatrcaatagaaacgttttgaaaaaatgtgaaaacaatattgtaaccaaaaagtgagcatttctaagtagaaaatcatccacaatcccactattctatgcagtaactgaatttctgcaggtttgctctaagtagctacagtactctctacataccttatcatgcatcatgaacctttattatgccacttgtttgcaaggcggtctcccaagcatgtgagcttccccagggcaaagcctgggatggatgcgacttcaggtctcacctgggtaactgacaccctcactggctcgaagtggggagtaactgagccaaaatctctggggcttttgaatggccgcattcactttcaacctgtagccaac

SEQ ID NO: 193496 - DNA, 521 bp, Homo sapiens
cccagcttgggaggctgaggcaggagaatcccttgaacccaggaggcagaggttgcagtgagctgagatcataccactgcactccagcctgggcaacagagtgagactccatctcaaaaaaaaaaaaaaaagaaaagaaaagaaagaaagtatttttttaatttcttaattttcctataatatagtatatgaataagggtaagtgttatgttggggtgaatatagaaatctaagttttctcttatactgtgacagaaaaaaaagttagttttcttttagaatgttcctcaatattagaggtkactcagctttattacaccctgaagttttctaatcatattcagatagtacattacaaaatgtcgggaatgagatgcatggttgttcaaacaagaatttacacaggcagacaaaaatgacagcagcagcaggaagcctacatttatatatatatatatatatattatcacacacacactcatggaattccacaaaattataatccaaataggagtgtggac

SEQ ID NO: 193497 - DNA, 488 bp, Homo sapiens
ccatttagtagaaattattacaattgaaatactattattgtgyctccacatataagttctaggtattttaatatcaagtattgaataatctttatcatggaatttattggaaagttataaaggaaaaatgtgtgtgtgtgtacaatttaagtcacttttacagtaggaaatctcttcatgaaaacttctttcaattaactttgcaatcactgtatttgaattattgtaggcataaaaaatttttaaaaactatagaaatgtacaacagagtcttccaacattataaataaaacatttttgtgaaatattccagatctccataccaattgcaatttccagagattgtagatattatttatatgtcctaaggcagactcttgatggattaattcctataatccatcatttttcttttctctccatctgtgccatacatcattcttaagcttgattgcgaaactttcagtgccaaattttagaaaacttat

SEQ ID NO: 193498 - DNA, 502 bp, Homo sapiens
gaattctgcagtgcacaacctgcacaactgtatgcattgcctttggaggagaaagtgaaaaaaaaggagaaagatgggcatcacttctcagatgcatctagatatctggggctttcccaaggtttcttgcattcttctggaccctcagttacatgcacagtctgaagccaccagggattatctcaataagtgcttaactgttttcggtttttagttagaaccattcactttatcgaatctcatataggtcatatttagctrgatacaacaaacttctataagctcattggtgtttaagttaatcttatgaaaactacagtccttaaccttttcaattacttatcaaatattagatgaggccacacagtgtagtgggggaaacaagcaggccaccattataaatgtctggctttgaggctggcaaccttcctacaacctggaccatctcgcttctttgctccaatttctacatctataagttggttacactaacaacaatact

SEQ ID NO: 193499 - DNA, 533 bp, Homo sapiens
tcaccaggtcaggagattgagaccatcctggccaacatggtgaaaccctgtctctactaaaaatacaaaaattagctgggcatggtagcacttgtctgtaatcccagctactcaggaggctgaggcaagagaattgcttgaaccagggaatcggaggttacagtgagctgagattgtgccattccactccagcttggcgacagagtgagactccatatcaaaaaaataaataaataaaagaaaaaaraaagaaagaatgctccattttaagaaagagaaacattccacttcaattttctcatttgtaagatttaagagtatattttaaatgatgtctttgcatctcccctcaaaaaaaggaaataaatcttattaatgctgaatatgcattagacaattttattctttttctgttcttgaatgaataaaggacctatttttataaccatagaattgcttggaatggaatgattatggagaaggttacatgtaaaacaaatgaaaaagtagaaaatgaaattatttacaaagtc

SEQ ID NO: 193500 - DNA, 554 bp, Homo sapiens
tgaaagcttgtgctggggacaaagtgagtcatatgttatggggaagctcagccattcatgaaacaaaaaaaacttaccttaaaaaatcatatccaagttgttgttcaaaggtcttttttaggctttttgtaattggaagaaaatataatttctgacaacttttctctgtttttgagatggagtctcactctgtcatccaggccggagtgcagtggcaagatctaggttcactgcagcctccaactcccaagttcaagggattctcctgcctcagcctcccaagtagctgggactacaggcacccgccaccacrtccaactaattttttgtgtttttagtagagactgtttctgccatgatgtccaggctggtctcgaactcctgacctcaagtgatccacccgccttggtctcccagagtgctgggattacaggcgtgagccactgtgccaggcctcaatttctgacaactttaaggaagccgttagcccaaacagaattaccaaatgttaaaatacctgaaattatattcccaaagcaatgggacaaacccat

SEQ ID NO: 193501 - DNA, 554 bp, Homo sapiens
tgaaagcttgtgctggggacaaagtgagtcatatgttatggggaagctcagccattcatgaaacaaaaaaaacttaccttaaaaaatcatatccaagttgttgttcaaaggtcttttttaggctttttgtaattggaagaaaatataatttctgacaacttttctctgtttttgagatggagtctcactctgtcatccaggccggagtgcagtggcaagatctaggttcactgcagcctccaactcccaagttcaagggattctcctgcctcagcctcccaagtagctgggactacaggcacccgccaccacatccarctaattttttgtgtttttagtagagactgtttctgccatgatgtccaggctggtctcgaactcctgacctcaagtgatccacccgccttggtctcccagagtgctgggattacaggcgtgagccactgtgccaggcctcaatttctgacaactttaaggaagccgttagcccaaacagaattaccaaatgttaaaatacctgaaattatattcccaaagcaatgggacaaacccat

SEQ ID NO: 193502 - DNA, 511 bp, Homo sapiens
gtagaaaagttataattcacagaaaattagaatggtagaattaagtctttgacttatttaagcagattttgtgtctattataatttttttatttaacaagcaactataaagctgttaaacttctctaagaaaaagcctcaaaaagcaaaccatccaaaaaattctgacttttgctgttttccatatgtgaggttatagaaaacttctcattcttttgaatcgtgataaatgagcagtggaattaaaatagcagcagaacctataataaattgatatttcatacatgcaaattcctctgagatagtctgatttctctgacaaatctggccccaccacagtcttgttaggtagattgacataacctgacagggtaagcaaatcctcttctttcaagttgcagctactgactggattgagtyatttggttttgaaaggaaatttatcctcttgagcttcttataccataaaagacacaagttcttccatggaagcaaggtcttcatggggatag

SEQ ID NO: 193503 - DNA, 533 bp, Homo sapiens
tcaattattctaattattgcacagtattctattgtgtgaatatgtcacaatttattaatccattcatttttggttggcatttggatagtttccagtttatacagtgttgctatgaacagtctaatttatatcttttcgtgaacatatgtatatattttctttggatatatacttagaagaattgctagatcacaaagtagatgtgtgtgtgtgtgtgtgtgtgtgcgtgyatgtgtgtgtttagttttaatggatagtgccaaacattttccaaagtggctgaattagttttttgcttccaccagcaatttttgagcatgtcagttgattcgcaccctcactaaatgccaaaaatgatattctctatttttcattttagcttttctagtgagtgcacggtgttttgtcatcatagttttatatgcatcttcttcacgacttaatgatattttcgtatgtttattggtcatctgtccatcctcttttgtgtagtgtatgttaaaatattatgccacttttcaattgaattgtct

SEQ ID NO: 193504 - DNA, 533 bp, Homo sapiens
tcaattattctaattattgcacagtattctattgtgtgaatatgtcacaatttattaatccattcatttttggttggcatttggatagtttccagtttatacagtgttgctatgaacagtctaatttatatcttttcgtgaacatatgtatatattttctttggatatatacttagaagaattgctagatcacaaagtagatgtgtgtgtgtgtgtgtgtgtgtgcgtgcrtgtgtgtgtttagttttaatggatagtgccaaacattttccaaagtggctgaattagttttttgcttccaccagcaatttttgagcatgtcagttgattcgcaccctcactaaatgccaaaaatgatattctctatttttcattttagcttttctagtgagtgcacggtgttttgtcatcatagttttatatgcatcttcttcacgacttaatgatattttcgtatgtttattggtcatctgtccatcctcttttgtgtagtgtatgttaaaatattatgccacttttcaattgaattgtct

SEQ ID NO: 193505 - DNA, 533 bp, Homo sapiens
tcaattattctaattattgcacagtattctattgtgtgaatatgtcacaatttattaatccattcatttttggttggcatttggatagtttccagtttatacagtgttgctatgaacagtctaatttatatcttttcgtgaacatatgtatatattttctttggatatatacttagaagaattgctagatcacaaagtagatgtgtgtgtgtgtgtgtgtgtgtgcgtgcatgtgtgtgtttagttttaatggatagtgccaaacattttccaaagtggctgaattagttttttgcttccaccagcaatttttgagcatgtcagttgattcgcaccctcactaaatgccaaaaatgatattctctatttttcattttagcttttctagtgagtgcacggtgttttgtcatcatagttttatatgcatcttcttcacgacttaatgatattttcgtatgtttattggtcatctgtcyatcctcttttgtgtagtgtatgttaaaatattatgccacttttcaattgaattgtct

SEQ ID NO: 193506 - DNA, 580 bp, Homo sapiens
aacaaaatttgcatttctaggataatccccatttgggcatgatgtattctttcttatataatgtttgatttgctttgctaatattttgtttagaacttttgcatctatgttcatgaaacacatgcttggtagttttgctttcttacaatgtctttttcaggtttkggtatcaggataaggctgacctcatataataagtgaagtcttttctctttcttttatttctggaataataaagaattggtataatattttcctcaaatatttggtagaatttaccaatgaagcttttggtgcatggaggtttataaagttaattgattaattcgttaatttattgtgtgtaagattttaactataatttttttctttttacatccagaatataaaccatattaaatattaatataattttcaattttaaaaatagatatagaactatttaggatgtctattttttctcaaggagttttggtaacttggtatctttaaaggcatttgttcatttcatctaaattgtcaaatttatttgtatgaacttgttctcaatcatcccttacttttctcttaatagctgtaa

SEQ ID NO: 193507 - DNA, 580 bp, Homo sapiens
aacaaaatttgcatttctaggataatccccatttgggcatgatgtattctttcttatataatgtttgatttgctttgctaatattttgtttagaacttttgcatctatgttcatgaaacacatgcttggtagttttgctttcttacaatgtctttttcaggtttgggtatcaggataaggctgacctcatataataagtgaagtcttttctctttcttttatttctggaataataaagaattggtataatattttcctcaaatatttggtagaatttaccaatgaagcttttggtgcatggaggtttataaagttaattgattaattcgttaatttattgtgtgtaagattttaactataatttttttctttttacatccagaatataaaccatattaaatattaatataattttcaattttaaaaatagatatagaactatttaggatgtctattttttctcaaggagttttggtaacttggtatctttaaaggcatttkttcatttcatctaaattgtcaaatttatttgtatgaacttgttctcaatcatcccttacttttctcttaatagctgtaa

SEQ ID NO: 193508 - DNA, 408 bp, Homo sapiens
aaatctctggaaaaatgtaaaaaaaaaaaaaaaaaaaaaataattaaaatycttcaatattaaatgatgtagttatattcaataagtcgtgtttatattacatttataatatttaaatgagatttgaaaacaaacaaaataacccaccctagaacaaatgcatctcttatctagactgacaaataaacaaaaaaatgctactgatttcagaacatttgaatgataaagcctactcttgttccaacttaatttatcttaaacatgaaaatgtacatgacctcattattgacatggatcataaggtaaataaaaagtacattcatgaaattgatgatacaggttaaaaatgctttaaatagtttttcttttctaacttttctattctagaaggtgttgataccaaagaat

SEQ ID NO: 193509 - DNA, 559 bp, Homo sapiens
tgacacactcatgtttcaaggtaatgtaagtgtattcaaggtatgtaagtgtatgaygatttatagtaacattttccacagaacaatattttaattattacagtcaacttgaagatgattagtctgtgagaagaaacatgtgaaaaataaaagggtgaataaaacaatggaaaattaacattgaggataataataaaggtgtgaacaaaaatgttgggaaacaagaacttaagtaatcatctatgcaactacaaacagattaatatattgggcagactataacattttaaagataaaatgtgagtccattaagagctttatgacagttctacaaattgtgttttgttttgtttttggcaaagtctgtctggacaggtgatttggtttttgattttagagactgagaaacatttcagtacagcatggcacgtggccctaaattggtagcaacacataatttacttattaatccaatcattgttattttctcagtagcctacaacagttaaccttatgtcattggggcctggataattgtcactacaaataaaaacaagca

SEQ ID NO: 193510 - DNA, 559 bp, Homo sapiens
tgacacactcatgtttcaaggtaatgtaagtgtattcaaggtatgtaagtgtatgacgatttatagtaacattttccacagaacaatattttaattattacagtcaacttgaagatgattagtctgtgagaagaaacatgtgaaaaataaaagggtgaataaaacaatggaaaattaacattgaggataataataaaggtgtgaacaaaaatgttgggaaacaagaacttaagtaatcatctatgcractacaaacagattaatatattgggcagactataacattttaaagataaaatgtgagtccattaagagctttatgacagttctacaaattgtgttttgttttgtttttggcaaagtctgtctggacaggtgatttggtttttgattttagagactgagaaacatttcagtacagcatggcacgtggccctaaattggtagcaacacataatttacttattaatccaatcattgttattttctcagtagcctacaacagttaaccttatgtcattggggcctggataattgtcactacaaataaaaacaagca

SEQ ID NO: 193511 - DNA, 581 bp, Homo sapiens
aaggttcttattatgcagataaagcctccaggtagcaagtttcagaaatcatagactgtctattatcagaccaaaaaggtgccagactgttagttaatctctcctggattaggaaaagacctggaaagrgaaggggattttctatagaacgtagatttccccacaaggaatggcttttcggggccatttcaaatattattttgaggtaaattattttgatttctttcagggcctgctatctgtcatgtgagactatactagagtcaggttggaatttagtatcttattgctatgatgagtttatttcctcactcttaagatgtctctttaaatgtttatgctggtcccttgtgcctgaattccaaacggaagagagtataatgaggcatgtcccaactcccttcctgtcatgcatggcctgaactatttttttgagtttaacttttgaatgcccttggctgagaggggatccattcagtttgtcagggggcttagaattttatttctggtttatagcactcttgtcataaatctgaatttacaggtgttcccacaagtattcctatgggtatctggttact

SEQ ID NO: 193512 - DNA, 579 bp, Homo sapiens
tagatctcgtctgacaaaaaaagttgtagtwtgctgaacaccaatcaattatccaacaccaactggctgtccaacaactcaattctgacaccacccagagtcaacacagaatccacaagttcagggctcagtcccacaacactgtcgcaactacagatgccagtcacatggctctggataaccatctatttctgaactactgctaacaagccaaggtcttccacatcttcctcctcaagttcaataatttgaataatttgaaagattactcagagaactcagcaaagcactgagcttacatgttgggaacaggccccccaaaatctggccaaaaagtggccccaaaactggccataaagaaaatctctgcagcactgtaacatgttcatgatggccataacgcccacgctgggaggttgtgggtttaccagaatgagggcaaggaacacctggcccacccaggaaggaaaactgcataaaggcattcttaaaccacaaaaaaaagcatgctcctgctgcagataactagcccaacccatccctttattttggctcatcccttcattttccataagggat

SEQ ID NO: 193513 - DNA, 579 bp, Homo sapiens
tagatctcgtctgacaaaaaaagttgtagtttgctgaacaccaatcaattatccaacaccaactggctgtccaacaactcaattctgacaccacccagagtcaacacagaatccacaagttcagggctcagtcccacmacactgtcgcaactacagatgccagtcacatggctctggataaccatctatttctgaactactgctaacaagccaaggtcttccacatcttcctcctcaagttcaataatttgaataatttgaaagattactcagagaactcagcaaagcactgagcttacatgttgggaacaggccccccaaaatctggccaaaaagtggccccaaaactggccataaagaaaatctctgcagcactgtaacatgttcatgatggccataacgcccacgctgggaggttgtgggtttaccagaatgagggcaaggaacacctggcccacccaggaaggaaaactgcataaaggcattcttaaaccacaaaaaaaagcatgctcctgctgcagataactagcccaacccatccctttattttggctcatcccttcattttccataagggat

SEQ ID NO: 193514 - DNA, 561 bp, Homo sapiens
aaggcccctgtggtagatctcgtctgacaaaaaaagttgtagtttgctgaacaccaatcaattatccaacaccaactggctgtccaacaactcaattctgacaccacccagagtcaacacagaatccacaagttcagggctcagtcccacaacactgtcrcaactacagatgccagtcacatggctctggataaccatctatttctgaactactgctaacaagccaaggtcttccacatcttcctcctcaagttcaataatttgaataatttgaaagattactcagagaactcagcaaagcactgagcttacatgttgggaacaggccccccaaaatctggccaaaaagtggccccaaaactggccataaagaaaatctctgcagcactgtaacatgttcatgatggccataacgcccacgctgggaggttgtgggtttaccagaatgagggcaaggaacacctggcccacccaggaaggaaaactgcataaaggcattcttaaaccacaaaaaaaagcatgctcctgctgcagataactagcccaacccatccctttatt

SEQ ID NO: 193515 - DNA, 608 bp, Homo sapiens
agggtgcacttgaatctttgctcaacacttatctatgtatgcataaggtgaaaccacatgagaccaggaaagaatgatrcctcttttttttcctattattagtattttactttattcaccattgtatacataaggagagaatgatttctgaagaaagaacaattacctgagagccttaagattaaactcccagaggtcacctggggccaaggattattcgaattccttccaatcacagtggagagatcatgttgaacacaagcagcactcaagtagaccttatgagggtcatacatttagaagtgcagctaatgaccaggtgcagtggctcatgcctgtaatcccagcactttgggaggcagaggtgggtggatcacctgaggtcaggagttcaagaccaacctggccaacatggtgaaactcggactctactaaaaatacaaaaattagccaggcatggtggcatgtgcctgcaatcccagctactcaggaggctaaggcatgagaatcacctgaaccagggaggaggaggttgcagtgagccaagaccacgccactgcactccagcctgggtggcagagtgaaagtatgtctcaaaaaaaaaaaaa

SEQ ID NO: 193516 - DNA, 608 bp, Homo sapiens
agggtgcacttgaatctttgctcaacacttatctatgtatgcataaggtgaaaccacatgagaccaggaaagaatgatgcctcttttttttcctattattagtattttactttaytcaccattgtatacataaggagagaatgatttctgaagaaagaacaattacctgagagccttaagattaaactcccagaggtcacctggggccaaggattattcgaattccttccaatcacagtggagagatcatgttgaacacaagcagcactcaagtagaccttatgagggtcatacatttagaagtgcagctaatgaccaggtgcagtggctcatgcctgtaatcccagcactttgggaggcagaggtgggtggatcacctgaggtcaggagttcaagaccaacctggccaacatggtgaaactcggactctactaaaaatacaaaaattagccaggcatggtggcatgtgcctgcaatcccagctactcaggaggctaaggcatgagaatcacctgaaccagggaggaggaggttgcagtgagccaagaccacgccactgcactccagcctgggtggcagagtgaaagtatgtctcaaaaaaaaaaaaa

SEQ ID NO: 193517 - DNA, 612 bp, Homo sapiens
cttgaatctttgctcaacacttatctatgtatgcataaggtgaaaccacatgagaccaggaaagaatgatgcctcttttttttcctattattagtattttactttattcaccattgtatacataaggagagaatgatttctgaagaaagaacaattacctgagagccttaagattaaactcccagaggtcacctggggccaaggattattcgaattccttccaatcacagtggagagatcatgttgaacacaagcagcactcaagtagaccttatgagggtcatacatttagaagtgcagctaatgaccaggtgcagtggctcatgcctgtaatcccagcactttgggaggcagaggtgggtggatcacctgaggtcaggagttcaagaccaacctggccaacatggtgaaactcggactctactaaaaatacaaaaattagccaggcatgrtggcatgtgcctgcaatcccagctactcaggaggctaaggcatgagaatcacctgaaccagggaggaggaggttgcagtgagccaagaccacgccactgcactccagcctgggtggcagagtgaaagtatgtctcaaaaaaaaaaaaaagtgcagctaaa

SEQ ID NO: 193518 - DNA, 442 bp, Homo sapiens
gtctcgctctggtcacctgtctttttgaaattaatttttatcttttacaactagatattatgaagttaaaataccttttacttaaaatataaactcatagtaatggaagctgattgtgtcaaccgccttccttccacctcctatcctaaaattgtagtgattctctattgactacaaaaaaaaaattcctcccatttggtttgaggattaagacatctccttatttatccataaacatttattaatttacctttgattcccatkgccaatctgtgttctggccacattgaattatttatttggagtttctttttctaatatttctggttccctggtttttctcatgttctcattgcaccaaattctatttgctttctctccacacagagtaaatctgctcagcagcaaggctaatcttacgttttatatcttctgtgaagtc

SEQ ID NO: 193519 - DNA, 549 bp, Homo sapiens
accaggctcttgactctaggagtcagcttcattcagaccacccatttccatgtcttcgaagcagtggagacagcaggccaaggttctcagcttctcatctttgtcacataggagggaagggctcttcgttttggcttattcaaaatatcacagagtaaagttctgattggctsacccatggtcatgggtccaatccaaaaccagtaactatgctcaagaaaatagagtacaatacatacctgaagatgattcccagccatccctgactctagatggctgggagaaggcaggttatttaaggaaatggcagctcctttaggggctatatattatagcgggagggaggacaagtagactaattctacaaaataaagggtgtgctatttcaaaataagtcttgggtactttagggagaaaaaagtcaaatgagtaaattacaaacttaaccacaactatcaatcagtacaattttcagtggttatatttggtagataatgtagaaaattcaagagagtcttatgtgagtaataagcttatgtcattctcatc

SEQ ID NO: 193520 - DNA, 459 bp, Homo sapiens
ttttcactcaaaatcctacctctttcctgctttatgctgcaggtgttaatcactaataaatatcctgtatgctaaaccttgtctcagcatcttctctagaaaacccaaactgggacagttggtatcaaaactgatttgaaaaagcatatgatgaaataagaatgtggaaactgattactcactgcatacctagacataagtkatctgtcactgattttaagtggaacacagacccagtgatagtccagttgttaaaattctgggaaaaagaaatacaatagaatgtgtgatgtagctggcatttgagatacacagagggaataataaccaacaagtttcattatttttcagttactaagcaccactggaatcctaaaagagaaaatgaaaaccgcaagtgattaacaggcaggtaaaagccaagagtggaaatcagataacctcttttgtgattcactc

SEQ ID NO: 193521 - DNA, 534 bp, Homo sapiens
atgtttgtctcctttaagcaaagttttggattctattcacttgacacatgaaccaagtaggtagagatcaatccagttgcatctgaaccactggaagtctcattaaatgataccatttactaaccaccttctkccccatgttctactaacctagggggatttcagaaacattgccaaggtctcttctgtctaaaaaagggaggggggcagttataattcagcagcttgggtagcttcttctttcattgtgtgtaatttataaagccagacagttgatatttattgtctatattgtggctaaacaacaataaatagcttttctgaattactaatgtccttttccagtccatgcattataatactcaggggtctgtgttgttttatcaaaaggcaataaagatgagaagcagaatccactagcctctgcccctaccccgctaatatgttgacttacctctgagtgcttgtagactctagcacccatcataggccagatattatgctgggctatgggaacacaaagttgagtaatac

SEQ ID NO: 193522 - DNA, 362 bp, Homo sapiens
catactattatcatggtagtgaataagtctcacaagatctgatggttttttaaggggtttctctttttgcttgcttctcattctctctttgcctcccaccatstaagaggtgacttttgcttcccattatgattgtgaggcctccccaccaatgtggaaccgtgagtccattaaaccttttcccttataaattacccagtctcagttatgtctttatcagcagtgtgaaagcagactaatacagattattttgtctgccataagtatagctacatttttatgcttacatgatttttttttctatcatttcactttcagtctgtgtgttgttacaggtgaagtgagtttcttttaggcagaat

SEQ ID NO: 193523 - DNA, 648 bp, Homo sapiens
aaccttttcccttataaattacccagtctcagttatgtctttatcagcagtgtgaaagcagactaatacagattattttgtctgccataagtatagctacatttttatgcttacatgatttttttttctatcatttcactttcagtctgtgtgttgttacaggtgaagtgagtttcttttaggcagaatatagttgagttctcttttatatattttttaatccattcagccattctrtaacatttaattggcaaacataaatggttaacgttcaaggttgttattgataggtaaggacttactcctcttatttttgttaattgttttcagattgttttgtacactgtttcttcctttgttccttttttttatctttacgatttggcgatttgctttagtgataatatttgtcttccttttttcttatttgtatatcttctctaccagtgagttttatattttcatgaattttcatgatggtagatattatcctctcactgttagatgtaggactcttttaagcatttcttgcaggtcaatctagtgttgataaattctctcagattttgattgtcttggaaaaactttatttttccttttgaaggatatctttgctggttattttattcttcattaacttattttttc

SEQ ID NO: 193524 - DNA, 581 bp, Homo sapiens
tggtgtaatggtcacttcttccaattgtattgagtagcttttggaaagaaagatattttcctgtagatgttatatagtatggactgagtagggtacattggctttgattttgtgttggtgccatattgtttattcagttgtaataaatgtcagtggtgtctgtgactcagtaacttaaactgaggttgttcatggagtctattataaggctttgttggtaacagkagtaccagttgggctggtcttgaaactcctgcgtggtatatgcaggcatttgtggtggtagtgaaacgctgggtaggtatgtccttgaatccctgggtggggcatatgggtgccagcaatggtggcagtgacctaggacagcctgcttgaggtagagtgttttaacagaaatatattactgcatgtagtatgacatgttaaaatgtgaattctagccaggcgcggtggctcatgcctataatcccagcactttgggaggccgaggcaggcagatcacaaggtcaggagttcaaaaccagcctggccaacatggtgaaaccccgtctctactaaaaaaatacaaaaattagccaggc

SEQ ID NO: 193525 - DNA, 581 bp, Homo sapiens
tggtgtaatggtcacttcttccaattgtattgagtagcttttggaaagaaagatattttcctgtagatgttatatagtatggactgagtagggtacattggctttgattttgtgttggtgccatattgtttattcagttgtaataaatgtcagtggtgtctgtgactcagtaacttaaactgaggttgttcatggagtctattataaggctttgttggtaacagtagtaccagttgggctggtcttgaaactcctgcgtggtatatgcaggcatttgtggtggtagtgaaacgctgggtaggtatgtccttgaatccctgggtggggcatatgggtgccagcaatggtggcagtgacctaggacagcctgcttgaggtagagtgtttkaacagaaatatattactgcatgtagtatgacatgttaaaatgtgaattctagccaggcgcggtggctcatgcctataatcccagcactttgggaggccgaggcaggcagatcacaaggtcaggagttcaaaaccagcctggccaacatggtgaaaccccgtctctactaaaaaaatacaaaaattagccaggc

SEQ ID NO: 193526 - DNA, 581 bp, Homo sapiens
tggtgtaatggtcacttcttccaattgtattgagtagcttttggaaagaaagatattttcctgtagatgttatatagtatggactgagtagggtacattggctttgattttgtgttggtgccatattgtttattcagttgtaataaatgtcagtggtgtctgtgactcagtaacttaaactgaggttgttcatggagtctattataaggctttgttggtaacagtagtaccagttgggctggtcttgaaactcctgcgtggtatatgcaggcatttgtggtggtagtgaaacgctgggtaggtatgtccttgaatccctgggtggggcatatgggtgccagcaatggtggcagtgacctaggacagcctgcttgaggtagagtgttttaacagaaatatattrctgcatgtagtatgacatgttaaaatgtgaattctagccaggcgcggtggctcatgcctataatcccagcactttgggaggccgaggcaggcagatcacaaggtcaggagttcaaaaccagcctggccaacatggtgaaaccccgtctctactaaaaaaatacaaaaattagccaggc

SEQ ID NO: 193527 - DNA, 581 bp, Homo sapiens
tggtgtaatggtcacttcttccaattgtattgagtagcttttggaaagaaagatattttcctgtagatgttatatagtatggactgagtagggtacattggctttgattttgtgttggtgccatattgtttattcagttgtaataaatgtcagtggtgtctgtgactcagtaacttaaactgaggttgttcatggagtctattataaggctttgttggtaacagtagtaccagttgggctggtcttgaaactcctgcgtggtatatgcaggcatttgtggtggtagtgaaacgctgggtaggtatgtccttgaatccctgggtggggcatatgggtgccagcaatggtggcagtgacctaggacagcctgcttgaggtagagtgttttaacagaaatatattactgcatgtagtatgacatgttaaaatgtraattctagccaggcgcggtggctcatgcctataatcccagcactttgggaggccgaggcaggcagatcacaaggtcaggagttcaaaaccagcctggccaacatggtgaaaccccgtctctactaaaaaaatacaaaaattagccaggc

SEQ ID NO: 193528 - DNA, 603 bp, Homo sapiens
aagagtgacacagtctccatcaagctctggagccatgtagtcatggcagagcaaagagtatttagctcastggggattggaattcagcatcgttacaaatggacacagttcacactgggacacgatatctccttggatgtctggataatctccactttcttttttgccctcatagctgatatggtccagggattctgcctcttctacattttctcccctgttagaatggaggtcctaaatccagtcaactgactggagctagtattcttcctaggccaggacagccctttccttaatgtaggcagatcaggccaaaataatgattgttgaaaatgatatagaaagatgaatagaattgtgctttctttgctatcctagggtatgaaaacatattctgttctcccttttccctgtaattctacaaacatctactgcacacttaaacagaatctgcaaatttctcccctgaaagccagagaagtttctctgccacacaccagctctttctctttgacacgtaagaagatgtatcctttcttaccaaccagcagaaactgggacatgcacaccactcccgtgccctcccacctccttcccagtctt

SEQ ID NO: 193529 - DNA, 603 bp, Homo sapiens
aagagtgacacagtctccatcaagctctggagccatgtagtcatggcagagcaaagagtatttagctcactggggattggaattcagcatcgttacaaatggacacagttcacactgggacacgatatctccttggatgtctggataatctccackttcttttttgccctcatagctgatatggtccagggattctgcctcttctacattttctcccctgttagaatggaggtcctaaatccagtcaactgactggagctagtattcttcctaggccaggacagccctttccttaatgtaggcagatcaggccaaaataatgattgttgaaaatgatatagaaagatgaatagaattgtgctttctttgctatcctagggtatgaaaacatattctgttctcccttttccctgtaattctacaaacatctactgcacacttaaacagaatctgcaaatttctcccctgaaagccagagaagtttctctgccacacaccagctctttctctttgacacgtaagaagatgtatcctttcttaccaaccagcagaaactgggacatgcacaccactcccgtgccctcccacctccttcccagtctt

SEQ ID NO: 193530 - DNA, 525 bp, Homo sapiens
ggtaaaaacaacccatgacagatgatgagcaacttcttatattttgaaagtgtttgttgtgtcgcactagaaggctttttttttctttgctatttatctccaaagccctgccttgaattgtgacactaaccactgcaygtcaatttgtagctctttctttattccagactttacattttaggcattgttgtgattatggctttattgcctatgggcacaagtacctaggactttggggccataaagctgcctttgcagcttgtgccttttctgacaatccaaaaaagtggcttttccatatttccttcattttccttgtctatgatatgaaaaaggtttgcagcatggcaagatcaattaagagcagaaacccaaaagctgttagctgaaaaacaaacaaaaaatacctatggtgaagcgtgatttttgggtgaagttaaaggcaggaagctggtagagttcataggttgtttagtggattagttgatagcatgtaaatatttaaaatgtttatttaaaactaca

SEQ ID NO: 193531 - DNA, 525 bp, Homo sapiens
ggtaaaaacaacccatgacagatgatgagcaacttcttatattttgaaagtgtttgttgtgtcgcactagaaggctttttttttctttgctatttatctccaaagccctgccttgaattgtgacactaaccactgcatgtcaatttgtagctctttctttattccagactttacattttaggcattgttgtgattatggctttattgcctatgggcacaagtacctaggactttggggccataaagctgcctttgcagcttgtgccttttctgacaatccaaaaaagtggcttttccatatttccttcattttccttgtctatgatatgaaaaaggtttgcagcatggcaagatcaattaagagcagaaacccaaaagctgttagctgaaaaacaaacaaaaaatacctwtggtgaagcgtgatttttgggtgaagttaaaggcaggaagctggtagagttcataggttgtttagtggattagttgatagcatgtaaatatttaaaatgtttatttaaaactaca

SEQ ID NO: 193532 - DNA, 502 bp, Homo sapiens
tgattaaagtaacaatacaatactttaaattgctgcttttcttaaaagtctatgactacattagcatagattcaaaaaatttggggatgttttttacattatatgaatttttaagtagttatccattcaataactactaatcacaggctttaccaatttgctgtggaacaatatarggaacatcacttattatcagtttatttctggcaggtaatattaatgcctcagaagactttcacagatatttaagtcatcagcaatatagattgaggccaggtgcggtggctcatgcctgtaatcccagcactttgggaggctgaggagggaggatggcttgagcccaggagttccagaccagtctgggcaatgtagtgagaccctgtctctacaaaaattacaaaatatctatgtatatagagagagagtgaaaaaagcaagttgtagaatatgtagagtatgattgtgtttttgtaaaataaaaaagctatacaagtgaacgtgt

SEQ ID NO: 193533 - DNA, 502 bp, Homo sapiens
tgattaaagtaacaatacaatactttaaattgctgcttttcttaaaagtctatgactacattagcatagattcaaaaaatttggggatgttttttacattatatgaatttttaagtagttatccattcaataactactaatcacaggctttaccaatttgctgtggaacaatatagggaacwtcacttattatcagtttatttctggcaggtaatattaatgcctcagaagactttcacagatatttaagtcatcagcaatatagattgaggccaggtgcggtggctcatgcctgtaatcccagcactttgggaggctgaggagggaggatggcttgagcccaggagttccagaccagtctgggcaatgtagtgagaccctgtctctacaaaaattacaaaatatctatgtatatagagagagagtgaaaaaagcaagttgtagaatatgtagagtatgattgtgtttttgtaaaataaaaaagctatacaagtgaacgtgt

SEQ ID NO: 193534 - DNA, 615 bp, Homo sapiens
tacccagccttggagggaggccagagcccagggtcttatcctcagctctgtaggtgcagaaattgatttctgtgcatgtagttagtgttgaagggcatccattcacagcaacaactacacaacattcacaagggtctgacgtgtagacaataaagccaagttattaactgaaaatgggaactaaactggccaataaatgaccatgtttgttagygggagttgcgggtagacacattttctccatgacgtaggtgctaaaggaaaatcaatagaaatggtaaaattatttcatgtgcataatatgagaaaattaggaaataaaatgttattcgaatgaccagtgtgatcaacctaaaaatttaatgcattaatgcattaatatttccctttctctctctgtctctctgtctctttctctctctcctcataatataaggtatatgtatatacataatttttgttcatcaggttgcttgctccattggaaataccagggatatgataagcttcaaatcctcactttttggaatcccacacaaataattcaattttagcatttattaatgacattttgttggttatatttgtctttcatatttagtccaaaatgtacta

SEQ ID NO: 193535 - DNA, 555 bp, Homo sapiens
tcaattaattcagtagctaggtagagagtttccttttagagggactgttacataacgttgaatgaaaggagaatgaaaggagatgcagacagctcctgactgctgctctcaagctcaagtgggagaattaagacagcctcattcactgctcagcacttcctttgctctgatgatcatcagaaatcatctcagtctyccttgcgctgctccttcttttcctgaagttccgatgctccagcttcaatcctcaaacttggaaaaaaaaaaaaaaaaggaaatatctgtagtccttgcaactgctttttgaagttgtgctcgggcccctgttgtttctctactgaagcttgcagtgtgctttcatcggagctggcccctgccccagccagcaccagccctcaaagacttttttattctaacatagcccgagtatgttaggaaactagagctgcataaccactgcctcttaactctgctagccctggcatcttatctgtatgatttctgcagtgatgggagggaagctagtagctctctagttcattaaacggaacgtct

SEQ ID NO: 193536 - DNA, 333 bp, Homo sapiens
attttactctctctccctatagcacccatcctgtttcttattcttactccacaatacactcccaacttacacatacagtctcttctttaggtgttgggggttgggagttattacaagatgacatggtgtatgcatttatttctttgtctacrttgattgtactgatttacagtctcaccagcagttcataaaatccttccttgcggctaagatatgggcacaaggctaaaatttatatctttagctgatatctcattcctgaacactcatctcatttgcaactgccttgaatgtcaaataggcatctcaaccttagtaagtaaaacagaattc

SEQ ID NO: 193537 - DNA, 333 bp, Homo sapiens
attttactctctctccctatagcacccatcctgtttcttattcttactccacaatacactcccaacttacacatacagtctcttctttaggtgttgggggttgggagttattacaagatgacatggtgtatgcatttatttctttgtctacattgattgyactgatttacagtctcaccagcagttcataaaatccttccttgcggctaagatatgggcacaaggctaaaatttatatctttagctgatatctcattcctgaacactcatctcatttgcaactgccttgaatgtcaaataggcatctcaaccttagtaagtaaaacagaattc

SEQ ID NO: 193538 - DNA, 333 bp, Homo sapiens
attttactctctctccctatagcacccatcctgtttcttattcttactccacaatacactcccaacttacacatacagtctcttctttaggtgttgggggttgggagttattacaagatgacatggtgtatgcatttatttctttgtctacattgattgtactgatttacagtctcaccagcagttcataaaatccttccttgcrgctaagatatgggcacaaggctaaaatttatatctttagctgatatctcattcctgaacactcatctcatttgcaactgccttgaatgtcaaataggcatctcaaccttagtaagtaaaacagaattc

SEQ ID NO: 193539 - DNA, 515 bp, Homo sapiens
cataactctacaggcaattcaggatcatctccagccaatttctggaactgaaacaattcaaatctgtgcttcaacttccgcaaatgtcttctctttctgaaaagctttttagctaggtttctcctttcggtactgtgacttaaagcaagaaaatattcctcacttttttcagtaatcaagactttaatctatcctaccagtaccctcaggagtactaggttatttcatctactctttgtctccatgacattcatgacattgatacaaagattgaacaaaaattacagcctagacatttggtcaaatgattttacatttagttacataggctgagtattcctgattaaattgaagttctcctttttggcmaaaatgttacttaaatgaagcttaaatgttaccaaataggtgatctgtaaggagttgatttaatattgtttaaatatttttgcctttcaaagtttcacacaatagcttctctctcattgctccctgaaaatataaatgatacggga

SEQ ID NO: 193540 - DNA, 515 bp, Homo sapiens
cataactctacaggcaattcaggatcatctccagccaatttctggaactgaaacaattcaaatctgtgcttcaacttccgcaaatgtcttctctttctgaaaagctttttagctaggtttctcctttcggtactgtgacttaaagcaagaaaatattcctcacttttttcagtaatcaagactttaatctatcctaccagtaccctcaggagtactaggttatttcatctactctttgtctccatgacattcatgacattgatacaaagattgaacaaaaattacagcctagacatttggtcaaatgattttacatttagttacataggctgagtattcctgattaaattgaagttctcctttttggccaaaatgttacttaaatgaagcttaaatgttacmaaataggtgatctgtaaggagttgatttaatattgtttaaatatttttgcctttcaaagtttcacacaatagcttctctctcattgctccctgaaaatataaatgatacggga

SEQ ID NO: 193541 - DNA, 472 bp, Homo sapiens
accaattggacctaataaacatctgtacaatatttcacccaacaaccacagaatatatatacttctcatctacacatggaacaaactctaagaatgaccatgtttggtcataaagcaaacctcagtaaattttttaaaaattgaaataatatcaagcatcttctcagaccacagtgaaataaaaatagaaatcaatatcaagaactctaaaaaatacrcaaatacatggaaactaaacaacttgccacaaaataacttttgctaaacaacaacagcaataaaatatgatggcataaattcaaaaatttttgaaacaaatgaaaataatgacactatatatcaaaacttctgggatgtgcaaaagcagtgttaagaggaaagtttagagtgctaagctgcataaggaagatagaaatatatcaagttaccaaccaaatgttgcatctaatagaattataaaaacaagaacaaa

SEQ ID NO: 193542 - DNA, 405 bp, Homo sapiens
gaattcttagaattatacctataaattaaattaagtawgctctcatgttactgtattaatattacatgatcatataaattgtgttgtaataataatcgtacatatgctgtgaccttgaaattcaggtgtattaatttcttaaaacatttgttagccttgtaataaaacaccaggctattgagtgggctaactataatcacacttctggtagcataactataattaaaattttcaacacatagtcccctaatgtccctgaaaaatagatagttgatgcatataagtacagcaatataattagtgaaaggaatttttatacttataacagtgtttgaaatacagtcataaaatgatctccattttgaacttcatagcttttaagtaataattggaaacatactgtat

SEQ ID NO: 193543 - DNA, 570 bp, Homo sapiens
aatatcttatacttattgagtagttactttgcaccaggtactgtgaaaaactcttaatgcacatggattattgttttcttgttagagctgttgaacatagcatgttattatgtccatttaaaatacgtgaagtttgtaataaagaaaatgaagaaatttttgccaagtctcagaggtaataaatcatcaagccccagtctctgttaataaaaagtgcaggctgttaaccacgatcttatttatttaaaaaattctctcttctagttagaaaatgtaggaagagtgaaatacggaagtaaggggttatggcaggtttattcattttctagtgttagacagcgaattgatacaaacttaatggcttaaaacaacacaawtgtattgtttgtgagagtatcacctctcagtttatatggctcagaaatctagaaaccaagtagttggcttggatctgatgtggccacaaaaaatgtccccagctgagctcttctctgaaggatctgaggaagacccagactccaatctcattctgcctattgtcgtaattcagttccatgtggctgcaggtcc

SEQ ID NO: 193544 - DNA, 607 bp, Homo sapiens
tccacatgtttcattggagatgatgatggaagcagttacacctattttagtttcagttcccaaactcaagtattctaactattgtggtctcagaaccacatgatgcccatcagtttraagtttatgcctcatcctgaggatcgcattcaaacctttcaggatgtcttcacagcaacttggatgtgttttaagcttattccaatgttcttaggctatcagcctctaggtaataccatttataatagaactgtagcattccataggcatattccattgtcatgtctcattcacctttagtctgaagtaatgttatgtaggatcctatgatagtaggcaatttctgagtcctgagttagcagtattgcctaagaaactgtattaatcttggatgctggcaggtacaacatactgcagcagagtggaggtgtccctggtcccatctctgtcaccgtagctcatccatttcaagcttctactctgcatccatttgggtcgtttaggacaggaaatggctgacctttactatactggacagtcaatatgcatgcttgtttgttttcaggagcctatatgactgtggttatcattttttggagaacatcaatgc

SEQ ID NO: 193545 - DNA, 485 bp, Homo sapiens
ccaccttcccctggcctgagaaattcccctcttttactgtgaggggaatttttttttactcttttactgtgtttgggtgctcttgtattagtgtcagtgcagatcctttaacagagtgtgaaaaattggagtagttttttgtgtgacagcatacaattcctctggaatagttttatgtccctttgtggcaggattaggaaaactgatgcttaatatccttgcagcaatgctcrcaggaggtttttcctcaagagaatatatacttcctttccatgtatgtgttctgaatctgagaactgttttgtatctggaaattgggatagtgctttatatactctagatattttagttgttgtttcataggcctagcaataccttcatttatctagccactaggaatattgtttattcaccaaggtcaaggcaatctggttatcattcttatgttaagtatgtccgtcttccctataaactttactaactgc

SEQ ID NO: 193546 - DNA, 613 bp, Homo sapiens
aatgaaagttttatgtgccctcctgaggaacttaatgtccttatagatttttctggttctaatagtaaatccattctaatattaatttaaataaatttaaaatttatttgaaataaactcaaataagataattctaataattcatcaatttttatagtctgtatttggcaagcttcaaagaggcatcccagcagcaaattaagactggatccaggtgtttatatcaataaattatattttaagtttattatcaacaaacttactcagccttgtattctgcccactgtgtccagcaccctcaagatccacctaactgttttctctaggttgtagccggtgcttaccrgctaagtctcatagatctttctggaaataacctctttctttcaatagcagagcaaattgaacctcagtgggcccttgaccataagtgtttaactctagttattagcataatagtaatatgtaaatatatgagcagatttgcagaagaattattagcattttgcagggcacctgcttaagctgaggtcattccatgacctcttggcaatgagaggcttctatcttctaataaagagtaggagagaaatgcttcctgaccagagtttag

SEQ ID NO: 193547 - DNA, 589 bp, Homo sapiens
atatatgcacacaacacaggagcacccagttttataaagcaagttcttagagaccttcaaagagacttagatttccatacagtaatagtgggagacctcaacacttcactgacagcgttaaacagaacactaaggcagaaaattaacaaagatacttaggatctgaactcagcaagaaaccaaatggacctgatagttatccagagaactctatacccaaaaccagcagaatatacatttttcccattagcacatttaacatactctaaaatcaatcacacaatcagacataaaataatcctcagtaaatgcaaaagaactgaaatcataccaaccactctcttggamaacagcaaaaaaaaaaaaaaaaaaaaatgaaaatcacgattaggaaaatcactcaaaactgtacaattacatggaaattaaacaacctgtccctgaatgaattttgggtaaataattaaattaaaggagaaatcatgaagttctctgaaactaataaaaacacagatataaatataccataatctctgggacacagctaaggcactatgaagagggaaatgtatagtaacaaatgctcaca

SEQ ID NO: 193548 - DNA, 623 bp, Homo sapiens
ataaactgttctattataaatacacatgcacgtgtaggtttattgcagcactattcacaatagcaaagacatggaatcagcctgaatgcccatcaatgatagactggataaagwaaatgtggtaaacatacataatggaatgttatgcaaccataaaaaagaacgagatcatgtcctttgtacggacatggatggagctggaggaccttacccttcacaaactaacacaggaacagaaaaccaaataccacatgtttctcactcataaatgggatctaaatgatgagaatacatggacacatagaggggatccacatgtactggggcctgttagggggtggagggtaaaggagggagagaagcaggaaaaataactaatggatactgggtttattgcctgggtgatgaaatagtctgtactaccatcccccatgacacacatttaccatgtaatgaaactgcacatgctgcacatgtacttctgaacttaaaagttaaaaaaaaaattccatgagtaaatagtagtgattttatctgactgatttctcatgtgtttatcaaaagtccacctgcatttgatattccaatgttttaatgtatttcaatttttgtatactgcaata

SEQ ID NO: 193549 - DNA, 623 bp, Homo sapiens
ataaactgttctattataaatacacatgcacgtgtaggtttattgcagcactattcacaatagcaaagacatggaatcagcctgaatgcccatcaatgatagactggataaagaaaatgtggtaaacatacataatggaatgttatgcaaccataaaaaagaacgagatcatgtcctttgtacggacatggatggagctggaggaccttacccttcacaaactaacacaggaacagaaaaccaaataccacatgtttctcactcataartgggatctaaatgatgagaatacatggacacatagaggggatccacatgtactggggcctgttagggggtggagggtaaaggagggagagaagcaggaaaaataactaatggatactgggtttattgcctgggtgatgaaatagtctgtactaccatcccccatgacacacatttaccatgtaatgaaactgcacatgctgcacatgtacttctgaacttaaaagttaaaaaaaaaattccatgagtaaatagtagtgattttatctgactgatttctcatgtgtttatcaaaagtccacctgcatttgatattccaatgttttaatgtatttcaatttttgtatactgcaata

SEQ ID NO: 193550 - DNA, 550 bp, Homo sapiens
acactgtcactgtggttgtacagttccccactgttattgcgtggtagtctaagtcttttcaaaggactagaattacttgttttataaattttagtgcttcaatattggttgcgttatatttaggataattaagtcttttgttgaattgaaccagttattattatgtgatgtccttctttgtccttttttaccattgttggtttctttaaattctgttttatctgatgtaagaatagtgatctcgctcttttttgttttccatttgcatggcagactttctccaacctttactttgagcccatgggtgtcattacrtgggagaggggactcttgaaaacagcagatggatgggtcttatgattttaatttaacttgccactctatgccttttaagtggggggtgtttagaccatttaaattcaagattaatattaatatatgaggttgtgatcatattatgaagttattagttggtcactttgtagtttctattgtttggttgctttgtagggtctgtgggtatgtatttcagtatatttttgtggtagca

SEQ ID NO: 193551 - DNA, 445 bp, Homo sapiens
tgttttgttacagcctctaatgagccaaaatagtataagaatcttgaagattaagaatttctgtagtgctctacttgcctgaaatttggggtgctaagcattaaaaaaatgcaattttagtgtgttatacttgcggacattaaacactatgtgtaaaggttgagaatttctaccataaaatacatagatcctctggatgtaaatcttgtatatgacacaaactagatgttagaccctaaaaaagatgttcagattctccatgtrtcagtctcttcattttaaagaatctaaaatacgaagaataaaacaatgtagggaaagtctttagaataatgaaatttacttgataagcattcaataaatatttgctattattactgatggttaatattgtcaacttgattggattgaaggatacaaagtattgatactaggtgtgtctgtg

SEQ ID NO: 193552 - DNA, 454 bp, Homo sapiens
taaagtcagacacagagacgttaaataagtagtttaaggttgcattgataacaaagtgtgaaacttcagtagttttcaaacccaactctgattgactcagactcccatgatcttaatcactcagcagcctctcttgtgaggtgggtccatcaacttgcccttttcagcacagtgggtggtgggaaaagatgggtcactttgatatctggtgtccagtctagctctgaraaaatgacaatctgtgtctctgtcagtgaggcatccaccactcatcactgtgtggagactggaagccaggaagcatctgccatctacttcactagtgggaccagtggtcttcccaagatggcagaacattcctactcgagcctgggcctcaaggccaagatggatgctgggtaagctgagctctttctctctacagagaattacatgagttttggagttagaagga

SEQ ID NO: 193553 - DNA, 577 bp, Homo sapiens
atggaattttttcctgtagaacttgatggtacagccattaagtaagacccacagactgcagctatgcattatcctgtagcaacaaagcaatgaaaatgacctcattttgcttatgaagatacaycctatgttggactctatgatagagggattgggttatttccctgctgtgcccccagatctctaatggcccatccagacatctatttggctgcagcaaaggttcaagctaaggcatagatgacatcttcaaaagtcaaaaagtcaggtgtgatctggattttcataggaaattatcttcaaataatactgtcattctctgttttaagcaaattcttactctgtgtccttctcaaaaggacttgaactggtttttattaagttccaccattaaaaaaatgaaaacagacataaaattataaagcccattgggaaaatttaggttggaggtgtagggtggaaaagactaaggaaattaaggagaaatatagcaaatgagtatgtagttacaagctgagcttctagtaaggcaaagcaataaggaatatgggatcattttcatagcttatatctgtgt

SEQ ID NO: 193554 - DNA, 494 bp, Homo sapiens
taatattttgtaactagcttttatcatttaacaatttaggtaaggatcttttcagttcaattaatgccaacctgcagcatgatttttaatgatgtagtaaatagtatatatccactgctgtttatgccttttatyggaccaagggatgatgtcccagttttcactagtaaaaatacactataatgaatgtgtagtagctaaagttttattgctttctcttgttgttttttgagaactagaatttgtgtttgtgtatctgtgttatgtgtatagttctgtatatctaaagtgtaacttagactctattcagtgtcatatccagttacttgccatgccattcactatgataaccatttgctaagcccctttcttagtatcttatttcattcctataaaaatcctgtgaaataagctgtcagtatctgttttatgggcgaaagcactgaagcccagagtttaagtagttcaaagtcagctagtaaggtagcagagta

SEQ ID NO: 193555 - DNA, 494 bp, Homo sapiens
taatattttgtaactagcttttatcatttaacaatttaggtaaggatcttttcagttcaattaatgccaacctgcagcatgatttttaatgatgtagtaaatagtatatatccactgctgtttatgccttttattggaccaagggatgatgtcccagttttcactagtaaaaatacactataatgaatgtgtagtagctaaagttttattgctttctcttgttgttttttgagaactagaatttgtgtttgtgtatctgtgttatgtgtatagttctgtatatctaaagtgtaacttagactctattcagtgtcatatccagttacttgccatgccattcactatgataaccatttgctaagcccctttcttagtatcttatttcattcctataaaaatcctgtgaaataagctgtcagtatctgttttatgggcgaaagcactgaagcmcagagtttaagtagttcaaagtcagctagtaaggtagcagagta

SEQ ID NO: 193556 - DNA, 600 bp, Homo sapiens
gtgttaaataaaagaattgttgtagatccaaatgattattcctattatacagatgaggaaaactgagcctcagtgatcagggcagagccacactgtccccttctccaagcatttcctttgtgtggtcccactctattctcaaatgccagtgaagtactatgtcatgggcttctccccatttgayagaaaaggaaacagactcagaagcgtctgtggggcagactcctaaggccacagaggctccatgatgcccatgagaaagtcaatccagtggccaagaaacctggcttctggtctcagttctaccttctgtaatggctgtttagcttcagactaacctcttgatgtctctggtcatcagtatccctatattcccaatgatagagtgaggctaagaatcctttatgccaccatatataatccagtaactgaacttccagtctggagcccatgcccctatacctgagtcagataggaagatgcactgacaagggataaacctcaagccttttcattgcttataagcaagtgcctcagctgaatagacggacccagctattgtagaaatatgcacattagccagggtcccagggggcttcc

SEQ ID NO: 193557 - DNA, 613 bp, Homo sapiens
catagcagttatgatccatcttgatagattgtttcttgaaaattgccaacctgatcctaaaattaatatgaaagagataagacccaaattagccaatacacttctgccagccacgaaggcatattataaatctacagttaagatagtgagtcccaacacaaggttgaataaatagaatcaatagaatacaatatatcagaaaagccagaaacaagcccatgtaaaatgtaaatgatttatgaaaaaataattgtgacctacagataagggagaaaataatggattataacagcaaacagtgctgaaacagttgggaacaatgtataaaatcaattccatgtggatttaagatttaacatgaaaaaaaccctacagactacacggtactataattaaaaataggggaatatatatatatktactttagggaaacatttattaagaaacaaaaggcctaatccacacagaaaaatattaataaattttactgtattaaaatttagaactttaaatcttcaaaagataccacagaaagagtaaaaagacaagccaaacactgaataatattatttgaacgttatacaaacaaaataagactagtattaatgacttc

SEQ ID NO: 193558 - DNA, 613 bp, Homo sapiens
catagcagttatgatccatcttgatagattgtttcttgaaaattgccaacctgatcctaaaattaatatgaaagagataagacccaaattagccaatacacttctgccagccacgaaggcatattataaatctacagttaagatagtgagtcccaacacaaggttgaataaatagaatcaatagaatacaatatatcagaaaagccagaaacaagcccatgtaaaatgtaaatgatttatgaaaaaataattgtgacctacagataagggagaaaataatggattataacagcaaacagtgctgaaacagttgggaacaatgtataaaatcaattccatgtggatttaagatttaacatgaaaaaaaccctacagactacacggtactataattaaaaataggggaatatatatatatttrctttagggaaacatttattaagaaacaaaaggcctaatccacacagaaaaatattaataaattttactgtattaaaatttagaactttaaatcttcaaaagataccacagaaagagtaaaaagacaagccaaacactgaataatattatttgaacgttatacaaacaaaataagactagtattaatgacttc

SEQ ID NO: 193559 - DNA, 593 bp, Homo sapiens
gattcatgaatttgaatgtttttcaatttatgaattgaatttggagaaattctaaatcccaaatgattatgtgaccaagtctgtatttctaagcacttatagctgtgactctggagagctgaagttgtaatgcagaaagacaaacaaacccagtgtgcctggctgggctatctttggttccaaagaggaagccatgacaatacactccaggttgacccgttcacaccacagctcacaatcctgcactgtctcccccttgtctactgaacagtgtataaatgcctcattcttttttttctttttttggcatgggggtctcaytccattgcccgtgctggaatgcagtggcatgatcacagctcactgcagcctcaacctcctgagctcaagtgatcctcctgcctcagcctcccaagtagctgggacagtaggtgtgcaccatcacacctgactaatttttgtattttttgtagcgatggggtctcatcatgttgcccaggctggtctcaaacctggtttcgagcaatcctcctgccttggcccctcaaagtgctgggattaaaggcatgagccactgcacctggccaatgcct

SEQ ID NO: 193560 - DNA, 489 bp, Homo sapiens
tggggggaggattctgagcagacagatttgggctcctacccctctttccccacgtccttgccatgttattggtaagcctcagtttcttttcctttgaaatgggctctactcccaggagagaggtgaggaggaaatctcaggtaaggaagagcttgttgttcaggctttagcctgtcatttgctggggcaaccctgccctttttagagacaccaggtttgaagggggcttttggatctctcctcgaatccgtcctccccaycccaccagaaaacagttgcccttctcaaggggcttcctggccaggctcagggaagcggctgtgtgggagggcatatgccctataatagttgtgcatgtgtgtgagtctgtgtgcctgtatgtgcacataagtgtgcatgcatgactgtgcgtgtgtctgagtctgtgtgggtacctgtcgggtatgtgtgtgcatgtgtgtgagtctgtgtgtactagtgtgtgcatgt

SEQ ID NO: 193561 - DNA, 420 bp, Homo sapiens
tctgtgttcctgcagcgactgcagtgggggaggagacagatttggggtagttattctcccagcctctgccctgccctgctgcacscctctccctcagcagcctccctacagccagtctctccaggtggcctaaatgcccctccccgcaccctggcaggttctcaggatgatgccccactcctggacagctccccttcttcccctgcccgcttctgcaaatgggccctttattaaatgctcctccatctcccggtttgagtgcgccatctgttttctgttgggaccctgaccaagggggtattctttaaagaatttttaagtaaatatgtctgcaaggtgtttgttgagactgtgataaaaaggcattcgaggaagcagtgtgaaagatgccatccgtgagactggagagacagaaagtca

SEQ ID NO: 193562 - DNA, 321 bp, Homo sapiens
aaaagcaaacagcagaatggctggtgcacaatggatcgttagggttgaattctgcagaaacttgactttacatttttctaacatttggcttttcgttatttaacmatgaggacattttttcttctgtgattagaaaacaaaaataaaagcaaaggtcttctatcctcctcaccccttacaaatccaagttctgtaaacgtgcaatgatttctaccctttttgcagggcttataaaagcactgtggtgaaggggctataaagccaggggcatctgcctgggtttcccacagcagggcacccttttcggtgccaggacaagaa

SEQ ID NO: 193563 - DNA, 540 bp, Homo sapiens
tgggaaaaagaaaagcaaacagcagaatggctggtgcacaatggatcgttagggttgaattctgcagaaacttgactttacatttttctaacatttggcttttcgttatttaacaatgaggacattttttcttctgtgrttagaaaacaaaaataaaagcaaaggtcttctatcctcctcaccccttacaaatccaagttctgtaaacgtgcaatgatttctaccctttttgcagggcttataaaagcactgtggtgaaggggctataaagccaggggcatctgcctgggtttcccacagcagggcacccttttcggtgccaggacaagaaaagccacgcatactgcatgatctcaattacagggagaatctaagacagtcaaattcatagaagcagagagtcaaagggtggttaccagggactggggaggagggaaatggggagacgctgatcaaagggtacgacgcacgatgagtaagttccggagctctcatgtacagcacagtgactacaggtcatcctactgtgttacagacttg

SEQ ID NO: 193564 - DNA, 583 bp, Homo sapiens
gggtgtcttttgaggcctatgtggataaagaaaatatctccaaataaaaactagaaagaagctttctgagaaactgctttgttgtttgtgcattcatctatgagatgtaaaactttcttttcattcagctgtttgtaaacactgtttttgtactttctgtgaatggatatttgggatctcattgaggtgaattgcaaaaaagtgaaaatacaaagataaaaactagaatgaagctatctgaaaaactgctttatgatatgttaacatttcttttcatttagcatttggaaacacagtttttgaaggatctgtgatggcatatttgggagctcttggatgccaatggtgaaaaagaaaatacctttagataaaaactagaaagaaacattctgagaaagtgcttagtgaagtgtgcattcatctcacagaggtaaacatttcttttgattcagcaktttttttgtccattctgtgaatggacatatgggagctcattgaggccaatggcaaaaaaaaatgaatatcacaggacaaaaactagagggaacctatctgataaacggttttgtgatatgtgcattca

SEQ ID NO: 193565 - DNA, 507 bp, Homo sapiens
tttgtgatatgtgctttcacctcgcagatttaaacctttattttcattcagcagattggaaacactgtttttgaagaatctgcaaagggatatttgggagcacattgcagcctatggtgaaaaagaaagtatactcaaataaaaactagaaagaagcawgctgagaaactgctctgtgttgtgtccattcatctcacacagttaaatgtttcttttcattcgacagtttggaaacaccatttgtgtccattctgtgaatggacatttgggagcagattgagaccaatggcgaaaaggcgagtatcccaggagaaaaacaagaaggaaactattagagaaagtgctttgtgatgtgggcttccatctcatggagataaacctttctttcattcaacagtttggaaacactgtttttctcaaatctgagaaggaataattgggagtgcatttaagcctatggtgaaaaagaaaatatgttcaggttaaagccagacggaaagtttttgt

SEQ ID NO: 193566 - DNA, 507 bp, Homo sapiens
tttgtgatatgtgctttcacctcgcagatttaaacctttattttcattcagcagattggaaacactgtttttgaagaatctgcaaagggatatttgggagcacattgcagcctatggtgaaaaagaaagtatactcaaataaaaactagaaagaagcatgctgagaaactgctctgtgttgtgtccattcatctcacacagttaaatgtttcttttcattcgacagtttggaaacaccrtttgtgtccattctgtgaatggacatttgggagcagattgagaccaatggcgaaaaggcgagtatcccaggagaaaaacaagaaggaaactattagagaaagtgctttgtgatgtgggcttccatctcatggagataaacctttctttcattcaacagtttggaaacactgtttttctcaaatctgagaaggaataattgggagtgcatttaagcctatggtgaaaaagaaaatatgttcaggttaaagccagacggaaagtttttgt

SEQ ID NO: 193567 - DNA, 507 bp, Homo sapiens
tttgtgatatgtgctttcacctcgcagatttaaacctttattttcattcagcagattggaaacactgtttttgaagaatctgcaaagggatatttgggagcacattgcagcctatggtgaaaaagaaagtatactcaaataaaaactagaaagaagcatgctgagaaactgctctgtgttgtgtccattcatctcacacagttaaatgtttcttttcattcgacagtttggaaacaccatttgtgtccattctgtgaatggacatttgggagcagattgagaccaatggcgaaaaggcgagtatcccaggagaaaaacaagaaggaaactattagagaaagtgctttgtgatgtgggcttccatctcatggagataaacctttctttcattcaamagtttggaaacactgtttttctcaaatctgagaaggaataattgggagtgcatttaagcctatggtgaaaaagaaaatatgttcaggttaaagccagacggaaagtttttgt

SEQ ID NO: 193568 - DNA, 631 bp, Homo sapiens
cacaagctaacctgctttatgacgtgtggattcatctcagagagttaaaacttcctcttggttaagtagtttcaaarcactctttttgtagaatctgtgaggaaacatttgggagctctttttggcctatggtgaaaaagcaagtatccaaagataaaaactagagagaggctctctgtgaaaccgctttgcaatgtgtggattcttcttacagaactaaacgttctttttcattcagcaggttggaaacagtccttttttagcatctgcaaaaggacattttggagtgcattgaggcctatggtgacaaactgaatatccccagataaaaactagaaagaagttatctgtgaaactgctttgtgatgtatggcttcatctcatgcagtttaacaattctcttgattaagcagattggaaatgcactttttgtagaatctgcaaagggacatttgggagcccctcgaggtctatcagaaaaaaagaatacacccagataaaaattaaaaataatctatctgtgaatctgctatgtgatatgtggatttatgtcacagagttaaacctttctttggattcagctgtttggagacactcgttttggagaatacgtgaaaggacacttgggagc

SEQ ID NO: 193569 - DNA, 631 bp, Homo sapiens
cacaagctaacctgctttatgacgtgtggattcatctcagagagttaaaacttcctcttggttaagtagtttcaaaacactcttkttgtagaatctgtgaggaaacatttgggagctctttttggcctatggtgaaaaagcaagtatccaaagataaaaactagagagaggctctctgtgaaaccgctttgcaatgtgtggattcttcttacagaactaaacgttctttttcattcagcaggttggaaacagtccttttttagcatctgcaaaaggacattttggagtgcattgaggcctatggtgacaaactgaatatccccagataaaaactagaaagaagttatctgtgaaactgctttgtgatgtatggcttcatctcatgcagtttaacaattctcttgattaagcagattggaaatgcactttttgtagaatctgcaaagggacatttgggagcccctcgaggtctatcagaaaaaaagaatacacccagataaaaattaaaaataatctatctgtgaatctgctatgtgatatgtggatttatgtcacagagttaaacctttctttggattcagctgtttggagacactcgttttggagaatacgtgaaaggacacttgggagc

SEQ ID NO: 193570 - DNA, 603 bp, Homo sapiens
ttctcttgattaagcagattggaaatgcactttttgtagaatctgcaaagggacatttgggagcccctcgaggtctatcagaaaaaaagaatacacccagataaaaattaaaaataatctatctgtgaatctgctatgtgatatgtggatttatgtcacagagttaaaccttyctttggattcagctgtttggagacactcgttttggagaatacgtgaaaggacacttgggagcccattgaagcctatgtggaaaactgaatatacccagataacaattagaaagaagctatctgtgtaagtgctttgtgatgagtcaattcatctcacagatttaaacttttcttttgactaagcagtttggaaacactctaattggagaatcagtgaaaagactttgggaagccccttgaggcctatgagaaaaaacgaaatatcccaagataaaaactaggaagaatctctctgtaaaattgctttgtcatatttgggttcatctcacatagttaaacgtttgttttgactcagcaggttggaatcactttttttggagaatctgtgaaggcacattaggaagcccattgatgcctatggggaaaaact

SEQ ID NO: 193571 - DNA, 446 bp, Homo sapiens
ctctttttctgtttacaagccctcctttgctggaccaggcttttttatttttgttgtggcatccctgcacttcacagggggcctggagcttgttcctgtgcccctgaagcacctatccataaatgatcagatcagagcagcaaaccactctgccaggaatcaccagsggggagagtcacatcttcctcatctttgggtttagacctgtgcattccagtgtggtcctgagtggcatatgtgcccattcatatttaaataaatgaaaaaattcaaaacctcctcacaagagccatgctagaagttcccagttgccaaatgtctactcttaagagaccatctccattctcccagaatcacctgggaagcagctgctgggagtctggcccaggttctgttcagtgcacccacctaactcagtgcatgtgcatcaaggcttaatctcaggt

SEQ ID NO: 193572 - DNA, 446 bp, Homo sapiens
ctctttttctgtttacaagccctcctttgctggaccaggcttttttatttttgttgtggcatccctgcacttcacagggggcctggagcttgttcctgtgcccctgaagcacctatccataaatgatcagatcagagcagcaaaccactctgccaggaatcaccaggggggagagtcacatcttcctcayctttgggtttagacctgtgcattccagtgtggtcctgagtggcatatgtgcccattcatatttaaataaatgaaaaaattcaaaacctcctcacaagagccatgctagaagttcccagttgccaaatgtctactcttaagagaccatctccattctcccagaatcacctgggaagcagctgctgggagtctggcccaggttctgttcagtgcacccacctaactcagtgcatgtgcatcaaggcttaatctcaggt

SEQ ID NO: 193573 - DNA, 494 bp, Homo sapiens
ccccagcatcctggagtcctgagggccgaacacatgattgagcacatttttggcctccactcctcacccagtcccatccaatcccaaatccttgggctttgaatgaaacctaaattggttttcgttggagaggcccgagtccagctgtagctcaaggccctctgtggctggcaggaatcctaggggatatatgtggaggggctgctgtgttgctgtaggcagtggctctcaccgtctgtgtagyctggtccctggaatccactgggcccagggcagagcctctgggcagctggcacggggtcatttatcttgtcacaccctcctctctggcccagcagccttgtcctgctccccatactcctgtcaggcccagcttgttctctgtgtcaggtctgccaggtgccctccctcttagtcttcccacagctcaggcaaaccctgggagggccccctcatttctgtgctgaaaactgctggcctcacctgcagattaa

SEQ ID NO: 193574 - DNA, 536 bp, Homo sapiens
caaggttgtgaagagggtggctgcctcttggaggaacagaatgatgcggcttaccctcccttggctcagtkatggtatgtgagggctgggcaagtatgtgggaagtcagagatccctcccttatagcacagaagaaatgatacaggctgtggagaaggctccagaaatgagcacatcagaggctctggggttggctccacagccctggaacagcagggtctgagtggttgtctcgactctaactctcccctttccttcttatggccaccccatcaccactgctcctccagacactctgatgcttgcttcacagaattggaagactccaccattacaggtggccaccagcaggtaattgatctcctcttatatgctctctctcttttatcctctttctgactcatgagctccttttttagctctggtccttttcctctttccctctcttctgattgttctcctgaagaacctggtctcatcccacagttgaggttcttgggtcttcagtgtcaataaaatcctctccagccctcctg

SEQ ID NO: 193575 - DNA, 536 bp, Homo sapiens
caaggttgtgaagagggtggctgcctcttggaggaacagaatgatgcggcttaccctcccttggctcagtgatggtatgtgagggctgggcaagtatgtgggaagtcagagatccctcccttatagcacagaagaaatgatacaggctgtggagaaggctccagaaatgagcacatcagaggctctggggttggctccacagccctggaacagcagggtctgagtggttgtctcgactctaactctcccctttccttcttatggccaccccatcaccactgctcctccagacactctgatgcttgcttcacagaattggaagactccaccattacaggyggccaccagcaggtaattgatctcctcttatatgctctctctcttttatcctctttctgactcatgagctccttttttagctctggtccttttcctctttccctctcttctgattgttctcctgaagaacctggtctcatcccacagttgaggttcttgggtcttcagtgtcaataaaatcctctccagccctcctg

SEQ ID NO: 193576 - DNA, 594 bp, Homo sapiens
ctttgtgatgtgtggattctttgcacagatttaaatttttgtcttgattcagcagcatggaaacatttcttttggagaatcagcaaagggacatttgagagcttattgaggcctaggtggtaaattgaatatcccccaataaaaactagaagcaatctgtgaaactgcattgggatgtctggagtcatctcacagagttaaatctttgttttgattcagcaggtttgaaacactctttttgcagtatctgagaagggacattttgaagcccttagaggcctatggtgyaaaacagaatagtccatgaataaaactagaagaagctatttgagcaactgcttcataatgagtggattcatctcacaaagttaaacttttttttgattcagcagattggaaacactcttttcagaaaatctgtgagcccacaagggcctgaggggaaaaatcaaatatccccagatacaaagcggaaagaaactatctgtgaaactgctttttgatgtgttgattcctctcacagaattaaacctttctttttatttagcatggtggaaacactctttttggggactctgggaatgcacatttggg

SEQ ID NO: 193577 - DNA, 475 bp, Homo sapiens
gtccttttgcagatactaaaaaaagagtcattacaacctgctgaattaaaagaaaggttccagtctgtgagaagaatccacacatctctaaacagtttcacagctaacttctttctagtttttatttggggatattctctttttcaccttaggcctcaacaagttgccaaatgtcttttcatggattctagaaaagcaatgtttccaacccgctgattcagaagaaagttttacttctgtgagatgaatccacacgtcatggaatagtttcacagatggcttctttctacttttcatctttggatattcagtttgtcaccataggcgtcaatgcactatcaaatgtccctttgtggatyctacaaaaggactgatcccaacctgctgaatcaatagaaaggtttacctctgtgaaatgaatccacacatcacaaagcagtatgagagattctacaaaagggctatttccattctg

SEQ ID NO: 193578 - DNA, 557 bp, Homo sapiens
tgggggtaggggggaaggatagcattagggagatattacctaaatgtttaaattgcgaaattaatgggtgcagcacaccaacatggcacatgtgtacatatgtaactaacctgcacattgtgcacatgtaccctaagacttaaagtataagaaaaaaaaaaaaagaaaagcttatctctgtgagatgaatccacatattgtaaagcagtttcacagatagcttctttctagtttttaatctggaaatactctgtttttccccatactcctcaaatgtcccttcacagattctccaaaaacagtgtttccaacagggtgagggaaaaaaaaaaaaacgtttaactctgtgctgaatccacatatcacaaagcagtttcacagatagcttctttctagttttcattggggattatcrctttttccccagaggcctcattgggctcccttatgtccctttgcagaatctccagaaagtgtttccaacttgctgaatcaaaagaaatatctaactttgtgagacaaatctacacatcacaaagcggtttcagagatagctc

SEQ ID NO: 193579 - DNA, 395 bp, Homo sapiens
tccctttgcagaatctccagaaagtgtttccaacttgctgaatcaaaagaaatatctaactttgtgagacaaatctacacatcacaaagcggtttcagagatagctcatttcygttgttttcctggggacattcaatttttccacatagacttaatcagctcccaaatatccctttgcagattctccaataatgtgtttccaacctgctgaatcaaaagaaaggtttaactctgtgacttgaatgcacatatcacaagccagtttcacagatagcttccttctagtttttatctggagattttctgtttttaccataggcctcaaagggcttttaaacatccctttgcagattctcagaaagagtgttttcaacctactgaatcctaagaaagtt

SEQ ID NO: 193580 - DNA, 614 bp, Homo sapiens
ataaaagccaaaaggaacctttctgagaaacagctttggtgctgtgtgcattcgtcttacagagctaaatcattcttttgattcagtattttggaaacactgcttttgtgcattctgtgaatggactttcaggagctctttgtggccaatagtgtaaaagtgaatataacaggaaaaacgtgaaggaatctacctgagaaactgctctgtgatttgtgcattcatctcacagagttaaaattttcttttcattcagcagtttggaaacagtgtttttgtccattttgtgaatggacatttatgagatcattgaggccaattgccaaagagaaaatatccaaggataaaaatgaaaagaaygctatctgagaaaccgatttgtgataagtgcatttgtctcatgacttaaacatttcttttcattcagcagtttggaaacacggttttgtagaatctgcaaagggatattttggagctcattgaggcctatggtgaaaaggaaaatatcttcagataaaaactagaaagaagctttctgagaaactgctttgtgatgtgtgcattcatctcacaaagctaaaactttgttttgattcagcagtttagaaacactg

SEQ ID NO: 193581 - DNA, 614 bp, Homo sapiens
ataaaagccaaaaggaacctttctgagaaacagctttggtgctgtgtgcattcgtcttacagagctaaatcattcttttgattcagtattttggaaacactgcttttgtgcattctgtgaatggactttcaggagctctttgtggccaatagtgtaaaagtgaatataacaggaaaaacgtgaaggaatctacctgagaaactgctctgtgatttgtgcattcatctcacagagttaaaattttcttttcattcagcagtttggaaacagtgtttttgtccattttgtgaatggacatttatgagatcattgaggccaattgccaaagagaaaatatccaaggataaaaatgaaaagaacgctatctgagaaaccgatttgtgataagtgcatttgtctcatgacttaaacrtttcttttcattcagcagtttggaaacacggttttgtagaatctgcaaagggatattttggagctcattgaggcctatggtgaaaaggaaaatatcttcagataaaaactagaaagaagctttctgagaaactgctttgtgatgtgtgcattcatctcacaaagctaaaactttgttttgattcagcagtttagaaacactg

SEQ ID NO: 193582 - DNA, 514 bp, Homo sapiens
agggatatttgggggcacattgaggcctatggtgaaaaaaaataagctcagataaaaaccagaaagaagctttctgagaaagtgctttgtgatgtgtacattcatctcactgagttaaaccttccttttgatttagcagtttggaaacactgttttgtccattctgtgaatggacacttctgagctcattgaggcctatgctgaaaaagggaatactgcaggataaaaactagaaggaagctatctgagactctgctttgtgatgtgtgcattgatatcacagagtgaaacataacttttcattcagcagtttagaaacactttttttgtagaatctctgaagtggtattcaggagctcattgaggacaatggcggaaaagtcratatctcaagatataaactggaggatagctatcttagaaaccggtttgtgatgtgtgcattcatctcacagagttaaaactttcttttcattcatcagtttgcaaacactgtttttggataacctgggaa

SEQ ID NO: 193583 - DNA, 543 bp, Homo sapiens
aaacctttcttatcattaagcaatttggaaaaactctttttgtagcttctgcaaagaatatttcgggagcacattgaggcttatgattaaaaacaaaataccttcatataaaaattagaaagagtctttctgagaaactgctttgtgacatatgcactcatctcacagagttaaaagtttcttttgattctgcaatttggaaactatttttgtccattctgtgaatggacatttgggagctcagtgaggccaatggcaagaaatcraacatcccaggatgaatactatgtggaagctctctgagaaactgctttgtaatgtatgcattaatctcacagagttaaacatttcctttcattcagcagttttgagacactgttttttttcatcctgcaaatggacatttgggagctcattgaggtcaatgacaaaaaagcaaacatacaaggataaaaactacaaggaagctatctgagaaactgcttttgatgtgtgcactcattttgccaagttaaaactctctttttattcagcagtttgcaa

SEQ ID NO: 193584 - DNA, 543 bp, Homo sapiens
aaacctttcttatcattaagcaatttggaaaaactctttttgtagcttctgcaaagaatatttcgggagcacattgaggcttatgattaaaaacaaaataccttcatataaaaattagaaagagtctttctgagaaactgctttgtgacatatgcactcatctcacagagttaaaagtttcttttgattctgcaatttggaaactatttttgtccattctgtgaatggacatttgggagctcagtgaggccaatggcaagaaatcgaacrtcccaggatgaatactatgtggaagctctctgagaaactgctttgtaatgtatgcattaatctcacagagttaaacatttcctttcattcagcagttttgagacactgttttttttcatcctgcaaatggacatttgggagctcattgaggtcaatgacaaaaaagcaaacatacaaggataaaaactacaaggaagctatctgagaaactgcttttgatgtgtgcactcattttgccaagttaaaactctctttttattcagcagtttgcaa

SEQ ID NO: 193585 - DNA, 543 bp, Homo sapiens
aaacctttcttatcattaagcaatttggaaaaactctttttgtagcttctgcaaagaatatttcgggagcacattgaggcttatgattaaaaacaaaataccttcatataaaaattagaaagagtctttctgagaaactgctttgtgacatatgcactcatctcacagagttaaaagtttcttttgattctgcaatttggaaactatttttgtccattctgtgaatggacatttgggagctcagtgaggccaatggcaagaaatcgaacatcccaggatgaatactatgtggaagctctctgagaaactgctttgtaatgtatgcattaatctcacagagttaaacatttcctttcattcagcagttttgagacactgttttttttcatcctgcaaatggacatttgggagctcattgaggtcaatgrcaaaaaagcaaacatacaaggataaaaactacaaggaagctatctgagaaactgcttttgatgtgtgcactcattttgccaagttaaaactctctttttattcagcagtttgcaa

SEQ ID NO: 193586 - DNA, 630 bp, Homo sapiens
ttttgattcagcatgttggaaacacactttttgtggaatctgccaatggacattttggagcccaataaggcctatggggaaaaattgaatatctccagataaaayctagaaataagctatctgtgaaactgcttttggagtgtgggttcatcacacagagttaaacctctcttttgattcaccagtttggaaacactgtttttgtagtatttgcgaagggacattttggagtccagttgaggcctaggcagaaaaatgaaatacccacaggtaaaaactagaaagaagctatctgtgaaactgctttgtgatgtgtggatttatctcacagagttaaaatgttctttttattcagcaggttgaaaacactttttttgtagaatctatgaagggacatttggtagccaatggaggcctatggggaaaaacagaatatccccagataaaagctagaaaaaaagctatctttgaaactgctttttgaggtgtgcattcatctcacatagttaaacctttcattttattcaaaaggtttgagatactcttttgggaaaatgtacaaagggacatttacgagcccattgaaatctagtggaaaagtcaaatatccccagatataaactagaaaga

SEQ ID NO: 193587 - DNA, 630 bp, Homo sapiens
ttttgattcagcatgttggaaacacactttttgtggaatctgccaatggacattttggagcccaataaggcctatggggaaaaattgaatatctccagataaaatctagaaataagctatctgtgaaactgcttttggagtgtgggttcatcacacagagttaaacctctcttttgattcaccagtttggaaacactgtttttgtagtatttgcgaagggacattttggagtccagttgargcctaggcagaaaaatgaaatacccacaggtaaaaactagaaagaagctatctgtgaaactgctttgtgatgtgtggatttatctcacagagttaaaatgttctttttattcagcaggttgaaaacactttttttgtagaatctatgaagggacatttggtagccaatggaggcctatggggaaaaacagaatatccccagataaaagctagaaaaaaagctatctttgaaactgctttttgaggtgtgcattcatctcacatagttaaacctttcattttattcaaaaggtttgagatactcttttgggaaaatgtacaaagggacatttacgagcccattgaaatctagtggaaaagtcaaatatccccagatataaactagaaaga

SEQ ID NO: 193588 - DNA, 630 bp, Homo sapiens
ttttgattcagcatgttggaaacacactttttgtggaatctgccaatggacattttggagcccaataaggcctatggggaaaaattgaatatctccagataaaatctagaaataagctatctgtgaaactgcttttggagtgtgggttcatcacacagagttaaacctctcttttgattcaccagtttggaaacactgtttttgtagtatttgcgaagggacattttggagtccagttgaggcctaggcagaaaaatgaaatacccacaggtaaaaactagaaagaagctatctgtgaaactgctttgtgatgtgtggatttatctcacagagttaaaaygttctttttattcagcaggttgaaaacactttttttgtagaatctatgaagggacatttggtagccaatggaggcctatggggaaaaacagaatatccccagataaaagctagaaaaaaagctatctttgaaactgctttttgaggtgtgcattcatctcacatagttaaacctttcattttattcaaaaggtttgagatactcttttgggaaaatgtacaaagggacatttacgagcccattgaaatctagtggaaaagtcaaatatccccagatataaactagaaaga

SEQ ID NO: 193589 - DNA, 596 bp, Homo sapiens
caaaatggtcaaaaacagtatttccatactgctgaatcaaaacaatgtttaaatctatgagatgaatgcacacatcacaaatgtgtttctcataaagattctttctagtttttatctgaagatattttctttttcaccataggcctcaaggcagtcccaaatatcccttcacaaattctacaaaaacagtgttcccaaactgctgaatacaaagaaacattcaactctgcgagatgaatgcacacatcatgaagaagtttctcagatagcttccttcttgtttttgtcctgagatattcgcttttttgccattggcccaatgagctcccaaatgtccgtttgcagaatggacaaaacagtatttccaaaatgctgaatgaaaggaaaggtttaactctgtgagattaatgcacacatcacaaaacggattctcagatagcttccttcaagttttaaacctgggatattccatttttcacttttggcctcaragagctacaaaatgtccattcacagaatggacaaaagcagtgtttccaaactgctgaatcaaaggaaagattttcctctctgagctgaattccaagatcaccaag

SEQ ID NO: 193590 - DNA, 593 bp, Homo sapiens
aatgcacatgttacaaagccgtttctcagaaagcttctttctagtttttatctgaagataatttctttttcaccataggcctcaataagctcccagatatccctttgtagattttacaaaaaagtgtttcctaactgctgaatgaataagaagctttaactctgacagttgaatgcacatatcacaaatcagtttctcagatagcttcattctactttttatcctgggacattcacttttttgctattggcctcaatttgctccccaaggtccattcacagtaaggacaaaaacagtgtttccaaaatgctgaatgaaaagaaatgtttaactgagagatgaatgaacacatcacaaagtggtttatcagatagcttccttccagttcttatcctgggatattcactttttttacctttggcctsaatgagctccaaaatgtccattttaggaatgggcaaaaaaaggttttccaaactgctgaatcaaaagaaaggtttaactctgtgaaatgaactcacacacctcaaagcagattctcagaaagcttcttctttctagtttttaagtgaaaatattttctttttcaccat

SEQ ID NO: 193591 - DNA, 599 bp, Homo sapiens
aaagggacttttgggagctcattgaggcctctagtgaaaaagcgaatatccccagataaaaactagaaagaagctatctgtgaaactgctttgtaatatgttgatttatctcacagagttaaatttttcttcttattcgcacgttggaagccctccttttgtagaatctgcaaaggtacatttggaagcccatggaggcctrttaagaagcaccaaatatccccagataaaaactagaaagaaactctctgtgaaactgccttgtgaagtgtggattcagctcacagagttaaacctttgttttgattcagtaggttggaaacactctaattggagaatctgaaaactgacatttgtgagcccactgaggcctctggtgaaaaacagagtatccccagataaaaacttgaaagaatttatctgtgaaacggctttgagatgtgtggtttcatctcacagtgttaaaactgtcttttgtttaagcaggatggaaacactgtttttggagaatctgtgaagtgacacttgggggcccattgagactcagggtaaaaacagaacatccctagataaaaactagaaacaagctatttgcaaaa

SEQ ID NO: 193592 - DNA, 599 bp, Homo sapiens
aaagggacttttgggagctcattgaggcctctagtgaaaaagcgaatatccccagataaaaactagaaagaagctatctgtgaaactgctttgtaatatgttgatttatctcacagagttaaatttttcttcttattcgcacgttggaagccctccttttgtagaatctgcaaaggtacatttggaagcccatggaggcctgttaagaagcaccaaatatccccagataaaaactagaaagaaactctctgtgaaactgccttgtgaagtgtggattcagctcacagagttaaacctttgttttgattcagtaggttggaaacactctaattggagaatctgaaaactgacatttgtgagcccactgaggcctctggtgaaaaacmgagtatccccagataaaaacttgaaagaatttatctgtgaaacggctttgagatgtgtggtttcatctcacagtgttaaaactgtcttttgtttaagcaggatggaaacactgtttttggagaatctgtgaagtgacacttgggggcccattgagactcagggtaaaaacagaacatccctagataaaaactagaaacaagctatttgcaaaa

SEQ ID NO: 193593 - DNA, 599 bp, Homo sapiens
aaagggacttttgggagctcattgaggcctctagtgaaaaagcgaatatccccagataaaaactagaaagaagctatctgtgaaactgctttgtaatatgttgatttatctcacagagttaaatttttcttcttattcgcacgttggaagccctccttttgtagaatctgcaaaggtacatttggaagcccatggaggcctgttaagaagcaccaaatatccccagataaaaactagaaagaaactctctgtgaaactgccttgtgaagtgtggattcagctcacagagttaaacctttgttttgattcagtaggttggaaacactctaattggagaatctgaaaactgacatttgtgagcccactgaggcctctggtgaaaaacagagtatccccagataaaaacttgaamgaatttatctgtgaaacggctttgagatgtgtggtttcatctcacagtgttaaaactgtcttttgtttaagcaggatggaaacactgtttttggagaatctgtgaagtgacacttgggggcccattgagactcagggtaaaaacagaacatccctagataaaaactagaaacaagctatttgcaaaa

SEQ ID NO: 193594 - DNA, 519 bp, Homo sapiens
cttcttacctgccatttttactctgtatcttgggaacaaatcacctcacccttcttggaatacctgttggtttatctaaatagccagcctcctgagggatttgtttcttctgccattcaaactgtatgtttgcacaaagacctattattagaaggtttgactccatcctttaaccactggttacattgattggtacagggatggtcatccaacccaaactttgctaaacaacagagccctttctagggcatttattttcaaattgtatcaaaacgagaattttcccttttcttgttctgggaattattagatgggatactagagagctgtcagctcctacaattttattttatttttttacaatgttgaggtagctgttctgcaatgagagagagtaaagacaatataccaaaaaaagcatagacaagagatatagaggsctattgggagtaaggtccctgaattttgttgacacttaattttatctacttcttccctgtggtttgcctgtccagaatt

SEQ ID NO: 193595 - DNA, 176 bp, Homo sapiens
gaattctgtttgattctgttatttttccaatgaattgtctactttgccttggtcagcttaagttgygattctgtcccttgtaatctaaagaatcccagtgaacacatttccaaagcaatttccttatgtctaggaatgtgtaggcgtgagacacaattagttattattattattga

SEQ ID NO: 193596 - DNA, 519 bp, Homo sapiens
aaacacagtgtttccaaactgctgaatgaaaagaaacatttttctcagagagatgaatgagcatatgacaaagtggtttctccaatagcttctttccagttcttaccctggtatattctttttttcaccgttggcctcaaagagctcccaaatgtccattcatataatggacaaaaacagggtttccaaactgctgaatcaaaagaatggtttaactctgtgagatgcatgcacaaatcccaaagcagtttctcagaaagattctttctaatttttatctgaagatatttcctttttcatcattagcctcaatctgatccaaaagattgcttctcagattctacaaaaacagcatwtccacagtgccgaatcaaaaaaaaatgaaacctgcaagatgaatgcacatatcacaaggcagtttctcagataaattccttctagtttttatcctggtatattagctttttcatctttagtgtcaacgggctcccaaatctcctttcacagaattgacaaatc

SEQ ID NO: 193597 - DNA, 519 bp, Homo sapiens
aaacacagtgtttccaaactgctgaatgaaaagaaacatttttctcagagagatgaatgagcatatgacaaagtggtttctccaatagcttctttccagttcttaccctggtatattctttttttcaccgttggcctcaaagagctcccaaatgtccattcatataatggacaaaaacagggtttccaaactgctgaatcaaaagaatggtttaactctgtgagatgcatgcacaaatcccaaagcagtttctcagaaagattctttctaatttttatctgaagatatttcctttttcatcattagcctcaatctgatccaaaagattgcttctcagattctacaaaaacagcatttccacagtgccgaatcaaaaaaaaatgaaacctgcaagatgaatgcacatatcacaaggcagtttctcagataaattccttctagtttttatcctggtatattagctttttcatctttagygtcaacgggctcccaaatctcctttcacagaattgacaaatc

SEQ ID NO: 193598 - DNA, 573 bp, Homo sapiens
tgttcctgtgtttccaaacaagtttcatggcaaagyccaggcctaggtgcctcacctgaaactgtcagccatgcttccacctccattcagacccagctcatcctggggccctcttcacttgctgtttttgctaatggtttggctctgccccctccccatccaatatccacaccttcgagcagctgatctgtgtcacttccatctgaccacacctgtcccctaaaacgaaaccccacatcctgctgcagttagaaaggaggcggcatctcttttccctaaaacagtcacttccctaaacaagtcgggttgcactgcatcccagggacttgctccttcctagaaatcccttctttgtgactcttcctaggaaatgggctgtaagctgtgggtggctgcgtgtcctcatccctgcaaaggcaggtgtgcattcctgcccacggcgggtgatgctgcatccctggcagtcatgccgctgtgagtaaccacctgtggagagtccctgttcagcacccttctctgttgtcacagtgcataatctccgagaatgccctaatttctctcattctctaagcc

SEQ ID NO: 193599 - DNA, 573 bp, Homo sapiens
tgttcctgtgtttccaaacaagtttcatggcaaagtccaggcctaggtgcctcacctgaaactgtcagccatgcttccacctccatkcagacccagctcatcctggggccctcttcacttgctgtttttgctaatggtttggctctgccccctccccatccaatatccacaccttcgagcagctgatctgtgtcacttccatctgaccacacctgtcccctaaaacgaaaccccacatcctgctgcagttagaaaggaggcggcatctcttttccctaaaacagtcacttccctaaacaagtcgggttgcactgcatcccagggacttgctccttcctagaaatcccttctttgtgactcttcctaggaaatgggctgtaagctgtgggtggctgcgtgtcctcatccctgcaaaggcaggtgtgcattcctgcccacggcgggtgatgctgcatccctggcagtcatgccgctgtgagtaaccacctgtggagagtccctgttcagcacccttctctgttgtcacagtgcataatctccgagaatgccctaatttctctcattctctaagcc

SEQ ID NO: 193600 - DNA, 573 bp, Homo sapiens
tgttcctgtgtttccaaacaagtttcatggcaaagtccaggcctaggtgcctcacctgaaactgtcagccatgcttccacctccattcagacccagctcatcctggggccctcttcacttgctgtttttgctaatggtttggctctgccccctccccatccaatatccacaccttcgagcagctgatctgtgtcacttccatctgaccacacctgtcccctaaaacgaaaccccacatcctgctgcagttagaaaggaggcggcatctcttttccctaaaacagtcacttccctaaacaagtcgggttgcactgcatcccagggacttgctccttcctagaaatcccttctttgtgactcttcctaggaaatgggctgtaagctgtgggtggctgcgtgtcctcatccctgcaaaggcaggtgtgcattcctgcccacggcgggtgatgctgcatccctggcagtcaygccgctgtgagtaaccacctgtggagagtccctgttcagcacccttctctgttgtcacagtgcataatctccgagaatgccctaatttctctcattctctaagcc

SEQ ID NO: 193601 - DNA, 613 bp, Homo sapiens
acagtaatcatttgtattttagggctaaagtctgccatattgtgatatgttatgtattcccctgtttctcctttttatgttattttattacattttttcctttctccggattacgtgaatgctatctggggttcctaatttacggatttatagtgcttgtgagttcatcttctcacttagctttcccggcggtttctctggtatccgtgtgtagctgtcccagcctgctggcatcgacgtgctgccctgaactcgaggcagctgcatcattgctgcttgtcattcttctgtcagctcaccacacgagcccagcgttkgtgcatctcagtgttggcatcagctgaatctcttttttctttcaagttgtgattttcttggttcttggtgcaatggagcttttatgtggtgtattggctgcttttcatggtgtcagctgactctgggtcctggttaacttgtttggtgtagcaggagaccctctgccttggctgggtgcagctcctggcctgctctgtggaccgtgactctgtgtctggaagcctcacactgatgctttgctctccttcgttttcctcctgccaccggggcttccacacgtcaggcctgagagggc

SEQ ID NO: 193602 - DNA, 613 bp, Homo sapiens
acagtaatcatttgtattttagggctaaagtctgccatattgtgatatgttatgtattcccctgtttctcctttttatgttattttattacattttttcctttctccggattacgtgaatgctatctggggttcctaatttacggatttatagtgcttgtgagttcatcttctcacttagctttcccggcggtttctctggtatccgtgtgtagctgtcccagcctgctggcatcgacgtgctgccctgaactcgaggcagctgcatcattgctgcttgtcattcttctgtcagctcaccacacgagcccagcgttggtgcatctcagtgttggcatcagctgaatctcttttttctttcaagttgtgattttcttggttcttggtgcaatggagcttttaygtggtgtattggctgcttttcatggtgtcagctgactctgggtcctggttaacttgtttggtgtagcaggagaccctctgccttggctgggtgcagctcctggcctgctctgtggaccgtgactctgtgtctggaagcctcacactgatgctttgctctccttcgttttcctcctgccaccggggcttccacacgtcaggcctgagagggc

SEQ ID NO: 193603 - DNA, 429 bp, Homo sapiens
ctgctgcggctgaaggagtttcagtgaccgtgccaacccacgcagtggcagaggtgagaccagaacccacagggtgacctgccagaggaggatgtgtctgagagggagtaggtgtcattagtcatttcactgaagtcagaggtaaaactgggattgctaggcaaggtgggacatgggggtaacgtaaatgtccaggggctccggccttgagaccagagtgccccgggtagcacagggacctgcaggagctgcctcatgacacgtaactccaggatcaagcagctgggctgagagggacatttgggggagtatcggagaatggggaaaagtgtccagtgtctaaaatcttcccacagctttgacttaacacctcagyggccaagccaaagtcaaaaaagaaaagagagagagagaaagaaaagatgcaga

SEQ ID NO: 193604 - DNA, 460 bp, Homo sapiens
ttctgcaagcacccacttcattgtcccacccaactccttctctcctggcttccccaacccttggcagctgctaatccactcccatctctaaagacttgtaattttgaggacgttatacaaataaaattgtacagcatgttctcttttgtgactggcttttttcactcagtataatgcccttgagatctgcccaagttgytgtaggtatccatagtccattcatgtggattgttgcgcacaatttcatggtatgggtgtgtcacaatttgttaattattgacattcgactgcagaaggacacctgggttgtttccagcttaggcttgttatgcataagtcttctctgaacagtcatatataggtttctgtgtgaacacgtttccactactctgggatagaagcccaggactgcagagctgggtcatatagtgagtggctctatgtttagttttttaagaaa

SEQ ID NO: 193605 - DNA, 583 bp, Homo sapiens
tatatttatgaaccttttaggaaatatttcatattgacattttctatgatattatagtctctattatatttctattataattcattaatttttagacatatgcataaaaaatagaattgttaaaagtaatattgggttagcayaatacccacgaaggattgtttttatttctatggatcacggctagagaacaaagacagaagtgattaaccctaagtgtgaaaattgcttatctgtataaattggccccaaaggaaaattttccagataggttttcttgtcccttgacatgatcccatcaaaatcatatttgcccccttgtcacgttactttagaagggtgtgcttaggaaagggaacaggtgcccatgtgtattgatcagtggtcatggtaaaaggctcttattagatgttgaagggtaccaggaaggcgtgagaaatggaggcgagagggcaggacaggttattgatgatggtaataaccgagcgcaaggggctccgacaccgcagccgtaaagttggccagatgagcacatcagtgtagatacgttgaggggaagagacaacatgaagaagtatggagc

SEQ ID NO: 193606 - DNA, 583 bp, Homo sapiens
tatatttatgaaccttttaggaaatatttcatattgacattttctatgatattatagtctctattatatttctattataattcattaatttttagacatatgcataaaaaatagaattgttaaaagtaatattgggttagcataatacccacgaaggattgtttttatttctatggatcacggctagagaacaaagacagaagtgattaaccctaagtgtgaaaattgsttatctgtataaattggccccaaaggaaaattttccagataggttttcttgtcccttgacatgatcccatcaaaatcatatttgcccccttgtcacgttactttagaagggtgtgcttaggaaagggaacaggtgcccatgtgtattgatcagtggtcatggtaaaaggctcttattagatgttgaagggtaccaggaaggcgtgagaaatggaggcgagagggcaggacaggttattgatgatggtaataaccgagcgcaaggggctccgacaccgcagccgtaaagttggccagatgagcacatcagtgtagatacgttgaggggaagagacaacatgaagaagtatggagc

SEQ ID NO: 193607 - DNA, 654 bp, Homo sapiens
aagaagggataggaggggaaaaaaggattaaggtagcacttaggagctcttctacagattttgtttttcgtatgtatctgagtgaagcaatgtctgtttgcagtatcactcttggagtgggtaaaacatttcattatgaaatagaaaggaaaacactaaggcatttctagaggtagttgtcaagagcagtttgtttgaaatctaataagaagcatattaaaagtaattattttaagcatctggagttaagacaggcaagtggttgagattattatttcttttctccaaactcataactataccaaaaatggttggaggcaatgtgactatctggatcttatggcacttctttgagatcttctttcttctctctctctctctctctctcwcacacacacacacacatacacacacacttttattttttttcttggcacttcccctccatgaaccaatgtttaaagaaggcattctaaagagactcccagctgtgggtttcagactttatttttatgttggcttagatccaggaaatgcaatgctttggctcacagttatgagaatcatacctagtggtaaaacataattcaaaatgctttaaattgttttgagttctttggattgtaaactttctcgttgctccctaagagaact

SEQ ID NO: 193608 - DNA, 577 bp, Homo sapiens
aggaaacaattgttggtattaaagcagaggagagactctgtgaagctgatttcagtgatgggacagagatattttaagaatggaatgttggtctgtagggtctagattgaatggagaagaaaatgagggaagaatrggttgaggatatgaggtgaaaggaaagagttggggactgggaatagccttggagaaaaaggagagcatggagcaaggttttataagatagagaagccaatatagtagagatgagataataacagaattgggaaggtagtgagctatggttacgaattggaagtaagaaataaataggtattgttttggtttggtgaagattaggatggctaaatttgtaaatataaagaaacctttgtttattcatccattctgctccagttgagaacttgagtcctcaatgatgtaggcagaaagtggaaaaggtaagatgacttgtgcaccagaatttcaaatgtttgatgaccttaaaagcaaaaagggaagaggggagtagttatggagaatggtaggactcctctaaccccacaaaataagatagaattattgcaggaagcaacca

SEQ ID NO: 193609 - DNA, 545 bp, Homo sapiens
taaatgacataaaaataacccagcatagacccaaatccaaggttgagacttgataactcctactctcctacatctgctcaaattccaatagacttgattatctgattttccagctcacaggttatttggaacagtaaattaaagtgaggaaggctgatagaagaagtttcactgattttaataaaaagtgatggctggtaaactgatgtggcacaagcaatagaagaaaaattaaaaacagatataagatattttagaaatacaaagtaatctgggacatttaattaggcaacaaacaaccatacaaaactcaaaagttatgagaaatcacaatctctaacagtacaataaacaatgattttaacagagatcttgagckactggattttgagctacttgagaacaggttgtattcttatatttaaggagagggagtgagggcataaagtgagaaagcagcctctgcatgtatcttcccacataggatcttagttggtttttacagaaattatgaggtaaatatttttattctacctcaaagagta

SEQ ID NO: 193610 - DNA, 612 bp, Homo sapiens
cttcagctatccatatgtcagtgtgtttgacgatgttctcataggatgagattttgttcactttttctttcatctccaatcttttttctctctgttctttgaacttctatggctttatattcaatgtactgacttttttcttctagcacctcaaaattgcttctgagaccatttcagtcatcgtattcctcgactctaaaatttgattcttttttatagttataattccctattgagattccctatttgtccagccattgtcatagttttctttcattattggaatatatatatatatatatatatatatatatatatataatggcttctttggagtgtttgctaaatccaacttctgggcccatccgggaatctatttttattggctgctttctttgccattctttcgtatatctcataatgtttgtttaaaaaccaaacactttagacagtatcatgtagcagtcttgggtttagtttttatttttctgagagttgaattttktttttactattcttttcttattccttgcttttgttttgtgttggtaacttgcctggacttaattttcaagatctttgtccttacattatttgtccactgatatcttt

SEQ ID NO: 193611 - DNA, 521 bp, Homo sapiens
agcaagatgataaactcagtattagacctatggggttggtaaccagagcaaggcttcatgttctgttaattaggaaacagctgaaataagttttccttgttgtcatgttcttcattttctcattctgagaatgtctttgctctactccaatcattcatctattattcaatgtttagaacatgtcttagattgttttctcgaatmttcctagtcaggtgtaagcattctttccaattctctttgacagtgctgtctgtccctttttaaaagccattacttcacaatctcttacattatagtgagtttacacatctatctcattattttggaaactgcttagaatgagtgatgagagctagaaagtcatcttttatttgcctttttgtttttataatacttccacatatatctcaatgtttgaagtagaggacagatttaataaaagcttactaaagctttcagaagcaaagctctgaatttgaaaacagaaaaaataaatttcatccaatctaaacaacaga

SEQ ID NO: 193612 - DNA, 521 bp, Homo sapiens
agcaagatgataaactcagtattagacctatggggttggtaaccagagcaaggcttcatgttctgttaattaggaaacagctgaaataagttttccttgttgtcatgttcttcattttctcattctgagaatgtctttgctctactccaatcattcatctattattcaatgtttagaacatgtcttagattgttttctcgaatattcctagtcaggtgtaagcattctttccaattctctttgacagtgctgtctgtccctttttaaaagccattacttcacaatctcttacattatagtgagtttacacatctatctcattattttggaaactgcttagaatgagtgatgagagctagaaagtcatcttttatttrcctttttgtttttataatacttccacatatatctcaatgtttgaagtagaggacagatttaataaaagcttactaaagctttcagaagcaaagctctgaatttgaaaacagaaaaaataaatttcatccaatctaaacaacaga

SEQ ID NO: 193613 - DNA, 495 bp, Homo sapiens
tatttcataaattaatgtaaaaccagaatyttattgcacggaccaccatccgcctgcctttcaagacaccactccaatcacaggtagtgcttgtggttgtgctgagtgttaggcttttctattgacaatctatgtagtcatgaccacaaggagcattaggtcttgttttaaaagtctcactgatactatagggagttcaagattatcgagatattgttgcatggcaaaatttttcaataggctagaaaaggaaacatattgactgagaagcacaatctgctatggtactgtctcaaggaatgagatataaagtaaaagacagaaaaaaaagcactcattaatgttatcaacagaaggcaaataaatttctagtagccaattaaaaagtaaaaaaaagaaaaaagcaacaggtgagtgaattttattaatatatcttatttagccaaatatatccagtataacattttgaaatgtaattaatgtaaaaattattaa

SEQ ID NO: 193614 - DNA, 495 bp, Homo sapiens
tatttcataaattaatgtaaaaccagaattttattgcacggaccaccatccgcctgccttkcaagacaccactccaatcacaggtagtgcttgtggttgtgctgagtgttaggcttttctattgacaatctatgtagtcatgaccacaaggagcattaggtcttgttttaaaagtctcactgatactatagggagttcaagattatcgagatattgttgcatggcaaaatttttcaataggctagaaaaggaaacatattgactgagaagcacaatctgctatggtactgtctcaaggaatgagatataaagtaaaagacagaaaaaaaagcactcattaatgttatcaacagaaggcaaataaatttctagtagccaattaaaaagtaaaaaaaagaaaaaagcaacaggtgagtgaattttattaatatatcttatttagccaaatatatccagtataacattttgaaatgtaattaatgtaaaaattattaa

SEQ ID NO: 193615 - DNA, 495 bp, Homo sapiens
tatttcataaattaatgtaaaaccagaattttattgcacggaccaccatccgcctgcctttcaagacaccactccaatcacaggtagtgcttgtggttgtgctgagtgttaggcttttctattgacaatctatgtagtcatgaccacaaggagcattaggtcttgttttaaaagtctcactgatactatagggarttcaagattatcgagatattgttgcatggcaaaatttttcaataggctagaaaaggaaacatattgactgagaagcacaatctgctatggtactgtctcaaggaatgagatataaagtaaaagacagaaaaaaaagcactcattaatgttatcaacagaaggcaaataaatttctagtagccaattaaaaagtaaaaaaaagaaaaaagcaacaggtgagtgaattttattaatatatcttatttagccaaatatatccagtataacattttgaaatgtaattaatgtaaaaattattaa

SEQ ID NO: 193616 - DNA, 562 bp, Homo sapiens
tttctattgacaatctatgtagtcatgaccacaaggagcattaggtcttgttttaaaagtctcactgatactatagggagttcaagattatcgagatattgttgcatggcaaaatttttcaataggctagaaaaggaaacatattgactgagaagcacaatctgctatggtactgtctcaaggaatgagatataaagtaaaagacagaaaaaaaagcactcattaatgttatcaacagaaggcaaataaatttctagtagccaattaaaaagtaaaaaaaagaaaaaagcaacaggtgagtgaattttattaatatatcttatttagccaaatatatccagtataacattttgaaatgtaattaatgtaaaaattattaatgagatatttacagtattttttcatatcacgtctttcaaatctggtgtgtattttacttatagtatatctcagtttggactagccagtttcaagygctcatggacatatgtggctaatagcttcccaaatggacttctcaggtttaggcagactttcttgcaattatcaagaaaacagagga

SEQ ID NO: 193617 - DNA, 593 bp, Homo sapiens
cccgcactcatgctctggcactgaagacaaaacaacagtgctatataatgtgttgatggactgtgattcagaagagaggtgtcatacacagggtgacagatgttccagtttgtccaaggcagtttccatttatgtttattgtactagtgtgattattcaaaattatttatttcactctcaaatatgttttcatttggaaaataaattatatgttcacaccatcaggcaaaccccaagtaaggggtgagggacgctcagggaattccatgcctaggtataggtcawagaggacagatagattcccaatgtcagcacagaggagaaaatttgaatttaaaatcctaatatattaataataatttgaaagaagaaggaactaagctgacgtctttaccaaagtttatttatctcaaataagaacaatgtttctatctccatagctctccttctctaagcaattttgtgttcatttgaataacaaaattgctgtcactgttaataaaactgagtagtttaaaaacacaaactaagcatcctagctgtttttgactcttatgtagatatttctaaaaattatcaggcttatttattct

SEQ ID NO: 193618 - DNA, 595 bp, Homo sapiens
tgccccgcactcatgctctggcactgaagacaaaacaacagtgctatataatgtgttgatggactgtgattcagaagagaggtgtcatacacagggtgacagatgttccagtttgtccaaggcagtttccatttatgtttattgtactagtgtgattattcaaaattatttatttcactctcaaatatgttttcatttggaaaataaattatatgttcacaccatcaggcaaaccccaagtaaggggtgagggacgctcagggaattccatgcctaggtataggtcaaagaggacagatagattcccaatgtcagcacagaggagaaaatttgaatttaaaatcctaatatattaataataatttgaaagaagaaggaactaagctgacgtctttaccaaagtttatttatctcaaataagaacaatgtttctatctccatagctctccttctctaagcaattttgtgttcatttgaataacaaaattgctgtcactgttaatmaaactgagtagtttaaaaacacaaactaagcatcctagctgtttttgactcttatgtagatatttctaaaaattatcaggcttatttattc

SEQ ID NO: 193619 - DNA, 585 bp, Homo sapiens
ggggtgagggacgctcagggaattccatgcctaggtataggtcaaagaggacagatagattcccaatgtcagcacagaggagaaaatttgaatttaaaatcctaatatattaataataatttgaaagaagaaggaactaagctgacgtctttaccaaagtttatttatctcaaataagaacaatgtttctatctccatagctctccttctctaagcaattttgtgttcatttgaataacaaaattgctgtcactgttaataaaactgagtagtttaaaaacacaractaagcatcctagctgtttttgactcttatgtagatatttctaaaaattatcaggcttatttattctgatcttacagtttaaaaatatatttgtaatgagatctagataaagtgttttgttaacatcttcacctcgtgttctattttttcaataattattattacttcttcactgacctttatatggtttgagctttaggggacattgcaaattaactttaaatgtgactagatctttataaatgaaggacgatttaggtgtaaatttatggcatgtaaaatattatagttaactgtgt

SEQ ID NO: 193620 - DNA, 604 bp, Homo sapiens
atgttcacaccatcaggcaaaccccaagtaaggggtgagggacgctcagggaattccatgcctaggtataggtcaaagaggacagatagattcccaatgtcagcacagaggagaaaatttgaatttaaaatcctaatatattaataataatttgaaagaagaaggaactaagctgacgtctttaccaaagtttatttatctcaaataagaacaatgtttctatctccatagctctccttctctaagcaattttgtgttcatttgaataacaaaattgctgtcactgttaataaaactgagtagtttaaaaacacaaactaagcatcctagctgtttttgactcttatgtagatatttctaaaaattatcaggcttatttattctgatcttacagtttaaaaatatatttgtaatgagatctagataaagtgttttgttaacatcttcacctcgtgttctattttttcaataattattattacttcttcactgacctttatatggtttgagctttaggggacattgcaaattaactttaaatgtgactagatctttataaatgaaggaygatttaggtgtaaatttatggcatgtaaaatattat

SEQ ID NO: 193621 - DNA, 634 bp, Homo sapiens
tatccaatgacgttttagccacagttggagctggaatagctggacacagggaacagtgtcctgaggttgtgcagcagggccctaagctgagcccattaaattatttttccctcttaagcctttggccctgtgaaaggagaggctgccttgaaggtctctgatatggctttgaggcattttcctcattgacttggctattaacatttggctactctttacttatgcaaatttctgtagccagcttgaattcctcccctgaaaatgggtttttttcttttctracacatggttaggctgcaattttttttaacttttatgctctgcttcacgtttaaatgtaagttccagtttcaggtcatgtctttgctcatacatataagcctgtgtacactgttagaagcagccaaacctcctattgaacactctgctgcttagaaatttcttccgccagatacctaaataatcttttcaagttcaaaattcaacagatcttcagggcaggggcacaatgcctccaacctctttgctaatgcataataaaagttaccttagctccagttctcaatgagtccctcgtctctacctaacaccccctcagcctgcacttcattgtccatatcactatcaacatttt

SEQ ID NO: 193622 - DNA, 634 bp, Homo sapiens
tatccaatgacgttttagccacagttggagctggaatagctggacacagggaacagtgtcctgaggttgtgcagcagggccctaagctgagcccattaaattatttttccctcttaagcctttggccctgtgaaaggagaggctgccttgaaggtctctgatatggctttgaggcattttcctcattgacttggctattaacatttggctactctttacttatgcaaatttctgtagccagcttgaattcctcccctgaaaatgggtttttttcttttctgacacatggttaggctgcaattttttttaacttttatgctstgcttcacgtttaaatgtaagttccagtttcaggtcatgtctttgctcatacatataagcctgtgtacactgttagaagcagccaaacctcctattgaacactctgctgcttagaaatttcttccgccagatacctaaataatcttttcaagttcaaaattcaacagatcttcagggcaggggcacaatgcctccaacctctttgctaatgcataataaaagttaccttagctccagttctcaatgagtccctcgtctctacctaacaccccctcagcctgcacttcattgtccatatcactatcaacatttt

SEQ ID NO: 193623 - DNA, 634 bp, Homo sapiens
tatccaatgacgttttagccacagttggagctggaatagctggacacagggaacagtgtcctgaggttgtgcagcagggccctaagctgagcccattaaattatttttccctcttaagcctttggccctgtgaaaggagaggctgccttgaaggtctctgatatggctttgaggcattttcctcattgacttggctattaacatttggctactctttacttatgcaaatttctgtagccagcttgaattcctcccctgaaaatgggtttttttcttttctgacacatggttaggctgcaattttttttaacttttatgctctkcttcacgtttaaatgtaagttccagtttcaggtcatgtctttgctcatacatataagcctgtgtacactgttagaagcagccaaacctcctattgaacactctgctgcttagaaatttcttccgccagatacctaaataatcttttcaagttcaaaattcaacagatcttcagggcaggggcacaatgcctccaacctctttgctaatgcataataaaagttaccttagctccagttctcaatgagtccctcgtctctacctaacaccccctcagcctgcacttcattgtccatatcactatcaacatttt

SEQ ID NO: 193624 - DNA, 634 bp, Homo sapiens
tatccaatgacgttttagccacagttggagctggaatagctggacacagggaacagtgtcctgaggttgtgcagcagggccctaagctgagcccattaaattatttttccctcttaagcctttggccctgtgaaaggagaggctgccttgaaggtctctgatatggctttgaggcattttcctcattgacttggctattaacatttggctactctttacttatgcaaatttctgtagccagcttgaattcctcccctgaaaatgggtttttttcttttctgacacatggttaggctgcaattttttttaacttttatgctctgcttcacgtttaaatgtaagttccagtttcaggtcatgtctttgctcatacatataagcctgtgtacactgttagaagcagccaaacctcctattgaacactctgctgcttagaaatttcttccgccagwtacctaaataatcttttcaagttcaaaattcaacagatcttcagggcaggggcacaatgcctccaacctctttgctaatgcataataaaagttaccttagctccagttctcaatgagtccctcgtctctacctaacaccccctcagcctgcacttcattgtccatatcactatcaacatttt

SEQ ID NO: 193625 - DNA, 435 bp, Homo sapiens
caggggcacaatgcctccaacctctttgctaatgcataataaaagttaccttagctccagttctcaatgagtccctcgtctctacctaacaccccctcagcctgcacttcattgtccatatcactatcaacattttggtcacaataatttaacaagtctctaggaaattcctaactttccctgtcttcttcagagcctttcacactcttccaagctctgcccattacccagtcccaaagacacttccacattttcaggtatctttataacaatacyccactcctggtaccaatttcctgtattagtcctttatagcaatgtaagaatgaactatctaagacttggcaatttatacagaaaagaggtttagttaactctcagttcctgtaccggaagcatggctggggaggcctcaataaacttacaatcatggca

SEQ ID NO: 193626 - DNA, 436 bp, Homo sapiens
aacctctttgctaatgcataataaaagttaccttagctccagttctcaatgagtccctcgtctctacctaacaccccctcagcctgcacttcattgtccatatcactatcaacattttggtcacaataatttaacaagtctctaggaaattcctaactttccctgtcttcttcagagcctttcacactcttccaagctctgcccattacccagtcccaaagacacttccacattttcaggtatctttataacaataccccactcctggtaccaatttyctgtattagtcctttatagcaatgtaagaatgaactatctaagacttggcaatttatacagaaaagaggtttagttaactctcagttcctgtaccggaagcatggctggggaggcctcaataaacttacaatcatggcagaaggctaaggagaagtag

SEQ ID NO: 193627 - DNA, 436 bp, Homo sapiens
aacctctttgctaatgcataataaaagttaccttagctccagttctcaatgagtccctcgtctctacctaacaccccctcagcctgcacttcattgtccatatcactatcaacattttggtcacaataatttaacaagtctctaggaaattcctaactttccctgtcttcttcagagcctttcacactcttccaagctctgcccattacccagtcccaaagacacttccacattttcaggtatctttataacaataccccactcctggtaccaatttcctgtattagtcctttatagcaatgtaagaatgaactatctaagacttggcaatttatacagaaaagaggtttarttaactctcagttcctgtaccggaagcatggctggggaggcctcaataaacttacaatcatggcagaaggctaaggagaagtag

SEQ ID NO: 193628 - DNA, 608 bp, Homo sapiens
aatttaaacaaaaataaataaatttcaagttttagtgtgaattttgatccattgatgtttcttcttttctgaagatccctgtcatacaaatgtgttatcttctttgcttatattgtatatgtatcctttctcaaggccttttcaatttgttctttgatttgttttgatttaaacaatttttwaatagttcatgttgcactaaataataatctggctctttattaacatgagtttctttctccttatgctttattatggttataattatttcatattcttttcaagttttaaactcaatttttaaatgttcatttcttattctaataatcttatctctgagtattctaattttaatttaagctgtagttagtttccattattttcctagtacattttagctcatttgaaatgtcagtttactattttaatctaccttgtgagcatgtattattggtctgctttccttcttgtaaggttcccataatcactaaaattaatgcacagaacttttaaatgaaacaaaattgaacattgacaaaaaatggttggaatttgaatttaaattgttcaaactatggataatatgtttaaaagagttacaatatata

SEQ ID NO: 193629 - DNA, 302 bp, Homo sapiens
ttttatgtgtcaacttagctagactctggtgaccagyagtttattcaaccactagtctagatgttgcttgatatggtctggctctgcatcctcacctaaatctcattttgaattgttatctgaattctaatctccgtgtgttgggggagggaatttgtgggagttggttagatcttgggagcagctctcactttctgtttttatgatagtgactgagttctcacaaaatctgatggttttataaggggctttccccacctttactttgcacttctctttcctgctgctatgtgaagaaggac

SEQ ID NO: 193630 - DNA, 302 bp, Homo sapiens
ttttatgtgtcaacttagctagactctggtgaccagcagtttattcaaccactagtctagatgttgcttgatatggtctggctctgcatcctcacctaaatctcattttgaattgttatctgaattctaatctccgtgtgttgggggagggaatttgtgggagttgrttagatcttgggagcagctctcactttctgtttttatgatagtgactgagttctcacaaaatctgatggttttataaggggctttccccacctttactttgcacttctctttcctgctgctatgtgaagaaggac

SEQ ID NO: 193631 - DNA, 614 bp, Homo sapiens
gctctgtgcaaagttgcgtaagtgtttacttttataaatatttttcaggcaatgggcgtgccaaattgagggtactatttgttcagttagaaaatcgagtgatgatccattgggtgccattttaattgttargtcctttcaaataactagagggggaagacccttaaatgcaaacaaaataatgaagtaagggcatcgtgttacttcatgtgaaatgtcattctgatggtaccttacttgagagtcattaaaattcagtgcttggtgtgagaaacattttagaataacataaagataaattctttggacccagaaagaccttgtttcaaatcctgttttcaacttttttttttatttaccttggcaagttcctcaacctactatgcctcagtttacttatatctaaaatatatgtatacccataattatacctttcaaaggcagggacccatttttattgaaattattcttccatattcccccaccccaaaattaattcatagtttttagaacataaagtgccttccacattagaaatgaggttcataagaaatattagaaaatattttgacattttaaaagattttgtgtctttcataaggtgataaaataac

SEQ ID NO: 193632 - DNA, 614 bp, Homo sapiens
gctctgtgcaaagttgcgtaagtgtttacttttataaatatttttcaggcaatgggcgtgccaaattgagggtactatttgttcagttagaaaatcgagtgatgatccattgggtgccattttaattgttaggtcctttcaaataactagagggggaagacccttaaatgcaaacaaaataatgaagtaagggcatcgtgttacttcatgtgaaatgtcattctgatggtaccttacttgagagtcattaaaattcagtgcttggtgtgagaaacattttagaataayataaagataaattctttggacccagaaagaccttgtttcaaatcctgttttcaacttttttttttatttaccttggcaagttcctcaacctactatgcctcagtttacttatatctaaaatatatgtatacccataattatacctttcaaaggcagggacccatttttattgaaattattcttccatattcccccaccccaaaattaattcatagtttttagaacataaagtgccttccacattagaaatgaggttcataagaaatattagaaaatattttgacattttaaaagattttgtgtctttcataaggtgataaaataac

SEQ ID NO: 193633 - DNA, 199 bp, Homo sapiens
tattaatgaaatataatagagattctagaaatacacmtacatatagtcaaataagcttcgaccaaaacagtaaaggcaatataatggaacacaactagtctcttcaactaatagttctgtaacaactgacatccacatgcaaagaaaataaatctagacatacatagactcaatacttttcacaaagataactcaaaat

SEQ ID NO: 193634 - DNA, 540 bp, Homo sapiens
tgcgaccaatatcaacttgtgtttcatctagctttctttcggtttcttttttaaggtaaaatcttgcttaagataatatctctctaaaggaaagaccttgtgtaagaccagactcatctctcaaaagggacgacaatattgttcttctttgcagactaagtctaacttaacagcatgtggttctagtgctcaacgaataagtttttaaaaaatagttgcatgaataaatgaatgaatatttaaaaataattaaatcacctttcagccaagccaaaattgactgttattttcaccttttttaaagtagtttttttttaaggttttaaatctctagcataaacagacmgctcatatttgtattttgaaaatactagagtggtctcaagctaaatgttacaatgtgactttagatgattgatttttgacttgattaatagtctttccacagagacaactcacaggctataaagtgcttaacatttccttggcttcagaaggcactagggaaggaggtaagtatggaccaattagcaggtgggc

SEQ ID NO: 193635 - DNA, 550 bp, Homo sapiens
aaaatctgtcattgagtgcagctaccttcatcaccattcttagctagatcttctggataacttgcagcagtttctacatcagcacttgctgcttcaccttgcactttcatgttatgaaaatggcttatttacttaaacctcatgaacccacctctgagagctttaaatttttattctgcagctttcttacctctctgagcctttgtggaatttcagagatttagggtcttcctctggattaggctttygcttaagggaggaaggctatgggctgttttattcttttatccaaactactaaaacttgttccctatcagcaacaaggctcttctacttgcttgtcatttgtgtggtcactggagtaacacttctaatttccttcaataccttttcctttatagtcacaaattggctaacttttagcacaagaggtctagcttttggccagtgttgtctttcgacatgccttcttcactaagcttaatgatttctagcttttgatttaaagtgaaaaatgtgaaactctgtctttcacttgaacacatagact

SEQ ID NO: 193636 - DNA, 550 bp, Homo sapiens
aaaatctgtcattgagtgcagctaccttcatcaccattcttagctagatcttctggataacttgcagcagtttctacatcagcacttgctgcttcaccttgcactttcatgttatgaaaatggcttatttacttaaacctcatgaacccacctctgagagctttaaatttttattctgcagctttcttacctctctgagcctttgtggaatttcagagatttagggtcttcctctggattaggcttttgcttaagggaggaaggctrtgggctgttttattcttttatccaaactactaaaacttgttccctatcagcaacaaggctcttctacttgcttgtcatttgtgtggtcactggagtaacacttctaatttccttcaataccttttcctttatagtcacaaattggctaacttttagcacaagaggtctagcttttggccagtgttgtctttcgacatgccttcttcactaagcttaatgatttctagcttttgatttaaagtgaaaaatgtgaaactctgtctttcacttgaacacatagact

SEQ ID NO: 193637 - DNA, 550 bp, Homo sapiens
aaaatctgtcattgagtgcagctaccttcatcaccattcttagctagatcttctggataacttgcagcagtttctacatcagcacttgctgcttcaccttgcactttcatgttatgaaaatggcttatttacttaaacctcatgaacccacctctgagagctttaaatttttattctgcagctttcttacctctctgagcctttgtggaatttcagagatttagggtcttcctctggattaggcttttgcttaagggaggaaggctatgggctgttttattcttttatccaaactactaaaacttgttccctatcagcaacaaggctcttctacttgcttgtcatttktgtggtcactggagtaacacttctaatttccttcaataccttttcctttatagtcacaaattggctaacttttagcacaagaggtctagcttttggccagtgttgtctttcgacatgccttcttcactaagcttaatgatttctagcttttgatttaaagtgaaaaatgtgaaactctgtctttcacttgaacacatagact

SEQ ID NO: 193638 - DNA, 568 bp, Homo sapiens
atttttttttcctgatggtcgttgtattcaagcctaataaacagaaactattccactattattcaacaaatatttactgacctactgtagtatacacacacacctacaccccaaataattaaattaagtgtgctacatagtattatagattgagagattgagaagtgccattcaaagtaaatttcttgaaaagagaagatggttcaactgcatttaaaaagacaggtttatcagacacacgatgtgaatgaagggagaaggaacartgtgtgcaaagtcggtgagatttaaggtgttatacaacataatggaaggagtaataatttatcaaagtgttaagcttcatttttagcatttggcaaaaacctgccactcagtgttgacttcagactttgtacggaaaatctgtcagagacccacaccaatgtcatttcctgcatgcctaaactcatgtgtgagcaataacgctgtgattgcatttctaattcttatcaatcagttcaataacctcgagtaatacaatcaaagcacctcacttgggtttagagttaataccccaatgtttcta

SEQ ID NO: 193639 - DNA, 568 bp, Homo sapiens
atttttttttcctgatggtcgttgtattcaagcctaataaacagaaactattccactattattcaacaaatatttactgacctactgtagtatacacacacacctacaccccaaataattaaattaagtgtgctacatagtattatagattgagagattgagaagtgccattcaaagtaaatttcttgaaaagagaagatggttcaactgcatttaaaaagacaggtttatcagacacacgatgtgaatgaagggagaaggaacaatgtgtgcaaagtcggtgagatttaaggtgttatacaacataatggaaggagtaataatttatcaaagtgttaagcttcatttttagcatttggcaaaaacctgccactcagtgttgacttcagactttgtacggaaaatctgtcagagacccacaccartgtcatttcctgcatgcctaaactcatgtgtgagcaataacgctgtgattgcatttctaattcttatcaatcagttcaataacctcgagtaatacaatcaaagcacctcacttgggtttagagttaataccccaatgtttcta

SEQ ID NO: 193640 - DNA, 470 bp, Homo sapiens
cactatgatcaagtgggatctatcccatggatacaaggatggctgtattagtctgttctcatgctgctattaaaaacatatccgagactgggtaatttataaaggaaagaggtttaatgaactcacagaaccacatgtctggggaagcctcacaattatggcagaagatgaaggaagagcaaaggaatgtcttacatggcatcaggcaagagaccgtgtggaggggaactcccctttataaaaccatcagatcttgtgagacttattcactatcatgagaacagcttggcaaagacccacccccatgattcaattacctcccattgggtccctcccatcacacrtgagaattatgggagctacagttcaagatgagatctgggtggtgacacagctaaaccatatcaatggttcaacatatgcatatcaataaacatgatgcactaacagaatcaagagcaaaaagtata

SEQ ID NO: 193641 - DNA, 442 bp, Homo sapiens
ttggtttaggaagaaggatttaatacaacaccggacaattaaatacaaagagttgtttttctaggatgggaaatttataatataaatcctttttcttctaatgtttataatgtcatgcatccttggagctgccacagacrtatgactgagctactatcctagaataatccacctccagaatatatttgtgtatgagataacaaattgcctaccgtttaagtaatttacggtcaggttttctgatactccaaactgaaagtccactgacttcactttaacttcaggattttggatcaatcactattcatgtttattaagtctcttcctatgcctgcattaatcagattaggctgaataagaaaaataaaagtttatttttacccacattaattctgctacatttttagtggatttccaggtaaactttaaatattgatttagg

SEQ ID NO: 193642 - DNA, 442 bp, Homo sapiens
ttggtttaggaagaaggatttaatacaacaccggacaattaaatacaaagagttgtttttctaggatgggaaatttataatataaatcctttttcttctaatgtttataatgtcatgcatccttggagctgccacagacatatgactgagctactatcctagaataatccacctccagaatatatttgtgtatgagataacaaattgcctaccgtttaagtaatttacggtcaggttttctgatactccaaactgaaagtccactgacttcactttaacttcaggattttggatcaatcactattcatgtttattaartctcttcctatgcctgcattaatcagattaggctgaataagaaaaataaaagtttatttttacccacattaattctgctacatttttagtggatttccaggtaaactttaaatattgatttagg

SEQ ID NO: 193643 - DNA, 297 bp, Homo sapiens
tctgtgtgtttagcccagatagtgacactgacaatgaatctcctcctggttctccttccacactgaacctaagtggggagagctggtcatgtgtcctgagtccgagaggggcccctggactcatgggtcrtcagtgttggattcctgagagattaatattgaaatagtgcttacaaagcgaagtcccttcttaaggagacatggggaggggtagggcagtagcttggcctactgtaaagcaatggatttagcactaagggctctaactaaccctcaacatccttatctgtcaaatgg

SEQ ID NO: 193644 - DNA, 505 bp, Homo sapiens
actaggtttggggatcaattgtttgtataacaaaaatggatttactgaaggggatgagatggcccaggaagagaatatagaacaggaagagcactgaagatgcaattttggagaggagagtgaagatccagaaacgaaaccaataattagtgattagagagagccgaggaacagcagaaaggagagggagaagctctaagaaggaggaaagtgctcctggtgccacatgctgcagagaagctgcagcagcgagaagggacattgatgacttcggccctttgcctgaagttctagcttaaatatggtttctctgccttaaamcttcccttcccagcagattgaattaaactctctcaccctctgttctactattcatgctcccattgttttcccactaatttctatctggtctgaggaaacctctgggtgaccgcttgatgctggtacaaagatttgtgacacaccctgagcccatgggacctcttctgatgctggccatgaattc

SEQ ID NO: 193645 - DNA, 606 bp, Homo sapiens
accaccacaacacacacgtgcacatacacacacacgtacacactcacacacatttttttcctggtaaagtaattccccttgccttgcttaagtgaagagtaggaggcaggaactgaggagtcctgtcctgggacaaaggataggsaaagcttggaacgggtctcacaggcttgaagaaattcctctgtgtaggaacaaggtccaggaaccgggctactgtgatctggaaaaggtgtacactagaagacctctccaagcagccaagctgactgatcaagtcccggcttccttatgcaatgagccttctgtgcctgtctctgcggaccctcccgttgcctaacctccctgggctgagcctgctacactcaccaccagtgcttccccagcgcatggaggccgcccaattatagcttctctggggcccctcaggagtgtgtagagtgatggagagtgaacgagtcgggtctccctggcactgacgctctgctcagacgcccaaggaaagctgagccctgactcctacccaaagggactgagctctatcactatccctctgagcccagctcaagagactagagggaggctgtgtcgcggggtggaaaggag

SEQ ID NO: 193646 - DNA, 398 bp, Homo sapiens
acccaaactacccagaccccacccacctcatttcagtcaggggcttataaagcctaagaggasttgaagtttaacttaaatagaaggtgagggaacgccattggtcagaattcttgaagcctggattggctggagccacggaggctcctgaacccactaaaccagaagcaaagtggcagctgagagctggtgctgattttttaaattgggagactcctgagtgtgttcacctgtaactacagtatcataattcaccttccaaaatttaacatcaggattcacaagaaaaaaaagttgccattgccagacatgggctagaatcttaaacttgacagtaaagaaaatgaactctacattgtgaaatatacatcactccctagattctatgatcagatcta

SEQ ID NO: 193647 - DNA, 398 bp, Homo sapiens
acccaaactacccagaccccacccacctcatttcagtcaggggcttataaagcctaagaggagttgaagtttaacttaaatagaaggtgagrgaacgccattggtcagaattcttgaagcctggattggctggagccacggaggctcctgaacccactaaaccagaagcaaagtggcagctgagagctggtgctgattttttaaattgggagactcctgagtgtgttcacctgtaactacagtatcataattcaccttccaaaatttaacatcaggattcacaagaaaaaaaagttgccattgccagacatgggctagaatcttaaacttgacagtaaagaaaatgaactctacattgtgaaatatacatcactccctagattctatgatcagatcta

SEQ ID NO: 193648 - DNA, 577 bp, Homo sapiens
tgtatctaaaaatgtcatccaggagctaaggccttatgactctgaccagtaccctattctactgtggctgagctggtatccaaaatgcaaaacagtcctccccacccttttttctttcctctccaaacagaaagaagtggtctgttgtcgctgtgagctgtgcagcctgggagagaggagtgatgcaagcactgttagcaaccccggcttgtgtctcagtaggtcatgttctccccaccgtctactstctccaggccgggttccacactagcgctcatcttacagttgcagttcccatggcctagactgcctttcaagtttagattcccagagcactttagcccttagtggcgagatttgcatgaactcatgttctaactgttgggattggtgattctcctctgtctagggatggtttaagtgtttcctctgtgggtgggcaccaactgagtctgggacgattgtcctgtctgctctaacaggatggcacttagttcattgcctcacaattgagttctccctcccccagcacctggagatgctcaccacactgccactgccagaggaagttgggggt

SEQ ID NO: 193649 - DNA, 619 bp, Homo sapiens
cccagttcacaagaggctgctttgaatacatgatcacttggtaccccatgaccatagcccggtaaaataccaggagctatttctcaaaagatctacaattgttttgctctagataagactratttcaaaataccagggatctctatagtgataattccataagcttcatcctgcatctcttcatagcactggtacctccaacactagtctgtcagttcctaaggcttaagtggcagtgatgctttcaccaaagcctggacctgctgtagcactcattcctgctttgggccctcttaaagttggaagctttttatgactttttatgtatgggccagggcaggattcctaggtgacaaatgttatctccagaatccaaagaggcttacgattcattgtgccctcctctttgggatagagaatgcaagatgaagtctgcttctttactctggagacattcaatgtaactctgatcattggacctaattaaatactattgacatcatgggtcctaaaaattctttggatttatctctaccttctggagcatgtgtcttactaaggcctttactgtacaaagcacctcgtgtgtgtttggcacaatcaatgtgataccattgga

SEQ ID NO: 193650 - DNA, 599 bp, Homo sapiens
tctgcttctttactctggagacattcaatgtaactctgatcattggacctaattaaatactattgacatcatgggtcctaaaaattctttggatttatctctaccttctggagcatgtgtcttactaaggcctttactgtacaaagcacctcgtgtgtgtttggcacaatcaatgtgataccattggatcactgcgatgttctctgggatgttcaggcagtccctgtcttttaggactatattatgacacatgacagtagagttaatgtgcccctgaggcaaactgtatgagtcctgttttctatcccatatgaatatgaacttyctgatcctcttataactggaatagaaaacaataaaactgccaagttttgtatcacgcatttaaagtcttctattttggtggggagggcattttcagaacaaattctatatggtagttattcaaaaaacctggcatagtaatttaactttttgttaagtgactagaaaaataaccagtgagttgggtctgtggaaccaggatacatggagactgtttaaagtagggactctattctaggtattagtctatgcagtaaataaaggaacaatgacta

SEQ ID NO: 193651 - DNA, 542 bp, Homo sapiens
gcaaactgtatgagtcctgttttctatcccatatgaatatgaacttcctgatcctcttataactggaatagaaaacaataaaactgccaagttttgtatcacgcatttaaagtcttctattttggtggggagggcattttcagaacaaattctatatggtagttattcaaaaaacctggcatagtaatttaactttttgttaagtgactagaaaaataaccagtgagttgggtctgtggaaccaggatacatggagactgtttaaagtagggactctattctaggtattagtctatgcagtaaataaaggaacaatgactatacttccaatttctagatatcaatgtcaactcaaactgttcagtaatccttaatgtctagttctttccccaaagtacaattgcctgagtaaattatcataggtaactttgagaaggaactatgataatcatgktatataatgaggacttttctacaaggattcaggtacctcttcaatgagttctagatctagaaactgacacaagtttgggaactaggca

SEQ ID NO: 193652 - DNA, 418 bp, Homo sapiens
gcaatatcaccgggtggatgtacacccactgctatattgggagttacgtcatactctaccccctggatatttggatcaatatcaccgggtgggtgtacacctactgcaatattgaaagtaataccatgctgtctccctccctggacattaggaacaaaatcataggtgggtgtacacscactgcggtattaggagtaatattattattaattattacttatttatgattaacattaatattaattaccaacatcaatagtgagaaataattgctaataaaaagttttcatattattaatattaatattaattattggtacctaatattattgttttctaattaataagatcagtatcaattgttaatatcagtcattactaataattaatattaataattttattgttatcattaata

SEQ ID NO: 193653 - DNA, 552 bp, Homo sapiens
atatattcctcatatatatccatatatatatataatatatatacactgacacccagatacacatatatattcatatatttatgaggaagaggaaggcaaacaggaggatatatatatttgctcctgatcaaggttttgcttctctgtgaatttttccatgagccttttgtctgaccaccctatttaaaactcaaaccctcatccccagtccctggactctgtgctccttttctaacttcctgcttgattattctccaaagacactactacactctaacacatcatatacrtcacatatctgcacggtggccatttgcttttctcatttcaattgcaagatttgtgttttctttcttctttactccttaattttctaagttgatatttgacctagactaggtactcacaaaatatctttcaatgaatattacaataaattaatgaattaatattagatatcataccctcaatataaacatccacaaagagaaaatcatttctagaattcttctcaagtccttagagttctccttatataaaatactagttccc

SEQ ID NO: 193654 - DNA, 421 bp, Homo sapiens
attgaaccttcctttagatagatcagtgttgaaacactctttttctatagtatgcaggtgcatatttggggcactttgaggyctatggttgaaactaaaatatcttcacataaaatctagaaagaagcattctcagaaactactttgtcatgtgggcattcaattcaaacagttgaactttccttttgatagatcagtttttaaacactctttttgtaggatatgcaggtggatatttggggcactttgaggcctacggttgaaacgaaaatatcttcacataaaatctagacacaagcattctcagaaactagtttgttatgtgggcattcaactcaaagggttgaaccttccttttgatagatcggttttgaaacactctttttggagaatctgaaagtgaatatttggacggctttga

SEQ ID NO: 193655 - DNA, 421 bp, Homo sapiens
attgaaccttcctttagatagatcagtgttgaaacactctttttctatagtatgcaggtgcatatttggggcactttgaggcctatggttgaaactaaaatatcttcacataaaatctagaaagaagcattctcagaaactactttgycatgtgggcattcaattcaaacagttgaactttccttttgatagatcagtttttaaacactctttttgtaggatatgcaggtggatatttggggcactttgaggcctacggttgaaacgaaaatatcttcacataaaatctagacacaagcattctcagaaactagtttgttatgtgggcattcaactcaaagggttgaaccttccttttgatagatcggttttgaaacactctttttggagaatctgaaagtgaatatttggacggctttga

SEQ ID NO: 193656 - DNA, 636 bp, Homo sapiens
ggtttatgcaatatttagtacacaccttttcatcactgattaaattagcctcacactatcattgtaaaaaccactgcctgaatgaggcatatctatcatcaatcttattagagtaaacatatgctagaaattaactgaaattaatactatttcttgggtttcttccaaggcacaagcattcctctaagtgcacatttatttatttataccaaagaaagtttcaccctctggagtgcagtggcacactcttagctccccgcagcattgaattccagagctcaagtaatcctcccacttcagctttcaaagtaaaaaagactakaggtttatgccattggacctagctaatttttcatttattcatcaaaaatattttttaaattcttagttgattacatgtgtcacaatgaccagctggattagaattagattaggtttaaaacaatgaaagaatctgggagagggggcagagtgttggttgttaattagcacatggatcaaaggagattactgatgtgtttagaagccaaaacactgacagaataaaagccagaactaacaatccaattgtaaatctctttactgtggtattttctgccatttctgctccataagacacaccttaaccactttgtt

SEQ ID NO: 193657 - DNA, 575 bp, Homo sapiens
ggcattttacaagatgcatctttcactaagttcagtgtgaaatttggagtcagtttctgaagatattatttccctmccatctggaaagcattttctatttcttctgtaatgaaaaacccagttagtcattttgtcattaattaatgtcctggtaaagtctgagtcttgaagacattctctccagaagtgaagggagaagaggcccagagagtctatgctctgtggtaacttcaaataacctactcagtcatctttcccagaacctattacccaaatgagtggacctcaaaataatattaatgtgagcctagattcccaaaacttctgatcttgccatgtcctcaaattatcctaaatgtaaatgaatcactcactattttatacatgttaaacaacccaaaatatattattgacttagatggggaatagttattggggctgttaccttgaccattccacagagttttgtggctggtggataaagtaggagggacctttggcctggtagaatcccttggcggggctatactctcccaataaagtagcattagttatgcgaatgtgtttttggaaac

SEQ ID NO: 193658 - DNA, 579 bp, Homo sapiens
actagttcccatattttgagcatgtttacatgtctccctcaagacacaaatcaatttttctcaccaattttctcatcatatgttatgtattattcagtattaattagttgagattcttaatttcatggttgccctagatttcccctgtcactctttctgcctcaaattttccatacaattccaaatactacttgtccaccagcattcagattaatgctgacccaggctcagaggttcacttgagctttctatgactgccaaatgaatcttgtgccaagcgtttatccaaccagcacatatagaatgctgtgagatggcccagtttcttgyatctgttggtgtatagctacaggtttgtatgaaaacaaaccagcatgctttgggtgacttcagtagttttcttagaaatcctatctaacagtcgtactattctatataagaaatgaggtcactttttctcaatgttttcttttcttttattgactcccagaaacattagagtttgataacaagttcctattttaagagtcacccatttgcccaccataatttcctggataaggtagagtagcacaggac

SEQ ID NO: 193659 - DNA, 579 bp, Homo sapiens
actagttcccatattttgagcatgtttacatgtctccctcaagacacaaatcaatttttctcaccaattttctcatcatatgttatgtattattcagtattaattagttgagattcttaatttcatggttgccctagatttcccctgtcactctttctgcctcaaattttccatacaattccaaatactacttgtccaccagcattcagattaatgctgacccaggctcagaggttcacttgagctttctatgactgccaaatgaatcttgtgccaagcgtttatccaaccagcacatatagaatgctgtgagatggcccagtttcttgcatctgttggtgtatagctacaggtttgtatgaraacaaaccagcatgctttgggtgacttcagtagttttcttagaaatcctatctaacagtcgtactattctatataagaaatgaggtcactttttctcaatgttttcttttcttttattgactcccagaaacattagagtttgataacaagttcctattttaagagtcacccatttgcccaccataatttcctggataaggtagagtagcacaggac

SEQ ID NO: 193660 - DNA, 579 bp, Homo sapiens
actagttcccatattttgagcatgtttacatgtctccctcaagacacaaatcaatttttctcaccaattttctcatcatatgttatgtattattcagtattaattagttgagattcttaatttcatggttgccctagatttcccctgtcactctttctgcctcaaattttccatacaattccaaatactacttgtccaccagcattcagattaatgctgacccaggctcagaggttcacttgagctttctatgactgccaaatgaatcttgtgccaagcgtttatccaaccagcacatatagaatgctgtgagatggcccagtttcttgcatctgttggtgtatagctacaggtttgtatgaaaacaaaccagcatgctttgggtgacttcagtagttttcttagaaatcctatctaacagtygtactattctatataagaaatgaggtcactttttctcaatgttttcttttcttttattgactcccagaaacattagagtttgataacaagttcctattttaagagtcacccatttgcccaccataatttcctggataaggtagagtagcacaggac

SEQ ID NO: 193661 - DNA, 549 bp, Homo sapiens
caagctttttcccataaagactgcattttmtttaaaagcttctcctgcaaaagagccataaattgaagcaccagtgaaaacaataaagtaacatgcagaccgtttcatagggagggggcacagaatgagagacaaataagcccatagtaaatggcatttcttctatttcccttcttcttcatcaaatctcagaggtttgaagctaagaaagcccaaaagtgagctgcttaaagggactcagatttggctttactccatctccaagaaaatagacccacaggaatttcatgtgtcctttatagaaatagatcttcagaggcatcacttacccggtgttcctcagcagcccactcaacgggacggtgtctgtgataccggtgctcctgagagctggagcacagcagacagagcagactcttgtccacttcacagaacatcttctttgtctccctgtgagtgccacacatttgctcctcagagctcaggaatagccagagactgacttttctggcaagggaagccatcttcttcaaatgaatgttagttttg

SEQ ID NO: 193662 - DNA, 549 bp, Homo sapiens
caagctttttcccataaagactgcattttatttaaaagcttctcctgcaaaagagccataaattgaagcaccagtgaaaacaataaagtaacatgcagaccgtttcatagggagggggcacagaatgagagacaaataarcccatagtaaatggcatttcttctatttcccttcttcttcatcaaatctcagaggtttgaagctaagaaagcccaaaagtgagctgcttaaagggactcagatttggctttactccatctccaagaaaatagacccacaggaatttcatgtgtcctttatagaaatagatcttcagaggcatcacttacccggtgttcctcagcagcccactcaacgggacggtgtctgtgataccggtgctcctgagagctggagcacagcagacagagcagactcttgtccacttcacagaacatcttctttgtctccctgtgagtgccacacatttgctcctcagagctcaggaatagccagagactgacttttctggcaagggaagccatcttcttcaaatgaatgttagttttg

SEQ ID NO: 193663 - DNA, 549 bp, Homo sapiens
caagctttttcccataaagactgcattttatttaaaagcttctcctgcaaaagagccataaattgaagcaccagtgaaaacaataaagtaacatgcagaccgtttcatagggagggggcacagaatgagagacaaataagcccatagtaaatggcatttcttctatttcccttcttcttcatcaaatctcagaggtttgaagctaagaaagcccaaaagtgagctgcttaaagggactcagatttggctttactccatctccaagaaaatagacccacaggaatttcatgtgtcctttatagaaatagatcttcagaggcatcacttacccggtgttcctcagcagcccactcaacgggayggtgtctgtgataccggtgctcctgagagctggagcacagcagacagagcagactcttgtccacttcacagaacatcttctttgtctccctgtgagtgccacacatttgctcctcagagctcaggaatagccagagactgacttttctggcaagggaagccatcttcttcaaatgaatgttagttttg

SEQ ID NO: 193664 - DNA, 549 bp, Homo sapiens
caagctttttcccataaagactgcattttatttaaaagcttctcctgcaaaagagccataaattgaagcaccagtgaaaacaataaagtaacatgcagaccgtttcatagggagggggcacagaatgagagacaaataagcccatagtaaatggcatttcttctatttcccttcttcttcatcaaatctcagaggtttgaagctaagaaagcccaaaagtgagctgcttaaagggactcagatttggctttactccatctccaagaaaatagacccacaggaatttcatgtgtcctttatagaaatagatcttcagaggcatcacttacccggtgttcctcagcagcccactcaacgggacggtgtctgtgataccggtgctcctgagagctggagcacagcagacagagcagactcttgtccacttcacagaacatcttctttgtctccctgtgagtgccacacatytgctcctcagagctcaggaatagccagagactgacttttctggcaagggaagccatcttcttcaaatgaatgttagttttg

SEQ ID NO: 193665 - DNA, 576 bp, Homo sapiens
aattaaatcaattttggtttaatagaagagaaaaacataattaaagatattgggcctttttattttctcgtggattaaattaacttctcctagggatacccaaactctgaactaacatatagtakgatttttgttaaactcagagaggtgtgattacatctctatggtgtgatggtgaattttagatatcagtctgactggattaaccaatacctagggaactggtgcagcattgtttctgggtgagtctgtgaaggtgtttccagaggagacagacatgtgagttggtgagctgagtgggaccatcatccctcagtgtgagtgggcaccattcaatcagctggtagctcagataaaaggaaaaagccagaggaaaggcaatttcctctttctttctcctgaagctggttctgaggctttcagccttgagctcagtccagataccggtatcctcaggacatcagcttaaaggcagcctatattagaactgctcagactccataatcaagcaaaggaattttcctgatgaattccctctcaggtagagtcatgtgtagcttgatgacagatatatgt

SEQ ID NO: 193666 - DNA, 498 bp, Homo sapiens
tctggaattcaataaagaaggagaaaacacttgagaaaaaaacaccctaattttttataaaagttagtgtgactctttggtaggatttctaatcagaccacagattttacactagcatgctcatctgtttccatacaaacctatagcaataccccaacaaatacaagaaactgggccatttcacactgttcccagtgggctgcctggataamttctggacacaagagttatttgtcagtcatggaaatttcaggtgacccttctaaggctgagtcagtatgaatttgaatcctggtgggcaagtatattgaaatgtgagctaaatttcaggcagaaggtgagagagcgcaaccttagggaaagcatgaaattaaatatcagcactaattaatattgaataagtcataaaacataatgggaaaagtggtgagaaatgtagacttgtgtcttgatgaagacataaatatgtgagaaatatgggaactagtatttaatata

SEQ ID NO: 193667 - DNA, 587 bp, Homo sapiens
tcaagaattctaatttctgttaattacatgtatctatattttttaaaaattatttttgctgttgattttactgtgcagcctgaaagagccaatagwcatatcttcctgcatggagatttgagaagcatgaatgttggatgtgaccctcaagaagatcccgatatcactgcaaaatctgaatgttttcttgtatggggggctcaggctttcacatctggcaaatattattgggaggttcacgtgggggactcttggaattgagcttttggtgtctgtaacaattattggaaagaggagacagaatgacaagatagatggagaggagggactctttcttcttggatgtgttaaggaggacagtcactgcaatctctttaccacctccccacttgtggtgcaatacgttccaagacctaccagcacagtaggattattcctggattgtgaaggtagaaccatgagctttgttgatgttgatcaaagttccctgatatacaccatccttaattgctccttctcacctcctctctagcctatcttttgctgtagtcacttctgagcagaaaaaagtcagaaatgtgtctata

SEQ ID NO: 193668 - DNA, 484 bp, Homo sapiens
aactctgtgagttgaatggacacatcacaaggaagtttctgagaatgcttctctctagtttttatgtgaagatatatccttttccagcataggactaaaagcattccaaatatccacttgcagattctacaaaaagagtgtttctaaactgccctatcaaaagamagttcaactctgagagttgaatgcacacatccaaaacatgtttctggcaatgcttctgtcaagtttatgagtgaagatatttccttttccaccgtaggcctcaaagcggtccaaatatctctgagaatgcttctgtctagtttttttgtgaagatatttccttttccaccataggcatcaaagcgctccaaatatccacttgcagattctacaaaaggagtgtttcaaaactgctctctcaaaagaaagggtcaactctgtgagtttaatgcacccatcacaaagtagtctctgagaatgcttctgtctagttttgatg

SEQ ID NO: 193669 - DNA, 484 bp, Homo sapiens
aactctgtgagttgaatggacacatcacaaggaagtttctgagaatgcttctctctagtttttatgtgaagatatatccttttccagcataggactaaaagcattccaaatatccacttgcagattctacaaaaagagtgtttctaaactgccctatcaaaagaaagttcaactctgagagttgaatgcacacatccaaaacatgtttctggcaatgcttctgtcaagtttatgagtgaagatatttccttttccaccrtaggcctcaaagcggtccaaatatctctgagaatgcttctgtctagtttttttgtgaagatatttccttttccaccataggcatcaaagcgctccaaatatccacttgcagattctacaaaaggagtgtttcaaaactgctctctcaaaagaaagggtcaactctgtgagtttaatgcacccatcacaaagtagtctctgagaatgcttctgtctagttttgatg

SEQ ID NO: 193670 - DNA, 542 bp, Homo sapiens
atcattcatttcttcctcctccatgttcccctcctgagaaaaaacagcattctgagaaggcataactaggaaaaagagaagcatcttgttaatatatgacacgaaggttaaatttaaatcctggagattctgctttgtgtaggtatggcagacagtactgagaagccctctaagacataagcctaaaggttgtgacgtctctactcttctatgatgttcrggagttcgggaattcaatgcagaactgtctgtcttcgggggtgcaactccccttgttgtggcataggggagctcaggggctttcagccctggctaaatactgatggcaatttaaaaagaagccagtgttcagcccctacactcagagatttggatttaattgatctggcatgggtctgagcaacagcattttaaattgtaaagtctccaagtgactctaagtgtagatgagaactactgggatgaggcgatggagagcacatgggtgagggtccattcttactctttatccccacaaggaatgaattcaccccaaagtgaat

SEQ ID NO: 193671 - DNA, 282 bp, Homo sapiens
catttttgtttggtgttttctgcaaagtactgaggaaataytttgtaaagtgagctttgggtataacttagccccatcattatttagagaatagaggaggaagaaagaggaaggattttaaaggcagacaatgacagaccattcaggataggtagggttttaaagggagataaacacagtctcatcaactaaggagagatttgctgcagtaaataggatgagggaaatagtctgtgggatgcaagcaaaggaagcagggtgccttagacactgagtggagcc

SEQ ID NO: 193672 - DNA, 282 bp, Homo sapiens
catttttgtttggtgttttctgcaaagtactgaggaaatattttgtaaagtgagctttgggtataacttagccccatcattatttagagaatagaggargaagaaagaggaaggattttaaaggcagacaatgacagaccattcaggataggtagggttttaaagggagataaacacagtctcatcaactaaggagagatttgctgcagtaaataggatgagggaaatagtctgtgggatgcaagcaaaggaagcagggtgccttagacactgagtggagcc

SEQ ID NO: 193673 - DNA, 282 bp, Homo sapiens
catttttgtttggtgttttctgcaaagtactgaggaaatattttgtaaagtgagctttgggtataacttagccccatcattatttagagaatagaggaggaagaaagaggaaggattttaaaggcagacaatgacagaccattcaggataggtagggttttaaagggagataaacacartctcatcaactaaggagagatttgctgcagtaaataggatgagggaaatagtctgtgggatgcaagcaaaggaagcagggtgccttagacactgagtggagcc

SEQ ID NO: 193674 - DNA, 395 bp, Homo sapiens
ttcataaaacttttattccacttacatgaatttaatacacgtgttcttaacaattatgcttggattgttcatgaamatttcataagacattaaacaaagctagccatcatctcaagttatttccctgttaactatttttacagcacatgcatgttaggcaagtatcaaaaaaaaaaaaatcacaaaagcaaaaatcctaaaaaaaagttaaatacatgggtttttgttttactgctgtgcttgatatacatgaagtaatgaataccaagcaattcatttttcctgcatctttacttttacatttgttcttaggttgcctaaaacatttaaatacaaataaaatgagtgtagcaaaaataatgaaagctaacagcaggtaactttacaaataatgg

SEQ ID NO: 193675 - DNA, 395 bp, Homo sapiens
ttcataaaacttttattccacttacatgaatttaatacacgtgttcttaacaattatgcttggattgttcatgaaaatttcataagacattaaacaaagctagccatcatctcaagttatttccytgttaactatttttacagcacatgcatgttaggcaagtatcaaaaaaaaaaaaatcacaaaagcaaaaatcctaaaaaaaagttaaatacatgggtttttgttttactgctgtgcttgatatacatgaagtaatgaataccaagcaattcatttttcctgcatctttacttttacatttgttcttaggttgcctaaaacatttaaatacaaataaaatgagtgtagcaaaaataatgaaagctaacagcaggtaactttacaaataatgg

SEQ ID NO: 193676 - DNA, 469 bp, Homo sapiens
ggggcttccccctttgctgggcacttattcttcttgctgctgccatgtgaagaaggaactgtttgcttccgtttctgccatgattgtaagtttcctgaggcctccccagccatgctgaactctgagtcagttaaacctcttttctttataaattacccaggctcagggagttctttatagcagcataagaatggactaatacaccctgtatcttccaaaaatttaaaaattagccgggcatggtggcatgtgccctatagtcccagctacttgggaggctgagatgagaggatagctcgggcctgggaggtcaagtaagccaagatcatgccactgtactccarcctggtcaacagagcaagaccctgtctcaaaaaaataagtaaataaatataaataaagtaagcactgtacaattaaaagggcttgttggtcacctctggtcaacccagcgcaggaattatttgtg

SEQ ID NO: 193677 - DNA, 654 bp, Homo sapiens
agccctacaagttgccacagccagggttctccgcatctctgcatatgatttcagccctctgtatccatcatcagagccttttcctttgcttactaaaaatgtataaaaggtaatctttccatatatgtctacagctatcatggatgaccttctataactccagagattttgcctagaatttagattagggatatagatttagttcggctcctggaagctgtgggttggttgccaaatcacaaaagaaaggcatgcctactaaaaaagccattgtttaagaacatggggagtgggtagacagtttctgctcccaaaatcatggaattagtggacatttgattatccttggatatatgctttatcacataaatgtacagttcacgagaacacagataaacacagtcaccttaaaaattcaaataaattcccattataaacattgaagataatttgattgcaatggtgaataaatctaaagaaatcatgtgttggtcagaagtgcagatcaaacaaaaaaggacaaaggaaggtcaccgaggcagatatcggcaaagctcatctaagcactctctcaagaaaagtaaatattgattcttagacttttagtrtagttccatagcaagtccctcctgatgttctattagaggaggtaag

SEQ ID NO: 193678 - DNA, 610 bp, Homo sapiens
caataataggctattagtagttaagtttttgaagagttaaaagctacatgagaatttttgactgtgcaaggagtcagcaccacaacytctgttcttcaggggtcaactatataaagaactaataaaactcaataattaaattacaaataacccgtttaacaaatgggcaaaggatctgaatagatagttctccaaagatacacaaataaccagtaagtacataaaatgatgttcatcgttaaacatcaggaaaatacaagtcaaaatcacaattagttgtaatttcacatctactaggatagctatgattaaaaaaaagtaataataacaagtgttgtcaaagttgtggagaagtcagtactttcatacactgctcgttggaaagtaaaatggtgtcactgctgtggaaaatagtgtggtaatttctaaagtagttatatgacccagaaatgcctctcttaggtatatgcccaagagaaaaacatatgtccacacaaaacttatgtaagaatgtttatattaacattatttatggaaagaaaatgtggaaacagtccagatgtccttcaaatgatgaataggtaaataaaatgtggcatagccatacaat

SEQ ID NO: 193679 - DNA, 551 bp, Homo sapiens
atcataccctattagtttcgttttccctaccctggcaccaaaaaaaaatcacctatattatagttaaaactgcttgtggaacttcactgaagtaatttcaattaggctccttaacaggaagcataacatcacrttatgaactgaacttcatccccacaaaattccttagctgaagtcctagcccttagtacctcagaatgtgactgcatttggagataggccctttccagagttaagtgaggtaaagtgaggtcatataagtgggccataaccctatatgtctggtgtccttctatgaagaggagattgggagatagacatgcacagagggacaaccatgtgaacacacgagagaaagatgttcatctacaagtcaaggagagaggcctcagaagaaatcaaccatgccaacaccttgaccttggaattcttgctctagaattttgaggaaatcagtttctgttgtgtaagccactcgttctggtgctttgctatgacagcccctaacaactcatccagctgctctggccttttccccctaacatgtgccc

SEQ ID NO: 193680 - DNA, 551 bp, Homo sapiens
atcataccctattagtttcgttttccctaccctggcaccaaaaaaaaatcacctatattatagttaaaactgcttgtggaacttcactgaagtaatttcaattaggctccttaacaggaagcataacatcacattatgaactgaacttcatccccacaaaattccttagctgaagtcctagcccttagtacctcagaatgtgactgcatttggagataggccctttccagagttaagtgaggtaaagtgaggtcatataagtgggccataacccwatatgtctggtgtccttctatgaagaggagattgggagatagacatgcacagagggacaaccatgtgaacacacgagagaaagatgttcatctacaagtcaaggagagaggcctcagaagaaatcaaccatgccaacaccttgaccttggaattcttgctctagaattttgaggaaatcagtttctgttgtgtaagccactcgttctggtgctttgctatgacagcccctaacaactcatccagctgctctggccttttccccctaacatgtgccc

SEQ ID NO: 193681 - DNA, 459 bp, Homo sapiens
tgaaactatgcatttgttgttaccatattctgaccacctgaagtttctatatgatacaatatctgtgtattatgaatacagtagcaaaaaacaaatgtgattttcattttaactctgaaaaacctattacacaaacatcacagccaagggtggtgtatacttatggcctctcaagctcatttaaaattcttatgacagcactaaatactctctgtgtagttacatgratctgtagagaaatggaaggcaggtcagaactgctgtgcctagagacttcagaatttgttttgcagtggttatattgagaataatcacttttctcattctgcacttggctgctttgttttggttttttttttgtttgtttgttttgtttgttttttctgtccctcttgaccaagtagaagaaagtctgaatactaatggttggtcaattccaagctatcattttgaggtaat

SEQ ID NO: 193682 - DNA, 532 bp, Homo sapiens
caaataatgacagagatgaaatatcaaaaaagctgaagttaatataaatattaaagcttaataatttatttaaatgttctatgtttatatagttggagtaatataactcccattacatatagattcacatctattgttttaattcatgycagtttggtaatacatttttttctctgtgtatttaatatttttaaataataaacattaaaaattttaaataactcatataggtataataaccatgaatataagatttctgatctttcataacaataactttattaacatttgttcttaccatattttatttggtctctttctttggttctggcctccatttctcttatatccacttaattgccttatgatgttcttcttctggtcagccacattgagtccttttgagacagactttcttaatttaaaataagtaggcaaataacactaggcagtatttttataataattgtaatttcaaatatctcatgcgagcacaacagagaagaaaaagccatattgtaatatccatgaa

SEQ ID NO: 193683 - DNA, 623 bp, Homo sapiens
taagttccttcttttccaaaagaagagagacaacaataaaaatacattatcctgtcataaggatataagattagtgtcatatactttttatctacataaaatgtgtatgtgtagctgtagaataaatatctagaagtgggtttaatggatattatttttcaaaatgtcactatatcatctactacaaagcttatgacaacttgaactttcatcaaaacattaagataatcaattatttttccaaattctcattatctatagtaggtattaatactttttaaaatcttcatcatatgaagataaatgtttgtgtttattataattttatttatttatggctgagattacagattttgtatgcctattygctagttctatagttattgaccaattctgctactagtctgtatgactcttactgatttgtaaaatcttttagtgttaaagcaatttgctcccttgctgttatacggctgctcctttttcttgcttgtcatttgtcatttggcttggttaatgatatcatctatacaagagatttaaagttttgtgtaatcaaattcactaatattttattttctgcttttggtatatgtaacatttgtggaaagcccattgacttc

SEQ ID NO: 193684 - DNA, 547 bp, Homo sapiens
ccaaactttcacacatttttctgacttcttctgagctttccaaactgttccaacctctgcctgttacccagttccaaagttgtttccaaatttttgggtatagaagaaccccactcctggtatcaattcactgtattagtttcctttcactctgctgttaagacatgccaaagactgggcaatttacaaaagatgtggacttacagttccacatggctgggaagtcctcacaataatggcagaaggtgaaaggcaaagaagagcaagtcacatcttatgtaaatgacagcagatgaacagagagcttatgcacaaaaactgccatttttaaagctatcagatatcatgagactcattcactaacgygagaacagcccaggaaagacccgcccctgtaattcaatcacctcccacctagttcctcccatgacacgtgggaattgtggagttacagttcaagatgaggtttgaatggagacacagtcaatctatatcagtactgtgaggtgagagcttccaaaaattaaaatgtgaatacctacaattg

SEQ ID NO: 193685 - DNA, 547 bp, Homo sapiens
aatagctatgggggctggaatgtgctacttcactttaataaacaagaattagaaggcagggcattgcattaagaagatttatgcatgagttgtgggaacataggcagagaccaaaaccagacagatcaccatcagtattttgagtgggaaaagtgtttgaaatggactgagatcgcaactgaagaaccactggcaagtttaattgagggccataattcagtacactagggtcraaatagggcaaagctatggaggatgaagcccattggcttagctatataggacgaggtcagggaaggccaatgtcatcatcagacaagttagcaaggcataccgagactttcttaatgaacataagaaaaccagataagcagaagctgaggtctagctctgagataatactatcagtctccatgagttattttgataagaggctatctttaacttagaccttttctctgcatgggctggtaaaactcttccatcgacagctctgttactatgtcagtatttctaggactgtgtttgttgaggcaggtcagaagct

SEQ ID NO: 193686 - DNA, 575 bp, Homo sapiens
gaattccctccctcttccctttactattcttcatctttgttcaccctgttctctttcctccactcttacagamggaaatctttcatcttctttccaaagataacaacagctccattcaaagctttggtaacatcccactgcatctcatccttgactctgtctcttgcgtctttaataccctgccagtcccttcttctccttagacaagtgcttaagtgtccttatcccaaatatcaaataaaagcaaaaaccaaaactcttaaacctgccacttaactccttaatgttccttatcatttcttcagcagaaggctcagagtctataaactgttttatgcaatcactgcctctagttcctcaccatccgttggattttaaatctcttgtaatctgatttctaccctctaattctgctctcttgagtaatgcccagttgccagaaccactctctctcactcttcaaattccttggatttctctgcaaaattggatccttgataaatcccttgttaaagatcatttattctccctttgcttcagtttacctcttgatgctcctaggaagactgagacca

SEQ ID NO: 193687 - DNA, 579 bp, Homo sapiens
cttcatctttgttcaccctgttctctttcctccactcttacagaaggaaatctttcatcttctttccaaagataacaacagctccattcaaagctttggtaacatcccactgcatctcatccttgactctgtctcttgcgtctttaataccctgccagtcccttcttctccttagacaagtgcttaagtgtccttatcccaaatatcaaataaaagcaaaaaccaaaactcttaaacctgccacttaactccttaatgttccttatcatttcttcagcagaaggctcagagtctataaactgttttatgcaatcactgcctctagttcctcaccatccrttggattttaaatctcttgtaatctgatttctaccctctaattctgctctcttgagtaatgcccagttgccagaaccactctctctcactcttcaaattccttggatttctctgcaaaattggatccttgataaatcccttgttaaagatcatttattctccctttgcttcagtttacctcttgatgctcctaggaagactgagaccataccaaatgagccccttcattttcttgaattc

SEQ ID NO: 193688 - DNA, 575 bp, Homo sapiens
gaattccctccctcttccctttactattcttcatctttgttcaccctgttctctttcctccactcttacagaaggaaatctttcatcttctttccaaagataacaacagctccattcaaagctttggtaacatcccactgcatctcatccttgactctgtctcttgcgtctttaataccctgccagtcccttcttctccttagacaagtgcttaagtgtccttatcccaaatatcaaataaaagcaaaaaccaaaactcttaaacctgccacttaactccttaatgttccttatcatttcttcagcagaaggctcagagtctataaactgttttatgcaatcactgcctctagttcctcaccatccgttggattttaaatctcttgtaatctgatttctaccctctaattctgctctcttgagtaatgcccagttgccagaaccactctctctcactcttcaaattccttggatttctctgcaaaattggatccttgataaatcccttgttaaagatcatttattctccctttgcttyagtttacctcttgatgctcctaggaagactgagacca

SEQ ID NO: 193689 - DNA, 606 bp, Homo sapiens
caagaaaaatttagaacagataggcttatacattaaacaggttgctacctcaattacctaggatgctagtatgcactacgattttcccaaggaagtatttagtatacagtttttcccaaacctgtttgaccttagaagcagttatttcactgaattttgaatatcagggaagaaatctcaatggagttaatacataatgggaaaacattaaaaacaaaacagaacaaaatcttcaaatatattaamcacagcaattaaaaactcaaatgccttcacaggcaaggcaacacacaaacaaaaagaacacaaagagggtcaagaataaaaaaacagatacttatttgtactgaaaataagtctagttgctttccattaaaaaaagaaatacatctagatcttctagtttgctacctttgtattaagagataattatatccaactccttttggtgctactttctaagctatttggaaagttagtactagaacagcagcttatgagagaaaaaattacaatcagagctgcagcaatctaggtaggcttcagtataggttaaaaaaaaagttgtagctcactaaataaaccatgtgggcaaaaaagaaaagc

SEQ ID NO: 193690 - DNA, 505 bp, Homo sapiens
cataagcatatccacacaaaagaaaatatgaatcagtattctttaggtagaataaataaacaattctagtggaagcttagagatggaagaaacagagggcaaaggaaatgataaatgtgtaaatcaatatcaatgtatattaagtataaaaacgattataactagatgtttttattatattgggcattgtggggttttaaatgtataaggtttaaatatatatatataagtaccaatgacactacataaattgtaaaagaaatgaaagaagtcaaagtgtactaagttccttgtattgtctaggatgtgataaaatactcattaatattagacttcagtaagttaggaatgcatgttggcatttatagagtaaggactaagagattaaagactgaataactaayacagctaaagaaaagaaagtcaaaataaacactgtataaaaaaaaggcaagaaatgaaaaaataaaacaagcagagcaaacagaacgcaaatggcaaaatg

SEQ ID NO: 193691 - DNA, 505 bp, Homo sapiens
cataagcatatccacacaaaagaaaatatgaatcagtattctttaggtagaataaataaacaattctagtggaagcttagagatggaagaaacagagggcaaaggaaatgataaatgtgtaaatcaatatcaatgtatattaagtataaaaacgattataactagatgtttttattatattgggcattgtggggttttaaatgtataaggtttaaatatatatatataagtaccaatgacactacataaattgtaaaagaaatgaaagaagtcaaagtgtactaagttccttgtattgtctaggatgtgataaaatactcattaatattagacttcagtaagttaggaatgcatgttggcatttatagagtaaggactaagagattaaagactgaataactaacacagctaaagaaaagaaagtcaaaataaacactgtataaaaaaaaggcaagaaatgaaaaaataaaacaagcagagmaaacagaacgcaaatggcaaaatg

SEQ ID NO: 193692 - DNA, 498 bp, Homo sapiens
catgggggaaactgcccccatgacccagtcacctgccaccaggaccctccctggactcacagggattamaacttgaaatgagatttgggtggggacacagagccaaaccacatcaaccactatgcttacataagagaggggggccttcatgtcttcatctcttcctgcttggacagagtcttggttacctccttcttggcctgaagtggctcctcggggcactcctgtacttccttggtcttaaccttgggggcctatctggttagccaggggcttcttgcaggccttctctgccttcagcttgtggatgtgtttcaggagaatctgcttgattctcattcacctaaaagataatgtaatttttaagagaaaaaaagtcagatgttatttttctttgagtaccatggccacagccatacatcttgctcaggcaaccgaagaggcatgcctccagcatcctctgccatgacgaaaaggcctcataggatcccagtgaaa

SEQ ID NO: 193693 - DNA, 498 bp, Homo sapiens
catgggggaaactgcccccatgacccagtcacctgccaccaggaccctccctggactcacagggattacaacttgaaatgagatttgggtgggkacacagagccaaaccacatcaaccactatgcttacataagagaggggggccttcatgtcttcatctcttcctgcttggacagagtcttggttacctccttcttggcctgaagtggctcctcggggcactcctgtacttccttggtcttaaccttgggggcctatctggttagccaggggcttcttgcaggccttctctgccttcagcttgtggatgtgtttcaggagaatctgcttgattctcattcacctaaaagataatgtaatttttaagagaaaaaaagtcagatgttatttttctttgagtaccatggccacagccatacatcttgctcaggcaaccgaagaggcatgcctccagcatcctctgccatgacgaaaaggcctcataggatcccagtgaaa

SEQ ID NO: 193694 - DNA, 521 bp, Homo sapiens
atgagaacagcatgggggaaactgcccccatgacccagtcacctgccaccaggaccctccctggactcacagggattacaacttgaaatgagatttgggtggggacacagagccaaaccacatyaaccactatgcttacataagagaggggggccttcatgtcttcatctcttcctgcttggacagagtcttggttacctccttcttggcctgaagtggctcctcggggcactcctgtacttccttggtcttaaccttgggggcctatctggttagccaggggcttcttgcaggccttctctgccttcagcttgtggatgtgtttcaggagaatctgcttgattctcattcacctaaaagataatgtaatttttaagagaaaaaaagtcagatgttatttttctttgagtaccatggccacagccatacatcttgctcaggcaaccgaagaggcatgcctccagcatcctctgccatgacgaaaaggcctcataggatcccagtgaaaccaaccaaacagt

SEQ ID NO: 193695 - DNA, 523 bp, Homo sapiens
tcatgagaacagcatgggggaaactgcccccatgacccagtcacctgccaccaggaccctccctggactcacagggattacaacttgaaatgagatttgggtggggacacagagccaaaccacatcaaccactatgcttacataagagaggggggccttcatgtcttcatctcttcctgcttggacagagtcttggttacctccttcttggcctgaagtggctcctcggggcactcctgtacttccttggtcttaaccttgggggcctatctggttagccaggggcttcttgcaggccttctctgccttcagcttgyggatgtgtttcaggagaatctgcttgattctcattcacctaaaagataatgtaatttttaagagaaaaaaagtcagatgttatttttctttgagtaccatggccacagccatacatcttgctcaggcaaccgaagaggcatgcctccagcatcctctgccatgacgaaaaggcctcataggatcccagtgaaaccaaccaaacagt

SEQ ID NO: 193696 - DNA, 579 bp, Homo sapiens
tgtcatccaactctaatcacctcccaaagatcccacctccaaataccatcacactaggggttaggatttcagtatatgaatttagcggatacacagatagtcagcccataacagatacattaacaaaactagaaccaggcattaattgtgtcagcttaaatttcaggctccaggggcaggcactgccatatctttccatactacttccctaggtaaggattttaagaagttaagaagtgttatatcatgttgaactttatagtcaaaaagcacatttatttattagaaataaatgtgttgccttctcatcatgtcaggtggccactggctaactgtagcactgtgatcttggaaagaaagtaatgactatatttacttagtttccctacaaatagggcatgtgatatattacagaattttgagtgaaaatactgaggtatgmgtcttaatataacatcactgattataggatcttgaataaaacatttagtgtgtttagcctcagtcttcttgtttgtaaaatgagaatcacagttaccttgttggttaaaatggctatatgataagctaagtcatttg

SEQ ID NO: 193697 - DNA, 571 bp, Homo sapiens
ccaaatagagtatagacttcattcctcttaattcccttttaagagccacattatatgcagatgtgcctgtctccagctgatggacatttaaggtatttggtcctggacagagaacttggaggttgtaggacaggaataagagggagataatttttaatgtatactactttcttgactttgataatgtgtatgtagtttgcatattcaaggggaaaaacattcgaagagtcaaaatatagtcacatgccccctttgcttaactaccttctgtaaatttttttactgtgaggataaacccagtccagamctacatggcctgcttgggcgggcctgtctgtctccccagagccttttggggactttgccctggtccccacactccagcccatctttcagttcttctaacatggactctttttcacctcagcagtgagaaagctcatgcacttttgtattctccctgctccctgaaccgcttatttcctttacttactctctttttggcctgcagggaaaagttctccaatctaaattgggtccccttattagtttctgtcatagaacgatgaaa

SEQ ID NO: 193698 - DNA, 548 bp, Homo sapiens
ttttgaagtacatccaacagaattttctgacatactgtgagataaacaggcaagtgaaggatgacaccacagttctggcctaagcaacaaggaaagagatgaacactgagtagaactggttttaggggtaagatcagggttcagtttaaggaattttaaatttgaatatcaaacgatcactcaaatgcttttacaaggctctggcaagaaatgttaagaggtcaagaaatgagaccataagaaatggaatcgaccgtgctcctataaagtccaatgcaccatctgaaaaaggcagtggctactaaactccagcaaactaatacaagagaatccagcttgcctagttataccaaattttccaatttttcaaaatctctcaatatttaaaaactgaaaattaatttgtcaaacagctatgaaagtgtacagaccaaacaaaacacctgcaggcytcctacggttcaaactctgggctgcatgagggcagagaccacttcagccttcaacactttctcaagtacccaccacagtctttggcacacagaagg

SEQ ID NO: 193699 - DNA, 581 bp, Homo sapiens
atcattataaatgtatactaaaatatttaagtsaaaatgacttgaattctttaattattcataactgaaaggcagaaacttcactgggtctattaacaaagtatttctattagtccctgaaaataacttttgttactattttacaaaacaatttatatttcttccaaaaaaaatgggatacatgtgcagaacatgcaggttacatagatatacatatgtgatggtttgctgcacctattgacctgtctgctaaattccctcccctcacccccagccccaaaaaggccctggtgtgtgttgtttccctctctgtgaccatgtgttctcaatgttcagctcccacttacgaacaagaacatgtggtggtttcctgttcctgtgttagtctgctgaggatgatggcctccagcctcatccatgtccctgcaaaggacatgatctcattcctttttatggctgcacagtattccacggtgtgtatgtaccacattttctttatccagtctgtcattaatggacatttggattggtttcatgtatttgctattgtaaatagtactgcaataaacatatgtgtgcat

SEQ ID NO: 193700 - DNA, 388 bp, Homo sapiens
actctcagtctttgctaaaacgagtgtcatagtagaacaaatattggatttagagtcaggcacattgtaatttgatttcmatttctgctgtttccttgttgtgtgaccttgggcaccttccttatctccctgagattcagtctcctcatctataagatgaggacaccaaaatctgacttttaagattaccaagaagattaaataagataacatctataatgttgctaacccacaatgaacattcattcacttaaaaatatttttgaacacttactatgtgccaggcactctgccagggatataggggtgaacgagacagatatgatcccccttcataaaatttattaacaattgatgttagtttttaaaagttttctaattttgccaa

SEQ ID NO: 193701 - DNA, 571 bp, Homo sapiens
agttattagtctagtgaagactcaatatacttattaattaaattgggttccatttggggaaggaaaaggggtaaaggatgtaatgtttgtcaataatatattatttccaaagtgtgataatatattactttctctaattattacaacaaattttcaaagcagttggcattatgcctattatgcagaagatgcttctaatttcacctcgttctgggaactggcagagttaaggggttaaaccaaagacactacctccaaaaaaaaggtctttgcctgtgaaaggrgtgattatgtttgttcccattttcctcctacaaaggtctctcctgttctttattgactcacagagggggcctctattgctggaatcttggtcccatttgttaaaattacctctattgaggacacggcttgtattgagggaccacatttcttccctgtggagcacagtcctgccataatttagcctctccactgcataggtcttgatgacttgggttatgtaggataagggtcatgatcaatgaaaagttcagtttatgaaaagtctgcaggactttatggacaactg

SEQ ID NO: 193702 - DNA, 571 bp, Homo sapiens
agttattagtctagtgaagactcaatatacttattaattaaattgggttccatttggggaaggaaaaggggtaaaggatgtaatgtttgtcaataatatattatttccaaagtgtgataatatattactttctctaattattacaacaaattttcaaagcagttggcattatgcctattatgcagaagatgcttctaatttcacctcgttctgggaactggcagagttaaggggttaaaccaaagacactacctccaaaaaaaaggtctttgcctgtgaaagggktgattatgtttgttcccattttcctcctacaaaggtctctcctgttctttattgactcacagagggggcctctattgctggaatcttggtcccatttgttaaaattacctctattgaggacacggcttgtattgagggaccacatttcttccctgtggagcacagtcctgccataatttagcctctccactgcataggtcttgatgacttgggttatgtaggataagggtcatgatcaatgaaaagttcagtttatgaaaagtctgcaggactttatggacaactg

SEQ ID NO: 193703 - DNA, 328 bp, Homo sapiens
ttctgttaattgcagaaaattttactggacaatactgttytaaattgtgaatgcttcaaaggcagaaatgtatgaattttttaagcctctttccaacttgtactgatatgcagtagtatttttgaataaacgatttaaaaagtcacaaaaaaaaaaaaaactggtcaattacaaacatatgctaccctcagaaaaaggaagaataactcagagggcagagctgagggcctgcagggcagaacatcaaatcaaagaggattattcccaggttttaaaacagactagagtttttctggttggatttcaaaatttcttgggaccagtgact

SEQ ID NO: 193704 - DNA, 508 bp, Homo sapiens
agtgatgttggcaattcaggtatgccaacaagaagcatacctgtttgaaagatcagaaggtaaaagtttttgacttaataaaggaaaaaaaatgtgtgtgaggttgctaagatctatgacaataacaaatctcctatttatgaaattgtgaaaaagaaaaaagaaatttatgtatagtgtacatagggttcagtactatctgyggtttcaagcatctactgggggtcttaaaacatatctcttgtggataaggagtggctactgaaataacccttacaaagattataacagtgagagagagaggtctagcatagctgactctatcttgctttcagcctcacaggctggctgtcctttctcattcctggacataggccaaggtaaccatgggaggagtttagcttatagtttatctttgaaacaagaatggtcataatccctccctaaaactgatctcctcattgtctggggactgaaactgcctttgtaagactaatgaaaggccaca

SEQ ID NO: 193705 - DNA, 626 bp, Homo sapiens
gatttctttttccttaaattggttaatgtgtgttttatagcccagaatgtgatctatattggtaaaggtttcatgtgagcttgagaagaatgtgtattctgctgctcttggataaaatactctrtaggtgtcccttatatttagttgattgatggtgtttttcagttcaactatgttcttactgattttctccatactggatcagttcatttttgatagaagttctgaggtctccaactatcacagtgaattaatctatttctctttgcagttctatcagtttttgtttcatttagtttggtgttctgttgttaggcatatatacatttaggattattatgtcttactgaataattgaaccctatatcattatgtaatagtcttctttattcttgataacttacattgctgtgaagtctgctctgtctcgaatgtatatactcttgttttcttttgattagtgttagcatgacatatttccacatctatttacttttattctatatatctttgtatttaacgtggccttcttgtagacagcacatagtagcatcttattttttgttctgttctgaccatctctgccttttaattagtgtatttaggttattgatattcaaagtgac

SEQ ID NO: 193706 - DNA, 466 bp, Homo sapiens
ttagtcactgcaggcttttactcaggttaaggtgatatgtttcattaatgaagataaggcttgagcacatgtctagagttttgcttctgagcttaaaataactatgacaataattttctatcacccaccctcaaagttgactgtccttgagttgacacaatagagttctcttgaaaacctaaagcaacgcagagaacttcagtrtaaacaacttaaggaattacctttggaagcaaagacttgtttcttatgataattttaaataaaagttcaataattatgcctgatttgtaatctataaatgtacatctctttaccttacactatttatagactttactaatttagaatttaataggccctttagatttatgaagagttaaaaaaagggtattttaatgatttagggtcttataatgtttgtgtatttaaagtagatccccatttagcagtgctccacctaata

SEQ ID NO: 193707 - DNA, 617 bp, Homo sapiens
tccttttttttgtcttagtctacacctttaagaggcttcaaaatatttctgaagtaaaagaataatagaaaattcatgtgggaattagtcactgcaggcttttactcaggttaaggtgatatgtttcattaatgaagataaggcttgagcacatgtctagagttttgcttctgagcttaaaataactatgacaataattttctatcacccaccctcaaagttgactgtccttgagttgacacaatagagttctcttgaaaacctaaagcaacgcagagaacttcagtgtaaacaacttaaggaattacctttggaagcaaagacttgtttcttatgataattttaaataaaagttcaataattatgcctgatttgtaatctataaatgtacatctytttaccttacactatttatagactttactaatttagaatttaataggccctttagatttatgaagagttaaaaaaagggtattttaatgatttagggtcttataatgtttgtgtatttaaagtagatccccatttagcagtgctccacctaatacattaaaaagccatattctatgtgttcattcaacaaatgccagacagtgactgaaccacagaactta

SEQ ID NO: 193708 - DNA, 506 bp, Homo sapiens
catgaagaattgaacaaaatttaaagttaaaaagtatcaaaatcaataattaaaagatatttcacttcaartgaaattgatcttatagatgtctagcaaataatttgagacaaattaattagtatcctcatagacaataattaaagaataatttctattcaaaaaggtaaacatttattacacagcataggcataactgagcaaaaccttggaaaaaaacaataagagattacgaaaattatcattttaatcattgaaataaaaggacagagagtggtttccagattggcatgtaaggagcttggaagctgtcactccattctaacaagtaaaaatctgaacaaactgcaaaatcaataactcttcttctaagaggtatctacacctcacagaaatgaggtcacagggtcaactattgcccccaaaactggtgagacagacaggaagttacagagaatcacaactgaccagagctggaacctcacaggaacgaggactgaagtagg

SEQ ID NO: 193709 - DNA, 506 bp, Homo sapiens
catgaagaattgaacaaaatttaaagttaaaaagtatcaaaatcaataattaaaagatatttcacttcaagtgaaattgatyttatagatgtctagcaaataatttgagacaaattaattagtatcctcatagacaataattaaagaataatttctattcaaaaaggtaaacatttattacacagcataggcataactgagcaaaaccttggaaaaaaacaataagagattacgaaaattatcattttaatcattgaaataaaaggacagagagtggtttccagattggcatgtaaggagcttggaagctgtcactccattctaacaagtaaaaatctgaacaaactgcaaaatcaataactcttcttctaagaggtatctacacctcacagaaatgaggtcacagggtcaactattgcccccaaaactggtgagacagacaggaagttacagagaatcacaactgaccagagctggaacctcacaggaacgaggactgaagtagg

SEQ ID NO: 193710 - DNA, 506 bp, Homo sapiens
catgaagaattgaacaaaatttaaagttaaaaagtatcaaaatcaataattaaaagatatttcacttcaagtgaaattgatcttatagatgtctagcaaataatttgagacaaattaattagtatcctcatagacaataattaaagaataatttctattcaaaaaggtaaacatttattacacagcataggcataactgagcaaaaccttggaaaaaaacaataagagattacgaaaattatcattttaatcattgaaataaaaggacagagagtggtttccagattggcatgtaaggagcttggaagctgtcactccattctaacaagtaaaaatctgaacaaactgcaaaatcaataactcttcttctaagaggtatctacacctcacagaaatgaggtcacagggtcaacwattgcccccaaaactggtgagacagacaggaagttacagagaatcacaactgaccagagctggaacctcacaggaacgaggactgaagtagg

SEQ ID NO: 193711 - DNA, 428 bp, Homo sapiens
tggtttgatgcttaagaatgagccaaacaacaaacgggaaactgtgtactgtctgcgtgacaaatgcaacttcatttaactgttatcatttgaaaataccaagtatactaatcttgttcattgtttttgtttcttttttgagacagagtcttgctctgtcacccaggctggagttcagtggtgagatcttggctcactgcaacctctgcctcggggttcaatcaattattgtgtctcagccaccggagtagctgggattacaggcatgcgccatgatgctcggctaagtttttttgtatttttagtacagatggggtttcgccatgttggccmggctggtcttaaactcctggcctgaagtgaaccgcctgccttggcctcccaaagtgctgggattacagtaagccactgcacccaggcaaaatata

SEQ ID NO: 193712 - DNA, 652 bp, Homo sapiens
tactcatgcatttgtggtgatactggtgtaaacaaacctattgtgctgccagtcacataaaattctagcatatataattatgtactttatataacatttgatgatgataataaacaactatgttactggtttatgtatttactatcttatacttttatcattattttaaagtatactccttctccttatwaaaaagtctaatataaaataggctcaggtaggtccttcaggaggtatctagaaggagacattgttatcacaggagatgacagctccgtatgtgttattgcccctgaagaccttccagtgggacaagatttggaggtggaagacagtaatattgatgatcctgaccctgtgtaggcttaggcaaatgtgtgtgtttatgtcttcattttcaacaaaaagttcgaaagtaaaaaaaataataataatttaaaaatagaaaaaagcttacacaataaaaatataaagaaagaataattttgtatagctatacaatgttttcaaggcaactgtaattataaaggagtcaaaaagttttaagaaattagcttataaagttaaaaagttatagtaagctaaggttaattcactattgaggaaagaaaaaattttaaataaatttagtggagcctaagtgtacagtgtt

SEQ ID NO: 193713 - DNA, 652 bp, Homo sapiens
tactcatgcatttgtggtgatactggtgtaaacaaacctattgtgctgccagtcacataaaattctagcatatataattatgtactttatataacatttgatgatgataataaacaactatgttactggtttatgtatttactatcttatacttttatcattattttaaagtatactccttctccttattaaaaagtctaatataaaataggctcaggtaggtccttcaggaggtatctagaaggagacattgttatcacaggagatgacagctccgtatgtgttattgcccctgaagaccttccagtgggacaagatttggaggtggaagacagtaatattgatgatcctgaccctgtgtaggcttaggcaaatgtgtgtgtttatgtcttcattttcaacaaaaagttcgaaagtaaaaaaaataataataatttaaaaatagaaaaaagcttacacaataaaaatataaagaaagaatawttttgtatagctatacaatgttttcaaggcaactgtaattataaaggagtcaaaaagttttaagaaattagcttataaagttaaaaagttatagtaagctaaggttaattcactattgaggaaagaaaaaattttaaataaatttagtggagcctaagtgtacagtgtt

SEQ ID NO: 193714 - DNA, 567 bp, Homo sapiens
tcatactttgatgtgtactattggctcttcttggaatgtcttcaagtatgagtgcaagggtcacctctgctttgaattttttctacattcttcttactcctatcagtactagacacactctcctttttccagagcyctcatcaataactattaatttcactgatcacattaatctctttattatctgcctctcctactgaacttcaaactttgttggggagaaactttctttagtttgtctttgtgtttctagcacatagcacagtgcctggcacatagaaagcatagttaattaatactttttaaaaaatctcttgatttaaaggtgcctacagagtttttaggttatttgcgtaattatcaggaataacttgtagacggtgacattttaaagtgcaaaaaaaaaaaaatagaaaaaagaacaagctcatatattgaggaataaaagaggccacaaatattaaagatgagtgttaacctatatctttctgtggaaaagagtcacgctaataaataattaatcacattaggccatttgctccattccgaatgaagaatgtaaatgcc

SEQ ID NO: 193715 - DNA, 567 bp, Homo sapiens
tcatactttgatgtgtactattggctcttcttggaatgtcttcaagtatgagtgcaagggtcacctctgctttgaattttttctacattcttcttactcctatcagtactagacacactctcctttttccagagctctcatcaataactattaatttcactgatcacattaatctctttattatctgcctctcctactgaacttcaaactttgttggggagaaactttctttagtttgtctttgtgtttctagcacatagcacagtgcctggcacatagaaagcatagttaattaatactttttaaaaaatctcttgatttaaaggtgcctacagagtttttaggttatttgcgtaattatcaggaataacttgtagacggtgacattttaaagtgcaaaaaaaaaaaaatagaaaaaagaacaagctcatatattgaggartaaaagaggccacaaatattaaagatgagtgttaacctatatctttctgtggaaaagagtcacgctaataaataattaatcacattaggccatttgctccattccgaatgaagaatgtaaatgcc

SEQ ID NO: 193716 - DNA, 440 bp, Homo sapiens
gggtttgctgtacagattatttcatcgcccaggtaataagaatagtatccaataggtagttttttgatcctctttctcctcacaccctccattttcaagtggctctgaggctctggcagatattgtctggagacaggaggctgtctgcataccacactcctcactgctgggcagccagtctttccttaaaaggaaaccagggtggagctttttcatgyggatcacagcacgtgagcatagtatatcccattgtaccccagaggggctgaacagagactaggatggaagacactttggcaacgaagctgaatagatcatgtgggattgtagagaggtttgaaagccatgatgaggatttgagactattttttcccagggagctttgttagggaattaaggagggccatatgatcatctaataccctgctttcaggagataa

SEQ ID NO: 193717 - DNA, 513 bp, Homo sapiens
acatatgccacagaagaaggacaggaaagaaccaaactcgcttctgtaacaccccccatccccgccccagatatagaactcactcctgagactccattcatcagggcagaaactaatcacctctcaaagatctcacctctcagaactgttgcattggagattaagtttccaacacatgaaccttgggggacacattcaaactatagcagctgctctatccctttctyccctgttgcatccacactggctgtattagtctgttctcatgctattaataaagacatacccgagactggggaattatgaaggaaagaggtttaattgactccgttccacatagctggggaggcttcacaatcatggtggaaggcaaggaggagtaagtcacatcttacatggtggcagggaagaaagagaatgagagccaagtgaaaggggtttccccttataaaaccatcagatctcatgagacttactcattaccatgaggacagtatgggggaaactgccccc

SEQ ID NO: 193718 - DNA, 448 bp, Homo sapiens
gtattaacatatggtttgattttaattttattaaaaacaaatataacatgaagaaacattattacatctgaatgttgggattatattgcttagtttattttttgtgcctttatggatttcataaaataaatatacattactttggtaatctgaaaaaacataaatgaattaagtgatactttctctctgctgaaaattatagccagtggcagagtaaygaagcaggttgatattcattatcattagctttgagtggtatattactctgccatttagcaagccacagttctcttttgaatctcaattttctcatcagtaaaatgaagataatactattcctacctacttcacagagtgttgggagggcctaagataatgcgtagtggacttaagacaagtggttgcccaacttcagcatgcacaaggaaaacccgaagtgtttgttcaa

SEQ ID NO: 193719 - DNA, 366 bp, Homo sapiens
taagacaagtggttgcccaacttcagcatgcacaaggaaaacccgaagtgtttgttcaacattttgattcccaactctttcccaacccttgagagtccaaatgtctagatattgggcccaggaattagtatgttttcccctaagctccccagtggattcagagagagtgttctgtaaaccatatcttaagaaacacagctytaaatattcaggaagaatgtttcttaactctttgtcaactccccagtaaattaatgtgactacatgcatagcacaaaatgtaatgggctattgagcaatatttttcctaccactcaaaatcagtaagtaggatccaaatctaaggataaagaaagtcttccacaa

SEQ ID NO: 193720 - DNA, 426 bp, Homo sapiens
agacacaaatgagctgttaaaaaacaatacaactgcactttactttctccctctatcagaccaatttgttcacttcaaatagggtgcagattagtagtaatcaacatataattagccaaaatgaaggtcacattgagattggatgttctaattgatcacagtctgtcctttaagtgcttgtgacacatgtctggaccatgccagcagttaacaaaaacatcgtgcatagaaatatggctcagatcagtagatgcaccgtctggaagactaaatgyaagtcttcattattagcagtcaataatgactcagctaataagagctaattctgactcagttctgattctctgtgcaccacaaagggcactttgcataaagctctgtattaccatttctatctttaattcagatagtcttaacactcagtta

SEQ ID NO: 193721 - DNA, 581 bp, Homo sapiens
ttacttacttcaaaacatttctcatcagcagattgaaagcatcttttgctgacctgcagaagtttctgccatatattgcaatctgaggaagacagtggctattattctggagccagtaacatactctaacaagatcaaaagacaatccaatracaggaaggtaaccaaattaattcctgtcatttgtagagctatctccactcttttttctaatgtgtatttgtgggacacactgtgtgtcctcagctctacacaactctcagggtcattgacagtcaggtgtacttccgatactgtatgccctcaaactctgggggattagacagccttaaacagaggcagctctttttcccaaattccagataatggcttctgtctttaaaatgtttgggctagagtttattgctaaaaaggttaaatattgtagtctctacataaaaaattactcttaaggaaacccaatacctttcactaaatttgatttattgatgaataggtttaacataatactctcattggaggtaaattaatgactgtttgaatctccataactatttcaatcacttttccagaccctgtgc

SEQ ID NO: 193722 - DNA, 581 bp, Homo sapiens
ttacttacttcaaaacatttctcatcagcagattgaaagcatcttttgctgacctgcagaagtttctgccatatattgcaatctgaggaagacagtggctattattctggagccagtaacatactctaacaagatcaaaagacaatccaataacaggaaggtaaccaaattaattcctgtcatttgtagagctatctccactcttttttctaatgtgtatttgtgggacacactgtgtgtcctcagctctacacaactctcagkgtcattgacagtcaggtgtacttccgatactgtatgccctcaaactctgggggattagacagccttaaacagaggcagctctttttcccaaattccagataatggcttctgtctttaaaatgtttgggctagagtttattgctaaaaaggttaaatattgtagtctctacataaaaaattactcttaaggaaacccaatacctttcactaaatttgatttattgatgaataggtttaacataatactctcattggaggtaaattaatgactgtttgaatctccataactatttcaatcacttttccagaccctgtgc

SEQ ID NO: 193723 - DNA, 581 bp, Homo sapiens
ttacttacttcaaaacatttctcatcagcagattgaaagcatcttttgctgacctgcagaagtttctgccatatattgcaatctgaggaagacagtggctattattctggagccagtaacatactctaacaagatcaaaagacaatccaataacaggaaggtaaccaaattaattcctgtcatttgtagagctatctccactcttttttctaatgtgtatttgtgggacacactgtgtgtcctcagctctacacaactctcagggtcattgacagtcaggtgtrcttccgatactgtatgccctcaaactctgggggattagacagccttaaacagaggcagctctttttcccaaattccagataatggcttctgtctttaaaatgtttgggctagagtttattgctaaaaaggttaaatattgtagtctctacataaaaaattactcttaaggaaacccaatacctttcactaaatttgatttattgatgaataggtttaacataatactctcattggaggtaaattaatgactgtttgaatctccataactatttcaatcacttttccagaccctgtgc

SEQ ID NO: 193724 - DNA, 590 bp, Homo sapiens
atgaacatatgacccagtatgaaaataatattacatgtaatctagctaacttttatatagcactttatcacttactttcacatgtgtcattctcctaacacatatttggtgttcaaaaactgctaatacgtagactaaataggttttacccttattctacccaatgattattgaggtttggggatattaaaggacttgttagtggtgatctttctaataagtgacagagtgtgaacttgaacaagttttcctgaatgraagatgctttcttttaaaagtcttcttcttttttttttttttttttgagacagagttttgctcttgttgcccaggctggagtgcaatgtcacgatctcagctcaccgcaacctctgccttctggttcaagtgattctcctgcctcagcctcccaagtagctggttacaggcatgcgccaccacgcccggctaattttgtatctttagtagagacggggtttctccatgttggtcaggctggtctcgaactcccgacctcaggtgaccagcctgcctcggcctcccaaagtgctgggattacaggtgtgaaccaccgcgcccagcaaaaagtg

SEQ ID NO: 193725 - DNA, 590 bp, Homo sapiens
atgaacatatgacccagtatgaaaataatattacatgtaatctagctaacttttatatagcactttatcacttactttcacatgtgtcattctcctaacacatatttggtgttcaaaaactgctaatacgtagactaaataggttttacccttattctacccaatgattattgaggtttggggatattaaaggacttgttagtggtgatctttctaataagtgacagagtgtgaacttgaacaagttttcctgaatgaaagatgctttcttttaaaagtcttcttcttttttttttttttttttgagacagagttttgctcttgttgcccaggctggagtgcaatgtcacgatctcagctcaccgcaacctctgccttcyggttcaagtgattctcctgcctcagcctcccaagtagctggttacaggcatgcgccaccacgcccggctaattttgtatctttagtagagacggggtttctccatgttggtcaggctggtctcgaactcccgacctcaggtgaccagcctgcctcggcctcccaaagtgctgggattacaggtgtgaaccaccgcgcccagcaaaaagtg

SEQ ID NO: 193726 - DNA, 428 bp, Homo sapiens
gccatcatttatttgatgtggaagtccccccactgatcgcttcgtaycaatttttgcctccttctcaccagttctctcctgaagccacggggacacctttaaaatgtcaaactagccaggcagggtggctcatgcctgtaatcccagaactttgggagaccaaagcaggcagatcgcttgagttcaggagtttgagaccagcctgggcaacatggcaaaaccttgtctctacaaaaaatacaaaaattggcctagcatggtggtgcacgtctgtggtcccagctacttgggaggctgatgcgggaggatcacttgaaaaggtcgaggctgcagtgagccgtgtttgcaccactgcactccagcctgggccacagagtgagactctgtctcaaataaataaataaataaataaataaaattatcaaact

SEQ ID NO: 193727 - DNA, 428 bp, Homo sapiens
gccatcatttatttgatgtggaagtccccccactgatcgcttcgtatcaatttttgcctccttctcaccagttctctcctgaagccacggggacacctttaaaatgtcaaactagccaggcakggtggctcatgcctgtaatcccagaactttgggagaccaaagcaggcagatcgcttgagttcaggagtttgagaccagcctgggcaacatggcaaaaccttgtctctacaaaaaatacaaaaattggcctagcatggtggtgcacgtctgtggtcccagctacttgggaggctgatgcgggaggatcacttgaaaaggtcgaggctgcagtgagccgtgtttgcaccactgcactccagcctgggccacagagtgagactctgtctcaaataaataaataaataaataaataaaattatcaaact

SEQ ID NO: 193728 - DNA, 622 bp, Homo sapiens
aggactgtttcacttttctaaaaaagggaggaaataatcacaataaaagcaagctaaagagcatttaaaactcaaatcatatgacaagagtaaattgtaaagcttaattctttttttatttcctgacttaaaatggatctaaagcatgtaactaggttcagaagccaatttattaccaatacaatcaagggaagaggaaaaatgaagaaataaagagaaatcagtcatgaaatgttctctaattaaagtatatcatctratttttttaccacctgcgagtagacaaaagaaagctatatttgaagtaaagagttctgtggataacactcaagatacactaaaataaaatggtcccaattaataaaatggtatgaaatttgattacctataacagtctttttatggaaaaaataataatgcactgtagcttagagcaatagtgtaaaatacacctgtaaaccattaagaagctttttgttacaaaactgaactgctgatgcagccctagtatcagcaaatataccattttattgaagacactaaggcctacagcaattcaacagaaaattaattagcatcagctcaccataaatctcaacagtattagctaaaatgccaattt

SEQ ID NO: 193729 - DNA, 622 bp, Homo sapiens
aggactgtttcacttttctaaaaaagggaggaaataatcacaataaaagcaagctaaagagcatttaaaactcaaatcatatgacaagagtaaattgtaaagcttaattctttttttatttcctgacttaaaatggatctaaagcatgtaactaggttcagaagccaatttattaccaatacaatcaagggaagaggaaaaatgaagaaataaagagaaatcagtcatgaaatgttctctaattaaagtatatcatctgatttttttaccacctgcgagtagacaaaagaaagctatatttgaagtaaagagttctgtggataacactcaagatacactaaaataaaatggtcccaattaataaaatggtatgaaatttgattacctataacagtctttttatggaaaaaataataatgcactgtagcttagagcaatagtgtaaaatacacctgtaaaccattaagaagcyttttgttacaaaactgaactgctgatgcagccctagtatcagcaaatataccattttattgaagacactaaggcctacagcaattcaacagaaaattaattagcatcagctcaccataaatctcaacagtattagctaaaatgccaattt

SEQ ID NO: 193730 - DNA, 587 bp, Homo sapiens
ctatatattgtgaaaagatgagatagaggtaagaacaaacagtttccagcatatggtgaattttgaatttataactaatgagcttgaatattttttcaatacaccattggaagactttagaggcttataatgtagggaataagattctccattctaagttttaggaagaaacctattataactggagaccagatgtgtacatttgaggaggtagagagggttaagtgcagttattgctaaattgggatgatgacaatgaaaattaaaaataaatggtttaagagattatcaagtagatgaactttccagaagaaattaaaatgtaaatttaattatattatgaatagtcttttctgaagtatgacaagtccaaatgaagcagaaatttccaaactgttatttactgatggtttccaaatgttcttggcttctatttcatttgtctatatgcaacaaagraaagtactaaacaggacatggggaaaccagcagttgctgccccaacacatccgtggcactgtgacacataataaaaatggctattggcagctatctggttaacttgatcaaaatagatcaagcaaacc

SEQ ID NO: 193731 - DNA, 587 bp, Homo sapiens
ctatatattgtgaaaagatgagatagaggtaagaacaaacagtttccagcatatggtgaattttgaatttataactaatgagcttgaatattttttcaatacaccattggaagactttagaggcttataatgtagggaataagattctccattctaagttttaggaagaaacctattataactggagaccagatgtgtacatttgaggaggtagagagggttaagtgcagttattgctaaattgggatgatgacaatgaaaattaaaaataaatggtttaagagattatcaagtagatgaactttccagaagaaattaaaatgtaaatttaattatattatgaatagtcttttctgaagtatgacaagtccaaatgaagcagaaatttccaaactgttatttactgatggtttccaaatgttcttggcttctatttcatttgtctatatgcaacaaaggaaagtactaaacaggacatggggaaaccagcagttgctgccccaacacatccgtggcactgtgacacatawtaaaaatggctattggcagctatctggttaacttgatcaaaatagatcaagcaaacc

SEQ ID NO: 193732 - DNA, 345 bp, Homo sapiens
ggtgtaatccagctgcatatttggaagaacttgaattttactggtgtagtctgatctacccaggacaaggaaaattcttagaaacttctcttcatgaaattgaatttgtcttgcttccaattctttctaacatctcaagcccttttgatgtggccacattaaagactgaaraaaaaacaatgaaaaccttagggtagcaaatactagaccctttcttctccaaatgagcccattcactgttgtccattctttttgtgacctctcttgtactgagcatttatcatccaaagcttgttaatatttgaaagccacttttttaccatatattagtctttaacaaaaatc

SEQ ID NO: 193733 - DNA, 345 bp, Homo sapiens
ggtgtaatccagctgcatatttggaagaacttgaattttactggtgtagtctgatctacccaggacaaggaaaattcttagaaacttctcttcatgaaattgaatttgtcttgcttccaattctttctaacatctcaagcccttttgatgtggccacattaaagactgaaaaaraaacaatgaaaaccttagggtagcaaatactagaccctttcttctccaaatgagcccattcactgttgtccattctttttgtgacctctcttgtactgagcatttatcatccaaagcttgttaatatttgaaagccacttttttaccatatattagtctttaacaaaaatc

SEQ ID NO: 193734 - DNA, 586 bp, Homo sapiens
attctgccaaacaaaaagttgtaaaatttcttggaaacatcaataacaatctgtactaattgatgaagacatttccctctgaagaaaaagtttaaatcaatattttttgaagttccagttctgaggcgtatttataaagaaaaaaaaaargctgcctaaaaggtaaggtcaaacagacactcccaagtccaaaacattttctttataaacaatatttaggactccgatacctcttgttttatttgattagatttgagaactaatttgcactaagagattatttttattatttttatattttattttatattttattattttataatgtggctttgtctctatttcttgaaccatcatctcttttaatatcttggatcctttagcactttgtggttattgaacagaagatgaagattctggtttatagaatatgagcaatacaaaaggcttatataaaaaaggtacaaaaagacctccaatttccactattcatggtcccatcacagtggattttcttcataacattacaacaacctaccctgtgtggtttcctagtgcctgatgaacaaaacatggaggagaatag

SEQ ID NO: 193735 - DNA, 434 bp, Homo sapiens
atcaataacaatctgtactaattgatgaagacatttccctctgaagaaaaagtttaaatcaatattttttgaagttccagttctgaggcgtatttataaagaaaaaaaaaaggctgcctaaaaggtaaggtcaaacagacactcccaagtccaaaacattttctttataaacaatatttaggactccgatacctcttgttttatttgattagatttgagaactaatttgcactaagagattatttttattatttttatattttattttatattttattattttataatgtggctttgtctctatttcttgaaccatcatctcttttaatakcttggatcctttagcactttgtggttattgaacagaagatgaagattctggtttatagaatatgagcaatacaaaaggcttatataaaaaaggtacaaaaaga

SEQ ID NO: 193736 - DNA, 620 bp, Homo sapiens
tattgttaatttcaattaggttgtatagcattaagagaaaatgtggagtcttaaattatagattctttttaacattatcctcattttatgctttactatataattaaattatatataacattatctaaataaaatgtgctttgtgtaacttctattttatagcccaattaactgtgctcactaggcatatattaaccattcttcaactcctgggtttgtactttcagaaaagaaagygtatttctttgttttatttttcgtttcctttaaaaatgaaaaaatatgtgttgagtactaattcaaaattaaggtgattagagtaacaatcaccacacatataatacaacttctacatttttagctatataggctaaagtatatgaatgaataaaaatgactactgaatctaagctattcaactgaacggaattgtattcatgaaaaaaatcataagtacagtttggactcaattgtctatgacggaagaatgatgagaatgcaatgcttcaatatactaaaaattagaaaatcaatgtaccatatagtttgccaatatttttctcttttacttgtcacagaattctttgtggtgaatatatctgaaacccagtattgtctta

SEQ ID NO: 193737 - DNA, 553 bp, Homo sapiens
ccccttatcaaaccatcagatcctgtgagactcattcactatctygagaacagcacaggaaagacccgcccccataattcagtcacttccccgtgggttccccccatgaaacgtggaaattgtgggagttacaattcaagatgagatttgggtggggacatagccaaaccatatcacccagcatccattagctattctgcctgatgctctcccttcctccatcccacaggccccagtgtgtgctgtttccccccatgtgtccatgtgtgctcattgttcgggagctacatgttttctaggtggatatggattctggttaactacaaaaggggcctagctcctcaaactggaaccagtgatagtcaagctcttggaggaacctcagtgggatggaacataacttgcaagtaaattatgtggacatgacttacacaaaagatgtttatgatctgagaatgtcacgtcatttgccctcttctgaacctaatattgcttccaaataactttaacacaaacctttttagatctgtgggttataacaaactcacagaaa

SEQ ID NO: 193738 - DNA, 553 bp, Homo sapiens
ccccttatcaaaccatcagatcctgtgagactcattcactatcttgagaacagcacaggaaagacccgcccccataattcagtcacttccccgtgggttccccccatgaaacgtggaaattgtgggagttacaattcaagatgagatttgggtggggacatagccaaaccatatcacccagcatccattagctattctgcctgatgctctcccttcctccatcccacaggccccagtgtgtgctgtttccccccatgtgtccatgtgtgctcattgttcgggagctacatgttttctaggtggatatggattctggttaactacaaaaggggcctagctcctcaaactggaaccagtgatagtcaagctcttggaggaacctcagtgggatggaacataacttgcaagtaaattatgtggacatgacttacmcaaaagatgtttatgatctgagaatgtcacgtcatttgccctcttctgaacctaatattgcttccaaataactttaacacaaacctttttagatctgtgggttataacaaactcacagaaa

SEQ ID NO: 193739 - DNA, 606 bp, Homo sapiens
aaataaaaaaaacaagaactaattaaacccacaattaatagaagggtggaaataataaagatcagagcagaaataaatgaaatagacactaaaaatcaacaaaattaagagtttgttttttgaaaagataaattgacatttagctagactaaataagaaaaaaagaggaaataaaatagcaggtaaaaaagaagacattacaactacagaaatataaaggatcataggagtctataacaaacaattatatgccaacaaattgaataaccctagaagaaatggataaattgctggacacatacaatctatcaagactgaatcatgaagaaataggaagtctgaatggaccaataatgagtaataaaattgaatcagtaataaaaaatctccaatcaaagaaaagccccaaacttgattgctttactgctgaattctaataaacatttaaagaggagctaataccagttctaatcaaactactccaaaaaaatcgaagaggtagaarttcttcgagactcattctaccaggccagcattattctgttgtcaaacccagacaaggatgcaacaaaaatcaaaatcagggcagtcatgggatacatgtaa

SEQ ID NO: 193740 - DNA, 498 bp, Homo sapiens
ctaaaaccatcaaacattctacaagttcttttcctctatatgtattatttacccacttattctttttattggtctctctttattctctctgatcttggagagcttctgcaagtgatcctccatcactgatttaattctttgatggtatcagctctacccttcactacacacttaacacttctcattactacttctatcattatgttacctttccatctcaacctctgtcttcctaatgactttctgcttctatttcatagaggccagaacttcatagtgctataaaagatggtaggaktctaataatttttcctgtttcctgctatggataattttaaaagattgttcttactctaccattttaggatctatcccatcttcattttagaagacttttgagagttcctccatttacattgtctactcctactaacaaaataagaattttccacacctaaaattttttaaaagtcagaatatatacatttcacttagccc

SEQ ID NO: 193741 - DNA, 413 bp, Homo sapiens
tttggtttggctatatttaaaattaaaatcaactataggtaacaatgacatctcatgagcagttttaggagayctgaatccttgtgacaaaggacttttcaaagtcctatatactgattattattcttctcagcagggaccacaggagagcctcaaacagctctgtaagagacaaaggtcttgtgaaatttaaatctgcactctgtctcttgttatgttaagcaaagaagctctgtctcttgttatgtttaccaataagaatcaagaagtttccaaaaatgtttaactgtttacatccaagttcttgtttaactcctcggaaatgggacattcaatcaacgagtttgacaaatactgtttagtccgtagtaccaatttattttagaaaaccggaatgtgacaacctggattgt

SEQ ID NO: 193742 - DNA, 413 bp, Homo sapiens
tttggtttggctatatttaaaattaaaatcaactataggtaacaatgacatctcatgagcagttttaggagacctgaatccttgtgacaaaggacttttcaaagtcctatatactgattattattcttctcagcagggaccacaggagagcctcaaacagctctgtargagacaaaggtcttgtgaaatttaaatctgcactctgtctcttgttatgttaagcaaagaagctctgtctcttgttatgtttaccaataagaatcaagaagtttccaaaaatgtttaactgtttacatccaagttcttgtttaactcctcggaaatgggacattcaatcaacgagtttgacaaatactgtttagtccgtagtaccaatttattttagaaaaccggaatgtgacaacctggattgt

SEQ ID NO: 193743 - DNA, 587 bp, Homo sapiens
tctatataagctcttcagttccagttacatatttgccaactaacaagaacaaaatkaagaaatggagggaacaccgtgagtaaaatggaaggatgggaaggagggaaagtgaggagagatgccacaatcagtctattattgttgagtgttataaaaaggatagattttaggatctaaactggatagagaagaaagtaaatttaaaacagggtcaatgaactgtgaaagaagagtgatcaatggacgaccagtctcacctacttgggagtatggtcatggtgacagccctggacaaatgagctggaaaaacagaggcttgttgcctaattcgttaagaaatcggggacatagcaagtattgttttgatattagtggctggttttcttttctctttttaattgacatacaaaaattatatatatatttgtggggcacaatgtgatgtcttgatatacatagtggaatgattagatcaaatgaattaatatatccagcatctcacacactcagcattgtgatgggaacatttaaaattccactctccagatctcaaaaacatattcctcctgtctcactgaaacttcata

SEQ ID NO: 193744 - DNA, 514 bp, Homo sapiens
tctgcaaatgtcaaaataaattccaagacatctctttccccatgtttaccatacaattccctgtgaccgtaattgaaactataaagtcasacactcttggattgacccttcatcaccactccttactacctatgggaacttgggcaagatacttaacctctcttggtctcagtttcattatatttaaaattaggattattatttgtatctcacaggttgtagtaagaatatacggaaaactggtacatggtatttaatcaatggtagctatttttataatgataacttccacattgctcatttccatcatctgcctgctaataggcactgttctattttgtgtccatctgtacatgatctctatgtctgcctttgctatggtctaaatgttattgtacccccaaaatgcatacaacaaaatcctgacctataagataatggcgttaggaggtggatatttgaaaggtgattaggtaacaggagcaggactgtcgtgagtaggattagtgccttt

SEQ ID NO: 193745 - DNA, 381 bp, Homo sapiens
ttcaccactcttattcaacatagtactgtaagttctcactggagtaatcaggcaagaaaaaaataaaagtaaaaagcatccaaattggaaaagagtaagtcaaatgatccttgttcactgatgatatatgatcttatatctagtaacatctggagactccaccaaaaaactcttagatttgataaatgaattgagtagtttcaggacatgaaactatgtacagaaatcagtggcatttctatacactaataatgatccagccaamgacaaaatccgaaggcaattccatttacactagttataaaacaaataaaatagctaggaatatatttaacaaaggaggtaaagtatctctataaggagaactataaaacactagta

SEQ ID NO: 193746 - DNA, 436 bp, Homo sapiens
gtgtttctccttgttccatgcaggaagggcttctttagcatccccacactggtaataaattattaaaggggtctcatatggacctgctgacagcactgtgataaatactcatattaattataaaaaataacagtggtcaaaaattcaaagttcaacatgactttcagaacagctttttctttttctttttttttcctgagataggtttcaaatttcaacactgaactttccgaaaaacagactgcaacttgatcctaaagattagtttagcacactctactttttacctttgtttttaaggagaaaaaactggaagaagctcatcataatcatgatcatytagtgtgagatatactcagagtccaggataggccaggtaggaaaccagggactatttcaaacactgggcatgggccatcctatgtaacatgggatg

SEQ ID NO: 193747 - DNA, 555 bp, Homo sapiens
gtgcttccatttaaagaaatgtttcattcactggagggatggggaggtctggggtggtgggtgggggtatgatttgcattcattgtggggctcttagtacctaagaagtatgatctttcatgcactgaatgcagttttgtagccatatttggtacttacgtgctaaaataacagtgtgttatttgaagagatgcatttactaatgaatcaatgaaaacattaaaacctaaggcatgttgacctccaaattataaaagtaattcaaaaccaaaagaatcatttagaaaataaagagtattgcattaaaacgccaccagaaacaaatgtgcttagtgggcttcctacaaaagaacactttgaattgctaaatctaaagacccacatacatttgttgaaatattaataaaggactgaatcaaagatgctggattggaaacactaaaagaatctcacraggcaaggtagcacaactgccattttccagtgacaccatagcacaatgttatgcaggccaataataacaagcaaatagtttttaaaaatacagctaacaat

SEQ ID NO: 193748 - DNA, 561 bp, Homo sapiens
ttactggggcagccgacagtatgagaagaatgaattgtgtacataatgtttgatttgtaccttcatgtattataatatgtcaatgtattgacaagtggtaagaaactagagccagtggggaagattagtgggaagatgttgcctgctgctgcctgtgtaaattctcacacaagtggcccttgtacctagcaattttaagtgatgtttcatttgtgattgtggaaaactagaaggagcatagcaaaagcttctttttcacttgctctttccttgggaagttctagaagaaagggacaggagagcatgctgattttaaagagggaaagtttttagtctttcagcacctcaagaatcaacctgtagtctgtcttctgyaccctaaaatgtcttagcacccatgtgcttaatgatactgagttacaaagttaaagtcaggcctggcgtaaatgtacattcatcctttcttggattgtaagacttttggggacaggatttgtgttttattttttctgaatcctgcagagtgtttaatagtaaaataatgaaaataatagtaatact

SEQ ID NO: 193749 - DNA, 306 bp, Homo sapiens
taccccttagttcacatatgtagcagacaattataatccccaatatttagtattttaggttcattgatcaggtgtttgctaaaaacctcctaaaatgataaggccatcctgaagcctactarccccagttagtccattggtgcagtctctacccaggaagctccccaaaatatctctctaggagcatccctcccacagagagcttattattactttttttttttttttttggtggagatgattatcttagtttagaagcccctcattttaactgggcctacagtttagtctgcagaaatacaaagg

SEQ ID NO: 193750 - DNA, 546 bp, Homo sapiens
tctttagaactccaaactctatttatacccacccctctcactgatgtgttacagagttgaggggaatactctcccagttctttaggactctgaaaattctaytagtacttcaatgcagtttcttatcagccagggaacaaatggtaactcaatggcaggatgacaggcctcctggggtcctattgggatagtgcagtctcccttaaccctgtaaggagcctgagggatatgtagagccctggaaatggctgagttgagcttttctgtccttgatattcttaaaaatgttggaggcacttcctgagctaaattagacattccaggaaagctaagccaacctaaagctcaaaaacaatttttaaataactctctcctcatgtgtgtctcattttattaaggcagctagaaagacccttttttgttaactgtattgggactatgaagtagattaaagcagagtccatttgtggggaggaagtagttcctgagtgctggcctattcttgggggagatactaccacaccaggtaaacctcatgtgcaaggg

SEQ ID NO: 193751 - DNA, 622 bp, Homo sapiens
cttttgttggatctcctgattttttttcaaagtcataaatctagatgtttaaaataaacattttaaatgtttgtattagtccattctcacactgctataaagaactacctgagactgggtactttatgaaaaaaaraggtttaattgactcacagttccacaggctgtacaggaagcatggctggggagtcctcaggaaacttttagacatggcagaaggcgaaggggaagcaagcaccttcttcacatagtggagtggcagagagagagggtaaaggaagtactacacactttcaagcaaccaaatttcgtaagaactcactcactatcatgagaacagcaagggggaaatctgctcccatgatctagtcacctcccacaaggccccttcctcaacgttgggaactacaactggacatgagatttgggtggggtcacagagccaaaccatatcaatgttggatctattttttaagaactatattgatcaagacaggcttgggctgaattgggctctgaagcgtaaagaaacttgtcaaatacatgataagtatctcttagtcatctttgtaaaagacagttcacttttacaaagtgaactgacctgactctgtgtctcaaa

SEQ ID NO: 193752 - DNA, 622 bp, Homo sapiens
cttttgttggatctcctgattttttttcaaagtcataaatctagatgtttaaaataaacattttaaatgtttgtattagtccattctcacactgctataaagaactacctgagactgggtactttatgaaaaaaagaggtttaattgactcacagttccacaggctgtacaggaagcatggctggggagtcctcaggaaacttttagacatggcagaaggcgaaggggaagcaagcaccttcttcacatagtggagtggcagagagagagggtaaaggaagtactacacactttcaagcaaccaaatttcgtaagaactcactcactatcatgagaacagcaagggggaaatctgctcccatgatctagtcacctcccacaaggccccttcctcaacgttgggaactacaactggacatgagatttgggtggggtcacagagccaaaccatatcaatgttggatctattttttaagaactatattgatcaagayaggcttgggctgaattgggctctgaagcgtaaagaaacttgtcaaatacatgataagtatctcttagtcatctttgtaaaagacagttcacttttacaaagtgaactgacctgactctgtgtctcaaa

SEQ ID NO: 193753 - DNA, 626 bp, Homo sapiens
gatctcctgattttttttcaaagtcataaatctagatgtttaaaataaacattttaaatgtttgtattagtccattctcacactgctataaagaactacctgagactgggtactttatgaaaaaaagaggtttaattgactcacagttccacaggctgtacaggaagcatggctggggagtcctcaggaaacttttagacatggcagaaggcgaaggggaagcaagcaccttcttcacatagtggagtggcagagagagagggtaaaggaagtactacacactttcaagcaaccaaatttcgtaagaactcactcactatcatgagaacagcaagggggaaatctgctcccatgatctagtcacctcccacaaggccccttcctcaacgttgggaactacaactggacatgagatttgggtggggtcacagagccaaaccatatcaatgttggatctattttttaagaactatattgatcaagacaggcttgggctgaattgggctctgaagcgtaaagaaacttgtcaaatacatgataartatctcttagtcatctttgtaaaagacagttcacttttacaaagtgaactgacctgactctgtgtctcaaaatgattcagtcct

SEQ ID NO: 193754 - DNA, 555 bp, Homo sapiens
cttagtcatctttgtaaaagacagttcacttttacaaagtgaactgacctgactctgtgtctcaraatgattcagtccttacactgaccaggaatggattaaaaaaaaaaaaaaaaagaagtttcactttgaattgtttaggaaagctaaaatgcatgtgtgaaaaggctggatttcaagggatggagtagaaacccagcttttccttccataatcaaattgcataatgtcgttaaatcatgtctgctttaagttctaaaatgttctcctgtctgttgggcagaaaggccacagaagcaaatcctctttttcttattgtccttgaaggacctggggggttctttctgcagaggaagagcattgagaatatttaaaaagagcttcccaagcagccctcctaattgtccaagatcttaggatataacaagatatacatttaaatatgtgtttcagcattttttacatgtcctgaaagccctaaggaattcacagttatcagacaacctgaccaccatcaaaatacaatatttaaacaccagcaaaatatctcttatc

SEQ ID NO: 193755 - DNA, 364 bp, Homo sapiens
tgcgtatgtacatacacacacatatatgatatatatccatatatatataaaaatgtacataggatatgtatatatggatgtataaaaggatatatacatacacatataagtacacatatttttatatatgtgtgttatctttatatccttatatgtgtgtgtgtgtgtgtgtgtrtatatataaggatataataacacacatatataaaaatatgtgtatatatacatatatatccttatatacatctttatatatacacatatatattttcatatatgtgtgtgggttatatataagtaacactatagataaaatactgacttgtctgctcctcccactggactctgagctctgtcataaaag

SEQ ID NO: 193756 - DNA, 525 bp, Homo sapiens
agtcaatagtagacaagcaaatacctattgactaggaattatatgctgaataatgtattcagctgctaaggctattgttataaaatatcacacactgggtagcttaaacaacttaaatttattttttcacagttctggatgctagaagtccaagatcaaggtactggaaaatttggtgtctatattgaggctgacagacacctgcctcctctctgtgtcctcacatgaacttttctctttgtatgcagagacagagagagagagagagagagagagaaggagaggagagaagaagggggaggggagagagagagagacagtttactggtgccccttcctcttcttataaagacatcattcctatcatattaagccctactcttataacctcatttaaccttaatcaccttcttaaagctrctgtctgtatatacagtcacaatgggggttagggtcccaaatatgaatgggagagggcacaatccagttcacaatagatgataaaggagagaatataaatgagac

SEQ ID NO: 193757 - DNA, 585 bp, Homo sapiens
cagttctcaaaaatgttttaaaacaaaatttaccctcagcaggtgatgataattaaggtaggaattagtgtagcttcaaagaggatataaaacataattagttctgtagttgtgaacgctataatttaaaaaaatctgcagggaaatcaatatagaaatatagagcttttttcgtgggggcrtgcaaatatacaattcatataatttatatgaatccctattattacattaacatgatttagtacttaacctataagcaccataatttaaatatgctgatagcacaaatgatatttcaagatatctctagccaccataacagaatatggaaagatctatgatctgtatttgtaacaaagtcataggaaataattcagatgcgatgtgttgccgacattcataaatgaagaaaacggcaaatttcagttagaggttagtgaaatatatgtttctttccaaactcatgaactccctccatggaaacccaagttttaagccccattcttagagtggctgtctattgtttatctgccataggaatacccgctattctactgtcccttacaccacttatctatcagatat

SEQ ID NO: 193758 - DNA, 578 bp, Homo sapiens
gttttggctttaccaatagctagacaaagcttgtgccaaggcattctaacagatctggttttgttaggtygtggctctcatgctagatcacggcaaaccctttctaaataaatggaaatctagactactgggccacacttcatgtcctgcttctacccagtgcaatttttaaagactgtaatgaatatgtgcacattttaaatttatttttatatacatatttgcccattttgagtcagaatgaatttgggaaattttaatctccgagactaggcaatgttattcatttacttaggtaaaacaattattcagttccttggaaaacataacagttgcaatattattttgctctaagtctgttactacaatctgtatatggtgaatgtgctttactgagaaacatttggggaaattgtggcacaggtgattctatctcatcagaactcaacattgttagtggctttatcaaccatgaaaaaccgatgactaatgtagtaatagtacatgtggctttttaaggaatgtagatgcattgaggaagtgatttattcatgtgtatattataaataagcagataa

SEQ ID NO: 193759 - DNA, 430 bp, Homo sapiens
taagggcccggggtttgctttggcatgcagaaggaatactggttacctgcaattctggttttcagaaggttcataactgtaatagatagcagctcccccgaatctaaatttcctggcacatgccaggcctgcgctggaaagctcagatttccttgcttcagaccacccacagggaggaggcaggaatctgtcaacagtgtggtctcctctataaagctgccttccacagagggctctggttcctcacagtgagatgcagtgcacaggccaagatgattgggttgtcataaatatagattccctgaaagcaggaattataaatgggctggggaacaagggaaaaattatcccaaagaaaaayagcataaatattctttgtattttcctgcatgtatctggctaaaatcgactctaggaatggtggtggctg

SEQ ID NO: 193760 - DNA, 410 bp, Homo sapiens
gcttcctctctaatactttgctccacaaattcctaccatatctgccacccaaaaatcaggtctcagttttcttcacccagctgctctctgggttccacttccccaggttgcaatttgaaaagtgccccaaggcaaaaagccaaggtaaacataaagcttatctcctgtgtcttcctcctctcaaggatcacagccgtggactgttgtctagtgcctaaaattgtggcttcaaatatttgtgtccatgtttatagttgtttacgtccctttctccattatagacacacttaaaaccttttttttcaatatactgcaactgaagcacrcataaatttgatcactcgccaagcttggctctatctacaaagctacttcatatttacagaaagttttctcaaatactgaggaca

SEQ ID NO: 193761 - DNA, 505 bp, Homo sapiens
gtcattttatatggtttgaatattttaaagatatttaattgcattttaaataatagtatcagccctgaagtctatttatgttaacaagaagttatgtaacattttagtcgtctttaaaacaacattgtaaatacacgtacataagcaaacatatagctaaatgttttatacataaatacaaacatttaaatactttaaaccataacagtaatagacaatatatatgtattctcttcctatgtatttttgcattgtagcttcagkatgaatatttgtctaaaaatatgttcttgagtataagtctgtctttatatgcttataatgttgtctctgacaatatttagtacttaatattggttctgagtggagcctacattaatatagcatagtacaaactaaatctacaccacttggctcagtacattccctgtacgtctcttttctactgaaaataattgaattattttggctacttaagacatttttctttgttttgatgaaagaa

SEQ ID NO: 193762 - DNA, 484 bp, Homo sapiens
gaaatagaatcatcaaggtaagcatcagcagtgtgttgattcatggccttcattggcttctgtggtaaaggacacacgtacttagaggaaaggaaatgcaacataactaggcaaaaacagaccattttattctgcggttatttcaactgatgctagttgtcgcacccaaaagagcattttcaacatttcttcaacctttccatctcctctttctatgaagttttagcttcgtgtctagtcttctttgctttgtatctaacattaattttctagtgccttatgtcttattagtggtagactaatgtcttattaatggtacattgtattagacaggataaagaaraatcttctcctcctgttcatttgtgcacactcttgtgcacactgtacacacatcctgccatggtcatcttgtcacaataccgcactaaagtcacggggcacaaagaagaccccacggtgctgtgaagtaatagagtatgcc

SEQ ID NO: 193763 - DNA, 562 bp, Homo sapiens
tggtttcccaggccattaatgtgttgcaacgaagtttgaaaaacattgtcttctagacaatggtacatattaggcattcaataaaatgttattgaatgaacagtggtatgcattttgttaatttggcctaaactccaatttgttgttagccttgttttcctttgccttctcaccttttgttcttatttaggtcaacttcttatagtgtatgcatctttagaaattgtcttaatcttttccagaacaagtccttaaaacacactctcaaagtcacacagtaaatcagtcagagcagagacaggagagaaaaggtcatcccaaggcacccaaggtgctgggaatgagaagcttaacacctgtaggacagacacttcctgtcccacctctgtaacaatgtctgtagygctagacacatgagagcagatggtgaccgggactaagtgcctggagctcacctctaaccttacagggaaccctatatactcttgctttccatgaagttctcttgcatttccgacagatgggagagagtgagccagctcattctgagaaacacaaagac

SEQ ID NO: 193764 - DNA, 622 bp, Homo sapiens
ggtgcagctgggactaggacaattactgggagctgatgggaaaatgaagggaaaactccaaaattgactatttttatttcctgtggttagggtaattcttaatttttagagcagttgataccattttttggatgatcatttgtagaggagatggatcttctgaagtattatgatcatgggaaataaatcaaggcttagcaaactgtatttccttgggggtaaataagtcaaaggccaatttagatcttaaatcgcctaagacatttcatccaatgagagccaactgcaggaatttaagagtccaaagacactgtaggaaattaccactgcaaacatgtccccaggactcttaaaggcttctgcagaaagctcattaactctgtttttaatgtttcaaatactctctcatccaagaataaatcagatagaattcaactcatgccaaacacagggtgcctgagctagctaattgtgcctaaagcctcaggggaacttggtaaatattaagcaatccactggagctggagctttcagtgggtcaaagtgcttagtccacaacacattcatttgtatggtgtttggctaaaccaaaacgtgaagytcaagggatagaagattaaaa

SEQ ID NO: 193765 - DNA, 480 bp, Homo sapiens
cctaaacttatctttcatatcactcttcgggatacactgcctagggatstggaaaccagatgaagagaccctgcttttgggcctcctctgaatggatgcaggaatgaagtggagtctgcagggatgtgctattaggtcattatagtaacacaactggttatgttatttaagcctacacattgagatggagactgggggtgtaaaactgggcaaagtcactcactttgataaggttcatggactttagaataaataattctaaagaaatacttttcttctgctgatttttcttccctggctctgtttgccagaagatacacctgaaactctgtcctcttgggggaaagggttggtaagagaaagagacctgggtagtggcttagatgagctctgctccaggccttaaagagatggctctttctgtcatcttctttgctagcttcctcctttcacagtctaattggtgagacccaatggaca

SEQ ID NO: 193766 - DNA, 480 bp, Homo sapiens
cctaaacttatctttcatatcactcttcgggatacactgcctagggatgtggaaaccagatgaagagaccctgcttttgggcctcctctgaatggatgcaggaatgaagtggagtctgcagggatgtgctattaggtcattayagtaacacaactggttatgttatttaagcctacacattgagatggagactgggggtgtaaaactgggcaaagtcactcactttgataaggttcatggactttagaataaataattctaaagaaatacttttcttctgctgatttttcttccctggctctgtttgccagaagatacacctgaaactctgtcctcttgggggaaagggttggtaagagaaagagacctgggtagtggcttagatgagctctgctccaggccttaaagagatggctctttctgtcatcttctttgctagcttcctcctttcacagtctaattggtgagacccaatggaca

SEQ ID NO: 193767 - DNA, 536 bp, Homo sapiens
ggggcagggagaggaaggagggtaatacatcgatatagattataatcctgtgttttttaaacttcaaaaatgttaaggagaattgtaaaaggaaattaaattaccttcctattctgaaataagaccctgcaggaatatatgaataaaaaatgtgtaatccattcctagtgccatcctttgagagacatttagtttcctcgagtaccatacttgaggggacacctggaatatgttccaaagaatggctctgtagaggctgaaggtttggggtgttccatgttacaaagaaaggctgaaagaattgggaatgtgcgatctggagaagaaaagactgcaggagtgattacagctatttttaagcatgagaaggactgaagcacagagcaaggaagacacttgtcctgtatttccctcaggaaaagagttttatcctttgggaaagagggataacagatccctttggcagtttgatgttatttaaaaaaaagacctctcctsagaaaatacatttattataaatgcaaaattgccacata

SEQ ID NO: 193768 - DNA, 596 bp, Homo sapiens
agcctacaaaaaacatgcctcatttatctgaaaatgctgacctgttctgtttgaggaaaatagattccatattaactactgatcatctaaaaaatgattttcttttcataagggtttaattgatttcctgtgttgaatagcagtaatattatctattawgcttttcaaaggaaaaatatgcacatttggcctttgaagtatgctcctagagcaagcacttagttctgacagcttataacttcattatggtcttcctttgggtttcttaaaacatgtacccctgagcccactgcaatcgaaggagggaaaagaacattgttttatctcatacacaaacaagggcatctaaagtaatgattttctcatatgagcccactaacgtatactgtacatgtatgtgtctggagtaggtttcttttgaaaatagaactacaattagtttctccactatgaagcaaatgctggaagtgaaaactccctccttcactaggaggcagctggggttctggctcagtctgcgaggaaagcatcccagcttccacaagatgggctgaaaagctggcttaccctagagctgtctaggagtgggcctagat

SEQ ID NO: 193769 - DNA, 490 bp, Homo sapiens
ttcagcttccactccatttccctgctcccctttagagcaaaggagttgtccttactccctgattccaatttctttcctgcctttttctctgaaagtttctccaatcagacttagttctctccccactcttcaaaactgtctgagttaagccaacccatgaggctcatattgccaaatcctatgcaattcttggaactcattttattagacctatcagcaacacttgatacagctagcttctcactacctcttcaaatcttcctccatttaccctccaggatgagacactttgctgatttttctcactgaacaatccttttcagacttttctggttcttttccatccagcctttacaagctacaagacttacgcctkggataccttttattcttcagttctctatctgtacttactcccttggtgatctcattctgtctcaatggctttaaatattattcataaggttacatttcccaaatatgtgtctct

SEQ ID NO: 193770 - DNA, 577 bp, Homo sapiens
gatgtaaatgtgatctagtgaatagaatgaaaaggagacacaagagctatttttggttgggagcaaagagaagagaacctaccagcagtaaattcctttgtgggtggaagatgagtttctaaaaaacaagcctggaggctgaagaggaatccatcaacccaaggatctgtctagggctgccccattaatcccatcagacaccaactcaggctttagatcattcaagatgaattactcatggagcccactcctgcaaggsttaggtgaagaaccaacctgtaactcaggggcagaagagctgaacaagagggatacaagatgtgtttgaaggcactgaagagactgtaattaattacacctgtatgagggaacccaatggtgatatgtgagtttggctttggaaaaatgagctgggatttttttccacgccagggatgaaaagcatggcttagaagtaccaaaaaagcccagggtatgtgactgcaggagcggggcaggaagtgaccatgaatgacactgcaaatgtagtttcaggccagatggtgaagagtcttgaaagagttgctgtggaacttgg

SEQ ID NO: 193771 - DNA, 663 bp, Homo sapiens
gttgggtaaattccaaggaataaaatttaacattcacagataggtactcaagcaaccttttgaaggccccaaagcttgtggaaatccaggcttttgcagagtttcagaatatctaccaccacttgcagacccaatgcagtgggttctacatagatatcttacacacatttccttttcatattctttcctttgccactsaataactctgttcgtcccctacccagcgccttcagctttacccactctcctttaagcagatctgagacctgcacatttaccttaaaaatcagattcctagggctacaaggacttaaaagacttcaatttaggtcttgattgatcaaaaacagaaaaagaacctgcagttggactgtatgtttgtcacagtatttttatgtgcattattttatttaaactttcattcattttatgagcaatgtaggccaagagtggctttcccagcctagagaagaagaaaatcagttctagtgaagcataacttgtatgaggccactgtcctttagtttgtaagtgagatgagagttgttctgggattctgatatcctgaaaaatgctcttccagctcttcctggtcaacttgaaagggagagaagaaaactaactttcaacaggagcgttgtcccagctttctgcaattctaga

SEQ ID NO: 193772 - DNA, 663 bp, Homo sapiens
gttgggtaaattccaaggaataaaatttaacattcacagataggtactcaagcaaccttttgaaggccccaaagcttgtggaaatccaggcttttgcagagtttcagaatatctaccaccacttgcagacccaatgcagtgggttctacatagatatcttacacacatttccttttcatattctttcctttgccactgaataactctgttcgtcccctacccagcgccttcagctttacccactctcctttaagcagatctgagacctgcacatttaccttaaaaatcagattcctagggctacaaggacttaaaagacttcaatttaggtcttgattgatcaaaaacagaaaaagaacctgcagttggactgtatgtttgtcacagtatttttatgtgcattattttatttaaactttcattcattttatgagcaatgtaggccaagagtggctttcccagcctagagaagaagaaaatcagttctagtgaagcataacttgtatgaggycactgtcctttagtttgtaagtgagatgagagttgttctgggattctgatatcctgaaaaatgctcttccagctcttcctggtcaacttgaaagggagagaagaaaactaactttcaacaggagcgttgtcccagctttctgcaattctaga

SEQ ID NO: 193773 - DNA, 429 bp, Homo sapiens
tggcatgtaagtttcttcttaaactggttggcaatgcctgtctgggtgctatttgagaaggatttggagattgtggttggattcagtagtaaagaaagattgcaattgattagtcatctctgtggtgaacatgggagatgggcagtgatgatatatatgctttatgtttatcttagaactttctagyttagtaaattgttatggtatcttggaaacaggagttgctttgtctattttatagaaggaagaaaaagaataacagatggatgttgcccatagttaagcctttcagtactcttgcgcttgtttcgtttctgttcaggttcagctagattatttgtttagtccatgcctcataaatgtttccattttctccttttttatttccattgccactgttatgtttttgaccctcattaaagaaattat

SEQ ID NO: 193774 - DNA, 563 bp, Homo sapiens
aaggcgtcactcagtagacctcaaaacaatggatgactttttgaatgataatgaaaatttactctgaggttgtgtaaaatattggagtctgaagaaactacacgcttattcaaaatctgtcactaatttattttcttaccttaaatttaycttaaccctgtggatctcaaactctgttgggtatcagaatcacctggagaacttgatagatctatgcatgcccacaccctatccaaatttcaaaaagcctggtcttcagtgttgtttaatagtgcctcaggtgatactgatacacatcaaactttgagaatcactgacttaaccttttgggatgttaatctccctaaaaagaaatatcccatttgtgtgagctttgaaggaacaaaaggatatgggcattagacataggaaattactgaagaccattattgccaaccacaggtatgtggaggtaacttgcagttctcaccaacaacagtatatccagtaggtagaattcaaggaccccagtgtcatgggagtctcatccttccttgggaatggcataggaattgcatgttgcc

SEQ ID NO: 193775 - DNA, 349 bp, Homo sapiens
aattcaataaaatccatgttagctttctgaaatactatgtccaaaaatgtccctgtaactatgataccaactcaaattcctcacacaattatattttaaatgctgtcctaggtctgaaaactcaccacctggaaaccagatttaaatatataacgggggctgatattytttataggaggtcaaacataggcacagcattgtattatcgaaactagctcaagatagaaatatgaaaaaacatttcacaacatttggaaaagccaagtaattaatatctaaagatggtaagtgatagccctaaccacatgcatgtatacttcgaagatgcaagaaggtacatttttctttg

SEQ ID NO: 193776 - DNA, 338 bp, Homo sapiens
tcccagttgccgatgatcctggcctgccttcctcagttagaaccttctaggcatgcacacaggtggggtggtctgtgtttttcttttcctttttccatttacatgggattttagacacactgtgtagytggaagactggaagatttctatttgtaaatgaaattcgacctgaatgagaaagagtcgtaactctacagggatcatccatcaatgcctaagttccttccatccccagtttgaacacatctgttatgcatgagactccttaagctgcacaaaaagcacacactcatttcatgcgatggacagccggaagcagtgcatcctgcaggctagga

SEQ ID NO: 193777 - DNA, 561 bp, Homo sapiens
gaattccttgtgttataagcacactttgagtggatttaaatttgaagccaactaactcgaagctcaattacatgtcagatttgtctcaagccttttatttctgtttgtgtccgaaaagactgattccatggtcatasgtttgaggttatttgttcttaagaacaatatctgggttatctgtcattgggacaggcagccaatgttggcggtgcagaaatattctgggccccactgcagggttacagttcatagacccggtctctctagaagatatatgagtcctcccaccattgttcagtgttcagtccaggagtttaacagaagaaatcaatgaggtgcaactgtgcaaaataggggtcaaatatgtacagctgtggctccacatgtatcagatagctctgtttgatttttctctagacagtattcattatcaaaatgggcttcaaaagctttttattaaaaacaaattgatgttaattaattcagattacagtggccattagtcagctatctcattgcagaaaactgaatcaaatcaagactgttccctgcaatctctga

SEQ ID NO: 193778 - DNA, 453 bp, Homo sapiens
ttctaattattttaatgtcttttaatacagggttgagaatgtacacagcagtttatattacaaactaattatcctaagtattccaataaggattcttatattcttatgttattttaatcagccttcttagtaaatgttaatatttataaattctaagagttattacaatgtttatgtagtcttcaatcatatcaaatccaagaaactatgatcttgacactattttttcaattattacacgttgcaatttgtattatcttctgaagtattgtcctttccagaacacacagtatattaaatgacaccacagttagtatgcagtcatgtgctgtataacawcattttggtcaccagtggatcacaaatacagtggtgataccataagattataatggaggtgaaaaatttctatcacttagtggcatcatggcattataaccatcataacatcgt

SEQ ID NO: 193779 - DNA, 547 bp, Homo sapiens
agaaaattaatggtagaataggcttaggcaggttcttcaggaggtgttccagaagaaggaattgttatcatagatgacagctccatgtgtgttattgcccctgatgaccttgtagtgggacaagatgcggaggtggataacagtgatattgatgatcctgaccctgtgcagacctaggcyaatgtgtgtattagtgtcttagtttttaattaaaaagtttaaagtaaaaaaagaagaaaaaacttatagaataagcatattaagacagaaaatatttttgtacatctgtgaaatgagtttgtgttttaaaccaagtgttattacaatagagtcaaaaagttaaaaaaagtttataaagtagttatagtaaactaagattaatttatgattgaaaaaagaaaaatattttttatatacttggtgtatcctaattgtacagtgataaattctatagcagtgtacaggctttcacattcattcaccactcactgactcaccccgagcaacttccagtcctgcaaactctattcatggtgaatgccctgta

SEQ ID NO: 193780 - DNA, 573 bp, Homo sapiens
caccccgagcaacttccagtcctgcaaactctattcatggtgaatgccctgtacaggtgtaccattttttatcttttatactatattttgagtgtgtcttttccatatttagacacacacaaaactgatcattgtgttataattgcctacataattgagcacagtgacatgttgtacaggtttttaccctagaagctgtaggctgtaccatctagcctaggctatacaatctaggtttgtgtaagtacactctgtaactttctcagagtgacaaaattgcctaatgatgcattgctcagaatgtattctcaccattagcaatttgtgtttctaaaattaacatgartccttctaggttattattatgacaaatgttgtccactgaattctaatagacaatttaaaacagcattttaagaagctattcattctttctagtttctaaaaaattatacttagaaattgttgaaaattttagaatttttatattattagataattatccttattgttatcaacaaaatattttcacataataaactaatttaagatatttaatcattaaacaagctt

SEQ ID NO: 193781 - DNA, 437 bp, Homo sapiens
aattcatctgccacctacagaaataactcttgttaacttggtcacgtttttaccaaattaagtggtaagrtaagttagatattcagtaaattctgacctaatatggggcaaaaataacaataaaatatttattctattacatgctattttatttccttctgatgctttgttcatcctcctaaccactgtctctctgcctctctctgtctctatttttctcagtttctgttactttatctctcaatctctctttcaatttttttttgtttgttttttccctcttccagaaaatccaggaaagaaatataaaaccaccgatggtcatcagacctgtaatgtgactctgaaacaaaacgctgtaacagtttatgtgcaagtggagaaatacacagctcaaatctggagagccagctctggaggccatgccagaatgaaat

SEQ ID NO: 193782 - DNA, 364 bp, Homo sapiens
ctatttacaataaaaactattcgataataggtgaaaaactgtaaggtcacatttagacaaggcaaaattgatctttagagaagactccaaaaccgaggtcacctaatttcatagaacatgatatgccagagaataaattcacgtaggaaattgcaaaatacacaaggagaaagaaccaacagatgcaacgtttgggagtatttaagccccaagtactacagaataaaataatcttaagagatttaaaaataagtatatggaactgaaactttcagagctaataaagagatattgaagttataagacaaacaaaaaraagtatgagaaaaatgcagtaatgtaccatctataaacaagtagtata

SEQ ID NO: 193783 - DNA, 640 bp, Homo sapiens
cgcatgtttttaaatggcatatgagccttcataattcatatattctgcaattcttggtttttacycaacattatctgtagagtccatatgttgactacaacagtttattcattctattctttatagacattgggtagttttcagtgtgggtctatttcaaataaaaagaaggtacagtgacatacttgaatagatgtttatgggcttgcattttccctggatagaagagatagacttggataaaagtgatacatgcttttactattactgtatcttttttcctgtcattgtccaggtatgagagttctcactgctataaactctttcttatgtccgatgtcagacttttttaatttttgccaattttatgattataaaatagacttctatctttaatttttattttcatgatttatgaaattgaaaatcttttaaattattttaataacatgacttcttaaagttttcttgaatgtattgcttatgttatttacctgtttatatttatacgttcatttttttactttttaaattcatttaaatattctttatattcttcttttgtcagtttattcattgaaagtatttttcctcagactggcttgcttttcctttttttttgtttttgttttttctcaca

SEQ ID NO: 193784 - DNA, 640 bp, Homo sapiens
cgcatgtttttaaatggcatatgagccttcataattcatatattctgcaattcttggtttttacccaacattatctgtagagtccatatgttgactacaacagtttattcattctattctttatagacattgggtagttttcagtgtgggtctatttcaaataaaaagaaggtacagtgacatacttgaatagatgtttatgggcttgcattttccctggatagaagagatagacttggataaaagtgatacatgcttttactattaytgtatcttttttcctgtcattgtccaggtatgagagttctcactgctataaactctttcttatgtccgatgtcagacttttttaatttttgccaattttatgattataaaatagacttctatctttaatttttattttcatgatttatgaaattgaaaatcttttaaattattttaataacatgacttcttaaagttttcttgaatgtattgcttatgttatttacctgtttatatttatacgttcatttttttactttttaaattcatttaaatattctttatattcttcttttgtcagtttattcattgaaagtatttttcctcagactggcttgcttttcctttttttttgtttttgttttttctcaca

SEQ ID NO: 193785 - DNA, 640 bp, Homo sapiens
cgcatgtttttaaatggcatatgagccttcataattcatatattctgcaattcttggtttttacccaacattatctgtagagtccatatgttgactacaacagtttattcattctattctttatagacattgggtagttttcagtgtgggtctatttcaaataaaaagaaggtacagtgacatacttgaatagatgtttatgggcttgcattttccctggatagaagagatagacttggataaaagtgatacatgcttttactattactgtatcttttttcctgtcattgtccaggtatgagagttctcactgctataaactctttcttatgtccgatgtcagacttttttaatttttgccaattttatgattataaaatagacttctatctttaatttttattttcatgatttatgaaattgaaaatcttttaaattattttaataacatgacttcttaaagttttcttgaatgtattgcttatrttatttacctgtttatatttatacgttcatttttttactttttaaattcatttaaatattctttatattcttcttttgtcagtttattcattgaaagtatttttcctcagactggcttgcttttcctttttttttgtttttgttttttctcaca

SEQ ID NO: 193786 - DNA, 514 bp, Homo sapiens
aagtatgctgacaaattcccaccatattaatactaagtaaaaatatcaatggtatatgaagaaatacttattaatattgtaaaatccagttcttggtaatttccagtctaattcacttagttaataacattttctagtgttttccatattcagcaagtacaatataatgcctaaatatatcctttagagtagtttaaggagtattgcttagagtaatccaaaattgtgtgttctccacctgctaagagtctaaatttkcacactagttttattgtaattttcaatcaatagagtctgccttgctaaaataaaataaaataaaataaacatatatatatatatgtatatttgaagtccataaaataaaatgctttagttcccttgaatcataagaaccattataaaaacaaaaaaaattaaggaaagaaattaaatacactttttgaaaatgctaatttactaacttgagaaatgcttcttaacaaaagtaattgtgcctccctagattgtcaat

SEQ ID NO: 193787 - DNA, 634 bp, Homo sapiens
gctttgtggaataccatgatggtggataaggcattctgcgagtccacagatattagttttggcagaagaatggcatgcaagataggcaaacccatatttggagtaagtgtctattccagtgaggacaaacctctgccctttccatgatggaagargtccaatataatcaacctgccaccaggtagctggctgatcaccctgaggaatggtgccttacagagggctcagcattggtttctgctgctgccaaattgggcattcagcagtggctgtagccaggtcagccttggtgagtggaaatccatgttgttgagcccatgcataacctccatccctgccaccgtggccactttgttcctgggcctattgggcaatgacggaggtggctggggaaagaggctgaggagtatccatagaatggatcatcatatccacttgattattaaaatcctcctctgctgaggtcacccattggtgagcactcacatgggaaacaaatatcttcacagtttttgaccactcagtgaggtccacccacatacctcttccccagatttctttgtcaccaattttctaatcatgctttgtctaagtccctgacaatccagccaaaccactggctatgacccatgaa

SEQ ID NO: 193788 - DNA, 571 bp, Homo sapiens
actgctaaaaatctggacaagaattttgatgaggtgttacaataatactgtaactcaatctgtccttaaattgttctcataaacttctacagatagggtcacaattgctgtcacttactttttatgatgtttcgcttggaggaaggaaaagcagcttctgtgcttattaagagtttgtagccactgggtctggaaygtattaacagtactctcataacctttaggacacctttattctaaaatacaacacagagatactggtaaaatatatactagcccatcaggagtaatatttataaaaattcgtgcacaagatcaaaagcaatttaattgaacaaatgtcaagcaagcaatgacaatgggtaatgcactgtgttcagagttctgtaggacattggaaatgtaaaactgtggtccttaaaattaatctgtgatgaactaggaagcctgacatgtgcctaattaatcataataaatgtaggaataattgtcttcgataacacagataactaaaggtactttgtacttgctgtgacttcaacctgaattgtgcttcccaactactagaaaa

SEQ ID NO: 193789 - DNA, 432 bp, Homo sapiens
taaattagcattaaattcgtgttttaccatacttcaatttgttttcattgtgtttttggcttatctgtracagcttttcaatcagcttcctttaattgaggacttgacttggtttctaacttttagcatttaaataatctttctgccatcttttcattaagaagtcattattatagactgaaaacagtcttataaatacaccatctcccttcagatttaaggaaatttgtctccttgatttttctttactttgcctttacttttagcatttacatgagttctatatttttcttccagaaacaaaactctgccaattatatattgaaagctcataagcacaaaatgcactgtcaaccaatactggtttgtaggtatttgatgccaatgatacaatattgtttactacactaaaaagtcatttatgacatagaa

SEQ ID NO: 193790 - DNA, 546 bp, Homo sapiens
tggactcactctaactcttcactttgcactgagattaggcttcccaaacggaaaccaagttttcctcaggtcagacacttctacttgtaaagcaatgtctccaagctctaatgcacctgtgagtgacttgaaggttctaataaaatatagattttgattaagtagttctgaggtaggtcctgcaatactgcacttcttataggtcagtactgttggtctatggatctcattttgagtagcaagatagaagtgcataaaayattactgttgacttagaagctaattccatcagtttcttaagaagtttattgcctaatatccagcataccataacttaacaattgtgaatacatttattatcttttttttccaatagatttgcttagatttctattttaagagtcagatctggtccagtgatttcacaggaactgcaaatagtttggagttattcttttggaatgctgtttttccctaaggcattcttccttttgtatcatttggtaagggaaactttcatacaataggatttagcaaacgaattag

SEQ ID NO: 193791 - DNA, 563 bp, Homo sapiens
gcattatatacaggtagttattaacgaaatacaaaggaattaatgtctctaagcttagtgctcaaaaatagagagttaaagcaagtttattggcctctgaactaatgacatcatggggctggataattctttgttgtggggactatcctgtgcattgtggaatgtttagcagactcctggctggcataccagtagatcccagtagcatgcctcctctacccagttgcgacaaccaaaaatgtctccagaccttgctaaatgtcccctaaggcacataattgctccagattgagaaccacaggataaaagagctgttaaacacaaagatagctaccatatatatgtgtgtgtatatatgtgtgtgtgtgtgtgtgtgtatatgtgtgtgcatatatatgtatgtgtgtatatatatacacacacatagcgaagtataagcaagtggaagaaatcctaaaccagaaaagtcttggtaatttcrtaatacaaagaaaaatgttttttcttttctatcaatgcatcaggtaatagaaaccacaccttatttcaactctaaaagtcct

SEQ ID NO: 193792 - DNA, 584 bp, Homo sapiens
cactctcagaagtagagataaccagttctttgtcacagcagataaaaagctcacagccaagaataccagagcactatttttgtcaggtgcatatcaacatttatgttgtcaccctgggccagcaaaacatttaacagatstgctgtatctatgttttctaagtatttgatacctatttttatatttcctcaatgatggccccccccaagaaaagccacaaattggcaaagaacgtgaagtaaaaacatattctcttaaagccaaatacataatgtccggattttgtgtttatgtgtatgtgtttaatctagtttaaggtgactcaattttcaaaatcaattcacactaaactttgctatcttccttcataccaagcactaaaacattaaaatgttttaaaatatatttaaaacatgaaatgttttaaatgttttaatgttttaaaatatatttaaatgaaagtttgcataaacttttcctgaaacaatgattcaaaacaccaacaaccatcatgcgaaaaaatattgtcaagttatatttgatggaggtttactggttatgggacatagtatgtatttctgtta

SEQ ID NO: 193793 - DNA, 584 bp, Homo sapiens
cactctcagaagtagagataaccagttctttgtcacagcagataaaaagctcacagccaagaataccagagcactatttttgtcaggtgcatatcaacatttatgttgtcaccctgggccagcaaaacatttaacagatgtgctgtatctatgttttctaagtatttgatacctatttttatatttcctcaatgatggccccccccaagaaaagccacaaattggcaaagaaygtgaagtaaaaacatattctcttaaagccaaatacataatgtccggattttgtgtttatgtgtatgtgtttaatctagtttaaggtgactcaattttcaaaatcaattcacactaaactttgctatcttccttcataccaagcactaaaacattaaaatgttttaaaatatatttaaaacatgaaatgttttaaatgttttaatgttttaaaatatatttaaatgaaagtttgcataaacttttcctgaaacaatgattcaaaacaccaacaaccatcatgcgaaaaaatattgtcaagttatatttgatggaggtttactggttatgggacatagtatgtatttctgtta

SEQ ID NO: 193794 - DNA, 584 bp, Homo sapiens
cactctcagaagtagagataaccagttctttgtcacagcagataaaaagctcacagccaagaataccagagcactatttttgtcaggtgcatatcaacatttatgttgtcaccctgggccagcaaaacatttaacagatgtgctgtatctatgttttctaagtatttgatacctatttttatatttcctcaatgatggccccccccaagaaaagccacaaattggcaaagaacgtgaagtaaaaacatattctcttaaagccaaatacataatgtccrgattttgtgtttatgtgtatgtgtttaatctagtttaaggtgactcaattttcaaaatcaattcacactaaactttgctatcttccttcataccaagcactaaaacattaaaatgttttaaaatatatttaaaacatgaaatgttttaaatgttttaatgttttaaaatatatttaaatgaaagtttgcataaacttttcctgaaacaatgattcaaaacaccaacaaccatcatgcgaaaaaatattgtcaagttatatttgatggaggtttactggttatgggacatagtatgtatttctgtta

SEQ ID NO: 193795 - DNA, 435 bp, Homo sapiens
ctatgttttctaagtatttgatacctatttttatatttcctcaatgatggccccccccaagaaaagccacaaattggcaaagaacgtgaagtaaaaacatattctcttaaagccaaatacataatgtccggattttgtgtttatgtgtatgtgtttaatctagtttaaggtgactcaattttcaaaatcaattcacactaaactttgctatcttccttcataccaagcactaaaacattaaaatgttttaaaatatatttaaaacatgaaatgttttaaatgttttaatgttttaaaatatatttaaatgaaagtttgcataaacttttcctgaaacaatgattcaaaacaccaacaaccatcatgygaaaaaatattgtcaagttatatttgatggaggtttactggttatgggacatagtatgtatttctgtt

SEQ ID NO: 193796 - DNA, 517 bp, Homo sapiens
aaacactggggcctccttgaaaatggagggtaggaggagggagaggatcagaaaagtacctatcaggtactatcctttgtacctgggtgatgaaataatctgtacatcaacatcccaggatgtgagtataccaatgtaacaaacctgcacatgcacccctgaacctaaaataaaagttaaaaaaaaaaaaacactttattttagattgaaaaaaacaaagaaaagaaaaagaaataatcaagacaaaaatcttgaccaacagaccagaagttcttctttggggaaataaaactaataatttattacaaaatgtttatcaagctagttgaaatttcaagtttaaaaaatmttaatgtttgatatattcttagattcattaaatgaagtatgcaaatgtatatgtgtaaaaccatagaaataaaatgaatttaatgaactggccaggtgtggtggctcatgcctgtaatcccagcactttgggaggctgagacgggaggatcacaggaggtcaggagct

SEQ ID NO: 193797 - DNA, 520 bp, Homo sapiens
tatctatacttcatagtacataaactccattgcacttagcactttgtgtataattttaccttgtattttataactaagactactacatctttggtaaaattatcaagaataataacagtttattattatctagaccctagggttttgtactacagtattgggctataagcaaactatcagctccataataaactttagaatgagcttctgcatggtgaggggaaacatggtttgaagtaaactatgaagtttgctccctttggaaataaaagggtcttgatctacaaacctactgaagtctttaaatagtcattgyatgttgagtggcacttggcccagctttggcttaacagctatggaaaaatccaggggagataagaaatcaccgtgctaaaactttaaggcatagcaaggctgctcgttattgtaatagttatgagcctatttttcccagcttctccataaaagacattttaaaaccttgcatatcattgcaatatgctcataaataaacaggtag

SEQ ID NO: 193798 - DNA, 598 bp, Homo sapiens
ttaacttgcctcatctcttccctgagttattcagatggtcggtgaggatagtaatggcagccacaaactctggaatcatctcgaagtctgatgatacagtgttacatggtattttctaccacataaccaaagctctggaatatatgaaggggtatctagtgcttacatttgtaacatcgaagggttatatgtaccccttcatatgtcccagagctttggtgtggtagaaaagttatttataacatacaaatcckatactacagtatagagagttacatattatgcattcttaaagcacaatattttagaaattttatactgcatttagctaaatacttcatttgtagatagagtagccttcataggataattaatattttctaaaaacttccactaactgacatttttacaatggattttgttatttaagtttcagtttacatcaattataagtgtgagaattcacatggaatctgtataaaagaagagaaaattttctttttaccttcctattacatgtagaactttttcttctactgagactaaaatattcctttaataaattcagaaatcattggttaatttcaaatttctcacc

SEQ ID NO: 193799 - DNA, 413 bp, Homo sapiens
gtaaaaaagaagagctacagtagagttagttatatactggagttagttatatatatataccagaattagttrtacacttggcatgttctgagatatataaaatatatgaaaatcaaattatgtaaatgaaaatgctgtcacaaaataagcccatgtaggcagaataaatttattaatttttcaaaagttgtaagacctctagttgatatcttttatttaccttatttgatagtaaagttatattgtgttggtattctctggaatgtttattggctcttttcaatttctaatttgtgtcagtaataacatttatgcataacaaaaatatgttatagactggtttgtaaatggaagaacactttggtatataacattgattactatatggtatccaaattggatatatttacctt

SEQ ID NO: 193800 - DNA, 413 bp, Homo sapiens
gtaaaaaagaagagctacagtagagttagttatatactggagttagttatatatatataccagaattagttgtacacttggcatgttctgagatatataaaatatatgaaaatcaaattatgtaaatgaaaatgctgtcacaaaataagcccatgtaggcagaataaatttattmatttttcaaaagttgtaagacctctagttgatatcttttatttaccttatttgatagtaaagttatattgtgttggtattctctggaatgtttattggctcttttcaatttctaatttgtgtcagtaataacatttatgcataacaaaaatatgttatagactggtttgtaaatggaagaacactttggtatataacattgattactatatggtatccaaattggatatatttacctt

SEQ ID NO: 193801 - DNA, 636 bp, Homo sapiens
tgtcaaatttccttttcttacatgtagcattgaattaaaaaaatgtaacaataaaagatgtttaaatatataagtatctgtccaaaattaataattcccgttatcatttttagttttctatttttcttcactcatctctacttattctttcttttttaattttaaattttcttttatctgaatcttaccattgcttgttttaatgcctgtatattatggcatttgtttactttaatccatcagagattttgtcatttaaccttgctctctagcagtctagtaataaatgattttgtaaagtaatacactacctttttttattttgtgggaacagggtctcactctgatgcctggctggactgcagtgtaagatcatagctcaaagcagcctggaaaytgtgggctcaagaaatcctcctgcctcagcctcacaatagctaggattacaggcatgagccactgcatctggctggaatatactaatttcgtttaaagcaagttatctcttttgcttcacgtcttgtaaaatcattgtgaaaaacatttcatgtcttcaaatgtttttaggatccagggaaaatttagaaaaaaaatgagaaattaaagggagatatagagagaaatagtaaattaatg

SEQ ID NO: 193802 - DNA, 636 bp, Homo sapiens
tgtcaaatttccttttcttacatgtagcattgaattaaaaaaatgtaacaataaaagatgtttaaatatataagtatctgtccaaaattaataattcccgttatcatttttagttttctatttttcttcactcatctctacttattctttcttttttaattttaaattttcttttatctgaatcttaccattgcttgttttaatgcctgtatattatggcatttgtttactttaatccatcagagattttgtcatttaaccttgctctctagcagtctagtaataaatgattttgtaaagtaatacactacctttttttattttgtgggaacagggtctcactctgatgcctggctggactgcagtgtaagatcatagctcaaagcagcctggaaattgkgggctcaagaaatcctcctgcctcagcctcacaatagctaggattacaggcatgagccactgcatctggctggaatatactaatttcgtttaaagcaagttatctcttttgcttcacgtcttgtaaaatcattgtgaaaaacatttcatgtcttcaaatgtttttaggatccagggaaaatttagaaaaaaaatgagaaattaaagggagatatagagagaaatagtaaattaatg

SEQ ID NO: 193803 - DNA, 607 bp, Homo sapiens
aacgatgtgtgtgtgtgtacaccacacatatgccttcatttctttcaaagtcatcattttccacatatcattcatgtttttagaaggcttcaagttttaatgagtcagtctaactgaaaatattacaaatataaacacacacacacacacatatttgtaaagaggaagaactagagtgccataagacaagtgagataaatgacaagaatggcgtcagttccattcttggcctccagaaaggttcctattagtttgtcctcggctttggaaactaacaaataaagaaaattgcataygatttggggcaagaaaattttctttagtcactgatttactctgtggcacaatcatagcagatagtgcccaaattgaaaggggaaagtaagaggtctgttaatttttatattactgagaagatttttagaaataaatatggggaaaaaagagtgaagaagaagtgatattctctttccagattaataaatacatgattaaagatatttgtcaatgattatgtaataagtctgggttagaggaatatattgacctgcaacataaacctaactataggtcagatagcctcatatgaatcaattattaacttact

SEQ ID NO: 193804 - DNA, 576 bp, Homo sapiens
cacttcataaaagatctgaaagaggtgaggatatattttcacaattaatcatgcacatctgtttcccttagatcttcaaagttaygaacatacttcaattatttttgtatgctggctcctagggagcagccacacttagtaagtacataatgttggatgaaatatctcaggtttctgaacttaaatttcagttgtctttcaactacacaaggctttgtacttcagaaaattgatgaatttgaatacaacactgatgtaaatcaacagcacaactagaacttctacactctcgctgctcaacaacttaatttaataggggtatgattttctaaatgttgtagcccaacacatgcaggaaacatgaagaaaactgaatcctaagaatatcgagggacaagcccaaaaccatacacagtgtgaactaataaacctcctaaacctacatttcacaacatgaaaaataatgaagtgctaagtaatacatttgatcaatttttgtctctatttctgattttattcccatagtatggccaattttatattcagcactactaccatcaccaataggagcctgag

SEQ ID NO: 193805 - DNA, 576 bp, Homo sapiens
cacttcataaaagatctgaaagaggtgaggatatattttcacaattaatcatgcacatctgtttcccttagatcttcaaagttacgaacatacttcaaytatttttgtatgctggctcctagggagcagccacacttagtaagtacataatgttggatgaaatatctcaggtttctgaacttaaatttcagttgtctttcaactacacaaggctttgtacttcagaaaattgatgaatttgaatacaacactgatgtaaatcaacagcacaactagaacttctacactctcgctgctcaacaacttaatttaataggggtatgattttctaaatgttgtagcccaacacatgcaggaaacatgaagaaaactgaatcctaagaatatcgagggacaagcccaaaaccatacacagtgtgaactaataaacctcctaaacctacatttcacaacatgaaaaataatgaagtgctaagtaatacatttgatcaatttttgtctctatttctgattttattcccatagtatggccaattttatattcagcactactaccatcaccaataggagcctgag

SEQ ID NO: 193806 - DNA, 549 bp, Homo sapiens
aaatattatctttgataagtcagtaaatctgactcttccataatcaatgatatataacctgatatccttgtttcggtttatacatatgctttatatttgttcatctacaaatcatgataatgtttttaagctaactagcacacaaagaactacaaaagttcaaatttacaaggactcacaaataactgtaagtacatactgaggagaacaggtttctattgaggaaaactgtctttagtattcagaaagtgtaccttgaagggaaaaccctccacratcagaccagctaaaacaacaatgacaattaagcatatagtagaaaaatatcaaatatcaacaatgacaattaggaatatagcagataaataccttcaaatctaagaaaatgccctaaaaattttgatatgtcattcagtggcagtgaggcaaagaagacagggatcaccatctcaaggtgctagcctccgaaaaaatataaatttgattggcaaaatctgctcagagaccatttacatgctattcatggaataagaatgaagttgaaacaag

SEQ ID NO: 193807 - DNA, 525 bp, Homo sapiens
ccagctaaaacaacaatgacaattaagcatatagtagaaaaatatcaaatatcaacaatgacaattaggaatatagcagataaataccttcaaatctaagaaaatgccctaaaaattttgatatgtcattcagtggcagtgaggcaaagaagacagggatcaccatctcaaggtgctagcctccgaaaaaatataaatttgattggcaaaatctgctcagagaccatttacrtgctattcatggaataagaatgaagttgaaacaagtattagagtatgttctgtgatgcttactactgcatatctgatataaattatgattatattaaaaagcttggcagttttcactgtgtggcctggtttgtgcaagataggattccaaatattgttttctccaaaaactacagtgaattaaaatgacaattttaatatcattggactgcttacacatcacagaggatataaaaattatggggaaaaaagaacagtgactttaatcagctccatgttacaaattacaccttt

SEQ ID NO: 193808 - DNA, 598 bp, Homo sapiens
tttacatgctattcatggaataagaatgaagttgaaacaagtattagagtatgttctgtgatgcttactactgcatatctgatataaattatgattatattaaaaagcttggcagttttcactgtgtggcctggtttgtgcaagataggattccaaatattgttttctccaaaaactacagtgaattaaaatgacaattttaatatcattggactgcttacacatcacagaggatataaaaattatggggaaaaaagaacagtgactttaatcagctccatgttacaaattacacctttcagtgttaaggatacaaaaattccttaaagggaaaccagatcataaaacacatgaattcagggagatctatggctaccacaaaccacactgtccagctattggaaagtattgtcataaaaaagtttgattgttaatagatttctgaaatatttccaggtgattttctcattaataatatattttatcccataagacaatcaccaataaaacataagatacataacttagagcacttgatactacattttgaataatattatcaaraatagcttttaaaaatgtctctgcttttaactct

SEQ ID NO: 193809 - DNA, 321 bp, Homo sapiens
cagcagcaataagatattatcaatagtggtaactattttgcatatgcrttagtgttaaagaaggcaaaacaaagattggttaatatcagttcactttcttttctaaatgagaatggagggggagtaaaagttaaataaatgtccattaccaacgggaatggaggaaacaggaggaggccacgtgctgaccagaaaatggggaggggtctgatggaggctgaggttcccacagttctgcagatggaggctgagcccgagggaaacccctcagcccctatcagcccccaggtccttgaggcctgggaaaaccagagggacaac

SEQ ID NO: 193810 - DNA, 321 bp, Homo sapiens
cagcagcaataagatattatcaatagtggtaactattttgcatatgcattagtgttaaagaaggcaaaacaargattggttaatatcagttcactttcttttctaaatgagaatggagggggagtaaaagttaaataaatgtccattaccaacgggaatggaggaaacaggaggaggccacgtgctgaccagaaaatggggaggggtctgatggaggctgaggttcccacagttctgcagatggaggctgagcccgagggaaacccctcagcccctatcagcccccaggtccttgaggcctgggaaaaccagagggacaac

SEQ ID NO: 193811 - DNA, 459 bp, Homo sapiens
gaattcgaggtggcagtgaattatgatcacaccactgtaccccaccctggtcaacagagcaagagcccatctaaaaaaaaaaaaaaaaggatatcaagctcccgtcctggaatgtgagcttgtaacccagaatctcccagctctcarcctggcttttctgaccatccctccaggtcagcaggactgtcacccaagctcatgctatatacatcctattccaatgaatgtggttcttttctgtctggattattgtttccaattatttgtccatctctatggaaacatttcttaaaaatactgtacatgaacttgaatttttgaccggcaaggtctctggaacaggtctgtgagcatggagccggtttacaccgagggaggaggcaccaccctcccatccacccctcggtgacagactaagcagtggaaacacatagcctctgggtggggcaggaagcctga

SEQ ID NO: 193812 - DNA, 558 bp, Homo sapiens
caaatttaaagtttaataaactagaataaatttttgcaacagatatatttggtatattcaatatatatagaaatcaataaaatactaagacctcagtagatttcttaaaaagatataaagaaatcacacaaaaaagaactacttgcagaaaagaactaacattgaagtttaaaattcaagtttaaaaaatctgagacacaatttttcaagtatcaagtaaagattttcataacttgtaatactttcttcgggcaaaggaagagttgtatatattgtagatataaacatatgttcgttcaagctttctagaaaacattggcagcaaatgccaaatgctttaagacttcctatagcctttgaggtagtgattaaatttctttaggttctgctatagagaaataaccagagatacagggaaaatatgtttatccacaaacatgtttcagyagagagtaattcataatattatttgtaaaaggaaaccagtgctttcaaggacagatgtatataaaacaacttcaaataaatgaagagggaaatattgtttgaactgaccaa

SEQ ID NO: 193813 - DNA, 507 bp, Homo sapiens
gtagtgaagcttttaattctttaagaaattgccaaactactgtccaaggtgtctgagctaatttacattcctactgacagtgtatatgtgtccccttttctctgcagcctcaccaaaaactgttattttttgactttttaataatatccactctgactggtgtgagatggtatctcattgtggttttgattcatattttctgatgatttcagtgatggrgaggattttttcatgtttgttggctgtatgtaagaagtgtttgttcatgtgctttgactgctttttaatgggattattcatttattgcttgttgatttgttttgtttcttataaattcttgatattagatgctagttagatgccagtttgtgaatattttctccaactgtataggttatgtgtttacttcattgatagtttctcttactgtgcaaagctctttcatttaattagggccccttatcaattttgtttttgttacaattgcttttgggaacttagccataa

SEQ ID NO: 193814 - DNA, 483 bp, Homo sapiens
ttcgtaatgatatttacaataaaaaataaatagaaagtgctttatcaaggaaacatagtgttttatttagaaggagaatatgatcattattgagcactggatatgcatatggtacttaatcaggtgaactatatgtgttctcatttaattaatataatagaacaacactgaaaaattatttgttaaattttgttaatgcaaaaaataatcctgaatattcacttattaagtactatgctcaactctttttatcattttactagtattctgaagatctaagttctaaatgttcattgggacatccgcactctttgccttatacatcagttaggattgctttactgctgagtaaccaaggcccagaataacagtggtttaaataagacaagagttaaaatctttctcacagagaagtctggagaggggcagcgcagggatgarttctcctgcttggaggctttaggatcccaaggttctaccagc

SEQ ID NO: 193815 - DNA, 395 bp, Homo sapiens
agttttaggacatttaaagactttctgacttttttccrtcagtattactttgattctttttgggaaatgtcaatattcaaaatcttgtgcctgaagcgcattttaaatttgcctttggataatccagcactgtttaaaatgtactttaatcactttcactccagaacgtcttttcctccctgatctttttactaagtatttcaaaaagagcatgaaaattttattactaagaaaaacggatatatttcccaaatagaaaacaaaatgtaaatgtctatattgaatatattaggtattcccactgggcccctgaggcaaagattgaacgttcaagaagtgaaaacggaatcaaaatgtgtctcaaagcagaatgacacagtttaaggaaccagggt

SEQ ID NO: 193816 - DNA, 588 bp, Homo sapiens
ttaaggtggtccttaaatctcatccatgtccttgtataaataatcccctcttttgagtgtgggtggaacgtattactttcttctagccagtagaatatggcaaaagtgatcagatgtcattaccgtgattattacgatttatacaagattttgtcttgaaagtggacatactagtgagaccctcccccaaccctttgtgagttttgaagaagcaagctgtcctgaataacttgccgtattggagttcacatggcaaaaaactgtggatgacccttaggaactaagagctgtttccagaaataaactgaagccctcagttctgcagccacaaggaaatcaattctgccaaaacccaagggaacttggaagtgtatccttctccagccaagcttctatggagactmcagccacagacagaacttaaactgcaggctagtaaaaccctaaagaagagaaccagctaagttgtgcccagattttcaacccacagaaattataaaataataaatgcatgtttttttaagtggctaaacttgtgaccacttgttacatggcaatataaagcaaatacaaagtagaacattatga

SEQ ID NO: 193817 - DNA, 580 bp, Homo sapiens
tctagataacacagagaagcattctaccagaaaaatttaataaagaaattaaaataattagaaaaaaatcaagcagaaactctggagttgaaaaacgyaactgacatactgaagagtgcaccagagtcttttaaaaacattaatcaaacagaagaaatagttagtgagcttcaagacaagctatttgacagtacacagtcagaggagaccaaagaaaagcaaataaaaaacaatgaagcacatctgcagaatgcagcaaatagcctcaacagggcaaatctatgagttattggccttaaagaggaggtagagaaagagataggggtagaaagtttatttagaaagatagcaagagagaacatctcaaacctagggaaagacatcaatatccaagtacaacaaggttatagaacaccaagtagatttaatccaaagaagaccacctcaaggcatttaataatcaagctcccaaatatcaaggataaagaaaggattctaaaagcagcaagagaaaagaaataagtaacataaaatggagctccaatgcatctggcagcagacttttcagtgccagaagaga

SEQ ID NO: 193818 - DNA, 573 bp, Homo sapiens
aaatttaaactttgttgtgcttaatataaatgttaaaatttttagagtacagagtttatcattttcaaaccaatagaggagaaaaatggaaccaaaacaaaacctaaaagtaaaacttaatccaagaaaaggcaaaagagagagagagaaagaaaatgtagaataaataggaaaagatagctctaagcaaaataaaaataaaaaaagtctaagcaaaagaatagtaattgtatatacttaaactacttagttaaaacacaagactgactaaattttcaaaatcaactgcacactgtttacaaaagatgcattaagataaagaayaaagaaagtgagagagggaaaagaataatacataccattcaagagaaatctgatgtggctatatcactgcagcaaaatttactttgggacaaacaaattaacagagatacagaaaatcacttactaataaaagattccatttcctaggacattaaaacaatactaagcttatatgcaccaaataagattgcttcaaattatattaagcaagtttttaaaaaatgattgcacctcaagaagaaactgaca

SEQ ID NO: 193819 - DNA, 573 bp, Homo sapiens
aaatttaaactttgttgtgcttaatataaatgttaaaatttttagagtacagagtttatcattttcaaaccaatagaggagaaaaatggaaccaaaacaaaacctaaaagtaaaacttaatccaagaaaaggcaaaagagagagagagaaagaaaatgtagaataaataggaaaagatagctctaagcaaaataaaaataaaaaaagtctaagcaaaagaatagtaattgtatatacttaaactacttagttaaaacacaagactgactaaattttcaaaatcaactgcacactgtttacaaaagatgcattaagataaagaataaagaaagtgagagaggraaaagaataatacataccattcaagagaaatctgatgtggctatatcactgcagcaaaatttactttgggacaaacaaattaacagagatacagaaaatcacttactaataaaagattccatttcctaggacattaaaacaatactaagcttatatgcaccaaataagattgcttcaaattatattaagcaagtttttaaaaaatgattgcacctcaagaagaaactgaca

SEQ ID NO: 193820 - DNA, 573 bp, Homo sapiens
aaatttaaactttgttgtgcttaatataaatgttaaaatttttagagtacagagtttatcattttcaaaccaatagaggagaaaaatggaaccaaaacaaaacctaaaagtaaaacttaatccaagaaaaggcaaaagagagagagagaaagaaaatgtagaataaataggaaaagatagctctaagcaaaataaaaataaaaaaagtctaagcaaaagaatagtaattgtatatacttaaactacttagttaaaacacaagactgactaaattttcaaaatcaactgcacactgtttacaaaagatgcattaagataaagaataaagaaagtgagagagggaaaagaataatacataccattcaagagaaatctgatgtggctatatcactgcagcaaaatttactttrggacaaacaaattaacagagatacagaaaatcacttactaataaaagattccatttcctaggacattaaaacaatactaagcttatatgcaccaaataagattgcttcaaattatattaagcaagtttttaaaaaatgattgcacctcaagaagaaactgaca

SEQ ID NO: 193821 - DNA, 597 bp, Homo sapiens
actgccacattggagattaaatttcaacttgagttttggaagggacattcactccatagcattctcacccttgcctccgaaaacttgagtttttctcacatacaaatacattcattccatccccatagcccaaagtcttaacttgtttcagtattaactcaaaagttcaaagcccaaagtgtcatctgtgagcctgtgaaatcaaaacaagttattttcttgtaagatacaagggtgagagaagcataggatacagattcctgctccraaagagagaaataggcaaaaaatggtaacaagacctatgaaattccaaaactcaagagagtagacattgggttctaaaactccagaataatctctgactccatgtctgacctcttctgcatactggtgtgggagttaagtccccaaggccttgggcagccctggactctggcttgactgggcttagcccacccagctctcccaagctgatgttgcccactctgcaacagctccagccccacatttctgcaggcattgctctaatgggggctctctgtggtggctccatccctgtgacaagtctttgtctgggccttcaggttttcagtg

SEQ ID NO: 193822 - DNA, 594 bp, Homo sapiens
gcaaagacaaagaattttagaaagagcaagtgaaaagtgttaagtcaaaaataacaaaatatctatcagacttacagcagatttctcagatttccctcttacaggccaggatataatgagattatatactcaaagtgctgaaagaaaataactkccagtgaagactaatatacccagcaaagctatccttcagaaatgaaagagaaataaagtctcttccagacgagaaaaaactgaaggaaatcatcaccactaggttggttctgcaagaaatgcctaaagagagtcctacctctacaagtgaaagtacaagaactactattatgataatacagtaaaatataaaactcactgacagagcaggtatacaaatgagaaagaaataaatcaaattatattactaccaaaaaacccacaaagataaataataagagagaaataaagaaacaaatgatgcacaaaacaatcagaaataatcaacaaaatgacaggagttaagtctgtacctatcactaagaacctttaacgtaaacagtttatatcccccaattaagagatatagactggcttaataaataaacaatcaagacctaa

SEQ ID NO: 193823 - DNA, 594 bp, Homo sapiens
gcaaagacaaagaattttagaaagagcaagtgaaaagtgttaagtcaaaaataacaaaatatctatcagacttacagcagatttctcagatttccctcttacaggccaggatataatgagattatatactcaaagtgctgaaagaaaataacttccagtgargactaatatacccagcaaagctatccttcagaaatgaaagagaaataaagtctcttccagacgagaaaaaactgaaggaaatcatcaccactaggttggttctgcaagaaatgcctaaagagagtcctacctctacaagtgaaagtacaagaactactattatgataatacagtaaaatataaaactcactgacagagcaggtatacaaatgagaaagaaataaatcaaattatattactaccaaaaaacccacaaagataaataataagagagaaataaagaaacaaatgatgcacaaaacaatcagaaataatcaacaaaatgacaggagttaagtctgtacctatcactaagaacctttaacgtaaacagtttatatcccccaattaagagatatagactggcttaataaataaacaatcaagacctaa

SEQ ID NO: 193824 - DNA, 609 bp, Homo sapiens
aagaatcgcattatctgactttatactacagtgttataataacaaatatggcatggtactggcataaaaacagacacatagatcagtggaacagaatggagaacccagagataaatctacacatatacaataagctgcttttaggcaaaggtgccaagaacacacattgggaaaaggacagtctcttcaataaatgatgctggaaaaactggatattcatatgcaaaagaatgaaactagactcttatttctcrtcatatataaaaatcaaatcaaagttgattaagacttaaatagaagacctcaaactatgaaactgctaaaagaaaacattggggaaactctccaggacatcagggcagacaaagatttcttgaataatactccacaagcacaagcaaccaaagcaaaaatgggtgaatgggatcatgtcaagttaaaaaacttcttcaaaacaaatgaaacaatcagcaaagtgaagagacaaccaacagaatgggagaaaatatttgcagactacccatctgaaaagggactcataaccagaatatgtaagtagctcaaacaactctataaaaaaatccccacagctctataggattaaaaaag

SEQ ID NO: 193825 - DNA, 611 bp, Homo sapiens
ttttaggtatacagtagctcttgtttatctgcagttttactttctgcagtttcagttacccatggacaacggctgtccaaaaatattaaatggggaattacagaaataattcataagttttaaattgcaccctttctgagtagcatgatgaaatcttgctccattctacttcacctgcctggatgttgaatcatatctttgtccagcttatccayactgtacacacaatacactggttagtcatcaacgtcatctgcatcagatgtccaatcatggacatcatcatggttcaatgatgcagaattacctggagcaggtgatttttcttctccttgggtcacgggggcatatccctcatgaatgactagctccatccccttggtgatgagtgagttcttgcctgagttcacatgagatctgattgtttaaaagagtatggcacctcccccacatctctctttctcccactttccccatgtgacaccaccaactctcctttcctttccaccatgtctgtagcttctgaggccctcagaataagcaggtgctgcttccatgcttgtacagcctgcagaaccatgagccaactaaaccccttttctttataaatt

SEQ ID NO: 193826 - DNA, 383 bp, Homo sapiens
caacttcatatttggtggaaaactgtccgttacactgatatcctaggagccagtatagctagtaacttcaaggacattaggagctctgactccactcagttttttggccagaaaaaggtagaatcagtttacatacttgaataatctattctgtctaaggtttggccatcaatagttttccrttttgttttctggaagtttttttttttttaaataaaaatgccgtagtctttgcaaaaacatataacctcaacaaaaaataatttgctttttaaaacatcaaaattcagtttattataaccagttatattatctatagttagcttagtatcatattttgttaacagcttttattcacagatttggttatggaactgtgggtg

SEQ ID NO: 193827 - DNA, 605 bp, Homo sapiens
ctcagtgagggttccagtgggaccagccctctgcatgtgctcccagccccatggcctgcagaggaggaaacgcaggtctcctgggaatgggctgttctaaggcaaccctcagcccctgcctcaggcatttcttctgcagcagccccagccccatccccagataagtgaccctcacatgcagcccctggcacagcagcctcccaggaggacccaggagtttacttggtggrtcctgcaccttgggaagccccgtggccccctttaaagatctccacctgatctatatccacctgtggtcctcacctgatcttacacagtcatctgtttgctgactggccccttttctcactggttcctagagggcagaggctgagcattcctcatgtttgcgaccccagaggctgcacaataccaggacatagtaggtgaaaaataattgttcaccgaatgtataatgagtggatgaattaatggactatctactcatagcccacctctctgaggagacctggagcccccagggtctgcattcctggagacaaattctgtcattccctcctctgtctcctctaccctggtaagggtgggcatgggcatggaatgga

SEQ ID NO: 193828 - DNA, 569 bp, Homo sapiens
accatttaaaaataacgattctggttggtcttgtctcctgggaaaacttaaaagagaagagttatgtctttgctattgtgaatagtgctgcaataaacatacatatgcatgtgtctttatgatagaatgatttatattccttacaacctaaatgcccatcattggtagactgagaaaatgtggtacatacatatacaccatggaatactatgcagccataaaaaagaatgagatyatgtcttttgcaggaacatggatggagctggagtccattatccttagcaaactaacacaaaactgaaaaccaaataccacatgtcctcactcataagtgggagctaaatggtgagaacacatggacacatagaggggaacaacagatgctggggcctattggagggtggatggtgggaggagggagaagatcaagaaaaataacttatgggtaataggcttattacctgggtaacaaaatgtacaagaaaccccaataacacaagtttacttatgtttaataaacccgcatgtgtactcctgaagaaaaaagaaaagggtcaaaaggacaagtt

SEQ ID NO: 193829 - DNA, 570 bp, Homo sapiens
aattctctggctataattctcaggctatgattgctgtatgggttaatctaccattacacctaggcagcgaagcaccaagaaattttccagtgaatcatccaagccacattcatagtctttcctgctcacccccacctagtgtagcagcagtgcatcttctcctaatgatcagtgttaattattcctgccaacagagtgactcctttcattatagagtgacttcttgtctcttggcataaggaggataaagtgaccaggtcacagccatagctttatgtttagtgagactcttactgtgacccctgataaatgtctttcctccctagaatctagtacctccagtcagatggagcctgaagttacagggacagaatgcataaattcccaagtgaataacttgaggcgtagtcacaggtccactatcattccacayattggttcctgttaggggctcagcattgtgtaatggacattgacttggggcatggttgggcattctacaactggtaggtcaatacagcccactgcctgcctgtttttgtacatcctgcaaagaatatttgtacattt

SEQ ID NO: 193830 - DNA, 400 bp, Homo sapiens
gtggttctgctgcagcccacctgtcaggaggtgggagatgttctaggatagtatggggtacagaggggagaacctgctgaactggattctggctgaactaagctaaacaagagacagcactttagaccctgaacgtcagaggtggaggaagggaccatctatctctctcagctcctgtctgtargtcatcgggccccacttaattgcggccaccactctcattgaagaatcttaatctaaaaactctggaaacctcccaagagccagaaagaaacagcctccactggagatgacaaaacaagattaacctttttggacattgatatgattccctttagcctcattttgttattgttagattcttttttttttttttaacagtctacaaattgttctaaac

SEQ ID NO: 193831 - DNA, 400 bp, Homo sapiens
gtggttctgctgcagcccacctgtcaggaggtgggagatgttctaggatagtatggggtacagaggggagaacctgctgaactggattctggctgaactaagctaaacaagagacagcactttagaccctgaacgtcagaggtggaggaagggaccatctatctctctcagctcctgtctgtaggtcatcgggccccacttaattgcgrccaccactctcattgaagaatcttaatctaaaaactctggaaacctcccaagagccagaaagaaacagcctccactggagatgacaaaacaagattaacctttttggacattgatatgattccctttagcctcattttgttattgttagattcttttttttttttttaacagtctacaaattgttctaaac

SEQ ID NO: 193832 - DNA, 400 bp, Homo sapiens
gtggttctgctgcagcccacctgtcaggaggtgggagatgttctaggatagtatggggtacagaggggagaacctgctgaactggattctggctgaactaagctaaacaagagacagcactttagaccctgaacgtcagaggtggaggaagggaccatctatctctctcagctcctgtctgtaggtcatcgggccccacttaattgcggccaccactctcattgaagaatcttaatctaaaaactctggaaacctcccaagagccagaaagaaacagcctccactggagatgacaaaacaagattaayctttttggacattgatatgattccctttagcctcattttgttattgttagattcttttttttttttttaacagtctacaaattgttctaaac

SEQ ID NO: 193833 - DNA, 584 bp, Homo sapiens
agacttaagcagacgcattactaagaagacatayggataccaactaagcacatgaaaagatgctcatcaccattagccattagagaaacgagttagtaaacttttccagtaaaggattagatacatagtaaacatttccagcttcatgggctgagaggcaaaattgatgatatgacgtgtatacgtagttatatagcaagagagaaaacaagtttccacaaatttttattgatgaaattaaagatataataaaaattgagtaagttttgtaatacaggtggactaatgaaaacaatgcatttttgggggtgggcagaaggaccatgtttagtttaatcagtgctgaaagttagtgtttcctgtcatcaaaatcagttgcacatgcttatatgtgatgaattttatatatttcatctttgcaatgtctttttacacgtataggcactatgtaaaatatttggtactgccaaatactaatatgaatctgatatggtttggatctgtatccccaccaaatctcatgttgaactgtaattctcaatgttggaggtggggcctggtgggaagtgattggagcatggggg

SEQ ID NO: 193834 - DNA, 584 bp, Homo sapiens
agacttaagcagacgcattactaagaagacatacggataccaactaagcacatgaaaagatgctcatcaccattagccattagagaaacgagttagtaaacttttccagtaaaggattagatacatagtaaacatttccagcttcatgggctgagaggcaaaattgatgatatgacgtgtatacgtagttatatagcaagagagaaaacaagtttccacaaatttttattgatgaaattaaagatataataaaaattgagtaagttttgtaatacaggtggactaatgaaaacaatgcatttttgggggtgggcagaaggaccatgtttagtttaatcagtgctgaaagttagtgtttcctgtcatcaaaatcagttgcacatgcttatatgtgatgaattttatatatttcatctttgcaaygtctttttacacgtataggcactatgtaaaatatttggtactgccaaatactaatatgaatctgatatggtttggatctgtatccccaccaaatctcatgttgaactgtaattctcaatgttggaggtggggcctggtgggaagtgattggagcatggggg

SEQ ID NO: 193835 - DNA, 541 bp, Homo sapiens
acttcatttcttaaaagccatctaaagattcccaccacccttctggggygagtcctttaactcccttttgcctttgccattttgcttttttggtaattgccctaatgtttaattaagcatcagtaagactcatgggggacagaaaatttgatgagacttctcaaacagtaatatcacgcaaggtgcccatgtaaaatgggcccttttaccctcaatatttaccatgacctggataatagacatattcagggggagaatatcccagtcatcataaatccagtcccacatggtttacatataaagcatatcagctgcttcatctggggtgctccactcagcattttatagggagagttgagcagttcccttctcagggcaaacagaccttatagtggcaattatccagtccactaggctgctcattctcttgggaataacctcttgtgcaattggatcacatatatccctcagggattgtttaatagtgagctgtgggtcctacatcaacccaatcatgctctttcattctgtagcatttgaa

SEQ ID NO: 193836 - DNA, 595 bp, Homo sapiens
tattagttcttagaaatacactgctataaaaaatgcaaagactaaaagaatgaatatcayttgaggtcaaaatataaaacaaaatggacatgcctgtttacatgaataaaattaagatgtttatatcaacttttacaatgtaaaaaggataacaaatgaagtattccagaaaaggagatgtactcaacttaggaatattgtgaaaatgcaaatagtgttgataattcattaggctttataaccagaaatagaaggcaatacacttatttgaactctgcatcaatgaagtaaaatctttattccttctattcactttatttacacatctaaaatcagcacattttgttctatgtatttattcaaataagattaaggcttatcctctttcaacactttttgagtcaaaaactgattttgtatgtctactgcttccctgtgtaagcggcatcattttcaagtgtagaaataaaccctttttttccctcttgaagaagcaataatttgccagggctatcataatcctcaagaactgtaagacagtacattaaacaatagaaatgtactgtcttttaattcttttatatatatatttatt

SEQ ID NO: 193837 - DNA, 595 bp, Homo sapiens
tattagttcttagaaatacactgctataaaaaatgcaaagactaaaagaatgaatatcacttgaggtcaaaatataaaacaaaatggacatgcctgtttacatgaataaaattaagatgtttatatcaacttttacaatgtaaaaaggataacaaatgaagtattccagaaaaggagatgtactcaacttaggaatattgtgaaaatgcaaatagtgttgataattcattaggctttataaccagaaatagaaggcaatacacttatttgaactctgcatcaatgaagtaaaatctttattccttctattcactttatttacacatctaaaatcagcacattttgttctatgtatttattcaaataagattaaggcttatcctctttcaacactttttgagtcaaaaactgattttgtatgtctactgcttccctgtgtaagyggcatcattttcaagtgtagaaataaaccctttttttccctcttgaagaagcaataatttgccagggctatcataatcctcaagaactgtaagacagtacattaaacaatagaaatgtactgtcttttaattcttttatatatatatttatt

SEQ ID NO: 193838 - DNA, 555 bp, Homo sapiens
agataaagtacaaaatgctgcatttggttcctcctgcaatcaagaaagagacacaagccctagtgggtctattgagattttggaggaaacacattcttcatttgtgtgtgttactctggctcatttatctagtgacctgaaaggctgtcagttttgagtgggatccagaacaggagaaggctctgcaacaggtccaggctactgtgcaagctgctctgccacttgggtcatataacccaacagatccaatggtgtttgaggtgtcagtggcagatgggaatgctatttggagcctttkgcaggacccaacaggtaaatcacagtagaggcctctaggatttttgagaaagtccctgccatattctgcagataactactctccttttgagagacaacacttggcctgttactggactttggtggaaactgaatgcttgactatgggtcctcaagtcaccatgtgacttgaactgcctatcatgaactgggtgctttctgacccatctagccataaagtgggtggtgcacagcagcatttcatcatcaaatggaagt

SEQ ID NO: 193839 - DNA, 555 bp, Homo sapiens
agataaagtacaaaatgctgcatttggttcctcctgcaatcaagaaagagacacaagccctagtgggtctattgagattttggaggaaacacattcttcatttgtgtgtgttactctggctcatttatctagtgacctgaaaggctgtcagttttgagtgggatccagaacaggagaaggctctgcaacaggtccaggctactgtgcaagctgctctgccacttgggtcatataacccaacagatccaatggtgtttgaggtgtcagtggcagatgggaatgctatttggagcctttggcaggacccaacaggtaaatcacagtagaggcctctaggatttttgagaaagtccctgccatattctgcagataactactctccttttgagagacaacacttggcctgttactggactttggtggaaactgaatgcttgactatgggtcytcaagtcaccatgtgacttgaactgcctatcatgaactgggtgctttctgacccatctagccataaagtgggtggtgcacagcagcatttcatcatcaaatggaagt

SEQ ID NO: 193840 - DNA, 429 bp, Homo sapiens
ttggtgaaacatatgccttctggaccttcccagttgggatgagtaggtctaaagtgactaagcctctccaccatcccagtgtccctaagcctttcgattccttcctctacattaaaccaagggagatcaggcattttgagctcactcacagtgggtcatcttttgatccatattgtagctaaccaagcaaatgaactattaaaagatttgttaagtccctgagctacagtattaagtacagaatccctgctaagtgggtccatatcaaytaattcaacctgatttaactttatgttccttccactattaccccacacccttaatatccatttccatacctgttctctagatttctgcttacataaatttgaaaactcaaacagttcttttagagtgtagtgcttctcctcatgagtcacactctgaccc

SEQ ID NO: 193841 - DNA, 546 bp, Homo sapiens
ggaagtatctagcacgggagaaaggtgaaggccagaagactcagcaagtctgctcattccaccttcttctgcttgttttctctagccatgctggtagttgagaggatggtgttcacccagattaatggtgggcctgcctctcccagttcactgactcaaatgttaatctactctagcaacgctctcacagacacacccagaaacaatactttgcattcttcaatccaaacaagttgacaatattaaccatcacattattyatcacataatatttttctcagaatatgatatctaaaatcataattctaaagcatcaagtgtgtattatgtatattttttgtaaaataatcttactgcttggtaattcctttttatcttttccagttattttaaaaaatattttcaacgattttaatgaaatcttccaaatatcctgtttcaggatagtccatgtacatattttaacaatgctgaggacacaattaacttgaatatatgcatggccctggtcatgtgcctatttaaagtaagtgtaagtagcattga

SEQ ID NO: 193842 - DNA, 630 bp, Homo sapiens
tatcaatccttggatgattcaactactctcactctgcatcctcctcaccacagaacactaaacattcttgaatttggactgaaagtaagctagcattttacatcacaacggatttattcaacatgtgcatcaatcctttgatatttgcttggtcttatctgtcctagaccgagtaggaacaatgacaaacttcaatacttttgttttaaccctttggtgctattatttcacctgtcactttcggcatccaatcttctctttctctttcctctctctctctctctctcwcacacacacacacacacatagcagattgtagttgaaatcctactattccattaaaactataaactcaattgcatttacatcctccctcttgttaggaaggaataaatgcggcttctaattttatacctttgcccatgttctgaatcatcacaccacactgttatgaactaggctctcaattaagtttccattatttttaatgtgatttctcgtgtatatattcatttttgattttaaggaaattctcaaacatacacaaattagggagattagtacactgaactccagtatttaatttcttaagatatttgccatattttctttatcgtttttctttttttc

SEQ ID NO: 193843 - DNA, 582 bp, Homo sapiens
tattacactgagtttagaatcaaatttcctgttcagtaaattaaaaatcttatcaatgatagataagagttgggaaataggatgctgagtaaaagtgaaaataaaatagagcaattagtattctccaacccactaaggtggatgaatgaaaactgttaccaggtagctcttggcacatgaatgatgratggtgaatttacagtgctaaaataaatccaactgataatttacctattagacattctgctctcaatactgttttgaatcaagacatttactaatacaagcatcagattctgagttcattaatgatacatggacacatctgcctttcatcatgtgattcatctctaaaggcaaattcaggtagaatgctggccttatttcacagaagagctttagttcagagaacagtttagttcagagctaagagcttatcttaaaggtatccgagtcctttgataggcttctggcatttgttgcttgctctcatgcctttcatgctgaagcttttgtctcctttgagggtttgttctaaagagcaggcatagagaaacacttctatgtacctggctatgccaa

SEQ ID NO: 193844 - DNA, 630 bp, Homo sapiens
tttgaaaccaggtcttcatagttccatagtttgagctgtgacttccagtttagatgaacgctcaaacaaacattttgagagagtgtttgtgttttattgattaaaaagagactggataatactacttttgtagaaatatgaagacaatatgaagtttggattaatgactcctgggaacttggtacttttaaaatcctttgattcatagacagtgaagatttttagttacttagttgaattttttattctatataaaaacaggtttgggctgaaaaacctgctagctccaagtataaatctgggaggacagggctgagtcagagctcactgaccttctcaaagaggcttgagacatctttgtgccagctgcactactggaagagggagtcctcaggggaaaaacacccactctgttttattaacggaaaatttgtcattctggttttaactgaaggattaaaaaggagacatgagaatacttcagacatgaatttctgtatgatttgggctcccaggcttcagagattcctctcaggcagacaaagaaggcaagccatggtcaagagctctggcctttattttgtttccctgtgaarcattttgtgagacacagatgcaagagtaagtggc

SEQ ID NO: 193845 - DNA, 544 bp, Homo sapiens
gaacatgacaaggatgcccattttcaccactgttattcaatatagtattagaagtcctagctacagcaatcagacaagagaaagatataaagggattccaaactagaaaaaaagtcatcaaattatccctgtctgcagatgatatgatcttagttggacaaacctgaagacgctacaagaaaactattagaactgataaacgaattcagtaatgttgcagaatagaaaatcaacatacaaaaatcagtagcatttctatatgccaacaatgaacaaactgaaaaagaaatttaaaaagtagtttcatttatagtagccacagataaaataaatacctaggaattaatcaaagaagtggaaattttctacaataaaaactataagacagttatgaaagaaattgawgaggacaccaaaaatggaaagatattccatgttcatgattggaaggttcgatactgttaaaatgtccatgctacccaaagcaatctaaagattcaatgtgatccctatcaaaatatcaaagacagtcttcagataatat

SEQ ID NO: 193846 - DNA, 525 bp, Homo sapiens
aaatatccagtagctttaaaaawttttttttaaattttgacattttgcagtttgactatggttttctagtcatggatgtatcattatttattttgttactcagagttactttgatcttagggctcattattttcttcagtttgggagaaagtttagcaacaacctcactaaatattgcttctttgtcattccctcaactattctttctatcaatctcctctcttaactgctctttcattttatttatctttttttttgtgctgctttctgggtcattccttccaatttattatttttcctatagagtttattcagtctattgtagcagtagattgtgtttccaaagataaacacaacactgtctcccgtcccacgtgctttttgcaatgagactttaccaatcctgccagggagagattgagtctgtgttccttccccatgaacctaggtcagtcctatatgcagctgaccaatagactgtggcacagtgacactgtgcccatgccagttcttcaagaggccttg

SEQ ID NO: 193847 - DNA, 391 bp, Homo sapiens
ctataaataataattgagttgattaaattacagctacatatattttgtgctgtaattaatatgtgttctctattcttcctcctgtggggaaaagcaaaggagtgtttttaattcttatataaacatgattcccacctctcacttatgactataaaaaaaagtatgctgtcaggaatagtcagaatgttcccagtattcaaatttggttttgatttataaaagcctccttttgacatctgtgtttcctagttatttccgtgctttttccmtgtcatggtctcatcatcctttttaatatcttgaaaaagtagtcaatatttacttctatttcctcttttctatttcaaaactttgtaatccaaattttgtccccactattttctcaaatcac

SEQ ID NO: 193848 - DNA, 528 bp, Homo sapiens
atttcttgagttcaggtgtatggtctcaaattttatgtttctataacctggtccagtgctgtaaaaggtgagcagcaatttcttggatgtggaacaaattctttagacttgtcctggtatcacctcttctcagaacctgacagaattatcctgaattgagaggattaatagtgtcacatgtgttagaacagcactctctagacttggtcacttgctcatgtcacctgtaytatcaccttctgtctgtagtagagctctactacagtctatgctcattgtagcagcaaggatgatcctttaaaagatctgcaatgactctccattttactcagagtaaaagctacagtccctacattgtcctatagatagagtgaccctgtgttccagttttcagggacagccctggtttatgcatgctgttttggtgtaattattaaatgtgtcctatgttattctaataagtgttgcagattgtttgatgagttgtatggtcatccacttagaaggccctacatgatctggttccct

SEQ ID NO: 193849 - DNA, 528 bp, Homo sapiens
atttcttgagttcaggtgtatggtctcaaattttatgtttctataacctggtccagtgctgtaaaaggtgagcagcaatttcttggatgtggaacaaattctttagacttgtcctggtatcacctcttctcagaacctgacagaattatcctgaattgagaggattaatagtgtcacatgtgttagaacagcactctctagacttggtcacttgctcatgtcacctgtattatcaccttctgtctgtagtagagctctactacagtctatgctcatygtagcagcaaggatgatcctttaaaagatctgcaatgactctccattttactcagagtaaaagctacagtccctacattgtcctatagatagagtgaccctgtgttccagttttcagggacagccctggtttatgcatgctgttttggtgtaattattaaatgtgtcctatgttattctaataagtgttgcagattgtttgatgagttgtatggtcatccacttagaaggccctacatgatctggttccct

SEQ ID NO: 193850 - DNA, 604 bp, Homo sapiens
tcctatagatagagtgaccctgtgttccagttttcagggacagccctggtttatgcatgctgttttggtgtaattattaaatgtgtcctatgttattctaataagtgttgcagattgtttgatgagttgtatggtcatccacttagaaggccctacatgatctggttccctatactctctctggcctctttctttcttttctctgctacyctggccaccttattgttccttccacacacaggcattcctgcctgggacttctgccctaattcttccctctacgtggactactcttcccagatacctactttgttctctctcaacttctccaaatctgctcaaatctcaccttctcaaagaagccagtgctgactatcttgttaatacttgtagaatgactatcaaatatttttcttcaaattgatatctttttagccttaaatatctacttcaattttaatcttaacaaaatatcaattaaaatgtgggcatgacatgttattttttaatacacaattttaatgtttacaataaagtagatatgttagaagaaaaatattttgtgtgccatgtaaaattatctcatgaccaccagtagtatgca

SEQ ID NO: 193851 - DNA, 604 bp, Homo sapiens
tcctatagatagagtgaccctgtgttccagttttcagggacagccctggtttatgcatgctgttttggtgtaattattaaatgtgtcctatgttattctaataagtgttgcagattgtttgatgagttgtatggtcatccacttagaaggccctacatgatctggttccctatactctctctggcctctttctttcttttctctgctaccctggccaccttattgttccttccacacacaggcattcctgcctgggacttctgccctaattcttccctctacgtggactactcttcccagatacctactttgttctctctcaacttctccaaatctgctcaaatctcaccttctcaaagaagccagtgctgacyatcttgttaatacttgtagaatgactatcaaatatttttcttcaaattgatatctttttagccttaaatatctacttcaattttaatcttaacaaaatatcaattaaaatgtgggcatgacatgttattttttaatacacaattttaatgtttacaataaagtagatatgttagaagaaaaatattttgtgtgccatgtaaaattatctcatgaccaccagtagtatgca

SEQ ID NO: 193852 - DNA, 604 bp, Homo sapiens
tcctatagatagagtgaccctgtgttccagttttcagggacagccctggtttatgcatgctgttttggtgtaattattaaatgtgtcctatgttattctaataagtgttgcagattgtttgatgagttgtatggtcatccacttagaaggccctacatgatctggttccctatactctctctggcctctttctttcttttctctgctaccctggccaccttattgttccttccacacacaggcattcctgcctgggacttctgccctaattcttccctctacgtggactactcttcccagatacctactttgttctctctcaacttctccaaatctgctcaaatctcaccttctcaaagaagccagtgctgactatcttsttaatacttgtagaatgactatcaaatatttttcttcaaattgatatctttttagccttaaatatctacttcaattttaatcttaacaaaatatcaattaaaatgtgggcatgacatgttattttttaatacacaattttaatgtttacaataaagtagatatgttagaagaaaaatattttgtgtgccatgtaaaattatctcatgaccaccagtagtatgca

SEQ ID NO: 193853 - DNA, 584 bp, Homo sapiens
taatgggactgattttcacccacttgagtcaattctaattcraatttgaataagaattgccacttagaaagctaaaatgatctataagtaagtttttccgcctaaatcatggtagtaggtgcagtttgagcaagacgttttgattgtaacaatacagaaaggaattgcatgatacgaagaggtctgtctaaatttattagaaacacattttcttatccaggttcactgtaaatgtttaaagaaataggctgtgctagaaatgccccaaatctctaatatgttgtttttaattagcacacttttttttagtaattacacaactatcactatgatagctaagaatgtgaaatgtattttaacattgttattcaggataaaataagcatacataaaatgttataaaatacaaagtatctaataataaccctgatgaggttccactatttccaattacaattaaataatctactttgtgctaaaacagcagagtaaaagaaaatcagaactcctttattaatgacaaatgaagatatactgtacaaagaaactataaagctctgataaaaacaacacaatagcattaa

SEQ ID NO: 193854 - DNA, 584 bp, Homo sapiens
taatgggactgattttcacccacttgagtcaattctaattcgaatttgaataagaattgccacttagaaagctaaaatgatctataagtaagtttttccscctaaatcatggtagtaggtgcagtttgagcaagacgttttgattgtaacaatacagaaaggaattgcatgatacgaagaggtctgtctaaatttattagaaacacattttcttatccaggttcactgtaaatgtttaaagaaataggctgtgctagaaatgccccaaatctctaatatgttgtttttaattagcacacttttttttagtaattacacaactatcactatgatagctaagaatgtgaaatgtattttaacattgttattcaggataaaataagcatacataaaatgttataaaatacaaagtatctaataataaccctgatgaggttccactatttccaattacaattaaataatctactttgtgctaaaacagcagagtaaaagaaaatcagaactcctttattaatgacaaatgaagatatactgtacaaagaaactataaagctctgataaaaacaacacaatagcattaa

SEQ ID NO: 193855 - DNA, 584 bp, Homo sapiens
taatgggactgattttcacccacttgagtcaattctaattcgaatttgaataagaattgccacttagaaagctaaaatgatctataagtaagtttttccgcctaaatcatggtagtaggtgcagtttgagcaagacgttttgattgtaacaatacagaaagraattgcatgatacgaagaggtctgtctaaatttattagaaacacattttcttatccaggttcactgtaaatgtttaaagaaataggctgtgctagaaatgccccaaatctctaatatgttgtttttaattagcacacttttttttagtaattacacaactatcactatgatagctaagaatgtgaaatgtattttaacattgttattcaggataaaataagcatacataaaatgttataaaatacaaagtatctaataataaccctgatgaggttccactatttccaattacaattaaataatctactttgtgctaaaacagcagagtaaaagaaaatcagaactcctttattaatgacaaatgaagatatactgtacaaagaaactataaagctctgataaaaacaacacaatagcattaa

SEQ ID NO: 193856 - DNA, 584 bp, Homo sapiens
taatgggactgattttcacccacttgagtcaattctaattcgaatttgaataagaattgccacttagaaagctaaaatgatctataagtaagtttttccgcctaaatcatggtagtaggtgcagtttgagcaagacgttttgattgtaacaatacagaaaggaattgcatgatamgaagaggtctgtctaaatttattagaaacacattttcttatccaggttcactgtaaatgtttaaagaaataggctgtgctagaaatgccccaaatctctaatatgttgtttttaattagcacacttttttttagtaattacacaactatcactatgatagctaagaatgtgaaatgtattttaacattgttattcaggataaaataagcatacataaaatgttataaaatacaaagtatctaataataaccctgatgaggttccactatttccaattacaattaaataatctactttgtgctaaaacagcagagtaaaagaaaatcagaactcctttattaatgacaaatgaagatatactgtacaaagaaactataaagctctgataaaaacaacacaatagcattaa

SEQ ID NO: 193857 - DNA, 324 bp, Homo sapiens
cttgaagaccttcctctggagcctcagtaaatttacctaatctaaatgggtcyaggtgctggggtgatttcccttatcttgtctcctgctaaatcacggaggtctggggagttccttcagactctcaataatctttttttgtggagagctgaggagtttcttcagactcccagtaaaatttgtttcatcatgctttaaggttcaggaaaggcctaggcaaaactcttggtgggcttttgttacatgccagcctttgtataagggcactggcttttaatatttaacttaaaccactcagtcagtactgaaacagttgttatggag

SEQ ID NO: 193858 - DNA, 324 bp, Homo sapiens
cttgaagaccttcctctggagcctcagtaaatttacctaatctaaatgggtccaggtgctggggtgatttcccttatcttgtctcctgctaaatcacggaggtctggggagttccttcagactctcaataatctttttttgtggagagctgaggagtttcttcagactcccagtaaaatttgtttcatcatgctttaaggttcaggaaaggcctaggcaaaactcttggtgggcttttgttacatsccagcctttgtataagggcactggcttttaatatttaacttaaaccactcagtcagtactgaaacagttgttatggag

SEQ ID NO: 193859 - DNA, 604 bp, Homo sapiens
ctactacatggttctacccttgcttctccatagagtgttctccaaacattttgagtaatttttttttttgaraggaataaacaagtaaagtcagtcttctgctcaaaatcatttaatgattaccgtgtcttaagatgatatatatgatttagctcttggatacctctctcttcttatttcctgttattctccctttggtcattccattttgccatatttctatcttttaaacataagaaacctggtccacttcagtgactgtagatattcttagacctcagttctttaatcataaccctgtagaaatattgcctcttcggagaagtgttccctgaccattctcactaaaatggtacttctcatgtctcttccttccttcctttcttttctttttctttctttccttctttctttctttttttctttctctctttctctctctctcttctttctttcttactttttcttctttctctctctctttctttctttcatttattgatcacatgtcttctcaacaagtatgtaaacttcatgaagacaggagttttgtttttagtattatgttgtccctggcacctagagaagtgtctggtacttatca

SEQ ID NO: 193860 - DNA, 600 bp, Homo sapiens
tagggatttctcctcccaattttccctgctttcctctccttgtaccactgaatgtccctaatatgagaagactcaagtataagccagcagcaaggctgctcagtccctcctaaccaaaagaagtgtggattttcatgacgtcaagatgggttcaaacataaacatcaggttgaaatgttgggaacctctcaggcttcagttcccaccactgggcatgctgacaaagaggaggggggagatttataactgccatttccagaaagattcacttcaagtcccattctttagtttggaggttggaatcatgggtgatacttaccataaactcctgtgaaatatactttgatacaaataaaagctttaaacaagatggctgtcaccagtgatgttccaaaccattaaggtggggcggataagtcctcacacttcagatttcagaagaaccaagaatgtctgttgactctaatgtcttargcctttctggtcaacactttaattcatttgttgagttctagttttttggtttaccaatcctgtgcttattaaaagacaggcacccctagaagagatgcttcagtttgaagtttcctccatcaacag

SEQ ID NO: 193861 - DNA, 581 bp, Homo sapiens
gcctcactcattcctgtgacaaatatttaaagaacaactattcaaaaatcactgaacttggtgttggggatgtagcacagaacaagacagttggagaagactgcctgagttcaaattccgttcccactatttggcattgaacaaattagttgccatctctgctgcagctttctcatctgtaagatggcatgataatgatatctcataggttatgatgaggattcactgagatagtgtatcagtcccrcttattatgtctgccttcaagaaagttacactttaacattcctcattatgtgtgtccctgcagaaaattaactgagactcactgctccagggattgtagagacctggaccccaaagttatgtgccctcctgaaagcaaacagtgggggtcagctggctctggcctggggcttgctccatttttcatcacttctgtggagggaggaatggtttctttagtaggaacagaggttccattttaatcaccagctttcagctttctttctttgatgaggtataaacattttgtcaacctttccgcatcagctcaattttgtttctgatgttggagatta

SEQ ID NO: 193862 - DNA, 460 bp, Homo sapiens
gttctggaagggttttgatgagaattgtctgatgggtctcatcatattgcataatgaattaaacaagttttgcaccaacttcatttattgacatacatagtccttaagactccttctcaaactcagtgagtaagaacttctttatctttagatggctttgttgacatgattatctaaccctgtggtttcacttggtcttctttaccttacrtacatccttgcatgtcaactgtcttccactttcctgggttcatttcatcaccctgagtctcacaggacttgttaaaacttcttgaatacttccaaagaattcattgatattaaaatatatttaaattattaataaccaaaccatgtggttctggaatagtaataaactgtgtgttagtctgctctcacattgctataaagaaatatctgagactacataatttataaagaaaagaggtttaattgactc

SEQ ID NO: 193863 - DNA, 590 bp, Homo sapiens
ttacctttagtcgaaaaatgttctcttattttcctaaaagaaataattcacaatagtacagaggaggtgacacactgtgttgtgttttcattttaaaaatgagaagttggtgagatagtctttaaggtctatctctgctttaacattcagtgagctttggaaaaattaatgacttagaagacacacgagacaactcttggaagaggttggcgccgctaactctattgacttaaatgatcacatttagttggagctccttcakaatgagatctcttatttaccaattgcagagatttatttcctttatttgtctagttaaaaggcactgggaaaaatgaggccagtccctcactcttcaagggagctcttatttccctgcactgcctattagactggggatagctgaaagtttttcattgcttttacttaggacacgtttgtaaggcatattttacgaaggttgcttcaacagacttttcaaccccctcagcaaccattcgctcattctgctcttttgcttaacattgtccttttttgccctcatgatctgagaccacatttgactgagatgagttgatttgtctggcatt

SEQ ID NO: 193864 - DNA, 546 bp, Homo sapiens
agatgggatcctgggacagaaaatagataatacataaaacctaaagaaatcgagaaaaattatggatatcaattaatagcaacatatcaatattgattcaatatctgtaccaaatgtactgtactaatataatactaggggaaattrtgcaggaggagagtggtttatgttaagtcttggtattatttctgtcaatctaaaactatgaagtctatcaatttttttaaaaaatataacaacacgggataggcctgagtccaaatctaaataagaaacctagcctagccagatccataagcaggagatgaagttgtccaaccagcctaaatcagctgactcacagaactagaaagggaattctggaaattcctgaaacttttgacataaagaacatacaatttcaactttgctaaataccacaaaattgctctccaaaatgattctactatttgaacactcaccaaatgcatgagtttttattcactcccacttttgcttccaattgtcagcacaaacattttaattttggctactctaacaggggag

SEQ ID NO: 193865 - DNA, 599 bp, Homo sapiens
ctgactgtaacacagaaaaatgtggtcataaagcagatgaaaatgaactataacacatgaagaaaatgattgaacctttgaagaaatagcacagatcaaagatagaaaatctcagaagtgaaaagttagaaattatatttctaggaagaaatgaaacaagaactcagagatctctgaaaataattaagaaagaaaaaatgtccctctcctcaaacaattcagtccaaaaattattagacaaggccaagtgtagtaggcatttatgtgaatgatgcatgtttgttggggggttgggggagtgggcatttaccccagagaaggtcaattaccaggtaaggagagtgtcaagsgggagggcagcagcccaggggccatgttagagatcaagtaggatgagaggggatccgcactgcgggttgggtggcaaagaggtggcagaaagaataggagattagttacacacagagagattgatcaaatacataaatatatcaaggccagttttctcagaaaataaacatacaccatgaaaaataaaatgaaaatgaaggaaactaaaatgaacccttcaaaggtagattacagttggggtattgggg

SEQ ID NO: 193866 - DNA, 412 bp, Homo sapiens
ctgatatacaagggcactcactgaaggtcaactcccatccccagtttagtattcaggaggcacttattatttcaacctggcagaaggctcaaatgttacttgcctgaaggagctggttatggcagaaagcaccctataatagggagaaggtggactgactagtcccaggagtgttgccttgcatatctgagatttgactgtgacagaagccactggtcaggagacatgggccatgaagatggagatgtactgtggcctcaccaaagttcatctccaacattctcactttcactgacttcactggcttccttgwtgctttgcaaatatgccaagcacacgactccttagaggacttgcatttgctgttccctccatctgaaatgctgctctcccaaatagaccattgtttgct

SEQ ID NO: 193867 - DNA, 597 bp, Homo sapiens
gaagtgggcactgactagacaccaaatctaccagcagccttgattttggacttcccaatcttcagaactatgataaatagatttctgttgtttataagtcatcaagtttgtggtattctgttacagaatcctgaataggctaagacaggtggagtattcccatcacatagcattgtgcccagcatatagcaggcatagagtaattatattctgaattcattaatgaagcagtcaatgagtrattaaatgaatgaagtttgaaaatgttccagaacttttcaatttagttgattcactcttcattataccccaggagcaaataaaaatgaactttgaatagccgtgcttgttctgcattgggtagtattatcaacactgtcggtgtttcccatcaacctgcttcattcttgctcttttctccccaaatctccaagttggagaaaaaaaagttctccacttctggcttcttagactttggccttttttagtcttactttcttctccctctggtcttggctttcccatctcctgaaacacccaccaccaccacaagcagcgcacacaccttcccaccaccaccacaagcagcgcacacac

SEQ ID NO: 193868 - DNA, 597 bp, Homo sapiens
gaagtgggcactgactagacaccaaatctaccagcagccttgattttggacttcccaatcttcagaactatgataaatagatttctgttgtttataagtcatcaagtttgtggtattctgttacagaatcctgaataggctaagacaggtggagtattcccatcacatagcattgtgcccagcatatagcaggcatagagtaattatattctgaattcattaatgaagcagtcaatgagtaattaaatgaatgaagtttgaaaatgttccagaacttttcaatttagttgattcactcttcattataccccaggagcaaataaaaatgaactttgaatagccgtgcttgttctgcattgggtagtattatcaacactgtcggtgtttcccatcaacctgcttyattcttgctcttttctccccaaatctccaagttggagaaaaaaaagttctccacttctggcttcttagactttggccttttttagtcttactttcttctccctctggtcttggctttcccatctcctgaaacacccaccaccaccacaagcagcgcacacaccttcccaccaccaccacaagcagcgcacacac

SEQ ID NO: 193869 - DNA, 577 bp, Homo sapiens
tactcctggctgacaggtctctcaatgtcctactttccatgcagcttgtttcattgttactggactgtgcactgtcttagtatctgagtggaccatttggtttacttttagtaagaaccctcagaaattttgaactgccttccaaaggcactgcttaccaacatcccctttcccccaacctggtcctccttctctcaaaccacacacagtgtgaccataataaacaagtattagggacatcgtctcattttaactttctaacaacgttggaaggtagtcaagatagggacaaatctatgtttgaaagatgtgaaaacaaaggcttaaagaggcccatggtgacagagctaataaagggaagaaaagaactagaacccaggttctgacttcaaacccatgaatcatactgtccactrctgtgctgcaggaactcagatctaatgaccctcagattccctatgcccccaagcctataactacttgatcctttcagctgctaggtgaaaaggcaggtagggatagaaatgaaaagttaacatttactgtatgcctactatgtatcagttaaccaatctct

SEQ ID NO: 193870 - DNA, 461 bp, Homo sapiens
gggccctttcccctttttgcttggcacttctccttgctgctgccatgtaaagaagaacatgttcgyttccccttctgccatgattgtaagtttttggaggccccccagccatgagaaactgtgagtcaattaaatctcttctctttataaattacccagtcttgggtatgtcttcgttagcactgtgagaaaggactaatacagtaaattggtactggccagtgggttgctactgcaaattcccaaaaatgtggaagcaactttggaaatgggtaataggcagaggttggaacagtttggaggactcagaagaaatcaggaagatgtagaaaagcttggaacttcctagagacctgttgaatggctttgaccaaaatgctgatagtgatatggacaaacaagtccgggttgaagttgtctcagatggagatgaaggacttgttgagaactggagtaggcat

SEQ ID NO: 193871 - DNA, 461 bp, Homo sapiens
gggccctttcccctttttgcttggcacttctccttgctgctgccatgtaaagaagaacatgttcgcttccccttctgccatgattgtaagtttttggaggccccccagccatgagaaactgtgagtcaattaaatctcttctctttataaattacccagtcttgggtatgtcttcgttagcactgtgagaaaggactaatacagtaaattggtactggccagtgggttgstactgcaaattcccaaaaatgtggaagcaactttggaaatgggtaataggcagaggttggaacagtttggaggactcagaagaaatcaggaagatgtagaaaagcttggaacttcctagagacctgttgaatggctttgaccaaaatgctgatagtgatatggacaaacaagtccgggttgaagttgtctcagatggagatgaaggacttgttgagaactggagtaggcat

SEQ ID NO: 193872 - DNA, 484 bp, Homo sapiens
catttaacacgaaaaaatgttagctattttcactactgttgtggtctgaggcatgtctgccccattctgctgagtcagtgattttatttgcccattttytttttatcatcatagattcaaatttcttacagactcaactcatttcagttagctgttaggttttgttttcatgtgtatatgttttcgttttgttttttcacttgtcactatttggccagtgggggcgcttttcaggctggattgtcattaaacaacaaaattaccttacaactctaaaaagaccctttctgaaagcttgtagcacagtatttacaagtatgcattccaaaatcaaactacctaggttcagatcccagatctgccacttactggctgtgtgacctacagcaagtgatttcacctgtttgtgcatcagtgtcacctctgttcaacaaggttgaagatgatactagtaattacccgctagaattgttgtgagaactaa

SEQ ID NO: 193873 - DNA, 499 bp, Homo sapiens
ccacctgcctcagtggagagagtaatcattcctcctatccaagaccactttcaggaactttttgtgctagtgtttggaaatctctcagcactgacctggacatcttataattgcttaaaaagagagagagtgtgaaattgtattctttacttttacgtatagtgagggcattgagaacacagaaaaatggtcacataacttgcttctccatctaccctcagagattctgttcttatgtctgcagttagcagctgccaagtgtacacagtaaaaaggcatkgaactatctccatggatttggagagcaaatacacagcggccatcactagcaatagcgccacagcataaaataacatgccaccccaggtgacaccggaataattggccaacgcttgccgcatgcattctttctaacaaatctgcggtatgtgttatgtcttttgccacattgtccagttgtatcctaactctagggcttaaggagcctacagttgaattc

SEQ ID NO: 193874 - DNA, 400 bp, Homo sapiens
ttcatgctcaggtttagggggtaatggaggaaataatgaaactggctaatttccttgtagaactgatgtttgtgatctttttgagtaaacatagaaactgactctcctggtcttaaaacttgaaacttacatttgtctaatttgagtatctttcccaggaaactgaccaccagacstcccagatagtatcaagaaactgaaactcaccagatcactgcatttagacaactcctcttccttacatccccctaattcctgatttcctgtatgttatggtttggctctgtgtccccacccaaatctcatgttgaattgtaattcccaatgttggggaagggagctggtgggagatgattgcatcatgggggtggacttcccccttgctgttctcatgatagag

SEQ ID NO: 193875 - DNA, 621 bp, Homo sapiens
agtaaaatacacttacagagcagcacagttcagaactaagcctcctacctttctgatcagaagaggacacgtgactgacctctgggatatatttactctcttctgtggtagatggaagaacaacctcccaagatgtccacatcgtaatccccagaacctgtgactatgttaggctatgtagcaagtgagaattaagattacagatggaattaaaactgccaattggctggatccatcatcctggattacttgggtggcccatgtaatcacaagggtccttaaatgtggaagagggaggcataagtcactgtcagagtgacgcaacatgagaaagacttggccaaccattgctggttgtaaagttgagaggggtccatgagtcaagtaatgtgacgcctctagaagctggaagagtaaagcaaacatataatcctatagagcactccagaatgaatccagtcataccaataccttaatttttagccgagatcacatcagatttctcacccccagaactataagataataattttgtgttgttacagcagcaaaaagaaactaatacagtctccagcattttgtygttactagtaccattggtttcttcttgaggggtgaggc

SEQ ID NO: 193876 - DNA, 422 bp, Homo sapiens
ttagatgttgctttttttttttttttttttttttgagattcagccaggctggaatgcagtggcgtgatctcggttcactgcaacctgcacctcctgggttcaaacaattctcctgcctcagcctcccgagtagaagagattacagacmcccaccagcaaacgcctggctaatatttatatttttagtagaggaaggggtttcaccatgttggccaggctggtctcgaactcctgacctcaggtgatccgcctgcatcggcctcccaacatgttgggattacaggcatgagtcaccgtgtctggccagatattgcattttaatggagtaaacagactataaaacagttgtattacttggatggtggttcaaacagaaggaaatctctgagatgaccctcaggttttaatcttgatgtttttac

SEQ ID NO: 193877 - DNA, 404 bp, Homo sapiens
tgagatgattcttttctcctggagttcataatcrtgtcacaaatgccacatttatcaatacatgtgatttaaggtcccatatcatctctttgaaaaaaacttgcttggagattctgtgcttgttcatgcttcccaattcagtccatgcatccaatccaattttaaatgtcttctcttctgggaaactgtcctaagtcctttaggtctcccctgatcctagtacagacttatgtctgtcatagcagtaagccttcaatatcccaattcgttgtttatgtatctccctccttactgttctctgtgtttcttgaaggcaaggaccgtcttttatttattccctttgtatccccagaatctagcacatatagcactccatttttttaagctgatgatgaagaaaaaga

SEQ ID NO: 193878 - DNA, 406 bp, Homo sapiens
gctttgctcaaggaatctactccatatttaccctctgagttctgagatgattcttttctcctggagttcataatcatgtcacaaatgccacatttatcaatacatgtgatttaaggtcccatatcatctctttgaaaaaaacttgcttggagattctgtgcttgttcatgcttcccaattcagtccatgcatccaatccaattttaaatgtcttctcttctgggaaactgtcctaagtcctttaggtctcccctgatcctagtacagacttatgtctgtcatagcagtaagccttcaatatcccaattcgttgtttatgtatctccctccttactgttctctgtgtttcttgaagkcaaggaccgtcttttatttattccctttgtatccccagaatctagcacat

SEQ ID NO: 193879 - DNA, 581 bp, Homo sapiens
ggactgtggagttagtgtttaaagggcacagaggttcaatttggcaatattgaaaatagttcagtggggaagatggatggccgtgatgcatcgtccatcacattgcacagcatcgtgaaatatacttaataccctgagcgttacacttaaaatggttaaaacagtaagatttatgttatatatatttaccatgataggatatatatatgtatattcatatcattcgccattgtgaatagcaaggagattgaagaaataaggacacaggatcttcaataaatatgtattaaatgcttcccatgttccacattctttgtcattgccagacacrtcacaggtataagggcccaatctttgttactcaaataatttagaataatttagaatttgcttggggagactttggataaacagttaagaagctgtatccattaggtaaagggacattgcttgctgcgtctcgtagcatttggtagtctcgttagacagccgttcttactcctatcgtttgctgaaattattagcaaaggaaagaatcttagttttcagctcgttcagccgcatgatttcataggctcagg

SEQ ID NO: 193880 - DNA, 521 bp, Homo sapiens
acgtctataacagtatcacatttcattttttaaaactgccaatgctttcagtgaggaccagaaagtacagtgagaaaaaaaaattcctcaaatattagttttcatgctcttgcacgcatttttataaaggcaaaagtcattctggtgcctgtatacaatctaaaggcataatctcctggagccttcagtgctggttttggggttttctggagatcaatccacagtgtcccattttttctgctggagctctgaacccaytaagagagagcaagaagagatgtaaacctctcctttgcttctgataaagccaagcccttactagtccacatgatgctttctctggggagtgagtcacatacaggagacatggcttgtccagctgcgtgctggactgaatttcagctccaacctgaaccttccaacaggacaagggagggaggagaatgggccgtagcaagacttgcccacagcattgccataacagctgtgcaggctgtgggtacaactctaagagcagcact

SEQ ID NO: 193881 - DNA, 662 bp, Homo sapiens
ggacaggcctcaaaaaaccattagggtagccaaataagaaatgataaagttaagatacagtaaaacaagtttaagcaaaatattaagaaaaactgcatggtgaatctttaaaattgtatctaaaagcttgaaaaatgtgacaggggaaattctttattggtagggaaaatagagggatatgcaagttttaaagtaatgaacagaacaagatcacattaggagagcaggcccttacttacaaagacatgtgcattgaacataaaggttgcagtatttctatattaaaaaggcattgtgatctcctaggctctgctsatctctcctctctataagacaatcaatgccaggagcgaaattatatttaatttctttgttatttaataaattttgggtggagttccacatgagggatttgaaaaaataatttctagttcagattaatttattaaaagcctattcaattgtaagtcaggggataaggttctccacagacctctataacatttaacaaacaaattgcttaatactttatttgaatcacctttcctaattactcttataaggagttctcagagatgttaatctgttgccacatagcaatttttagtagcagcttcataaacgtgttaaatttaaatacatatttacatgaggtgcacaca

SEQ ID NO: 193882 - DNA, 596 bp, Homo sapiens
atgtgaagcccccagagtatgactgttactacgctaaaccctttaatacattatattattgaaaagctacatttaataataattgctccacatttagtacagataatytcaatttcttagctagagacactggggtttggggagagccagtgatctgctcaaggcggaagagctacagtggcagagccaggattcaatccagactcctctgactccaaaactcaagctcttaatctttgggcatgctgcttttcactatgaaatgaatgaagagaaagtcctgcaaaaagatgcaatacctgaagaacagggaacttttttttttaatctgcaggaatctctgtaatgaggaggaagatgttggaacagaaaacacttggtgatcttggtgttagagctgagcaaagtgccctatttgccagagaaaagatgcatttaaaaaaaacaaaataaataaaaaataaaaaatcctcaaattaccttgtgaacaaaagtgctggaatcaagtacttgaatcacaaggcaaatttggatttcagtgaggatgctcttataccttgttggggcacaacaacaaattgccacaaaaactggtg

SEQ ID NO: 193883 - DNA, 596 bp, Homo sapiens
atgtgaagcccccagagtatgactgttactacgctaaaccctttaatacattatattattgaaaagctacatttaataataattgctccacatttagtacagataatttcaatttcttagctagagacactggggtttggggagagccagtgatctgctcaaggcggaagagctacagtggcagagccaggattcaatccagactcctctgactccaaaactcaagctcttaatctttgggcatgctgcttttcactatgaaatgaatgaagagaaagtcctgcaaaaagatgcaatacctgaagaacagggaacttttttttttaatctgcaggaatctctgtaatgaggaggaagatgttggaacagaaaacacttggtgatcttggtgttagagctgagcaaagtgccctatttgccagagaaaagatgcatttaaaaaaaacaaaataaataaaaaataaaaaatcctcaaattaccttgtgaacaaaagtgctggaatcaagtacttgaatcacaaggcaaatttggatttcagtgaggatgctcttataccytgttggggcacaacaacaaattgccacaaaaactggtg

SEQ ID NO: 193884 - DNA, 514 bp, Homo sapiens
gcctccccctccactaccttttcccagcctccggtaactatcattctactcttacctagaaattgttttttagtgtgcattctgcatgtatgctattggatggctgagaattctaaaaggtttattgtgcataagtaacataaccatacttcatataatgtccttattttataccacagggatgtttagatgaagagcrtctaataggataagcatcaaagcttcagaatcccgtatgatcaattgcaaacagtcattattgcaaacagtacatatttaagctatcacattggaatgctaaatcttaaactcaacacagagattaaataccagtagaaaaaataaatactggttgaaaactaaaattgttttttcaacacatgaagagcatatacacaattgacatcaagagtaggctaaccagagactaaactgatgcaaataggatggcaagcaaaactcagctttctgccaaaagctttccccaagaggtgaataacattttccataagtc

SEQ ID NO: 193885 - DNA, 514 bp, Homo sapiens
gcctccccctccactaccttttcccagcctccggtaactatcattctactcttacctagaaattgttttttagtgtgcattctgcatgtatgctattggatggctgagaattctaaaaggtttattgtgcataagtaacataaccatacttcatataatgtccttattttataccacagggatgtttagatgaagagcgtctaataggataagcatcaaagcttcagaatcccgtatgatcaattgcaaacagtcattattgcaaacagtacatatttaagctatcacattggaatrctaaatcttaaactcaacacagagattaaataccagtagaaaaaataaatactggttgaaaactaaaattgttttttcaacacatgaagagcatatacacaattgacatcaagagtaggctaaccagagactaaactgatgcaaataggatggcaagcaaaactcagctttctgccaaaagctttccccaagaggtgaataacattttccataagtc

SEQ ID NO: 193886 - DNA, 623 bp, Homo sapiens
caatgtgtaaaaacaatgcctctctacccttggtgaaagttttgacgtctcaaaacaaatgtgttaatgcaatgtttttcttgagtgaagcaacactaaaatagttattttttcccttggatttttaaagagttctgcatatattcccatggaaaatcttgaagtctttctcaagtattacacacgtatgtacatatgcatgcagcccccaaaggttaaattgttagctcattcactaggatatggaatgtatttccccataatagtcatagagtggtggttatatttatttacatcctattccgccccaatgtcgatactatatcaccaggcctaacttccatcagtaaggtcttatatgagtactacattctgatatctggtggtagtgatggctatggaggtgggatgggtaatatctttcaggggcatatcccttgagtgagtcaggcacaactagctacatataatcttgacttgattttaattattatttacacagagcacaaaacatsacatatcttggggaaataagatagtctgaaaaaaccaaagccacatgatgaaaattagaagggcgtataatatggatcaaggttctcaggcatcccataaacaaacac

SEQ ID NO: 193887 - DNA, 621 bp, Homo sapiens
tatctcagaactctgcatatattcccagggaaaatcttgaagtctttctcaagtattacacacatatgtacatatgcatgcagcccccaaaggttaaattgaacagaaggttctgttaaattaaggttaattaacagaaataatagaaatctctaatttctaacctttatttatattctatattttatgaagtacagtatgcaagaaccacagcataaatcaagaagttacagaccaaccagttttaagaaaatggaagcaaagcatcatawtaacccaccagctttaggacaaagaactttaattttttttcatataatgtaggttaattagaattaaacctagaaggctaaatgcattgacaattttacaagttaaattttattctactttgtaaaagtatgaataactcttaattttaccttttatttcactaatcttatattttagaacaaaattccattgacccttcaatgaagagttctaatttacatttcaaatttgtgcctaattataaaattttagaataacttaggaaatcatgtggtctctagctttcaaactgattaattgcttaggcaatgatattaaactctggtttgatatcactccagggtgagt

SEQ ID NO: 193888 - DNA, 500 bp, Homo sapiens
aaaaagaggtgaagggccaggcgcagtggctcatgcctgtgatttcaacattttgagaggccaaggcaggcagatcacttgaggtcaggagtttgagaccagcctgaccaacatggtgaaaccacgtctctactaaaaaactacaaaaattagctgggctttgtggcatgcatctataatccaagctacttgggaggcaggagaatggtgtaaacccgggaggcggagcttgcagtgagccgggattgcgccactgcactccagactggacgacagagcaagattccatctcagaaaataaataaataaataaataaataaataaataaataaataaawatataagtcatgtatgcattataagaaaatgtataatcactttataagaatgttatctcatataatacaataaggttttaaaataatgtgaagaatcgagaaaattagtgattgatgggagtggaaaattaaaaataaaaaaatttaaaagtcaggagtca

SEQ ID NO: 193889 - DNA, 566 bp, Homo sapiens
gtcttcttgctctcaaccatttatgttcttaacgctttctcagaagaaagaattcaaatgcaaagagaaacagaagataatcacttctgagttaatgttttccttgaagttcaaatccatggatataattttattgctcccttaggatttctatagattttcttcctacgggtasgctttttttaaggtaagctatttttgacaatgctatagttaagagactagaatgcaaaggtggtataattttcttaagttaagtgaattagctttcttctttaactccatatttgaacctaagccttctagaaattatagaagaacatattatatcctaaactaaattgtaataagacttgccttagtaaaatgaaaatactttctggagtctgtgtgtaatttacatacaatgatatcagcaatcaaatgataagaaaaaaataagtatatcttttcattataaaaaaaagcatccaaacactttaataaagtatttcttaaaagatagataattttgatttataggaagatccacccccagatgtccatgacttgtaattttaatacct

SEQ ID NO: 193890 - DNA, 655 bp, Homo sapiens
gggttatggtgactgcattaggataaatctgcattctcaagatttttggggtaaagagatatgtggtcatatcctatgaaataactgtgagtcgtttaggaaagacttagacatcgtgaacccatgtgatgtggaccatgagtgaatgaaaggtttggaaaatggaakatgtcattcataacatgaaactttcaggtgaaagattctcaggaacaaaaatctctaaagaatacaagaaaaatgttcatgagagaaaaatcagttttaaccatttctcagacccaaagagcatgaaatctatcgaatcaagtcagaagtattctatcaccttaccagttttctctcctttcttccaataatgttcaaaactgcaactagaaactaaggaaacaggtgaaaaagagagggagcagaagccggctgcatttccttttactgattaatatatctgccagctatgactctgggcattcagaagaaggagagtaagccttagcctcaaatggcattgaagcagattgattcatgttttcatatattaattaataggtgattatttaatccaaattttatgctgtgacttaaagagattgtacaaccatttattatccaaaaatgaaaagaacagttaatgatgtcaccaattttaaattat

SEQ ID NO: 193891 - DNA, 570 bp, Homo sapiens
ttgttctgtggttcttacttccacgttattgagattagtcacaataaactatgaaacagttgttactctgctagttctacaggtgagggagtagagataaggggaagttaaggatctaacttactgaagaagtagtaacttgagactgaatctgatctctggatgtcaagatcagtgctctcacaattacatcaaagctgcctccttaacataaggcttgattttgcagtcaattgctttgacttacagagtccctccctgtccccagtagttattgtcccctcaaagagcttagccctcagccaaattgcagtactctttacacacactttgtagttgagaactgtagtgcttttcagcaatctccagccctgctgctgtctctagcttcaggcaatggattatcctgtacttaagttttagttccttaattaattaccactgcttcagaacatctagtcaatgggagaatcaatmaaaattccttgacctttgtttatttccccaggtaaaattctagagggaaggaggtgtttatagtaatctctttttccctgttgacccatgaat

SEQ ID NO: 193892 - DNA, 629 bp, Homo sapiens
gtttcttttgtatgctttatttttgtttttgtttcttgcaatgtaaataaaagaaaatcactcaaattgtgaactatttcttttacacaagaggtcctcagccttacattgactgtcaatttactttatattcagttgtttacatcattaagtaatcagatattttaagacttctgtattagttcattctcacactgctgtaaagaaatacctgagactgggcaatttatttttaaaaagaggtttaactggctcacagttcagcaggctttacaggaagcagggctggggaggcctcagtaaacttacaaccatagtagaaggcaaaagggaagcaggcactccttacatggccagagcaggaggaagagagacaactggaaagtgctgcacacttttaaacaaccaggtcttgtgagaactcactcactgtcaagagagaagagagggggaagttcacacccatgatttaatcacctctcaccaygcccctccaccaacattggggattacaattcgacaagagatttgggcagggacccaaatccaaaccatatcaacttctaaaataatgtttaattgattgtctaatttcccaatacttattcagattattttaatgaatattt

SEQ ID NO: 193893 - DNA, 587 bp, Homo sapiens
ctgtaattttgatttattgataaatcataaatacttacatttaaaatggttccacatagtactcaattttatctccagaaatgctgtaccagtttacactcttaccacaattttgcgataaatattatcatgataactaaaattttgccactgtaataagttaaatcttggtagctctttattgttttcattttcctttkctcagtagtgcctcttttgatttgaataatggcttttctactcaagttcttctgtgtatttggaattgaattaaatgaatttcttatttttctactgaaataattactaattctcttaattgtgataacttttagtataagagatatttacctactgtctatcatgaacacaacacttttttttttacaaaattttgttctctttaactttttaaaaaaaatttgattgatactagttttcttatggaaacaatgtttatgtggttaaatctagcctttttccttcatgatttctaatcctagtgtcatacttagaaacatctttgctgtctaatatagattatagacttatattttatgtgtgatttttacatgttttaccataaa

SEQ ID NO: 193894 - DNA, 594 bp, Homo sapiens
acatgattaacagaacaataacygacatctcaaaacaaacattaaatgtaagtggtccaaatgcttcacttaaaatatacagaatggcagaatggataaaaatccatcaaccaagtatctgctgtcttcaagagactcacttaacacacaagaactcatacaaacttaaggtaaagggttggaataagatattacacataaatggaaaccaaaagcaagcacgagtagctatttttatatcacatgaaagataccttaaagcaacaaagagaaagaaggacattatataatgataaagggagtagtccaacagaaaaatggcacaatcctaaatacatatatacatctaacaccacagcttccaaatttacaaagcaattgctactagacctaagaaatgagatagagggcaccacaataatagtggaggacttcaatactccactgacagcattagataggtcatgaaaacagaaagtcaacaaaaaaacaatgaacttaagctatatcttaaaacaaatggacttaacaaatatttacagaacattctacccaacaattgcagattatacattcctttcatcagcacataga

SEQ ID NO: 193895 - DNA, 594 bp, Homo sapiens
acatgattaacagaacaataaccgacatctcaaaacaaacattaaatgtaagtggtccaaatgcttcacttaaaatatacagaatggcagaatggataaaaatccatcaaccaagtatctgctgtcttcaagagactcacttaacacacaagaactcatacaaacttaaggtaaagggttggaataagatattacacataaatggaaaccaaaagcaagcacgagtagctatttttatatcacatgaaagataccttaaagcaacaaagagaaagaaggacattatataatgataaagggagtagtccaacagaaaaatgkcacaatcctaaatacatatatacatctaacaccacagcttccaaatttacaaagcaattgctactagacctaagaaatgagatagagggcaccacaataatagtggaggacttcaatactccactgacagcattagataggtcatgaaaacagaaagtcaacaaaaaaacaatgaacttaagctatatcttaaaacaaatggacttaacaaatatttacagaacattctacccaacaattgcagattatacattcctttcatcagcacataga

SEQ ID NO: 193896 - DNA, 568 bp, Homo sapiens
aactgattaattctcattttattagtgatggacttggagggttctaataactgactcttgaagaattttcatataaatgttattatatattttcacatagcacctttttcttcccatttctcacttaggtacaaggtttcactatttcatttatgtaatagtgagatggggggaatactgtaatatcttttatacaccacagcaacaaagacataacattttgttctgtttcatttatgaaggatttagaaagaaaatgatctttaaaagaaaattcaatttttggaaaaaaaaaatgacagtgaatggcacagagcctctttatttcccttgaagctgtcagagtcagagaagaaaaccactttggggtatgagtctgcggtacytgtcataagactgaaaggacttgatgttgagattttattagctctgacaatatgggaaaattccattctaaactgtaataagtagtatataaagtaatttagatatgccagtggctatggccctgggtgtaaatgtatataccatgtgcgtaaataaagctggggtaaatttgccactaatg

SEQ ID NO: 193897 - DNA, 506 bp, Homo sapiens
tgtgtgttttaatattaacactctgcaaatacattatctcccttttaataaataaaatttgaaatatatgtgtgttactacatgcatatctatagactataaaataaatggatacaaaacttgcccttaacaatttatgctgtttaagctaatattatattaacgcaataatattatgatatttttcctctctctttgaacatagcaaacattttctcttccatcaatgactgtttccctttggttgtttttgcaatgatgaaataaaatatcaacacatttcctgaaaaataggcaatatctcaataaaatttactgttagcaaatgatgcccagctttgtatttggcatttgtcccatatgagaaaaaagtcaattgcagaataatatggacagtcttttcaacagtatgacagactcgcaagccatatatatayacacacacacacacacacacacacagacatacacacacactcactgagttgacatgacaataaaaaaag

SEQ ID NO: 193898 - DNA, 587 bp, Homo sapiens
gcagtctttcccacttttagaaagaatacattagtataagaacaaataaacacaagaatatacaaacattagagcagtttcctttggcagatgcaattatgaagaaattttaccttagtattcattttaaatattttaataataaataaccttaaattacttttatgataaaaaatagaactgtaacaatagaagctaawtgattcatttaaagtatattccaaaatattatgttggtagtaggataacaacttagaaaagtccatgtaccatgtgctacacattacagttttaaagtgcctttagtaacatctgacaaaagttgataatataacacttaacaaccattgtacagaataaagagccaatactactgataaaggcatattacccacaattggggcatgaaattttcattttccattaagattcattttatacagctcctctaaatggcctcttacgagcccattcctgctgtcatcctgcccacttgcttacataaacagaaatttaacagcccatattcttgaatccgtacacttaacattaagtgggtgcttctctgaaatagtgatacacatgtt

SEQ ID NO: 193899 - DNA, 587 bp, Homo sapiens
gcagtctttcccacttttagaaagaatacattagtataagaacaaataaacacaagaatatacaaacattagagcagtttcctttggcagatgcaattatgaagaaattttaccttagtattcattttaaatattttaataataaataaccttaaattacttttatgataaaaaatagaactgtaacaatagaagctaaakgattcatttaaagtatattccaaaatattatgttggtagtaggataacaacttagaaaagtccatgtaccatgtgctacacattacagttttaaagtgcctttagtaacatctgacaaaagttgataatataacacttaacaaccattgtacagaataaagagccaatactactgataaaggcatattacccacaattggggcatgaaattttcattttccattaagattcattttatacagctcctctaaatggcctcttacgagcccattcctgctgtcatcctgcccacttgcttacataaacagaaatttaacagcccatattcttgaatccgtacacttaacattaagtgggtgcttctctgaaatagtgatacacatgtt

SEQ ID NO: 193900 - DNA, 587 bp, Homo sapiens
gcagtctttcccacttttagaaagaatacattagtataagaacaaataaacacaagaatatacaaacattagagcagtttcctttggcagatgcaattatgaagaaattttaccttagtattcattttaaatattttaataataaataaccttaaattacttttatgataaaaaatagaactgtaacaatagaagctaaatgattcatttaaagtatattccaaaatattatgttggtagtaggataacaacttagaaaagtccatgtaccatgtgctacacattacagttttaaagtgcctttagtaacatctgacaaaagttgataatatarcacttaacaaccattgtacagaataaagagccaatactactgataaaggcatattacccacaattggggcatgaaattttcattttccattaagattcattttatacagctcctctaaatggcctcttacgagcccattcctgctgtcatcctgcccacttgcttacataaacagaaatttaacagcccatattcttgaatccgtacacttaacattaagtgggtgcttctctgaaatagtgatacacatgtt

SEQ ID NO: 193901 - DNA, 587 bp, Homo sapiens
gcagtctttcccacttttagaaagaatacattagtataagaacaaataaacacaagaatatacaaacattagagcagtttcctttggcagatgcaattatgaagaaattttaccttagtattcattttaaatattttaataataaataaccttaaattacttttatgataaaaaatagaactgtaacaatagaagctaaatgattcatttaaagtatattccaaaatattatgttggtagtaggataacaacttagaaaagtccatgtaccatgtgctacacattacagttttaaagtgcctttagtaacatctgacaaaagttgataatataacacttaacraccattgtacagaataaagagccaatactactgataaaggcatattacccacaattggggcatgaaattttcattttccattaagattcattttatacagctcctctaaatggcctcttacgagcccattcctgctgtcatcctgcccacttgcttacataaacagaaatttaacagcccatattcttgaatccgtacacttaacattaagtgggtgcttctctgaaatagtgatacacatgtt

SEQ ID NO: 193902 - DNA, 540 bp, Homo sapiens
cttaaaaaacaaaaaacaaaaaaactaagttatacttgccctttctcttcaaaacaatagttacatgaagttgtggttgctgcctgaatgtcaggggaaaaggaatgagcaccaggcagcacaatgaaagaaaccttactatgtaaaataatattcaagacttatgcagtgacatgtaaataggacaaaaataaaatacaaataaatacaactaaggctgattttaagataaatgaactcacgtctaattaccattttcattagatacctaaacatatttttacctggaataagaatcwgaataccaaattttagtgatgagaattttgtaatttctgaatcatattttatgtgaaaagctttttgaggatttctttgtaaccagacatggtgtttttttaaaaaaaacacaataatacaggggatcaacagaccaagcaggtgctatccccagtcattatagtcaacttaataaatactctgcacacagacatccaaaacctatgagcattgatccaaaagaaaaatcattaaggtgag

SEQ ID NO: 193903 - DNA, 540 bp, Homo sapiens
cttaaaaaacaaaaaacaaaaaaactaagttatacttgccctttctcttcaaaacaatagttacatgaagttgtggttgctgcctgaatgtcaggggaaaaggaatgagcaccaggcagcacaatgaaagaaaccttactatgtaaaataatattcaagacttatgcagtgacatgtaaataggacaaaaataaaatacaaataaatacaactaaggctgattttaagataaatgaactcacgtctaattaccattttcattagatacctaaacatatttttacctggaataagaatcagaataccaaattttagtgatgagaattttgtaatttctgaatcatattttatgtgaaaagctttttgaggatttctttgtaaccagacatggtgtttttttwaaaaaaacacaataatacaggggatcaacagaccaagcaggtgctatccccagtcattatagtcaacttaataaatactctgcacacagacatccaaaacctatgagcattgatccaaaagaaaaatcattaaggtgag

SEQ ID NO: 193904 - DNA, 599 bp, Homo sapiens
gggtaaaggaatttcatttattctttcacaaaagtatctttactaactgctgtgcatacaagagtgaggaagactaacaaagccattgctgaaatggaatttacaatataaaggagagggctgggcagattagtaagcagattcacattgtgtctattaatgtgtaaaaaagaacaaactagagtgatggaataaagagcgactggaggaagtgaagtactgagaattaaagtgggggaaagtcctttcataggaggagataaacattcacaggactcgtagggcacaaaagaacattctaatttagagagaggaaacagtgaatgcagaggcctgaatgcaagaamcagatcagcatgttctataaattggagattagaacatagaacttaagaaagagaacatgcgataacatcaggcagaagccagaaagcagatcatgcagcaagcatggtgcctagatttcattctgagactgatagagtatgtttggaacacataaagcagggaagctactatagtatattaagaagctattagagaagacgaagtagtagaggtagcttgagctagggtgcggatagtgaggagggaaaaaa

SEQ ID NO: 193905 - DNA, 599 bp, Homo sapiens
gggtaaaggaatttcatttattctttcacaaaagtatctttactaactgctgtgcatacaagagtgaggaagactaacaaagccattgctgaaatggaatttacaatataaaggagagggctgggcagattagtaagcagattcacattgtgtctattaatgtgtaaaaaagaacaaactagagtgatggaataaagagcgactggaggaagtgaagtactgagaattaaagtgggggaaagtcctttcataggaggagataaacattcacaggactcgtagggcacaaaagaacattctaatttagagagaggaaacagtgaatgcagaggcctgaatgcaagaaacagatcagcatgttctataaattggagattagaacatagaacttaagaaagagaacatgcgataacatcaggcmgaagccagaaagcagatcatgcagcaagcatggtgcctagatttcattctgagactgatagagtatgtttggaacacataaagcagggaagctactatagtatattaagaagctattagagaagacgaagtagtagaggtagcttgagctagggtgcggatagtgaggagggaaaaaa

SEQ ID NO: 193906 - DNA, 570 bp, Homo sapiens
cacaaacttttgttattttgtccaggattgctaaattgattactgtggcaaggagggagaataaacccatctgatttctaaccagatcccaaagttggaaagaggtgatatcaactgtgcccaaactgaatgacaaggagggggcaatcccatatccacctgccacaatttcccatttgagtttagrccttcaaaaatcctatcttaatgatttttgaacattgtacccattctaggtcagaacactgctcttggaatttaaatatatattcaaagctccactaacctcctcctgcctcccacgtctcagaagtgtgacacaagaaaggtttgtgtacaatcaaaattgtctatgacctagaatacacttttgaaaactaatttgtctcaaagttctgaagagtctgacttcaagcgtacactattcagacattaactttaatggttcattgcaaaattgatgcagcagtatgggcaccaaaggccaaataatcataatgctgacttgattgtcactgtctttaaacaaatgagggagaaaaacaaacagaaaaacaaaaaataaaatca

SEQ ID NO: 193907 - DNA, 577 bp, Homo sapiens
tcgaaatttatatatgtatttaattcggtctcaatttatcaaaattatctttaatacttttagaatatttagaaggtgagactagaaaaaatacttttaaaaagaagtgtagggtaggcatggtggctcacagtgttgtcccagctacttggggtggagacaggaagatcacttgagcccaggagtttgagaccagcttgggcactggtctgtacaacaaaacaaaacaaaacaaaacaaaacaaaacaaaacaaccacttcagcctgggtgacagattgtacagagtgaggccctgtctcaaaaacaaaaaacaaacaaaaaactccaaaatgtgtagttgctgatttatatagccatggagtataacatggagtacaagcacacaaatgaagtcagtttggtactaatgctaaaataaaaacatgtgcggaaaaatggaaaagattctttatctcaggaaagagctatgttcataagtgtgtatccacataataaatcgtgttaaaaacaccacaytaatcaatggaaagtttatcacacaaagagaacaattcacatgcccatagcatctaatt

SEQ ID NO: 193908 - DNA, 500 bp, Homo sapiens
aaaaagaggtgaagggccaggcgcagtggctcatgcctgtgatttcarcattttgagaggccaaggcaggcagatcacttgaggtcaggagtttgagaccagcctgaccaacatggtgaaaccacgtctctactaaaaaactacaaaaattagctgggctttgtggcatgcatctataatccaagctacttgggaggcaggagaatggtgtaaacccgggaggcggagcttgcagtgagccgggattgcgccactgcactccagactggacgacagagcaagattccatctcagaaaataaataaataaataaataaataaataaataaataaataaatatataagtcatgtatgcattataagaaaatgtataatcactttataagaatgttatctcatataatacaataaggttttaaaataatgtgaagaatcgagaaaattagtgattgatgggagtggaaaattaaaaataaaaaaatttaaaagtcaggagtca

SEQ ID NO: 193909 - DNA, 500 bp, Homo sapiens
aaaaagaggtgaagggccaggcgcagtggctcatgcctgtgatttcaacattttgagaggccaaggcaggcagatcacttgaggtcaggagtttgagaccagcctgaccaacatggtgaaaccacgtctctactaaaaaamtacaaaaattagctgggctttgtggcatgcatctataatccaagctacttgggaggcaggagaatggtgtaaacccgggaggcggagcttgcagtgagccgggattgcgccactgcactccagactggacgacagagcaagattccatctcagaaaataaataaataaataaataaataaataaataaataaataaatatataagtcatgtatgcattataagaaaatgtataatcactttataagaatgttatctcatataatacaataaggttttaaaataatgtgaagaatcgagaaaattagtgattgatgggagtggaaaattaaaaataaaaaaatttaaaagtcaggagtca

SEQ ID NO: 193910 - DNA, 344 bp, Homo sapiens
aaatagtatataatatagaatttacacatataaacatatgtggcatataaaacatatttatagaacatatgtaaaatcatatgtatcatatgtaaatgaagagcaacagtgatcaattctaaggggaaggcatatgggtaggggattggaggaacagagatttatcaaggttgaattttgtttgctgtgtattgactgaattatttacaataaggatgcattcacttacggattgtgaaattttaaaattaaaaaaaaagacctgacatataggtaatattcartaaataattgctgttattgtagatgtgaatgtaattattaatcttgaaattatgtattag

SEQ ID NO: 193911 - DNA, 561 bp, Homo sapiens
tttttaaggggctcaatatgggaaaatgggttatagatacgggtaatggcaagagccactgacaagtttaccagtgacaagatgtgccaaaggtttaggtatgggctgagacacagaaagaaataataaaggacacctcccaggttttggcctgagcaactgcctgaaggtgatrccacttactgaggggcccagtaagaaaagcaaacttggctggggaagaactagaaaggaaatcgagagttcagacctgccatgttaaatgtgagatgcagccatacaagtggacgtgatgacaccattctgtagttcaagtgaatgttctggctagagatatccatttgggaattttcacagtagatacagaattaaaacctatgcaattagatattatcaaccagagagcaagtaatgatagagaaaaacaaagtataaggaaaacagtaacttgggcagtgcaatatttagatgtcataaagaggaggaagatccatcaacgcagatagagaacacgctaatgggatagagggaaaaagtaacccaatagtacgtggtgtcctg

SEQ ID NO: 193912 - DNA, 561 bp, Homo sapiens
tttttaaggggctcaatatgggaaaatgggttatagatacgggtaatggcaagagccactgacaagtttaccagtgacaagatgtgccaaaggtttaggtatgggctgagacacagaaagaaataataaaggacacctcccaggttttggcctgagcaactgcctgaaggtgataccacttactgaggggcccagtaagaaaagcaaacttggctggggaagaactagaaaggaaatcgagagttcagacctgmcatgttaaatgtgagatgcagccatacaagtggacgtgatgacaccattctgtagttcaagtgaatgttctggctagagatatccatttgggaattttcacagtagatacagaattaaaacctatgcaattagatattatcaaccagagagcaagtaatgatagagaaaaacaaagtataaggaaaacagtaacttgggcagtgcaatatttagatgtcataaagaggaggaagatccatcaacgcagatagagaacacgctaatgggatagagggaaaaagtaacccaatagtacgtggtgtcctg

SEQ ID NO: 193913 - DNA, 561 bp, Homo sapiens
tttttaaggggctcaatatgggaaaatgggttatagatacgggtaatggcaagagccactgacaagtttaccagtgacaagatgtgccaaaggtttaggtatgggctgagacacagaaagaaataataaaggacacctcccaggttttggcctgagcaactgcctgaaggtgataccacttactgaggggcccagtaagaaaagcaaacttggctggggaagaactagaaaggaaatcgagagttcagacctgccatgttaaatgtgagatgcagccatacaagtggacgtgatgacaccattctgtagttcaagtgaatgttctggctagagatatccatttgggaattttcacagtagatacagaattaaaacctatgcaattagatattatcaaccrgagagcaagtaatgatagagaaaaacaaagtataaggaaaacagtaacttgggcagtgcaatatttagatgtcataaagaggaggaagatccatcaacgcagatagagaacacgctaatgggatagagggaaaaagtaacccaatagtacgtggtgtcctg

SEQ ID NO: 193914 - DNA, 519 bp, Homo sapiens
gactctggtcaactgttcctgtcagacttcagcaagttaataggtaactacttctcttctcatttttcatattttcaaaaatcactctgaggaaagatcaaaatatcatgctcagaactattaatattctaaatgttaaaaatcagcaacattaatgaacttgttatatggaacaacatattaataaactgagctctagacatggaagaaactaagtcttcagcgatatacattttccagtgatctgtgcacatgtgtaattaacatgttttggtcatggtatcaatgtgtaaaatcatagaagattagcatttgaagggtaattggagcctacacacagcacgcacatgctcacatgcatgtccacwtgggcaccctgcattaccctccccaaggaagaaaccttcctccagttgattttccatagaatttttcccaaatgaatctgtaggcccttagtagtggtaactaatcaacccctaggcattgtcttctccaatgccactgcaacctcccctg

SEQ ID NO: 193915 - DNA, 519 bp, Homo sapiens
gactctggtcaactgttcctgtcagacttcagcaagttaataggtaactacttctcttctcatttttcatattttcaaaaatcactctgaggaaagatcaaaatatcatgctcagaactattaatattctaaatgttaaaaatcagcaacattaatgaacttgttatatggaacaacatattaataaactgagctctagacatggaagaaactaagtcttcagcgatatacattttccagtgatctgtgcacatgtgtaattaacatgttttggtcatggtatcaatgtgtaaaatcatagaagattagcatttgaagggtaattggagcctacacacagcacgcacatgctcacatgcatgtccacatgggcaycctgcattaccctccccaaggaagaaaccttcctccagttgattttccatagaatttttcccaaatgaatctgtaggcccttagtagtggtaactaatcaacccctaggcattgtcttctccaatgccactgcaacctcccctg

SEQ ID NO: 193916 - DNA, 519 bp, Homo sapiens
gactctggtcaactgttcctgtcagacttcagcaagttaataggtaactacttctcttctcatttttcatattttcaaaaatcactctgaggaaagatcaaaatatcatgctcagaactattaatattctaaatgttaaaaatcagcaacattaatgaacttgttatatggaacaacatattaataaactgagctctagacatggaagaaactaagtcttcagcgatatacattttccagtgatctgtgcacatgtgtaattaacatgttttggtcatggtatcaatgtgtaaaatcatagaagattagcatttgaagggtaattggagcctacacacagcacgcacatgctcacatgcatgtccacatgggcaccctgcattaccctcccyaaggaagaaaccttcctccagttgattttccatagaatttttcccaaatgaatctgtaggcccttagtagtggtaactaatcaacccctaggcattgtcttctccaatgccactgcaacctcccctg

SEQ ID NO: 193917 - DNA, 519 bp, Homo sapiens
gactctggtcaactgttcctgtcagacttcagcaagttaataggtaactacttctcttctcatttttcatattttcaaaaatcactctgaggaaagatcaaaatatcatgctcagaactattaatattctaaatgttaaaaatcagcaacattaatgaacttgttatatggaacaacatattaataaactgagctctagacatggaagaaactaagtcttcagcgatatacattttccagtgatctgtgcacatgtgtaattaacatgttttggtcatggtatcaatgtgtaaaatcatagaagattagcatttgaagggtaattggagcctacacacagcacgcacatgctcacatgcatgtccacatgggcaccctgcattaccctccccaaggaagaaaccttcctccagttgattttccatagaatttttcccaaatgaatctgtaggyccttagtagtggtaactaatcaacccctaggcattgtcttctccaatgccactgcaacctcccctg

SEQ ID NO: 193918 - DNA, 568 bp, Homo sapiens
tcggccctcctcctcaaccctgtctttgagggcatgcgcctgcttcccatcacaattctgaatgtaaggtattaattggagcaacagcagaaagatttgggaaagcgatggtaagacaagcctgtgtacccactgtgtggtgcagcaaagacacgtgaatttctcatgggttcaaaaaggggttatagaagttgaccaggttatgagccatcctgtaggaactcttcactggagggtagcctgtgtggttagggkatatccatagcacaaagtcatgggtaagtcctgggaatagaacctgagggggttccaatatatcgggcaaagtgtgcattatacacatcaggcatgtgtgacctatgagaaatctacaagcgagcatgttagcccactctacacgaaggaccaaattatacatgatttttcactttttttccccattcctcctccttagcctcaacacattaaagaaggaaggggaaagaagaagagggagaggcacagtgaagaagaaaagtagagttaaatagagtccttagccacttgcccacgatgggtcttgtagcca

SEQ ID NO: 193919 - DNA, 529 bp, Homo sapiens
cagtgcctttctttgtccgtaattttaattgatttatagtctgctttatctgatataagaatagcaactcctgctcttttttttcccattttcatggtagatctttctccatccctttactttgagcctgtgggtgtcagtgtcaatatgtctgagatgggtctcttgaagatagcagattgtcgggtcttggctttktctccagcttgctcctctatttattttaaggaactgtttaggccatttccattgataattagtattgatatgtcaaatttgatcttgtcattgtgttgttagatggttgttatgtagacttaatcatgtagctgctttatagtgcctgtgggctatgttcttaagtgtctttttgtggtagtaggtgttgttgttttgttttctggcttagctttcccttaaagacctcttgtatggttggtctacctgaaaaaatttccctcaatgtttgcttgtctgagaaagattttatttctctttcacttacaaagcttagtctgcaggatatgaa

SEQ ID NO: 193920 - DNA, 574 bp, Homo sapiens
tctagttctcagtatcttcttcctttctgatcctttagcaggtccagaccaagcaagtctggtggggaggagcctgttctagatctggagagtccctgcatccaattccaattgggtactaagttcactattagggtgacaggttcaatagaaacccaaacgtcagcatcacataatatatccatgtaacaaacctgcacatgtgccctrgaatctaaaattaaataaataaataaataaataaagcagtggacctgggataggccatgaatatctactattttagatgaaggattaggacagtccatggatacagtgctttcttaaatagaccctcaaaattctgcatcataaaatcctgatactcaggagcaatttgaagcactccatttggtactgtagtgtttttgagttgctttgtatttagcgtgcttttattttttctcaaattgcttcaatgctacctggcccatgacctcttttggagttcgtgaaaaaaactgcacactggcaaacagctttgccaaatgattatcattttctcttattaaaaatcatcttattctttgctcct

SEQ ID NO: 193921 - DNA, 484 bp, Homo sapiens
aatttttgtcatctgaactttctattacaattcattttacaaatctcatataagttgaagagagcaagaggaatgaaagggaggggaaagaaaaaaggaggcctttattttgcctacaggcatacttttattcttttttcttggcttaaaggacaaataaaggttgacacacaatagtatttctagccaattcggtatttttaatgctgacatacttggcccaagttcttttagtgatcctagacaagctcatcggagggagtttctgtttaaaagatacatagattgccccggaggtgtaatgtctgatgttccactagaattcttccaggaatcctacatttgtatgcattttttttctttcttttctcttagctccaccttcctttttaaactccaccatgttatttacaaaaatattatttggtcacactgatctgaaatgacatctggwtgttcaaatatttagaacttcatattttca

SEQ ID NO: 193922 - DNA, 337 bp, Homo sapiens
tgacatctgggttggaatgaacatgagattccttttgggtgagcaaaataaaacaggccatgcaaaactatgctctgtctaatccttgtgcctgatgcacacgggcttcagtgacatttctggaactgatttgtacttagccaagatgcactttttaataaactgcaagaggaaaatggcattagctactttaacaaggaagcaaaatatatagttggaaagtgagaatgaaaaatgcttaagtaaaaagatgaaakaatttttccttgttcacccacctcattccccggattaattaatacctattttgcctccaagtaaatacaggatcaaaatg

SEQ ID NO: 193923 - DNA, 526 bp, Homo sapiens
tgccgagttttaacccctatacatagatctcctgaattcgaatctacatttagcaagacccccaagagacatatatgcacgtgaaaatggggaatcactggcccatgatgttgcatttctgttaggggctttctcccatagagtaaccaaagaaccagtcacccaagggasataaactgaggaccagatttgagaggtttccagccacacagggaggaatgcacagatgcatgctggattccgcggtgccaaaccaaacagtttgccatttgctctgactgttttattgccctgaaactatgcactcagcttcttctgaggcttccaacacacaatgaatccacagaaaaaataaataatgtaaaggttttctaaggcacttggcagcagaaggaatttttagtggggctcagattgagggaggggtggagaagaggaagaaatggaatttggacatatagcagaaaggaattcctaaacactttccgagtttcatcaccttggcaggttgaaaaaggaatttgta

SEQ ID NO: 193924 - DNA, 526 bp, Homo sapiens
tgccgagttttaacccctatacatagatctcctgaattcgaatctacatttagcaagacccccaagagacatatatgcacgtgaaaatggggaatcactggcccatgatgttgcatttctgttaggggctttctcccatagagtaaccaaagaaccagtcacccaagggagataaactgaggaccagatttgagaggtttccagccacacagggaggaatgcacagatgcatgctggattccgcrgtgccaaaccaaacagtttgccatttgctctgactgttttattgccctgaaactatgcactcagcttcttctgaggcttccaacacacaatgaatccacagaaaaaataaataatgtaaaggttttctaaggcacttggcagcagaaggaatttttagtggggctcagattgagggaggggtggagaagaggaagaaatggaatttggacatatagcagaaaggaattcctaaacactttccgagtttcatcaccttggcaggttgaaaaaggaatttgta

SEQ ID NO: 193925 - DNA, 422 bp, Homo sapiens
gcaagacccccaagagacatatatgcacgtgaaaatggggaatcactggcccatgatgttgcatttctgttaggggctttctcccatagagtaaccaaagaaccagtcacccaagggagataaactgaggaccagatttgagaggtttccagccacacagggaggaatgcacagatgcatgctggattccgcggtgccaaaccaaacagtttgccatttgctctgactgttttattgccctgaaactatgcactcagcttcttctgaggcttccaacacacaatgaatccacagaaaaaataaataatgtaaaggttttytaaggcacttggcagcagaaggaatttttagtggggctcagattgagggaggggtggagaagaggaagaaatggaatttggacatatagcagaaaggaattc

SEQ ID NO: 193926 - DNA, 529 bp, Homo sapiens
tgccgagttttaacccctatacatagatctcctgaattcgaatctacatttagcaagacccccaagagacatatatgcacgtgaaaatggggaatcactggcccatgatgttgcatttctgttaggggctttctcccatagagtaaccaaagaaccagtcacccaagggagataaactgaggaccagatttgagaggtttccagccacacagggaggaatgcacagatgcatgctggattccgcggtgccaaaccaaacagtttgccatttgctctgactgttttattgccctgaaactatgcactcagcttcttctgaggcttccaacacacaatgaatccacagaaaaaataaataatgtaaaggttttctaaggcacttggcagcagaaggaatttttagtggggctcagrttgagggaggggtggagaagaggaagaaatggaatttggacatatagcagaaaggaattcctaaacactttccgagtttcatcaccttggcaggttgaaaaaggaatttgtatgt

SEQ ID NO: 193927 - DNA, 565 bp, Homo sapiens
catatggtatctgagaacacagacttcctatatgaagttctacacaggtgttatgtcactgttgagctgggggatttcatgctrgattccaacttgttcggtttttttaaaaaatcatattgatgtttttgaaaacactcttctaatctttatagaaaatctgtctccaataaattcatgtaaaccccttcaatttacttgaattttagcttgtgcttcctttttatacaaagttttccataagtttagtattagtggtatgaagtggttctctgcttcaattcatttgtcttaaatatacctatttcatgctctaagagatgtcttttaaattaaatgaatgagttgcctaaataatttattattccataaatttatattacataattcttttattagttaccattcatctctctgactttaaaaagatcgaatgttgctagtcaggttttatttagcattttatctctcatcaccctggttaccttgagtgctgtattagtttacaggctgccataataaatcactacaaactgagtagtccaaagaaacagaaatctattct

SEQ ID NO: 193928 - DNA, 557 bp, Homo sapiens
ttgtcactatcctctatgatatgcggaatttaactgaaatggaaatcagggtattagagtggccctttttatgtcatattgctttattgggtgtttatacttaagctaattactaattagtaactgaggcttagaagcagtgataagactggcctttgtaaggcctatagacttattctaattgctttatagtaggattgtatgtgggaaattgagattaagagaattgcttacagctgcaacatttaggccctgacatcctttaataataggtgacatgtcttgagagcttatgaagtgttaggcactattctaagcaccattcattatctcacttgataattacaacaatacagtaagttggatgctrttataattgtccaccttttacacataaggaaactgattaaatcactttcccaaagttatctagctcatgaatggcagaactgggattcaaacccaggcctttcacctacaaggcttgtaactcttaaccatccaacttttccctctccttgtctgttctcttcattgcttccaagagctgggcttac

SEQ ID NO: 193929 - DNA, 547 bp, Homo sapiens
agctataaggccagttttcccaaggagctcttattggctaagtcaagcttgattccttaaaggagagcatgccatttaagtcaaagccttggtaaaacaatcagtttctccaattgtgtcctgttgcaaaagaaaacattcttattgcacttatgcaaataattacattgccataagttaagaacactcacaaatattttccaaattctggagaaattagatggagagaaatgtgctccaaattttgttcacaggagtatactttactcaattgttaaaagctgtaaatagcttaaaaattttcttcactgaaaaacaaaacaaaggatcagcaacattttaagcaaaaggtcaaaaagattagttcagtcttctrgcagttcagtccatgcagttaactctgcattcaagagcacctatcaaattctatagctgattgtaaaccaccttttgaagaggatcaaaacaagagggctgtctgtgaatgacaaaaagtcttgggacggacattattaaaaccacaattgactggaaatttgttgctttc

SEQ ID NO: 193930 - DNA, 605 bp, Homo sapiens
gacacataaatacagagatatattagacacatagctagtagatcttatagattaataagacttctatttttccgcctattttagacatccaatttcttgataactattttattaccctaggcaattgtcagagagccctaaatctgcatattaaaggaactcttaggtgaaaaatcagataatgaaatttacatctcaaagtacagagagaatctgatggtgcttgagggagattaaaaatgaatgccaaatcaaacataaaattatagaaatctatcatagaattatgtaataagaccaattttattttgctagagaccacctatctcctaactgggtatctragctttgggcagagcccatgttcaatcctggttctccaaaaaaggagaattcttatgtggctaggccaggtgattgttttacagtacatcaaggaaatctttttaacaaagacatttctatgtgtctaagctatactattccttaaagatccaagagtagcctctgttgtaataactaatttatgttttacttgtcaaaaaatcaggtaacataatacaaaaccaagtagtttatgatctgagatggacttgtctgtttac

SEQ ID NO: 193931 - DNA, 605 bp, Homo sapiens
gacacataaatacagagatatattagacacatagctagtagatcttatagattaataagacttctatttttccgcctattttagacatccaatttcttgataactattttattaccctaggcaattgtcagagagccctaaatctgcatattaaaggaactcttaggtgaaaaatcagataatgaaatttacatctcaaagtacagagagaatctgatggtgcttgagggagattaaaaatgaatgccaaatcaaacataaaattatagaaatctatcatagaattatgtaataagaccaattttattttgctagagaccacctatctcctaactgggtatctgagctttgggcagagcccatgttcaatcctggttctccaaaaaaggagaattcttatgtggctaggccaggtgattsttttacagtacatcaaggaaatctttttaacaaagacatttctatgtgtctaagctatactattccttaaagatccaagagtagcctctgttgtaataactaatttatgttttacttgtcaaaaaatcaggtaacataatacaaaaccaagtagtttatgatctgagatggacttgtctgtttac

SEQ ID NO: 193932 - DNA, 406 bp, Homo sapiens
gaattcatgttactgtgttaataattgatgtaaaattcatttatgagaatgaaagatagagtaagagctttctgtgtctttgtgtcaagaagcatgcctatgaagggcatgtggcggtgagttggaaccagcatgtgctgacttgtgaaagctgaattttatcatttctagcaaccctacatttgtcctttgaaattggccatkgaggagtatttacatcataggaataggcaaagagtatgactcagcatttctttctcctttttctgtagaataaatttaccagcacaacagtacgccattgacctgggagtggaggagtgacaatgaacacagtaagatacaacaagccaaagacaaaattggaatagcatagacaaaaaattatgattttacctgcttcact

SEQ ID NO: 193933 - DNA, 406 bp, Homo sapiens
gaattcatgttactgtgttaataattgatgtaaaattcatttatgagaatgaaagatagagtaagagctttctgtgtctttgtgtcaagaagcatgcctatgaagggcatgtggcggtgagttggaaccagcatgtgctgacttgtgaaagctgaattttatcatttctagcaaccctacatttgtcctttgaaattggccattgaggagtatttacatcataggaataggcaaagagtatgactcagcatttctttctcctttttctgtagaataaatttaccagcacaacagyacgccattgacctgggagtggaggagtgacaatgaacacagtaagatacaacaagccaaagacaaaattggaatagcatagacaaaaaattatgattttacctgcttcact

SEQ ID NO: 193934 - DNA, 598 bp, Homo sapiens
ttaccactcaccaccagggacaacaagtactcctgattgaaggaaacattaggagaagtatgttttatgtatttagaactatttttctactttaattataactattgctaattgcgggcagtggaaaaaatagtaaatcatttctggaagagtaacagcaaagacacagggaaagaaaaatgaaaaaatcttctccttagtcctagtcccattaaaaaaatacaagaaaaaggatcaattaaagttataactgccagaatatatgatcactttttatgaaatgataactstaacaatttacttatgataggctccccctctccccgcaatttataccttttcccaaaaggtaatttataatcaaacataaagcaaatacgttcttggtgatttctctgtgttaaatattcagtactgagtactatgaagataaaatgagcacagtttatgactaaaatatatcattttgacttattttaaaattcagaatcttatgcaaagagatatgcatgtgaaagaaacaattatgctatagagtatgaggtcttggggaagagatatagctaaaaaactctggaatgctttcataaaggcaaca

SEQ ID NO: 193935 - DNA, 616 bp, Homo sapiens
caaagagatgtcatggctctggattggggaatccctaagtctgatctgggatcctcaaagggctgcagctcttctcgccttcttgtcacctgcttcgtggtaagtgggggccatgtttcrgccctgtttatattacagctcttttattcccaccatttgacaggtcctaagttcttgtcacatgttcaggaagaatgagggatgtgggtaagcaaggggcagaggagcttcactgagtgacagaacagctcctaggagacccaaaatgggtagctcctctttgcaggcaggtcaatccaacatctgtccagctctccgtggagaggagactcacggtggctaactcctttctgcaggcaggtcatcccagtgagtgtcaaactctcagaagagaggagacctgcagtgggtagctccttttcacaggcagatcatccctgtgaggtctgtgcagccctcagcagagagaagacctggagtgggtagctcctaaccataggtgggtcataggggatgtctgttggagtctggggtttttatgggctcagaagggaagaagtgcatgttaattggtcaatgagcagccatgggtgggcctggaaaaagtaccataagt

SEQ ID NO: 193936 - DNA, 616 bp, Homo sapiens
caaagagatgtcatggctctggattggggaatccctaagtctgatctgggatcctcaaagggctgcagctcttctcgccttcttgtcacctgcttcgtggtaagtgggggccatgtttcggccctgtttatattacagctcttttattcccaccatttgacaggtcctaagttcttgtcacatgttcaggaagaatgagggatgtgggtaagcaaggggcagaggagcttcactgagtgacagaacagctcctaggagacccaaaatgggtagctcctctttgcargcaggtcaatccaacatctgtccagctctccgtggagaggagactcacggtggctaactcctttctgcaggcaggtcatcccagtgagtgtcaaactctcagaagagaggagacctgcagtgggtagctccttttcacaggcagatcatccctgtgaggtctgtgcagccctcagcagagagaagacctggagtgggtagctcctaaccataggtgggtcataggggatgtctgttggagtctggggtttttatgggctcagaagggaagaagtgcatgttaattggtcaatgagcagccatgggtgggcctggaaaaagtaccataagt

SEQ ID NO: 193937 - DNA, 616 bp, Homo sapiens
caaagagatgtcatggctctggattggggaatccctaagtctgatctgggatcctcaaagggctgcagctcttctcgccttcttgtcacctgcttcgtggtaagtgggggccatgtttcggccctgtttatattacagctcttttattcccaccatttgacaggtcctaagttcttgtcacatgttcaggaagaatgagggatgtgggtaagcaaggggcagaggagcttcactgagtgacagaacagctcctaggagacccaaaatgggtagctcctctttgcaggcaggtcaatycaacatctgtccagctctccgtggagaggagactcacggtggctaactcctttctgcaggcaggtcatcccagtgagtgtcaaactctcagaagagaggagacctgcagtgggtagctccttttcacaggcagatcatccctgtgaggtctgtgcagccctcagcagagagaagacctggagtgggtagctcctaaccataggtgggtcataggggatgtctgttggagtctggggtttttatgggctcagaagggaagaagtgcatgttaattggtcaatgagcagccatgggtgggcctggaaaaagtaccataagt

SEQ ID NO: 193938 - DNA, 563 bp, Homo sapiens
tctagatctcttgaactttctagctaatcaaggatacaagrcatctaaattgaaggcctacctctgcctacaacaagtcaaatatctagacctaatcttagccagaggaactagagccctcagcaaagaacaaattcagcctatactggtttatcctccccctaagacattaaaacaattgtgggcattgcttgggatcaccggcttttccaaactatggatccccagatagagcgagatggccaggccactctatacgctaatcgaggagaccagagggcaaatactcatctagtagaatgggaaccagaggcagaaacagccttcaaaaccttaaagcagtccctagtacaagctccagccttcagccttcccacaggacaaaactcctctttataagtcacagagagaggaagaatagctcttggagtccttactcagactcgtgggacaaccccacaaccagtggcatacctaagtaaggaaattgatgtagtagcaaaaggttggcctcactgtttatgggtagttgcagcagtggccatcttagtttcagaagctat

SEQ ID NO: 193939 - DNA, 598 bp, Homo sapiens
aagctttgttctttcactcttcacaataaaccttgctgttgctccacctttgggtctgtcccacctttaagagctgtaacattcattgcaaaggtacgcagcttcattcttgaagtcagtgagaccccaaacccactggcaggaaccaactctggacacagtttgaatgttaacaatwaagtttttcttagcaatccaaattttgggtcatgcaatcttttaaaataatcatgcagatatggtatatgctacgtttgacattttaaatataaaggtcaactaaaggaataaaacaaacactgtaaactcaaaaattttcagggattttaacagttagagcttttaaaaaactagactgtgttttctttcatcctcaaaatttatgagaaaaatacaccagacatgtaaaaatgatagacccataaaaagaaaattttagggtttatatgaagttagtgcagatctaatccaactctttcacctacatgtgtagtttcatatagtcattgattttctccaaggcatgtcctatagtttattgccttcatttatttacactatttttttctgcaatagctaaaccctgtcatttctacct

SEQ ID NO: 193940 - DNA, 598 bp, Homo sapiens
aagctttgttctttcactcttcacaataaaccttgctgttgctccacctttgggtctgtcccacctttaagagctgtaacattcattgcaaaggtacgcagcttcattcttgaagtcagtgagaccccaaacccactggcaggaaccaactctggacacagtttgaatgttaacaattaagtytttcttagcaatccaaattttgggtcatgcaatcttttaaaataatcatgcagatatggtatatgctacgtttgacattttaaatataaaggtcaactaaaggaataaaacaaacactgtaaactcaaaaattttcagggattttaacagttagagcttttaaaaaactagactgtgttttctttcatcctcaaaatttatgagaaaaatacaccagacatgtaaaaatgatagacccataaaaagaaaattttagggtttatatgaagttagtgcagatctaatccaactctttcacctacatgtgtagtttcatatagtcattgattttctccaaggcatgtcctatagtttattgccttcatttatttacactatttttttctgcaatagctaaaccctgtcatttctacct

SEQ ID NO: 193941 - DNA, 572 bp, Homo sapiens
ctgagtatttctagcaactgctaaatgatacataatgaatctcaatttaggaaacattgtactaaatattaaacatggacactttatgtgatcaccatgccatagactagaggtaaaaacacagacctaagctcaaaaataaaatgcactttgaaatactgttgacgttatttattacatgagcatcagtgttatcaagatgatgcattgttcaggattatagatactagaaatttaacattaattttaaaatataataatgatcttattaaattgacagacctcacagagtatattttcaatcatcctactttgggaacaattgtttgaagagccctgacctgctgcctttaaaatacatcaatgcttgytccacactcaatggacatccattgtaaattactctggactgcatcagaggatatacatttttgacaaatatgaatgaaagcagaactaatataatgatataggaagtgggaatttcccagctatttaaggaacaggacagaaatgatcttctgtggatcgtgtaccttccatggaacattatccctcctatctctattata

SEQ ID NO: 193942 - DNA, 463 bp, Homo sapiens
ggaattatataaagcatcattttgtctctggaatttattccttcccatgggttatcggtctcactgacttcaagaatgaagccaaggttcttcgcagtgttaagctyttaaggatggtgtttccggagtttgttgcttcagatgtttagatgtgtctggagtttcttccttccggtgggttcgtggtctcgctgacttcaggagagaagccacagacctccgcagtgagtgttacagctcttaaaggcggcacgtccagagttgtttgttcctcctggtgagttcatggtctccttgacttcaggaatgaagccacagaccctctccgtgagtgttacagctcataaaggcagtgcggacccaaagagtgagcagcagtaagagttattgtgaagagtgaaagaacaaagcccccactccatgaaagggggtcccaccaggttgctgctgctggctccggtgg

SEQ ID NO: 193943 - DNA, 478 bp, Homo sapiens
ttttttttttctattccacacattcgtgagatcatagaatattttcctttctgtgtctggcttattttacttggcataatgtcctctaggttcatgcatgttgtggcaaaagaccaaatctccttctttattaaggctgaataatattcccttgtatatctatactgtattctctttattcattaatcagtgacgttttgttttcatatcttagctatyataaataatgctgcaatgaacataggagtacagatatctctttgaggtggtgatttcatctctatttggcatgtatctaaaagatggattgctgggtcatacgttagttctatttgtaattactttaggatctgccacattgctttccatatggctgtaccggtctacattcccaccaacagtgtattggggttcccttaactccacactctagccaacatttattgtctcttttatttttcataataaacatccttac

SEQ ID NO: 193944 - DNA, 588 bp, Homo sapiens
attttgttttgttttgttttgttttgttttgttttgttttgttttgagacggagtttcactcttgttgcccaggctggagtrtaatggcacgatctcggctcacggcaacctcagcctcccaggttcaacggattctcctgcctcagcctcccaagtagctgggattacaggtgtctaccaccacgcccggctaatttttgtatttttaatagagacggggtttcaccatattggccaggctggtgtcaaactcctgacctccaggtgatcctcccgccttggtctcccaaagtgctgggattacaggcatgagccaccacaaccagccaatgcctggactttatccatgtttttcccccatacctgaatcacctttttctccatctttacctagatagctaattctgattctttgtatcagctcaagtgtgacttactcccagaaggcttctctgactccctaggctacatctgctttcttttttagaagatgtcatggacttttatccttcccttcatagcacttactgtgcagtcaatcactcttggttgtgtttattccataacactcatctccaacaccagct

SEQ ID NO: 193945 - DNA, 422 bp, Homo sapiens
ataaacacaggatgaaagactgaagcratgcttctttctgcttttaaccatattctctctctgatcccttcacatgctactatacaagctccctacagtgtttaagtatgacatcttttagctccaccttctgagattcagtaaggctctttctccagctttagtttgaaaacttctaggctgggcacagtggctcacgcttgtaatctcagcacttagggagactgaggcgggcggatcacctgaggtcaggagttcaagactaaccttaccaacatggagaaaccctgtctctaataaaaaatacaaaattagccaggaatggtggcacatgcctgtaatcccagctactcaggagcctgaggtaagagaaacacttgaacctgggaggcagatgttgcagtgagctgagatggagtcat

SEQ ID NO: 193946 - DNA, 425 bp, Homo sapiens
tgttcttctagttgcttaggttaaagttgttgaataatctttgacctacctcttcttctcacaccccacatttaatcttattgcaaaacctattagccatacttgtcaaatacatctcaagcatgatgacttttaccatccctccactatcttttctggccaaagctcccaacgtcttccatctaatacattgcagtggccttataaatggtttcttggcttattttgaactatatgcagtatagcagccaagtaagcctgtataaatgacaatcaaaaagcctaatagycctgtgccccaaaccatccaatagcactttttctatcccttgaattccccttctggttttgtctaacatgattcttgccctcactgtgcctcttggcctcactctggcctcattagggttcttcagacataccag

SEQ ID NO: 193947 - DNA, 602 bp, Homo sapiens
atttgtaaggcaaaagcctggattataaaaatttcaactatgcattgttctcctgatattcttccctaaaaattgccaggatagctaccagtaaagagagggtcagtattaattatagcaggtttagctttcctgcatattgcatgagacacaaagataataatagtctcctacgtttgtacttttgtgttatgttaatgatcgtcagtaaggcaatgtgccaggaagactatacagtcttctacttctgccagaggtatctgcgttttaatccaaaatatctatgtttaaatttcatctcccaaaaragattgcattgagtccactctgtcttttgaaacacttcattttgccagtgagtggattttcatgctgtggtgcagtcagatgcactctagctctacagcaagtgttcctcaaagagatgcttctgtactttgcttcctccctggatatagctttggcaatggtccagtgagactgagaaaatactctcaaattaggcatgggctggtgataattgttaattattgaatgctgctgggtgaggaaaaattcatgcaaaggcaaatagatggtatgtgaaagtagcaaccacactg

SEQ ID NO: 193948 - DNA, 602 bp, Homo sapiens
atttgtaaggcaaaagcctggattataaaaatttcaactatgcattgttctcctgatattcttccctaaaaattgccaggatagctaccagtaaagagagggtcagtattaattatagcaggtttagctttcctgcatattgcatgagacacaaagataataatagtctcctacgtttgtacttttgtgttatgttaatgatcgtcagtaaggcaatgtgccaggaagactatacagtcttctacttctgccagaggtatctgcgttttaatccaaaatatctatgtttaaatttcatctcccaaaagagattgcattgagtccactctgtcttttgaaacacttcattttgccagtgagtggattttcatgctgtggtgcagtcagatgcactctagctctacagcaagtgttcctyaaagagatgcttctgtactttgcttcctccctggatatagctttggcaatggtccagtgagactgagaaaatactctcaaattaggcatgggctggtgataattgttaattattgaatgctgctgggtgaggaaaaattcatgcaaaggcaaatagatggtatgtgaaagtagcaaccacactg

SEQ ID NO: 193949 - DNA, 410 bp, Homo sapiens
ccatggcattgtagtcgagaaagaatttaactgatgagaggccagcccacatgggraaaactggagttatcactcacatcagcctccctaaaagctcagaggttagggtttgcatggacaatttgatgactgggagactagggaatgggtgctgctgattggttggggatgaaatcatagggtgtggaaaatggtcctcatgcattgaggctgcctctgggtagggccacaggaccagttgtatcatgagtcacaggtcctggcagggccagtctgttgtaaaaatgtctgaaaaaatctcataagatcaagcttaggttctacaatggtgatgttatccataggagcaactgaggaagtcacaaatcctgttacctctggctacatgactcctgagcagtaaggaatta

SEQ ID NO: 193950 - DNA, 392 bp, Homo sapiens
aaagaatttaactgatgagaggccagcccacatgggaaaaactggagttatcactcacatcagcctccctaaaagctcakaggttagggtttgcatggacaatttgatgactgggagactagggaatgggtgctgctgattggttggggatgaaatcatagggtgtggaaaatggtcctcatgcattgaggctgcctctgggtagggccacaggaccagttgtatcatgagtcacaggtcctggcagggccagtctgttgtaaaaatgtctgaaaaaatctcataagatcaagcttaggttctacaatggtgatgttatccataggagcaactgaggaagtcacaaatcctgttacctctggctacatgactcctgagcagtaaggaattat

SEQ ID NO: 193951 - DNA, 393 bp, Homo sapiens
gaaagaatttaactgatgagaggccagcccacatgggaaaaactggagttatcactcacatcagcctccctaaaagctcagaggttagggtttgcatggacaatttgatgactgggagactagggaatgggtgctgctgattggttggggatgaaatcatagggtgtggaaaatggtcctcatgcattgaggctgcctctgggtagggccacaggaccagttgtatcatgagtcacaggtcctggcagggccagtctgttgtaaaaatgtctgaaaaaatctcataagatcaagcttaggttctacaatggtgatgttatccataggagcaactgaggaagtcacaaatcctgtyacctctggctacatgactcctgagcagtaaggaattat

SEQ ID NO: 193952 - DNA, 564 bp, Homo sapiens
ctataattcctattaggtgagaattagtataatttgatgctgatataacctgacaagatgaaaatactgttccactaaaatccatggagagattatatcctcaaagttttgaagcaaactattttcactaacaacatgtgattattgaaaagttattttaaatccttgctgaccaaactgatcagagataacgaaatatttaaggatcttctggtcaaatggacaccaaagcttgttggataaaatacatgccagttggatttatggtaatacataagtcagcaagtccctggatttgtctgttatactttctgctatgtattatcaggccycttgaataaagatccatttcagtacaaaaactagttaagattttaagattgaccataaattcagagttttgaactgacgataaactcaatgtgtctgtttataaagataaaaagttgttttaaaaaaaaatccatgttagtagaaaactaaaaatagcaaatagtcccatatttatatctcagtagtcagaatacaaataaacatccttggtgaaaacacatcagtgcttcc

SEQ ID NO: 193953 - DNA, 546 bp, Homo sapiens
tgtttctttcattctttaaaaatgtgttactaatttatattttcagaccagaaggcaaccttattttctttaccagtcttgaatccagactggcacagcactgttatatttgggaaaatacaaatggctgtggaattcttggggaagatgtagacaagccttgacgttgtacaattccttttcactatgcacatccctgcttagcctgggmagagcctctgtacatgaggacgaacatgaatacaagatgaacaccaactgatgtactgacctacagacatctcaacattacagccgctgttatgtctgtgaaagagttcacgtgggcttccacttctttactacatgaactcccaaatacccactttcaactatttattcttatcctcatttatagaataaagctgacccaaaacaccaccactaagggagaatgactttgcaactagtggcaagattaaataatgttggaactttgtagcccaagttagcactgaagaaaagatagttcagacaataaacgtatcagtgccatgtgacccttgt

SEQ ID NO: 193954 - DNA, 546 bp, Homo sapiens
tgtttctttcattctttaaaaatgtgttactaatttatattttcagaccagaaggcaaccttattttctttaccagtcttgaatccagactggcacagcactgttatatttgggaaaatacaaatggctgtggaattcttggggaagatgtagacaagccttgacgttgtacaattccttttcactatgcacatccctgcttagcctgggcagagcctctgtacatgaggacgaacatgaatacaagatgaacaccaactgaygtactgacctacagacatctcaacattacagccgctgttatgtctgtgaaagagttcacgtgggcttccacttctttactacatgaactcccaaatacccactttcaactatttattcttatcctcatttatagaataaagctgacccaaaacaccaccactaagggagaatgactttgcaactagtggcaagattaaataatgttggaactttgtagcccaagttagcactgaagaaaagatagttcagacaataaacgtatcagtgccatgtgacccttgt

SEQ ID NO: 193955 - DNA, 546 bp, Homo sapiens
tgtttctttcattctttaaaaatgtgttactaatttatattttcagaccagaaggcaaccttattttctttaccagtcttgaatccagactggcacagcactgttatatttgggaaaatacaaatggctgtggaattcttggggaagatgtagacaagccttgacgttgtacaattccttttcactatgcacatccctgcttagcctgggcagagcctctgtacatgaggacgaacatgaatacaagatgaacaccaactgatgtactgacctacagacatctcaacattacagccgctgttatgtctgtgaaagagttcacgtgggcttccacttctttactacatgaactcccaaatacccactttcaactatttattcttatcctcatttatagaataaagctgacccaaaacaccaccactaagggagaatgactttgcaactagtggcaagrttaaataatgttggaactttgtagcccaagttagcactgaagaaaagatagttcagacaataaacgtatcagtgccatgtgacccttgt

SEQ ID NO: 193956 - DNA, 577 bp, Homo sapiens
aagaaagcatatacactctcggatgctttcatactcagctttcagaattgaaacctgaagctgtcagattattagttgcttagactctctctctctatatgagaaaaatagtctaagattattactcacagatgtttgtttccatggtttttagtctaccaattcataggcttatgaacttttaatttatattttatctgtgaaatgaatcactgatttcagtgttggtcaccacaaattatcagtgactagaacagtgaaagccttaaaacactggtcagaaaacagggtcatgtttctcacctgtcattaagttsctgtgttgccctgagaaagttttttaatctttttggacttcacttttattattagtgaaatgaagacctcaaagtctctttttacagttgtaaggcttttggttttataacttttaaattattataagagaggtaacaatgcaagatactaataaggatctttaatatttaatcagtgcttatcatgtacaaagcatacttcaatgcatttcacattactaaatgtcttagtccattttgtgctcctgtaacaagatgcc

SEQ ID NO: 193957 - DNA, 545 bp, Homo sapiens
gtctctcaatgaaaaaacaagataagcatataagcagtattttagattaactgaatttaaaacataggccaaattagaatacaagcatgatcacttaatgatggggatacatgctgagaatctgttgttggggaattttgttgtgtgaacatcatagaatgtatttacacaaatctaaatggtataacctagtatatatctaggccataaggtatagtctgttgctctcaggctacaacttgtacagcatgttactgtactgaatgccatagggaattgtaacacaatggtaagtatttgtgcatctaaacatatctaatagaaaatatacagtaaaaatacagtattctaatctcatgggaccacagtcatatacatggtctgtcattgatagaaacgttatgtaatgcgtgactgtatttcccaagttattgaccaagcagttaaatggtgacttacactatttagtctccaaggttgaccaataaaccaaatgkaatggagatttttattggttacatatttggttgcaaacatttaaaaac

SEQ ID NO: 193958 - DNA, 448 bp, Homo sapiens
ctacttgttacttccactgtcacagcccctgccttagttcaggacctcatcattctttacctggactgttggagtakccttctaagcatgtttccttatctttccttgttgtcttcaaatcagttattgatgctagaagccagaaggatcctaggagggtttttgcttaagcaaaagctcttcagtgtctgccttgcaataggataaaatctcaacccttttttttggcagcaaatcaagagcaaggtccctatgagctgacttgtaattgattttccccattgtaatcactgcagaaccttttggatccatcttcaatttagcaggttcccaatacattccacactaattcatgcttctgtaccattgtacataactaccctacagacagagttcccttatttgattcctagctctggtcttttcttctctcaatcaatatttgcgc

SEQ ID NO: 193959 - DNA, 448 bp, Homo sapiens
ctacttgttacttccactgtcacagcccctgccttagttcaggacctcatcattctttacctggactgttggagtatccttctaagcatgtttccttatctttccttgttgtcttcaaatcagttattgatgctagaagccagaaggatcctaggagggtttttgcttaagcaaaagctcttcagtgtctgccttgcaataggataaaatctcaacycttttttttggcagcaaatcaagagcaaggtccctatgagctgacttgtaattgattttccccattgtaatcactgcagaaccttttggatccatcttcaatttagcaggttcccaatacattccacactaattcatgcttctgtaccattgtacataactaccctacagacagagttcccttatttgattcctagctctggtcttttcttctctcaatcaatatttgcgc

SEQ ID NO: 193960 - DNA, 554 bp, Homo sapiens
tcagtttgagttaaaaggcaacctgctggtagaattctttcttgctaaggggaggtcagtttttgctctattaaggccttcaaatgattgcatgaagcccatttatatcatggtgggtaacctgctttactcaaagtctattgatttaaatgttaacctcacctaaaaaacaccttcacagaaacttccagaaaaacgtttgacctaatatctggacacaatggctcagccaaattgatgcataaaattaatcatcacaatatataagtgtaccaaaaaactgaaatcacatacctgaagaaaatttgattggattcctttatactcaaaatccaaatataataccagtaaactgttaataattttgactatttaaaaatcttgcatagcaaaacaagacattacaagcaaatgcaaaaggcaaaggaccaacaaaaatgaacatttgcaatatgtatagcmaatattcaatacttacatatcaataacctatctgatacataaatagcttctaaaagttgaggagaaaaaaaccaaaacccaaaagaaaatgg

SEQ ID NO: 193961 - DNA, 611 bp, Homo sapiens
cactatgacaagaacagcatcatgggggtaaccactcccatgattcaattacctmctatggggttcctccatgacatgtggggattatgggaactacaattgaagatgagattttggtggggacacagccaaaccatatcaataataaataaatgctagtcattattaaaataagttaagtaaattgatgaaattttagacctgaattgaagcttcatgattctgtgtaatatacacatattatatttcctagatgacataatcttttcaccattatttaccaagtgaacttcattaagattccacttcaaaatcctttctctgtgaagccttcgatagttgccacccatgactgttagatgttccattttctgagcttccaaaaaccttttccattgatctcactatagcatgtattatcataatgattatgactgaaatgaaaggaaaataaaaatctcaagaccccaaactcactatggcaaggggaaaagtcgagcttgggaattgtgtcacacaaagtgcctttcattttgttcctgaatagatagctgcaaagatagaaggctacatacctccctgggggtcttcttcacaatttgctcataaag

SEQ ID NO: 193962 - DNA, 611 bp, Homo sapiens
cactatgacaagaacagcatcatgggggtaaccactcccatgattcaattacctactatggggttcctccatgacatgtggggattatgggaactacaattgaagatgagattttggtggggacacagccaaaccatatcaataataaataaatgytagtcattattaaaataagttaagtaaattgatgaaattttagacctgaattgaagcttcatgattctgtgtaatatacacatattatatttcctagatgacataatcttttcaccattatttaccaagtgaacttcattaagattccacttcaaaatcctttctctgtgaagccttcgatagttgccacccatgactgttagatgttccattttctgagcttccaaaaaccttttccattgatctcactatagcatgtattatcataatgattatgactgaaatgaaaggaaaataaaaatctcaagaccccaaactcactatggcaaggggaaaagtcgagcttgggaattgtgtcacacaaagtgcctttcattttgttcctgaatagatagctgcaaagatagaaggctacatacctccctgggggtcttcttcacaatttgctcataaag

SEQ ID NO: 193963 - DNA, 611 bp, Homo sapiens
cactatgacaagaacagcatcatgggggtaaccactcccatgattcaattacctactatggggttcctccatgacatgtggggattatgggaactacaattgaagatgagattttggtggggacacagccaaaccatatcaataataaataaatgctagtcattattaaaataagttaagtaaattgatgaaattttagacctgaattgaagcttcatgattctgtgtaatatacacatattatatttcctagatgacataatcttttcaccattattyaccaagtgaacttcattaagattccacttcaaaatcctttctctgtgaagccttcgatagttgccacccatgactgttagatgttccattttctgagcttccaaaaaccttttccattgatctcactatagcatgtattatcataatgattatgactgaaatgaaaggaaaataaaaatctcaagaccccaaactcactatggcaaggggaaaagtcgagcttgggaattgtgtcacacaaagtgcctttcattttgttcctgaatagatagctgcaaagatagaaggctacatacctccctgggggtcttcttcacaatttgctcataaag

SEQ ID NO: 193964 - DNA, 650 bp, Homo sapiens
tcctcccttctctctctgagtctcccctcttccctccctttcaatctctctccctcctttggtgttggagtccaatgattctcatgtagaaacccagtatgtcaagtgagattgtactttctctggcatcctagcagggggcagggtggtctggaaggtaggcaatgcgatatctctgggctggggccctccctgccctcctctttgcaccaactgaagcagctttgcaggagtctaggactccagagagctaggtgtgaaaatcactgatccagggccaaggaggctagtattaaagggctgcaatcatgcattcataattttgtactcagataaaaagaaatcctgagtttatagctacaattctggatttcctcctgcccatcaattccaaatccttgatgtctaggtttctgtgtgatcttacttctccctgcatttctaatattacccagctccattctgctcctcattttctatgtgtcagagtctcatccatgctactttctctgcctgcaatccctctctttgtgcttatctgggtaactcctacctgtcctttaggtgtctgcttagtgycatttatagagaacttcactaaaatttgaaatgtagtttaggccttgttttatattctccaaacatattct

SEQ ID NO: 193965 - DNA, 590 bp, Homo sapiens
aaattatctttcttttgtgatgcttagaaamctgtgactacttaagcccaagtgtgtttgttcaggatccttgttcctgaggactctttctctcttaatatctagcatttcctttttaagtgctagttaaatgcaaatacagcagatcatattggcatataaaagggctcgatatttgattagcaaaagtcaaatttttttagattacgtttttattgcagagactgagaatcctgtaaggtctctgagaatggagcaggattttcagagatcttccacagaaatggtagatcaaattacattgcacgaagtatggggcttttgagtttgtgattgtttcttttagttttcctccaactttgtttaagaagaaatcacattcctccagtagtaagaatatttattctttatctgttcattgggaaattgataaattccactattccttccctctgggtctgtaacatccacagccactatcagggattgtttaacatccaccaaagactctaaatggggaaataaagcagagtgccctctcagatgtttctcagtcaaggctcacagatcacaagagactggatcttgtg

SEQ ID NO: 193966 - DNA, 543 bp, Homo sapiens
tatcttgtcttatgaataaaatgttcaaggaaataaaggtcttccatctgtcctctgaaacatttaattctgccccctctcagctagaaaattcatgttgggtggatttggggtttcttcaactgctgcattctagactgtctcttaagagaatgggggattattttaatggaatgagggattattccagagtctcagaattaactatttagtcactgacattatgctaaggaagctgaaagatttaagaaggacatgaaagattttatagctgttctmccctttccaagattttaaatgagtgactctctagcccctaacgaattagctcaggcagcactgtgatcctagacacctgcttgtacttaatgttggccacaacagcagcaggagcacagtggcatataggtgaaggggatagataaaaacaaatcttgattttaggctgattctatgcagtttgccagaatcaatggccggtggaataaaacttactggagagaaatccctctacgagaggttaattttgacattacggaattc

SEQ ID NO: 193967 - DNA, 569 bp, Homo sapiens
agccagcagatcttagtttgctgggctccttggaggtgggacctgccgagccagaacacttggctccctggcttcagcacctctttccagaggagtgaacggttctatctgcctggcgttccaggtgccactggcatatggaaaacaacaacaacaacaaaaactcytgcagataatatggtgtctgccccaacagctgcccagttttgtgcttgaaactgagggccctggtggggtaggcaccagagggaatctcctggtctgcgggttgcaaagaagacagtgggacaagtgcagcgtctgaactggagtgtgcatggttcctcaggctcatttcctcacggcttcccttgggtgggagagaaaattccccaaccccttgagcttcctgggtgaggcgatgccccagcctgcttcagctcaccctccatgggctgcactcactgtccaaccagtctcaatgtgattaactgggtacctcagttgataatgcagaagtcacccgccttctgcgtcaatctcactgggagctgcagaaaagagctgttcctattcggccatcttgccag

SEQ ID NO: 193968 - DNA, 569 bp, Homo sapiens
agccagcagatcttagtttgctgggctccttggaggtgggacctgccgagccagaacacttggctccctggcttcagcacctctttccagaggagtgaacggttctatctgcctggcgttccaggtgccactggcatatggaaaacaacaacaacaacaaaaactcctgcagataatatggtgtctgccccaacagctgcccagttttgtgcttgaaactgagggccctggtggggtaggcaccagagggaatctcctggtctgcgggttgcaaagaagacagtgggacaagtgcagcgtctgaactggagtgtgcatggttcctcaggctcatttcctcacggcttcccttgggtrggagagaaaattccccaaccccttgagcttcctgggtgaggcgatgccccagcctgcttcagctcaccctccatgggctgcactcactgtccaaccagtctcaatgtgattaactgggtacctcagttgataatgcagaagtcacccgccttctgcgtcaatctcactgggagctgcagaaaagagctgttcctattcggccatcttgccag

SEQ ID NO: 193969 - DNA, 569 bp, Homo sapiens
agccagcagatcttagtttgctgggctccttggaggtgggacctgccgagccagaacacttggctccctggcttcagcacctctttccagaggagtgaacggttctatctgcctggcgttccaggtgccactggcatatggaaaacaacaacaacaacaaaaactcctgcagataatatggtgtctgccccaacagctgcccagttttgtgcttgaaactgagggccctggtggggtaggcaccagagggaatctcctggtctgcgggttgcaaagaagacagtgggacaagtgcagcgtctgaactggagtgtgcatggttcctcaggctcatttcctcacggcttcccttgggtgggagagaaaattccccaaccccttgagcttcctgggtgaggcgatgccccagcctgcttcagctcaccctccatgggctgcactcactgtccaaccagtctcaatgtgattaactgggtacctcagttgataatgcagaagtcacccgccttctgcgtcaatctcactgggagctgcagaaargagctgttcctattcggccatcttgccag

SEQ ID NO: 193970 - DNA, 491 bp, Homo sapiens
aattacccacatgtccatcaacagtaaaatgtgtaggaagaaaaagtaatttttcctctacccttctgagttcttggctgggatatctgcaacaaaagacaggttaacaaaggaaaagcaaatggaagcttattaacatgtatatttcatatatacatgtgacataccgaagaaatgagtaattctcaaagagatgaactagaattttagtttatataatatctttagttcaaagaaagaaggaggcaagttatgggaaactaatggtaggtaaagtctagttaataaagrtttgttttgttgattcctctggttctgtctcctggcttataaaagtctaaatttatctttggtgatcaatctttgtttttcctggtagaggtggaagggaagacatgtttataaatatatgccctgcttttaggcaaatgtgggaggacagaaagtttttcttgtatctgcttcttctcaattcccttcaattcaaaata

SEQ ID NO: 193971 - DNA, 491 bp, Homo sapiens
aattacccacatgtccatcaacagtaaaatgtgtaggaagaaaaagtaatttttcctctacccttctgagttcttggctgggatatctgcaacaaaagacaggttaacaaaggaaaagcaaatggaagcttattaacatgtatatttcatatatacatgtgacataccgaagaaatgagtaattctcaaagagatgaactagaattttagtttatataatatctttagttcaaagaaagaaggaggcaagttatgggaaactaatggtaggtaaagtctagttaataaaggtttgttttgttgattcctctggttctgtctcctggcttataaaagtctaaatttatctttggtgatcaatctttgtttttcctggtagaggtggaagggaagacatstttataaatatatgccctgcttttaggcaaatgtgggaggacagaaagtttttcttgtatctgcttcttctcaattcccttcaattcaaaata

SEQ ID NO: 193972 - DNA, 407 bp, Homo sapiens
gttaagctaagctatgtgcaaattaagtagattttcctgtgtatattattttccatgtgaaaaatttttaaatttcccctaagtgggtgaaaaaaaccttccagaataacttacatttgaataacttgaataattctttcaaatttttgtctattttacagcaatgtagaaattgtttcaagattacacagctagtaacagttcttaagatttttcccccacaaactcatcatcttttatcaccacaaaactgctacccagataccagctagtaccaaaggtatatagataagtattgaatctgaaatagcatgtgaggccccactcttaacaccttggtagctattacctaatgtattagtttgttagggctgccatarcatagtaccacagattgggttgcttac

SEQ ID NO: 193973 - DNA, 347 bp, Homo sapiens
gggtgacaacagtgaaactccatctcaaataaataaataaattcaactcaacaattcaagaggtctgggtgagagcacctgctctgtgccaggtgtgcgtgtatagtttctgtttcctaattataaactgagggtggctgctttgtcatttttgtsccccatgtgtatctgagcgccgggacagcaggtctcacatgcgcgcccgtcggacactctacctgctgagtcagaatttccaggggaaggtgctcacttgtatatgtatacattttattactgaaaataatacacacggtaagaaaaaaagcaagcaggtaaacatttccaacctccacgggattctattc

SEQ ID NO: 193974 - DNA, 350 bp, Homo sapiens
ggaaatatgtttgcatcagacaatggcttcaattccaacacatggtacattcccacaagtttggatttccataggaagaataaataacactggcttccttgaatgtcctggatgaaaaccacacatccttccaaatcctgtggaaaaacatctctggctccctccttcccttagaatcagacccttcaaaatcttgtggtatttccccaaataccataattttgagttgtgacatctggtttccagttctcccaggctggggtttcttgttaaagggacatcgraatctcgacatcccgagctgccaccctgaccttgtgcaggagtctcactgccccacttcctggcat

SEQ ID NO: 193975 - DNA, 490 bp, Homo sapiens
acatgaacaaaatttaacttttgtgaaaraaggtattttaaatgcttaagtagctaagcctttaaaaaatgctatgcttattttcttatttatttgtttttctaaactaattaggttatttccaattcaaaatttcttacttttacaaaaagagtagatactgggagaaatttgaatcagttcaatgcctggcaccttttctaaatatcccctgttatatccaatactcggcaaacttcattcctaacccccactcctgatttgaaaaccatgcatgaggatgcttctgatattgatcatcctggtttctgctctgtcaaagaccaacccggccttggcaccaaccaccttgtgaaagaatacagttctgttctgcaaattctctttagtgaggtctggaggttctcactgtcattctaaacaagaatttgagacttggcagcccaatgcatggctgcctctgtactgcatcacagcagccgaaatcttg

SEQ ID NO: 193976 - DNA, 576 bp, Homo sapiens
accaaacaaaaatgaatatgtactagaaaaatgctggattggaattagaagaggacaaattggacattattgtagattccactacaagatttaaatttgggaagttatttaagctttctaagtccttgtttccccatttggaaaccatgagcaayaacacatgttctaatcacttcataagtgtgtggcagagtataaagcagctagtgtgctaaagtacttcataaatatttttctaataaaccatattttcagttttcttgctttttcattttcctagcagtgtttctttattccatactttcaaagcaacaaaaaatttatgtgttttaaaaaacaggcacataaatatagaggggcacaacttaacagttctaagaaatagaacaataagatttaatcaacttaaaagcaaagacatttttatatttatagtctggacttctgcaagtgtttgtctgaatctgctaatttcatcttagttaatgcattcataaatattttcttcaatgaaagttcagacctttccacttcagcctaaggcaacaggtactacctgccactttattcacagtc

SEQ ID NO: 193977 - DNA, 597 bp, Homo sapiens
tattttcttcaatgaaagttcagacctttccacttcagcctaaggcaacaggtactacctgccactttattcacagtcagtctagtatatttcaggtactacccgccactttattcatagtctatatattttgtttcactagactcagcaacctgtttcagagcatgggtctractcattcacactgcagctccacgttgtaggcatgctgagaaagtgttctgagtgttgaagtgtatttagatcttcgctgtgatgtagtaacataattcaggaaagatgttaccaatgtgtgactgcttttaagctacagattcataccagagaccaacattttggagcttcttatttggattatgattatttaacacagtccacagtgtagtggatagttataatgactttgttttgcccatggcagtattttgttcaaggtcatttgtaccagagaaatcaatgacctattaatgtaatttccacaagaagtgatctctcaaaaaatactctaaatataaagttgctttatgttcatgctattaggataggagtggttataaaattaaacaaagtggatagaaactgaacgttgtaataaca

SEQ ID NO: 193978 - DNA, 596 bp, Homo sapiens
tgacatgcctttctttatagctttatccaaggctgattagaattgtattcacctgctttgaaggtactagatcatytaaatggagatttagtaaagagagaaataagagaaaaaaaaaatgagggagaagagtaagtacattgaacatttccataagataaagtgattttggaattagaaataaaggagtagaatatattttattctaaaattggcaaaaacacccataagtccatcacccctttttatattagctgtctttttccaatgaatttttacatgacaattttatattcttctttttcaattaaaattgcattgcaaacagtttcctaaaccatagatctattttgtgaatatcatgtcaataactgaataaaagtaaaaataatggagtaagttagctggaatggtaggaaataatgaccataatgtgagatatctgacttgcagatttcagagatagtgcaggtattggtgttggatttgagaaggcagaagaaatcagacacacaggttggaataatgatcttggataatgcaaaagtcttcagctcctgatggtcactggtataaacaggaaagtaaggcttcat

SEQ ID NO: 193979 - DNA, 430 bp, Homo sapiens
ctacaacagttaagacattgtagagttggcaaaaaggcatattgatctgtaggtgaaaatagagccttatagacacttgatttatgtgctgcaggcaaacctgcagcacagtgatagtgctggatcatttggacagccatattgaaacaaatagcaaacttgatccctacctcacaccataggcacagatcaattccagttggattggggatagaaatatgaaaggtaaaataataaagcttctacaagataatatgggacaatattttcatgaccttgtgattgagaaacatttgttaaacagggcactaaagcagtaactataaaggaaaagattgctaatttgaacagaatcaaagtgaagaacttacatccatcaagacaccgttaagagtgaaaaggcrattcatagaatggcataagatatatg

SEQ ID NO: 193980 - DNA, 495 bp, Homo sapiens
tgaacagatgcttctcaaaagacatacaaatggacaacaacaaatatataaataaartgctcagcatcactaatcatcagagaaatacaaatcagaaccataatgagatactatctcacaccagtcagtatggctatgattaaaaagtcgaaaaacagatgctggtgaggctgcaaagaaaagggaatgcttatacactgttggtgggaatgtaaattagttcagcctctgtggaaagcggtttggagatttctcaaagaagttaaaacaaaattaccatctaagccagcaatcccattatggggtatatatccaaaagaaaacaaatttttctaccaaaaagacacaggcactcacatgtttatcacagtgctattcaccatagcaaagtcatggaatcagcctaggttttcatcagtggtagattggataaagaaaatgtgctacacatacaccatgaaatactacacagccataaaaaagaatgaaaccatg

SEQ ID NO: 193981 - DNA, 495 bp, Homo sapiens
tgaacagatgcttctcaaaagacatacaaatggacaacaacaaatatataaataaaatgctcagcatcactaatcatcagagaaatacaaatcagaaccataatgagatactatctcacaccagtcagtatggctatgattaaaaagtcgaaaaacagatgctggtgaggctgcaaagaaaagggaatgcttatacactgttggtgggaatgtaaattagttcagcctctgtggaaagcggtttggagatttctcaaagaagttaaaacaaaattaccatctaasccagcaatcccattatggggtatatatccaaaagaaaacaaatttttctaccaaaaagacacaggcactcacatgtttatcacagtgctattcaccatagcaaagtcatggaatcagcctaggttttcatcagtggtagattggataaagaaaatgtgctacacatacaccatgaaatactacacagccataaaaaagaatgaaaccatg

SEQ ID NO: 193982 - DNA, 579 bp, Homo sapiens
agaagatgagaaggatctggacaggctaaaataaagcaggcagatatttctaggagaagcaaaacataaatgtaaaatgtcaaactttaggatataaataaataacttgttttctcttttgttttagactaacrtatattgaaaattttggtagtcctgttaattcgaatcaccaacacattaatttctcagttgtatcagaaatattttctctggaaatatttgctaaatctgtgccagttctgaatattttttggcaggaagggtggggactatttggaccattgtatcttttcagatctctacttagaactctgtaaaatattgcatactcaaaatggaattcaaagcctgtaattatgtatcagctcataagtaattttctgaattgtcaccttttcctaattttggattgtgttttctatttcgaaatgaaatgttggcatgcctactatttttttcttcttcaaatctggatgcccaactgtcgaacttctaaaattttacttcctacagcggaatgaacatgttcttaaatacacttttaaatttttgctctgagttattttgccaaagcaa

SEQ ID NO: 193983 - DNA, 498 bp, Homo sapiens
ttggtctgttgcccaggctggagtgcaggggcatgatcttggcttactgcagcttccacctccacctcctgggttcaagcaattattgtgcctcagcctcctgagtagctgggaccacaggcatgcaccaccgtgactggctaatttttgtatttttagtagagacggggtttcactrtgttggccaggctggtcttgaactcctgacctcaagtgatctacccaccttggcctcccaaagtgctgggattacaggcatgagccaccacgcctggtcataaacctcttttctttataaattacccagtctcaggtagtatctgcagtttgaaaatggactaatacaaggaatataagtagattttactcagtgtaacttgattgggagttgagataatagtggctcttaattacaaccagaaagtagaatttggggtttgtttctgtgttcgtttgaattatgtttctttaccttgaagatcaaagaaccgttattag

SEQ ID NO: 193984 - DNA, 412 bp, Homo sapiens
tgctaaattctattcctagcaaggaatattaataattaatacgctggggaaggaatgcattcctggaggggaggtctataaatggctgctctgggagtgtctgtyttatgtggttgagataaggacagaagtatgccctggtctcctgcagtaccctcaggcttactagggtggggaaaaaccctgccctggtaaatttgaggtcagaccagttctctgctctcaaaccctgttttctgttgtttaagatgtttatcaagacaatacgtacaccactgaacatagacccttatcagtaattctgcttttgccctttgacttgtgatctttgcttttgccatttgccttgtgatctttgttggacccttatcagaagtttctgattttgcccttagaagcatgtgatcttatt

SEQ ID NO: 193985 - DNA, 412 bp, Homo sapiens
tgctaaattctattcctagcaaggaatattaataattaatacgctggggaaggaatgcattcctggaggggaggtctataaatggctgctctgggagtgtctgtcttatgtggttgagataaggacagaartatgccctggtctcctgcagtaccctcaggcttactagggtggggaaaaaccctgccctggtaaatttgaggtcagaccagttctctgctctcaaaccctgttttctgttgtttaagatgtttatcaagacaatacgtacaccactgaacatagacccttatcagtaattctgcttttgccctttgacttgtgatctttgcttttgccatttgccttgtgatctttgttggacccttatcagaagtttctgattttgcccttagaagcatgtgatcttatt

SEQ ID NO: 193986 - DNA, 412 bp, Homo sapiens
tgctaaattctattcctagcaaggaatattaataattaatacgctggggaaggaatgcattcctggaggggaggtctataaatggctgctctgggagtgtctgtcttatgtggttgagataaggacagaagtatgccctggtctcctgcagtaccctcargcttactagggtggggaaaaaccctgccctggtaaatttgaggtcagaccagttctctgctctcaaaccctgttttctgttgtttaagatgtttatcaagacaatacgtacaccactgaacatagacccttatcagtaattctgcttttgccctttgacttgtgatctttgcttttgccatttgccttgtgatctttgttggacccttatcagaagtttctgattttgcccttagaagcatgtgatcttatt

SEQ ID NO: 193987 - DNA, 410 bp, Homo sapiens
acccatatatccaaattccttggatactaatgatccctgcttggctctctcacatgcatttcaaaattaacatgtccaaaactgaaactgagaccgaatgacaagtactttaggaagatcacaagaagaaaccattgtcatagaagcaaatggagtagaacatttccaaaagaagaggggagtcattcttatgaattgctggagaaaagttaaagagggtaacagatcaaatccctaattgtgctatcaccagtatggttagcaaaaccatgatggatgagaagcacagtgaggataaagtctagagtctgacttaaggagtaagmcatgccagaccatgaagaatcatataaatcaaatggaaaggagggttgattcctcaggtcagtggagagccattgaagcatttg

SEQ ID NO: 193988 - DNA, 614 bp, Homo sapiens
ttcgtctctaaaaaaaaaatttttttttctctgtgttaatcatcatttccacttgttgtttattatttcatatttttctcctttttttcttgaacaaatttactattaatagtaatttgtttgttaatttttccaaggacccagaattttggcttattggtttgatatgcttttcaattctgtaccttattaattgcttttttttttatcattagtatttgcctccttgtgcttttttggggtgtcttttgttttatttctaggtttttgagttgaaagctttatttttacttttcactttttataagacttgctgtgctttttggcacayagatatttgtaacttacctcttcataatgaattacagcttttagtattagaaggtgtccaatgtctcatttaatttttattgcccagaattctcctttatctgatataagagtcagaacatctgcttttttattatttccctctgattgtgtttttgttttatctgttgtgtctttgtgcacgcctttagtttcagctttttaatgccatgttttggccatatttcttgtatacaggctaatgttggcttttccttcataagccaaatttaaaatgtttttat

SEQ ID NO: 193989 - DNA, 491 bp, Homo sapiens
gcaggaaccatggagtctgacactgatagttattgaatgaataaataagttgatgtcattcaaagtacagcatgcaatacaacagttctgaactttttaaaaaatagtaactctaaaaataataaatacatacataaaatccccgatcttggttaaagccaactgcttcctgtgacacaacgccctaccagacagctgacatggctggagaaaggcacacaagaatgctgactagtcccatttgaaatttatgagaattaatttgaattgtgtcctcaagggaacctggcaatcatattatatttccttagatgactattaaataccttctcctgtctcctcaaacatgcaacatctgttcccctatccctactctcasctgatgactcagtttcctatttcaccacaactattatctacaagtcccttctcttctctactctgtaccatagacagagtgattgtaccccactaaggccaatgcctccact

SEQ ID NO: 193990 - DNA, 491 bp, Homo sapiens
gcaggaaccatggagtctgacactgatagttattgaatgaataaataagttgatgtcattcaaagtacagcatgcaatacaacagttctgaactttttaaaaaatagtaactctaaaaataataaatacatacataaaatccccgatcttggttaaagccaactgcttcctgtgacacaacgccctaccagacagctgacatggctggagaaaggcacacaagaatgctgactagtcccatttgaaatttatgagaattaatttgaattgtgtcctcaagggaacctggcaatcatattatatttccttagatgactattaaataccttctcctgtctcctcaaacatgcaacatctgttcccctatccctactctcagctgatgactcagtttcctatttcaccacaactattatctacaagtcccttctyttctctactctgtaccatagacagagtgattgtaccccactaaggccaatgcctccact

SEQ ID NO: 193991 - DNA, 344 bp, Homo sapiens
ggacttatcgtcactgagtttgttataaccgagtcaaacaggtatccagacttaatgaagcacatttcaaaaaggttatgtatcaagtatattattgaggggatttatatttttgaggtgaggttggatagagttatttataaattctagattctttgatttggtgactcaatacggattattatctgcttcttggaggttayctacgggttaacatacctttgattagtagcacatataaatgctgaatatctttatcttaagaaaattaaattgtaattattacatatattcaatataataaatataacatatatatcaagtatgaagtgaagggatccttg

SEQ ID NO: 193992 - DNA, 578 bp, Homo sapiens
aaccgaaaacgttgcaagtatgtggaaattaaatatacatttttgaacaaccaatgggtcaaaaaagaaatccaaacaaaacatatctggaaacaaataaaaatataaatrgaacttaacaaaattttctgaatgcagcaaaagaagtactaagaaggaagtttacagtgacaaatgcctatgttaaaaaagaagaaaggtctcaaataaaaaaccccattgtatatctcaaggaaattgaaaaataagagcaactaaatccaaagcagactaaaggaaataataaagattatagcagaataaataaaatgaagaagagaaaaacaatagaaaatcaatgaaactaagagttggcttttgagaagataaaattgaaaatattaagctagagtaaccaagaaaaaagagagaagactcacataaaatcagaaaacagagagaatacattacaactgataccacagaaatgcaaaggattataagagattactattaacaattatacaccagaaacctgggaaacctagaagaaatggataaattcttggaaacatacatcctaccaagactgaatcatg

SEQ ID NO: 193993 - DNA, 198 bp, Homo sapiens
gaattctgtgttaagtcaaaatcctcctctaagattacttcaaattccaagagtacttattgtacctagttgttgtataactcactggctatgaacatgaaattgttttattttttctgatcactacatttaattgtgctgtcattctyacatcttcatgaaaaatcaggtatatcccagaagtgatcaatttcaatt

SEQ ID NO: 193994 - DNA, 338 bp, Homo sapiens
cattggtgtaggcaaagaattcatgactaagacctcaaaaacacaagcaacaaaaacargaatagacaaatgggacttaattaaactaagaagcttctgtaaagcaaaagaaataatcaacagagggaacagacaagttgaagaatgggagaaatatctgcaaattatgcctttgacaaagactgatatccagaatttacacggaactcaaacaactcagtaacaacaaaaaaccccacaaataaccccattaaaaagtgggcaaaaaacatgattagacatttttcaaaagaaaacatacaaatgaccaacaagcatatttttaaaatgcttgccat

SEQ ID NO: 193995 - DNA, 338 bp, Homo sapiens
cattggtgtaggcaaagaattcatgactaagacctcaaaaacacaagcaacaaaaacaggaatagacaaatgggacttaattaaactaagaagcttctgtaaagcaaaagaaataatcaacagagggaacagacaagttgaagaatgggagaaatatctgcaaattatgcctttgacaaagactgatatccagaatttacacggaactcaaacaactcagtaacaacaaaaaaccccacaaataaccccattaaaaagtgggcaaaaaacatgattagacatttttcaaaagraaacatacaaatgaccaacaagcatatttttaaaatgcttgccat

SEQ ID NO: 193996 - DNA, 451 bp, Homo sapiens
ctggaattttagaaattcttccagcagtaaacttatgatatgatacttttctgcataatcattatacttttatgcaaagcttttaaatgtgtttgtttttaatctacaccctaaatcagtgatagtaagggatttcttctcagagagttttggctggtggatgctccagatgttgtataaaacaatattgtgtaattgcatccaggcttggtgggtgataccgttgtatcacctgctgatagctcccaataaacaagcccaaggagcaagcatgtcagctatgtatttaccatctcattggttattacagttttaaaatacatgaaaactctatgaagtcctaaagtacccaaggactctatggagttgttatatatttttagaataatgatattgctaacattctctctgtaaatatagtgatgawtagtctaacattcacttagaagaa

SEQ ID NO: 193997 - DNA, 617 bp, Homo sapiens
caactattatatactgtcccttctccttctttggcaataggagagggataaaaatgagaatcaacgtgggaatggtaagataacaagagctgggaaggtatggtttattcttattggagggaaatctcctaagaatgtgagatgatcaggaatgtcataattaaacaaatatataaatgtggccgttaggatcaagagaatgcatcatgttgctcaggcatagcaaggtaggcagttgagtgcagattgaaggtggtctctgaactccagaagcttataaaccaatagataaaacagatactactactataatcatcacatatgttacatagcactaagatttcatgtgcaagartgcaaaaggttgaaatgtattttcaaattcattgatagcacaagatttgcttttattcaatactaaaactaagtacttgcttaaagtgaatgcaatctttcattttcaagatagctaattgagaacaagcatgagactccactcctggtccccaagctccagaacacaatagaaactattttttagagaatataaagcaataaatcaatggacagtcatacattagtttatgaaaatgacagaaaaattcttactaaacaat

SEQ ID NO: 193998 - DNA, 599 bp, Homo sapiens
aaagaataaaatgagggtggagttaattctgactacgggattcctttttcacttttataatgaactccttccttctaactaaatcttatcataagcaaatctatgcaccaaattatttartacaattcctaataacagctgaaggaccatttatttgaagcaatgttcaccatagcaaaattccagtgaagtctaagaactgggacagtccgttgaggatccttgtgccaggatgtatgttgccccatgaatgtgcacatgcatattaaaatatgggcacctcttttaagtcttttttttctcataataagtttgaaactcacagtaggaaattgagagatcaatttggttactgttttatcattgatcctgaagacagttgaagcaatcatactggttgttctcgaactagctggtttcccagagacagctggagactgagcaaataaagacatcattgaggaaaaaggctaccttgtacctcatggagagctgaaggtctgataaatgggaactgccaggtaatagctatgctatttctgacataaatttaaaaactagtattgtttcttctagctctgtttttgcatagtgcacag

SEQ ID NO: 193999 - DNA, 599 bp, Homo sapiens
aaagaataaaatgagggtggagttaattctgactacgggattcctttttcacttttataatgaactccttccttctaactaaatcttatcataagcaaatctatgcaccaaattatttaatacaattcctaataacagctgaaggaccatttatttgaagcaatgttcaccatagcaaaattccagtgaagtctaagaactgggacagtccgttgaggatccttgtgccaggatgtatgttgccccatgaatgtgcacatgcatattaaaatatgggcacctcttttaaktcttttttttctcataataagtttgaaactcacagtaggaaattgagagatcaatttggttactgttttatcattgatcctgaagacagttgaagcaatcatactggttgttctcgaactagctggtttcccagagacagctggagactgagcaaataaagacatcattgaggaaaaaggctaccttgtacctcatggagagctgaaggtctgataaatgggaactgccaggtaatagctatgctatttctgacataaatttaaaaactagtattgtttcttctagctctgtttttgcatagtgcacag

SEQ ID NO: 194000 - DNA, 599 bp, Homo sapiens
aaagaataaaatgagggtggagttaattctgactacgggattcctttttcacttttataatgaactccttccttctaactaaatcttatcataagcaaatctatgcaccaaattatttaatacaattcctaataacagctgaaggaccatttatttgaagcaatgttcaccatagcaaaattccagtgaagtctaagaactgggacagtccgttgaggatccttgtgccaggatgtatgttgccccatgaatgtgcacatgcatattaaaatatgggcacctcttttaagtcttttttttctcataataagtttgaaactcacagtaggaaattgagagatcaatttggttactgttttatcattgatcctgaagacagttgaagcaatcatactggttgttctcgaactagctggtttcccagagacagctggagactgagcamataaagacatcattgaggaaaaaggctaccttgtacctcatggagagctgaaggtctgataaatgggaactgccaggtaatagctatgctatttctgacataaatttaaaaactagtattgtttcttctagctctgtttttgcatagtgcacag

SEQ ID NO: 194001 - DNA, 467 bp, Homo sapiens
cttttttcagtaaagctctaaaacatggaaaggaaacttttacctaataagtaataaccatgctatagctataaaatcacaacaattacttgatatttacaattagcaaactttggaaaaatttattaagccacaaaatccttactctaatttttggtaaacaactaaaaagggctctgcctaaaattgaatggctctaggacygtgaattagcctgctccctccaaactgagaatggcgaaaatgcacaagtaaactagacattccatctggaaagtaaaatcctattttataccaaaatacttttattagccaacataaaatttggatctaaatgattctgaggtaagactctcatctcattttactatagttagatgcatataagaccccttcattgcatgaagagtgatggctttgctcagtctttcctataagagttacaaagtatttatgcagccaataag

SEQ ID NO: 194002 - DNA, 602 bp, Homo sapiens
tcaccacctccctgccaagcaaatgccagacatcatataattttactgtggcttgtttttcatttcttcagtgtttcttttgataaacaaaagtttgtaattttaatgcagttgaattcctaagtttctttcctctatggattgtgtgtttcttatttaagaaattcttctgcaaaagattgtggagatatttcctaagtttttgtctaactgttttaaagctttacctagacactagttataatagcctttccccattctttcacagatttcttatgctatctctggcatatcaattttacaaatctgtgagatctgtttctgggctctgtactcctgctaataccatattttattaatcactatacccttwtagtaaattaatactatatattaattgtatctatagtattcttatatattattgtatatataactatattaataattattagggcaggagttcccaactttgctcttcagaaactttgacaattcttgggcttttgttctttcatgtaaattttggaattagatgatgaagttctaccaaaaacttttgagattttgactggcaatccatgtatagataaatttgtgat

SEQ ID NO: 194003 - DNA, 510 bp, Homo sapiens
tgctcagcactttacaagcattatgctatttacttaactcagtaagtccatgagtttatgtacaattgttattcttaaattaaatttgacaaccttgaaactcagaggttgagaaacatgtcctttgtccctccagatctacttgcccccttctcctctgcactgtgcctggagaggctgcctgctttggactgcctcaacctgctcttttgtcctctggtttctggttgcctttggccagtcggaagcactggcaggagggcttggggtggtcaaggagctatggccaatgccagccctcaggcatgcctcttgaggtttccctgcaccctgcccacacatttgcagagaatctctttattacttatcctcaaattgcccacttgaatgtgccaagtgtttcctgmaagggccctgactaataccattatgagttaggaacttagatccagatttgcctgatccaatgtgggtttcctgaaccactttgcatattgcctccagagtatt

SEQ ID NO: 194004 - DNA, 596 bp, Homo sapiens
tggctggtatgctaaatatccagctatacatcatcagtgttaataaggtcttttactaattttttttgtcttatacagataaccacaattaacaatttctttaagtcaacatgctaagtcagcaatgggcaaaatattgctattctgctgactgcatatttttaaaaatattttattctctccctccccactgtctccaccacacacaaagattgcacacctattttgtgcatgtcaactgaatgaacatgtgcattggagacatgctgatcctggggtgcagcctggcacctggaaactatcaagcgcakataattgcaacaggtgacatgtgtttttgttttacatatggtttattctaagaagatctttctgatctttgtctcaagattaaagccaaaatctataatttggccacctggccaagaagaccccacaatgggggcccccagctacttttccaccccatcctgcaccaccattccctttcccaccatcttccagttttccaggccacattttattcccccatgtgttacgccctttgcctatacaggagcttggtacgtgttctttcctgttttctaagctttatc

SEQ ID NO: 194005 - DNA, 596 bp, Homo sapiens
tggctggtatgctaaatatccagctatacatcatcagtgttaataaggtcttttactaattttttttgtcttatacagataaccacaattaacaatttctttaagtcaacatgctaagtcagcaatgggcaaaatattgctattctgctgactgcatatttttaaaaatattttattctctccctccccactgtctccaccacacacaaagattgcacacctattttgtgcatgtcaactgaatgaacatgtgcattggagacatgctgatcctggggtgcagcctggcacctggaaactatcaagcgcatataattgcaacaggtgacatgtgtttttgttttacatatggtttattctaagaagatctttctgatctttgtctcaagattaaagccaaaatctataatttggccacctggccaagaagaccccacaatgggggcccccagctacttttccaccccatcctgcaccaccattccctttcccaccatcttccagttttccaggccacattttattcccccaygtgttacgccctttgcctatacaggagcttggtacgtgttctttcctgttttctaagctttatc

SEQ ID NO: 194006 - DNA, 597 bp, Homo sapiens
ttcactaaacaaaaccagtttattcattttttcttctagctataacttggttctgtacccacatgagaaagcacaaaaatgttgacagaaattcagttaccttaatgttctcatcaactccagtttcagatttagccattatttgatgacttcttctgggatttatttggtcttttttttctattagaaaacatggctttctaagcaatttaacaaggtaataaagccctgacatacatgaacaacatcaatggtggacaagctatttgatagtatttgtctaaatgtgttgtacttgaacttcaagttggatctatttaaatrcaagtttctagggtcacatatttcctactagctgtaagagtgttctggtccttaaagtagttttctaatttggatattttccaagggaatactgtcatcgacagtagcaacattatcagtgctttggttgccaaaacactcaatctctcttcttttgttaatggcaccttgatttccttttgggaaatcacatctcttggagagactgcatttcttttatggaagggtctattcgatagccaagggatgggcatatgtccaaactcagaccaa

SEQ ID NO: 194007 - DNA, 597 bp, Homo sapiens
ttcactaaacaaaaccagtttattcattttttcttctagctataacttggttctgtacccacatgagaaagcacaaaaatgttgacagaaattcagttaccttaatgttctcatcaactccagtttcagatttagccattatttgatgacttcttctgggatttatttggtcttttttttctattagaaaacatggctttctaagcaatttaacaaggtaataaagccctgacatacatgaacaacatcaatggtggacaagctatttgatagtatttgtctaaatgtgttgtacttgaacttcaagttggatctatttaaatacaagtttctagggtcacatatttcctactagctrtaagagtgttctggtccttaaagtagttttctaatttggatattttccaagggaatactgtcatcgacagtagcaacattatcagtgctttggttgccaaaacactcaatctctcttcttttgttaatggcaccttgatttccttttgggaaatcacatctcttggagagactgcatttcttttatggaagggtctattcgatagccaagggatgggcatatgtccaaactcagaccaa

SEQ ID NO: 194008 - DNA, 321 bp, Homo sapiens
ataattctccagaattcttagagttctaggatttctagagttcctggcaggactgaggacccagttgtccacagtggtaacctgttcatscgtgcttcctttattcactgtctctttcttactttccccccctccatacttgtacttcttgggttctgttctaaataaaccgtctacatccaagcttttatctcagagtttgctttcaggggaacccaaacgaagacacaggtatcaaccaatataaataatttatctccttttttatttatactggtggagtaagttactcggtgaaataaataacttcctatggtattc

SEQ ID NO: 194009 - DNA, 584 bp, Homo sapiens
ccagcgacagaggaataacatgcaccgacacagatattttgctttgtcagtccagctgagtgtggggaatgcttacagactcccaggagagtgctgtaaacagttgcgactgcagcccccaccagccagtgagactggcatttattcagtaaagattaattgacaaaggcttgagtcaacaccactagagggtaattgacattgcagacctcccaagtagaaagcaattaagcacctgcagtagatcaacggttagtcatgagtaaacaagctagtaagataaactccyccacattcctttgtatctactttaatctatttaactaaaggtaaagggactaggcagccttcagccagatctattaccaaagttatgcaaactctcaggccttccaagagggtctgtggctattataactaaaatttttcccaccagcctgactgaaccctcacactacaagtcaaagcatcccttctaccaacactgagaactaattgttaaacatttaccagcacaccactgcatcagatgacaagagaccctgcagaaagaaggcaaagcatgccaacccaaaccatgctgc

SEQ ID NO: 194010 - DNA, 590 bp, Homo sapiens
tgaagtttcctgtctcctcagttctttgytcaatttttgtcctcctttaaacatagtttctttctgttttaagacttgctactcttaaaacagaataacaaaataaagaaatcaatgtcttaaatattacactaaattttcatagctcttgtttctctctttaaaaacattttttttagagatggggtctttctatgttgcccaggctgctctcaagcttctgtcatcaagcaattctcctgcctcagcctcccaaagtgctggggttatgggcacaagccactggacctgtcttatagcttctgtttctattggatgataaaatataaaatcaaggatgggtttgcctttctcagcagcttctctgagcttttgtcttaggccatttttagtgctatcactgaatgccacaaactgggtaatttataaagaacagaaatttattggcttacagttctggaggctagaaagtccaatatcaaggtgccagcatggcaagcgccctctttctgcatcaaaacatggcatcaggcaccacacagcaaagggcaaagagacagagagagcaagaaggggtgaacctactccca

SEQ ID NO: 194011 - DNA, 318 bp, Homo sapiens
aagacttcatggagaccactgcttctctgtgaacacattgttccttccatctccactggcttgttcctcttggtgtgtgtgtacacagacatgcacacacacacacacatgcactcacacacacaatcaagttattcttatcttaaacacaaaacctaacaagcttctctcatcctttccrtcatcttcttaggcctctttttctcccttcccctatagaatcaaccttcctaaccgtctggactcttggtctcagtttttcatcttccgttttctctcccggacccactgtgttgcagactcccctatcaactgcaa

SEQ ID NO: 194012 - DNA, 549 bp, Homo sapiens
gtgttggctccttgcagtgacagccggcagcaacaggtgggtagtcagacttctcaggatggatgatagcccaagaagacttgaaagtgggcgatatttttctgggatgccccatacttccctttgaggtatcttctttctgtggtcccatgtcccttgactgccatggtcccccactgtaatgactcatcacagctctcctcacctcacctccatctgtaagcacagacatgtgccattgtcagaaaataaaagcatcttagttaaagggaaatggagaagccgtttggccaaacttttcatttgacagatgagaaaactgaggcttagggtcactagcccagggattgcaaactcagaagcctccaggattcaggcagggttcarttgtcccaggactgaagaagaaggtaatcaaatcaggataaggatctagagaaaacagggtcatcccagcctccagcaccatttggtcattaggaaggtctcctcatatcttaggagtaattcttctcttcaaaattttcatcatggagtaactgcccaaag

SEQ ID NO: 194013 - DNA, 464 bp, Homo sapiens
gggtctgtggtccagccctgcatggaaggctggctgaggctgggcttggcagtgcaggccctgggttcctgggggcagsctgtgggcctataggacatgtgggagggagatgctcaggatccatccggcctcctttggctctgccctttaccaatctcctaggacatactgataggcattcacacctggcacaagggatgcagacataaacatcaagtgctaagtgaagaagccacatggtagggtgaaaattgttcaagctttgcagtcagacatagctcggtttgaatctgagctctctcattttctagctgtgtgatcttggcaggcttctttaaatcctggtttcctctcctgcaattaagaataatgcagcctctacagagattattctgggtttgaaaaagaagaataaaaaaaaaaataaagaaacaaaagaacaatacagcctccttcatgcaaaa

SEQ ID NO: 194014 - DNA, 596 bp, Homo sapiens
ggctggtttagcccttcagtatatcctagaggtcttgctcactaccacagcctggtaacaacagtgcccaactgcaggattaacagaaggtaaagtggattaaatcgttttgaaagcagaaatttacaactacagtgataacaatgaatgtcacaaatacagcataaagactgaacatgctctgggaattatactaaccataactttctaagaaatggtgcaattacacaactacaataaagataattggattagttacccctaaggttttgagtgacatccaaattttagggctacctaatttatattttatgttgatcaaaataccacaattcctttccaggccagttcacaccatctgttattctsttaatgattagcacaaatcttaaaaatattttcttttgctgactgattgtgggggactggttttcttttcttttttcctttctctttttagaatgggatgattgtccacattctttctgggaaatgcatggaagctgtggtgcaagaaaacaataaagatttgtacctgcgtccgtgtgatggaaaagcccgccagcagtggcgttttgaccagatcaatgctgtgg

SEQ ID NO: 194015 - DNA, 539 bp, Homo sapiens
tcctttccaggccagttcacaccatctgttattctcttaatgattagcacaaatcttaaaaatattttcttttgctgactgattgtgggggactggttttcttttcttttttcctttctctttttagaatgggatgattgtccacattctttctgggaaatgcatggaagctgtggtgcaagaaaacaataaagatttgtacctgcgtccgtgtgatggaaaagcccgccagcagtggcgwtttgaccagatcaatgctgtggatgaacgatgaatgtcaatgtcagaaggaaaagagaattttggccatcaaaatccagctccaagtgaacttaaagagcttatatatttcatgaagctgatccttttgtgtgtgtgctcctggtgttaggagagaaaaaagctctatgaaagaatataggaagtttctccttttcacaccttatttcattgactgctggctgctttaaaaaaaaaaaaaggatccattgtaccgttgtcttcatcactgggaaatgattattacatagtacagaaga

SEQ ID NO: 194016 - DNA, 539 bp, Homo sapiens
tcctttccaggccagttcacaccatctgttattctcttaatgattagcacaaatcttaaaaatattttcttttgctgactgattgtgggggactggttttcttttcttttttcctttctctttttagaatgggatgattgtccacattctttctgggaaatgcatggaagctgtggtgcaagaaaacaataaagatttgtacctgcgtccgtgtgatggaaaagcccgccagcagtggcgttttgaccagatmaatgctgtggatgaacgatgaatgtcaatgtcagaaggaaaagagaattttggccatcaaaatccagctccaagtgaacttaaagagcttatatatttcatgaagctgatccttttgtgtgtgtgctcctggtgttaggagagaaaaaagctctatgaaagaatataggaagtttctccttttcacaccttatttcattgactgctggctgctttaaaaaaaaaaaaaggatccattgtaccgttgtcttcatcactgggaaatgattattacatagtacagaaga

SEQ ID NO: 194017 - DNA, 423 bp, Homo sapiens
cactgtcttcttgcttcagacccatctatatttaaaacaaatttccctaaatcctgagactgagayggagctacaaattctcagatggcgaccgtgtaaatggtattagcggctgaagaaaaaaaatttttcaagacctctgttttttaactgaactttatcattggcattgtgggtctttgaagttgctgggataaattaatataattaaataaaagactgaatttaattgcataaattgtattaggtggcaattaacaaaaggacccagatggcttattgcctaattgggtgaacaaagcaagaatatggtgtttcttgcttccttaaccagctccatgatttattactttattgcagaagtggctgtcaactcagtccctggctggtatttacagacccttaatttaagtaaaacagatg

SEQ ID NO: 194018 - DNA, 340 bp, Homo sapiens
gccataatagcaatatctgtatgaaaagggcatgaggccacagagaaagatgattaattctgcactgataactccagaatgaccacagttactgacccaaatatgaataaagcaaggcatgttatcaaatagcatcaccaataagctgatcctgatcaaacagtaaccaaaagaaatatacaagcttcaaaaacattcacatctttatactattactaaataagccatagccagattctaatcctgtctccatcacacaaaaaaaccaccaccatttattatatgccaggtaccatactaraaactctgaattcattgttttggaaaatcctcacaatgc

SEQ ID NO: 194019 - DNA, 624 bp, Homo sapiens
tgtcatttataagcactaatcttcttaccttgctctccaaatgcctgaatggagatgaatgaagatgaatcaggaaggagattaagggtttaaggtaaaatacttgcagtgcttcaaaagtgatagaataatgagtgcctttacctgaatgatcactgtctatgatcctaaaaatggcctctatgttggatcggttgcgatacaatgtttccagcaaacttgattgtatgttctgcaagaaaaaattcattttccttctttgtcataygtttagacttgttccaatatataattaacacacaatcaaccctgacaatcacacattcttgaaaaaacctgaaaatattttgccatccctccattccctctacccagttcagcccatcaaataatctagtggtttaagaagcacctcacccatgatgaaaatcttctaaaattgactggtgatggttgcacatacaggttgtgtatgccttgtctgaaatgcttgggaccagaaatgttgtgaattttggattttttcggacattgtaatatttacatgtacataatgagatatcttgggtataggacccaagtttaaacataaaattaatttttgtttcatatacaccttataca

SEQ ID NO: 194020 - DNA, 624 bp, Homo sapiens
tgtcatttataagcactaatcttcttaccttgctctccaaatgcctgaatggagatgaatgaagatgaatcaggaaggagattaagggtttaaggtaaaatacttgcagtgcttcaaaagtgatagaataatgagtgcctttacctgaatgatcactgtctatgatcctaaaaatggcctctatgttggatcggttgcgatacaatgtttccagcaaacttgattgtatgttctgcaagaaaaaattcattttccttctttgtcatacgtttagrcttgttccaatatataattaacacacaatcaaccctgacaatcacacattcttgaaaaaacctgaaaatattttgccatccctccattccctctacccagttcagcccatcaaataatctagtggtttaagaagcacctcacccatgatgaaaatcttctaaaattgactggtgatggttgcacatacaggttgtgtatgccttgtctgaaatgcttgggaccagaaatgttgtgaattttggattttttcggacattgtaatatttacatgtacataatgagatatcttgggtataggacccaagtttaaacataaaattaatttttgtttcatatacaccttataca

SEQ ID NO: 194021 - DNA, 624 bp, Homo sapiens
tgtcatttataagcactaatcttcttaccttgctctccaaatgcctgaatggagatgaatgaagatgaatcaggaaggagattaagggtttaaggtaaaatacttgcagtgcttcaaaagtgatagaataatgagtgcctttacctgaatgatcactgtctatgatcctaaaaatggcctctatgttggatcggttgcgatacaatgtttccagcaaacttgattgtatgttctgcaagaaaaaattcattttccttctttgtcatacgtttagacttgttccaatayataattaacacacaatcaaccctgacaatcacacattcttgaaaaaacctgaaaatattttgccatccctccattccctctacccagttcagcccatcaaataatctagtggtttaagaagcacctcacccatgatgaaaatcttctaaaattgactggtgatggttgcacatacaggttgtgtatgccttgtctgaaatgcttgggaccagaaatgttgtgaattttggattttttcggacattgtaatatttacatgtacataatgagatatcttgggtataggacccaagtttaaacataaaattaatttttgtttcatatacaccttataca

SEQ ID NO: 194022 - DNA, 438 bp, Homo sapiens
agtcacaactcttgccctattagcattgatgcctttagaaaaaaagaaagaaagaaagaaagaaaaggattcccagatgagcactaggagaaacagcagcttctgcagttgagttgggccacataggattgagggtgaaggtttcttcagtgaatgtgaacacctgtctctcttctgttttgatgtaggtattaacaatcttttctgcctccaactactatgaagttggcagcaacagaggggcctatgtcaaactggggccagccctgaccccacatatygtgcagtatcaagctaacaaggtgacccacacactcaccatgaggcaaaggcaagacttttcaatgagtgattttcagaaaaaaaaattatagtgttcatagaatctttgaatgaagtgtcaaacgttatatttattcaaattctacgtgagaattc

SEQ ID NO: 194023 - DNA, 617 bp, Homo sapiens
cgtttctttctggaaggaagcatataatactactcgaatggtagattttggccgggcgcggtggctcacgcctgtaatcccagcactttgggaggcygaggcgggtggatgattggaggtcaggagtttgagactggcctggccaacatggtgaaaccctgtctctactaaaaatacaaaaaaattagccaggcgtggtggtacacgcctgtaatcccagctacacgggaagctgaggcaggagaattgctggaacccaggaggttggaggttgcagtgacccgagatcgcaccactgcactccagcctgggcgacagagcaagcctccatctcaaaaataaaataaaataaagtaaaataaaaataaataaataaataaataaataaatggtagcttttgagatgattctgagttcttagttgagagattacaaccacaaaatgttataaagaatttatatgggtagcctcacagtaaatttatgcaacagatattgttattaatttcagttttgtagaagagattattaaagaaccgatgttaaatcatctgacctgtggtcacacagctagtccttgagtgaaggtagtccttgaccgaggcaattctatttca

SEQ ID NO: 194024 - DNA, 617 bp, Homo sapiens
cgtttctttctggaaggaagcatataatactactcgaatggtagattttggccgggcgcggtggctcacgcctgtaatcccagcactttgggaggctgaggcgggtggatsattggaggtcaggagtttgagactggcctggccaacatggtgaaaccctgtctctactaaaaatacaaaaaaattagccaggcgtggtggtacacgcctgtaatcccagctacacgggaagctgaggcaggagaattgctggaacccaggaggttggaggttgcagtgacccgagatcgcaccactgcactccagcctgggcgacagagcaagcctccatctcaaaaataaaataaaataaagtaaaataaaaataaataaataaataaataaataaatggtagcttttgagatgattctgagttcttagttgagagattacaaccacaaaatgttataaagaatttatatgggtagcctcacagtaaatttatgcaacagatattgttattaatttcagttttgtagaagagattattaaagaaccgatgttaaatcatctgacctgtggtcacacagctagtccttgagtgaaggtagtccttgaccgaggcaattctatttca

SEQ ID NO: 194025 - DNA, 617 bp, Homo sapiens
cgtttctttctggaaggaagcatataatactactcgaatggtagattttggccgggcgcggtggctcacgcctgtaatcccagcactttgggaggctgaggcgggtggatgattggaggtcaggagtttgagactggcctggccaacatggtgaaaccctgtctctactaaaaatacaaaaaaattagccaggcgtggtggtacacgcctgtaatcccagctacacgggaagctgaggcaggagaattgctggaacccaggaggttggaggttgcagtgacccgagatcgcaccactgcactccagcctgggcgacagagcaagcctccatctcaaaaataaaataaaataaagtaaaataaaaataaataaataaataaataaataaatggtrgcttttgagatgattctgagttcttagttgagagattacaaccacaaaatgttataaagaatttatatgggtagcctcacagtaaatttatgcaacagatattgttattaatttcagttttgtagaagagattattaaagaaccgatgttaaatcatctgacctgtggtcacacagctagtccttgagtgaaggtagtccttgaccgaggcaattctatttca

SEQ ID NO: 194026 - DNA, 214 bp, Homo sapiens
aagtatcttacagaattatacacccatgcaaaaatctatataargatttttattactgtataatttgtgattaggaaaagttggaaaataacctaagatatttttttatgtggtattacccatattttctagtttccatattgatgctttgacattttggggccttgttgaccagggagagactacacctcctgggattagctgatccctgaga

SEQ ID NO: 194027 - DNA, 553 bp, Homo sapiens
ctggggacagttggagaggagttctgccacaggactgctgaactccaagggaagatcatctttccactccgtccccgttccagctccccatccatcctgctgagagccacctccaccactcaataaaacccccatattcaccactcttcaagtctgtgtgtaacctgattctttctgggtgctggacaagggcccgggtaccaaggggacactgagctggttaacacttaagccatctgtggatggcagagttaaaagagcactgtagcatgcctactggggcttcaggagtcaaagcaccacccctagaagctgccctggggccagagcccaaaagcgctcactctggttcctgcacctgcctgtctgtatcctcccgctcctataaggggtttgagcttgtggcagctgaacagagatcaacacccctgttgagtgtcctgcaaggggagccagggaactctcctgtttcacccccacctccgcctcctaaagtgctgtgattataagataaamcaccacgcctggcctcttaacagatttttaagtgtac

SEQ ID NO: 194028 - DNA, 604 bp, Homo sapiens
aagcttttagtgggatcatttctaacttatgcaaaaggtgaatgatagtgcttccatgatattttactatgcatttatgtaattaacatccaatgttgggaacaagccccccaaaatctggacataaactggccccaaaactggccataaacaaaatctctgcagcactggggggggttcatcatggccataacgcccatgctggaaggtggtgggctttccagaatgagggcaaggaacatctggcccgcccagggcagaaaactgcttaaaggcattcttaagccacaaacaattgcatgagcgatctgtgccttaaggacacactcctgctacagttaactagcccaamctattcctttaatttggcccatcccttcatttcccataagggatacttttagttaatttaatatctatagaaacaatgctaatgactggcttgctgttaataaatacgtgggtaaatctctgttcagggctctcagctctgaaggctgtgagacccctgatttcccacttcacacctctatatttctgtgtgtgtgtctttaattcctctagcgctgctgggttagggtctccccagccaagctggtcttgg

SEQ ID NO: 194029 - DNA, 376 bp, Homo sapiens
tgcctgaaagaaaatgcctttggagttacagtaatgccttattctctgattgacgttagttataacccgaatgtcagctgcctgaatttgcttgagcttttagcagtcatcttattttttaatattttagcaagatggttttcagaggctgggaagggtagtgggggccttgcaaagaggtagggatggttaataggtacaaaaaaaaatagaaagagtaaacaagatctactatttgatagcacaacagggtgactatagtcmagataatcaataataacttaactttacacttttaaacgaagaatataattggattatttgcagctcaatggataaatgcttgaggggatggataacccattcttcattatgt

SEQ ID NO: 194030 - DNA, 395 bp, Homo sapiens
caaagataaagtgtttctggctaaagtgacttgctaggtttattactgaaggcagggtgatagcatatccagggtggtcagatatgaaagccccggggggattttccctaaactgactgatcagaattcttgctcaaactggatcctgcaaggatgggaagggaaacccaatgtcagacctcatcaagcaaaggattcagaggaagctgactaaagttttggtcagggagagaatccttgtcaccggagtaccctattttttgtctccttaatgtgactcacctgaagatcttaatttggggccaccctgagagggcatttttgtctattcrtgaggcatatcacgtatttattgtctgtatgaaggaggtgttaatttggctttaaggtcttat

SEQ ID NO: 194031 - DNA, 654 bp, Homo sapiens
actagcttttgccccaggcttcagccttcttccaccaaaattaaaacgtaaaaacatcacatggatattaatattatattccctgccctgtaaaccttctataacgttctgtggtctgtcagtcaacagcatttattgagtgtccactatgaaaaggaagtcagtgccctttggaggactaaaggaagaaaaagtattctttgctttcctttactaccagtaaaagttccgtcttgttgtttccctccrctcggaattcctccacgcccccgtacctgtctgcaaacgctggaccaacacttgccctaagtgttttgttcctctcaggtacccattctcctggtttcccaaagaaatcttcaccgtacctataaactgtccaattcataataagctacgccccatcagctccaaaaggccatgacagaggcagtgaactaaaatctgtgaaccctgctgatgcgcctggaactgtagtagacactttacgttcctaataacattcattcctagagctagtctgcaagatgaaaattactcccatctctcagatcttgccaatcagaatcagaaaggctcagtaactagtttgaaggtttttaaagtggcagagtggagagcaaattcagatctgtttgactctaaaaagcttcc

SEQ ID NO: 194032 - DNA, 654 bp, Homo sapiens
actagcttttgccccaggcttcagccttcttccaccaaaattaaaacgtaaaaacatcacatggatattaatattatattccctgccctgtaaaccttctataacgttctgtggtctgtcagtcaacagcatttattgagtgtccactatgaaaaggaagtcagtgccctttggaggactaaaggaagaaaaagtattctttgctttcctttactaccagtaaaagttccgtcttgttgtttccctccgctcggaattcctccacgcccccgtacctgtctgcaaacgctggaccaacacttgccctaagtgttttgttcctctcaggtacccattctcctggtttcccaaagaaatcttcacmgtacctataaactgtccaattcataataagctacgccccatcagctccaaaaggccatgacagaggcagtgaactaaaatctgtgaaccctgctgatgcgcctggaactgtagtagacactttacgttcctaataacattcattcctagagctagtctgcaagatgaaaattactcccatctctcagatcttgccaatcagaatcagaaaggctcagtaactagtttgaaggtttttaaagtggcagagtggagagcaaattcagatctgtttgactctaaaaagcttcc

SEQ ID NO: 194033 - DNA, 654 bp, Homo sapiens
actagcttttgccccaggcttcagccttcttccaccaaaattaaaacgtaaaaacatcacatggatattaatattatattccctgccctgtaaaccttctataacgttctgtggtctgtcagtcaacagcatttattgagtgtccactatgaaaaggaagtcagtgccctttggaggactaaaggaagaaaaagtattctttgctttcctttactaccagtaaaagttccgtcttgttgtttccctccgctcggaattcctccacgcccccgtacctgtctgcaaacgctggaccaacacttgccctaagtgttttgttcctctcaggtacccattctcctggtttcccaaagaaatcttcaccgtacctataaactgtccaattcataataagctacgccccatcagctccaaaaggccatgayagaggcagtgaactaaaatctgtgaaccctgctgatgcgcctggaactgtagtagacactttacgttcctaataacattcattcctagagctagtctgcaagatgaaaattactcccatctctcagatcttgccaatcagaatcagaaaggctcagtaactagtttgaaggtttttaaagtggcagagtggagagcaaattcagatctgtttgactctaaaaagcttcc

SEQ ID NO: 194034 - DNA, 654 bp, Homo sapiens
actagcttttgccccaggcttcagccttcttccaccaaaattaaaacgtaaaaacatcacatggatattaatattatattccctgccctgtaaaccttctataacgttctgtggtctgtcagtcaacagcatttattgagtgtccactatgaaaaggaagtcagtgccctttggaggactaaaggaagaaaaagtattctttgctttcctttactaccagtaaaagttccgtcttgttgtttccctccgctcggaattcctccacgcccccgtacctgtctgcaaacgctggaccaacacttgccctaagtgttttgttcctctcaggtacccattctcctggtttcccaaagaaatcttcaccgtacctataaactgtccaattcataataagctacgccccatcagctccaaaaggccatgacagaggcagtgaactaaaatctgtgaaccctgctgatgcgcctggaactgtagtagacactttaygttcctaataacattcattcctagagctagtctgcaagatgaaaattactcccatctctcagatcttgccaatcagaatcagaaaggctcagtaactagtttgaaggtttttaaagtggcagagtggagagcaaattcagatctgtttgactctaaaaagcttcc

SEQ ID NO: 194035 - DNA, 595 bp, Homo sapiens
gtcacataagctctcttagccatcaaatacaaacacataatcgccactatcaaaagtaagcatttgcagtgcaggccgggtgcagtggctcacacctgtaatcccagcactttgggaggccgaagtgggtggattgcctgaagtcaggagtttgaaaccagcctggccagcgtggtgaaaccccatctcaactgaaaaatacagaaattagccaggcgtgatagagcatgcttgtagtctcagctactcaggaggctgaggcagragaattgcctgagatcaggaggtggaggttgcagtgagctgagatcatgccactgcactccagcctgggtgacagagtgagactctgtctccaaaaaagcaaaaaaagtaagcatttgtgaggtaccctctaccaagctagctggctacgatccagcttacttccctacataggtaatgtttatggtgattaccagtgtgttatctgagtcagactgcctgggtttgaaccccaactcctctacctactaggtgtgtcatttggaaaaataaatgatacaacccctctgtgcttcaatgtcctcagctatagatggaaattacaacaata

SEQ ID NO: 194036 - DNA, 619 bp, Homo sapiens
gaattcttataggtagacctctcaaaatggtgcctgccatacaagtgttctatggttttgctaacattataattcaaaaggaccaaccagcacttttgatgtaggtaataccaaaatggggtgttaactgatagygatggagaatacgaacacagaacaaggctcttaactgcctgatccaatcttactatcactctccctccatcagtcagtcctccccacaaggtcacagaagcaaaaagctgcacaaagacaaagcaagttcgcatcttattaccagccaggactgcggctagcagggagactgaggctgagattggtctggcttggagctggatcacaggctgggctctcagaccttaatgtggaactctagagaagtagatttaaatatacagatggacttttcagtttagcctctatagctctaagtggtctagcaccaaactatagaaaacactagaaaagagtgttacacctcctttcctccaaaaccaaaacttaaatttcagacatagccctagctaaagagaggcagggcttaatgccaattcccctcaatacacacacacacacacacacacacacacacagacacacacacacacacacccttctg

SEQ ID NO: 194037 - DNA, 619 bp, Homo sapiens
gaattcttataggtagacctctcaaaatggtgcctgccatacaagtgttctatggttttgctaacattataattcaaaaggaccaaccagcacttttgatgtaggtaataccaaaatggggtgttaactgatagcgatggagaatacgaacacagaacaaggctcttaactgcctgatccaatcttactatcactctccctccatcagtcastcctccccacaaggtcacagaagcaaaaagctgcacaaagacaaagcaagttcgcatcttattaccagccaggactgcggctagcagggagactgaggctgagattggtctggcttggagctggatcacaggctgggctctcagaccttaatgtggaactctagagaagtagatttaaatatacagatggacttttcagtttagcctctatagctctaagtggtctagcaccaaactatagaaaacactagaaaagagtgttacacctcctttcctccaaaaccaaaacttaaatttcagacatagccctagctaaagagaggcagggcttaatgccaattcccctcaatacacacacacacacacacacacacacacacagacacacacacacacacacccttctg

SEQ ID NO: 194038 - DNA, 619 bp, Homo sapiens
gaattcttataggtagacctctcaaaatggtgcctgccatacaagtgttctatggttttgctaacattataattcaaaaggaccaaccagcacttttgatgtaggtaataccaaaatggggtgttaactgatagcgatggagaatacgaacacagaacaaggctcttaactgcctgatccaatcttactatcactctccctccatcagtcagtcctccccacaaggtcacagaagcaaaaagctgcacaaagacaaagcaagttmgcatcttattaccagccaggactgcggctagcagggagactgaggctgagattggtctggcttggagctggatcacaggctgggctctcagaccttaatgtggaactctagagaagtagatttaaatatacagatggacttttcagtttagcctctatagctctaagtggtctagcaccaaactatagaaaacactagaaaagagtgttacacctcctttcctccaaaaccaaaacttaaatttcagacatagccctagctaaagagaggcagggcttaatgccaattcccctcaatacacacacacacacacacacacacacacacagacacacacacacacacacccttctg

SEQ ID NO: 194039 - DNA, 617 bp, Homo sapiens
aaaatggtgcctgccatacaagtgttctatggttttgctaacattataattcaaaaggaccaaccagcacttttgatgtaggtaataccaaaatggggtgttaactgatagcgatggagaatacgaacacagaacaaggctcttaactgcctgatccaatcttactatcactctccctccatcagtcagtcctccccacaaggtcacagaagcaaaaagctgcacaaagacaaagcaagttcgcatcttattaccagccaggactgcggctagcagggagactgaggctgagattggtctggcttggagctggatcacaggctgggctctcagaccttaatgtggaactctagagaagtagatttaaatatacagatggacttttcagtttagcctctatagctctaagtggtctagcaccaaactatagaaaacactagaaaagagtgttacacctcctttcctccaaaaccaaaacttaaatttcagacatagccctagctaaagagaggcagggcttaatgccaattcccctcaatacacacacacacacacacacacacacacacasacacacacacacacacacccttctggggcaacaaataaacaagaat

SEQ ID NO: 194040 - DNA, 644 bp, Homo sapiens
aacttcatcaacctaattttatagcttgctcccattcaaaaagtgccttctctgtactccacccatgttcactgaaaaccttccacccacctggggagctttcagatatggaactctgagtcaagtggaaagccactgtgaaaaatccagctctctggcccttgaggagtagagcattgtgttgctcaagggtacattgattccaggcacttctgatttgctgaaaacaatgaccacttgttctgtaattcctcatgcttgttctcagctcaaatttcatctagatgtttcagagttagtagagcatgtgaaagggtgtgtttttcacrcacacacacatttttcatgtgctttttgtgattggataactcaaatatagctttgttttaaaccttcagacatgctgtgatattaatggaagaaggaagtttacaggaaagggagacatcttggcctctatgtgaaagggcagacttgaaggttggctttattttatcaacccaaatgtgacctttgaatgaaagaggttactcagagcattacaaagaaaatagaacttcagaaggaacatcacgtagatacaatcaacaatgaaatttctaacaatcccagtctccaatgcaagcacagttttaggttatgca

SEQ ID NO: 194041 - DNA, 644 bp, Homo sapiens
aacttcatcaacctaattttatagcttgctcccattcaaaaagtgccttctctgtactccacccatgttcactgaaaaccttccacccacctggggagctttcagatatggaactctgagtcaagtggaaagccactgtgaaaaatccagctctctggcccttgaggagtagagcattgtgttgctcaagggtacattgattccaggcacttctgatttgctgaaaacaatgaccacttgttctgtaattcctcatgcttgttctcagctcaaatttcatctagatgtttcagagttagtagagcatgtgaaagggtgtgtttttcacgcrcacacacatttttcatgtgctttttgtgattggataactcaaatatagctttgttttaaaccttcagacatgctgtgatattaatggaagaaggaagtttacaggaaagggagacatcttggcctctatgtgaaagggcagacttgaaggttggctttattttatcaacccaaatgtgacctttgaatgaaagaggttactcagagcattacaaagaaaatagaacttcagaaggaacatcacgtagatacaatcaacaatgaaatttctaacaatcccagtctccaatgcaagcacagttttaggttatgca

SEQ ID NO: 194042 - DNA, 644 bp, Homo sapiens
aacttcatcaacctaattttatagcttgctcccattcaaaaagtgccttctctgtactccacccatgttcactgaaaaccttccacccacctggggagctttcagatatggaactctgagtcaagtggaaagccactgtgaaaaatccagctctctggcccttgaggagtagagcattgtgttgctcaagggtacattgattccaggcacttctgatttgctgaaaacaatgaccacttgttctgtaattcctcatgcttgttctcagctcaaatttcatctagatgtttcagagttagtagagcatgtgaaagggtgtgtttttcacgcacacacacatttttcatgtgctttttgtgattggataactcaaatatagctttgttttaaaccttcagacatgctgtgatattaatggaagaaggaagtttacaggaaagggagacatcttggcctctatgtgaaagggcagacttgaaggttggctttattttatcaacccaaatgtgacctttgaatgaaagaggttactcagagcattacaaagaaaayagaacttcagaaggaacatcacgtagatacaatcaacaatgaaatttctaacaatcccagtctccaatgcaagcacagttttaggttatgca

SEQ ID NO: 194043 - DNA, 579 bp, Homo sapiens
gtatatagtaaagaaacagtagacatgcaaagagtcaggagaatgtgacccactatcaagagaaaagatagtcaatagaaattgatcctgagatgacctaaaggttggaattagaaaacaaggactttaaagcacctgctttaacactgtcaaggacttaaaggaaaaacttgtcagaatggctatacaaataagaagatcaactgggagatagaagatataaaaaagaaccaaagggaaacactakaactgaaaaagggggaacggctgaaattttaaaattcactgaaagggcgtaacagcagaaaaaggggccacataggctgcagaaaaaataaaagccagtgaacttaaaataatagtcagtaaaagtaattcaacatgaagaatagagagaatagagattcagaacagcaaaataaagctacagtggcctatggggcaatattaagttatcaaacacaaataattacagtctcagaagcataggagaggaaatgaggaagaaaaaatacttgaagaaattatcactaaaaactttctcaaatatggttaaaaaaattaacttactgttccaag

SEQ ID NO: 194044 - DNA, 525 bp, Homo sapiens
ggaattattagaccaggaattcaaaataactgtcattgcagacattcttcattttattgcacttcacagatactgtatttttttttatttttttatttttatttttttttacaaatggaaggtttgtggtaaccctgagtcaagcaaatctatcagcactgtagaagtaatgtctagcttaaggccttattatttaaaggatacattttgtaaggctatagctgccatacgtagtgattcctctgatggatctgggcaaagtaaattgaaaaccttctggaaaggagtcaccattctagatgccattaagaatgttggtgattcataggaagaagtcaaaatatcracattaatcggagtttggaagaagttgattccaaccctcatgaatgaggtaaaagggttcaagacttcagtggaggaaataactgaagagtggtagaggcaacaaaagagaactagaattaaaagtagagcctgaagatgtgactgaattgctgcaatatcataaaatttgaatggatg

SEQ ID NO: 194045 - DNA, 628 bp, Homo sapiens
tcggcttttgcattcccattatcttgtgagtgtatggtggagttttctggaagctgctgaatatgtggtatcacaacacrttgaatgcagaagcagacacaagaatacagttgttttctgtttagccagatattaacaagatttgcaaaaatgtgaaacaatgacaatcttctaatgtttttggggggagaaatctagttattttccataaaatgttatttatattaacatgtaataggtctattgctattttcaagatcaattcataactatttttaaaatttctcagttttgattgctaataagataaatgtcagtagatataacccacataaacagctctttgaggccctcaataagttttaaaaatgtaaatagatcccgaggccaaaaagtttgagaactattgctgtaaccaactgtgtttttttttcctttgttttggaagctagaaagcccagaccagatttgtagtccacctccagcatttgtctaagatcccaagacatagaatttatggactaatatttccccatgcagtcttttgtttttaacccttatttttctttctaaatgattttatattctatttttaaagcttctctgttttattttaaaatgctttatc

SEQ ID NO: 194046 - DNA, 533 bp, Homo sapiens
taagcacccagaatcacaccagccccatgtattagacagggaagaggcacatgctttccactacctaggagaaagagcttgtcaccaagagaccctggmtaatagatttaaaaagagaaaaatataggccagaaagtataatcttcttaatcctggaacatttacaactccatatacttgatgtttctatggaaaacctagaatattgcccctatctattcctactgaagtcgctctaacaaaaaagaattctaaaatagaattgagttccctcaaatattatgaaaataagctttcatggtcctattgtcctattttatgtatttcttcccaatctctgtcttgcctaaaaagttttcacagtctgcatatagtatatttaaaattttatatcaagctttaatcaaaacttctttatatagttgccaattataattataaaagcatctcaatgttttttagttgatacattacaatttaataatttacctggttttatatttaatttccttccatgtttctacaattgcaag

SEQ ID NO: 194047 - DNA, 533 bp, Homo sapiens
taagcacccagaatcacaccagccccatgtattagacagggaagaggcacatgctttccactacctaggagaaagagcttgtcaccaagagaccctggctaatagatttaaaaagagaaaaatataggccagaaagtataatcttcttaatcctggaacatttacaactccatatacttgatgtttctatggaaaacctagaatattgcccctatctattcctactgaagtcgctctaacaaaaaagaattctaaaatagaattgagttccctcaaatattatgaaaataagctttcatggtcctattgtcctattttatgtatttcttcccaatctctgtcttgcctaaaaagttttcacagtctgcatatagtatatwtaaaattttatatcaagctttaatcaaaacttctttatatagttgccaattataattataaaagcatctcaatgttttttagttgatacattacaatttaataatttacctggttttatatttaatttccttccatgtttctacaattgcaag

SEQ ID NO: 194048 - DNA, 358 bp, Homo sapiens
aacatccttgaaccttattcttctctgacaggcacatcataaaagccaccttcaaaagtgatgccagacaaactacacttgctgcttagtgttctttctgacaagtatctgtatactactcgtaatatgtaaaaaatactcatttaatttgccttttcaatatcacaatgaaaaagaaaacataatcaaggaatgagaacacatctttgaaggctctaacagggcctggccattaagactatctatgtgaacacctctgcatccatctttggaaatcagcagtcttgctgaaatatacttagactacccrgctcctttttcacagtattgaaaacatacgcatatttttttctacatg

SEQ ID NO: 194049 - DNA, 592 bp, Homo sapiens
cacattttttggcaaattgattcatcatgatgagtctgtgatgagatgcccagtgacagaaagaactcagaaatgtttagagaaataaagagtgttgtttaggtatggtttgttttctcttttgtgaaccttgggaaagtcacttagcctcccaggcctcagtttcctcatttataaaatgagaagtgaagragttcaattagataatctctatggtggtgtctggcaattatgctccgtgattttattatggtgtgtgtgaattcaggatgaatattttgttctatttcttttcccttttttaaaaattcttctcaccgacctactgtatttggcatagatcagtccttttgatcaaaagcataagccgagtggacataaaaatagaaaaagcaaggaaagataagtgagcggttccaatgacaatcaggaatcttttgtaaatggccacatcttgggaaagcctgatccagcttattttctgggaactaatgatcagctgagatgagttgctgataggctgcaaaggcaaggaccattaacacttgattgtcactaattctgagtcaatgtcccatttcaaagtcattag

SEQ ID NO: 194050 - DNA, 471 bp, Homo sapiens
ggaatttattatacatgccctttttcagttctccatgttccaaatacctcctctcaaattgaaacttstgtttttcagtctctaaatagggaatttttatacaatgaaattcttactattgatatggacaaatttaacaatcttttcctttggagtccatgtttttcatgccttgtttaaacatctttgcctactcccaggtcataacgtttttctcctaaattaccttctaggaactctatcattttatcattatgtctactatccacccggattgatttttgtattggtatgaggtagcagttaggcttctatttttcatacggacatataatcaagaaagcatcatttattaaatataaaagtgttctttctccacagacctgaagtgtaaactttgaataagtaaagtctacatttattcatgagtctgatcctggactctaatccattagaatattatatatctgt

SEQ ID NO: 194051 - DNA, 610 bp, Homo sapiens
tcatttaatacatacattgattgtctactacatgccacatacttttctaagttcttagggtattgcattaaaccaaattgaaaaatgctgcctgcactcagaaggctatcctttaaacctcaaaagttgcttctaaacatttaagatgaagttcagtaaattttagtaaaagattgaataactcatgattttaaatatccttgaacatgctacaggtttttcsttatgttttggttgctttgtttttaattgtcttggtaattgtttcatcttcttattgtcattaattcatatccaaagcacaatataaaccagaggtgagatttatccttaacagtagtgattttccaagcttcctttttcaacatattacttctatgattagatcattgtggttttcatattgtcagcaccacccttttcttgttacctgatgtttacatgattaacctgtattttatagtgtctgtataaggtggggcccaagcaacaaacaaaccactctagttattttgacagataatttaataaaggaaattggctcaagaggcatttaggacttaaaaggggaaaggggacgctgtggtctcagagaccacattaacttagg

SEQ ID NO: 194052 - DNA, 394 bp, Homo sapiens
ctgactggtgtgagatattattccattgtggttttgatttgcatttctctgatgattagtgacacggagaactttttcatatgtttgttggccgtgtgcgtatcttcttttgagaagtgtctactcatgccttttgtctattttgaaataggattgttttttkttttttgatttgtttaagttccttatagtttctggatgttagacctttgtcggatgcatagtttgcaaatactttctcccattctgttggttgtctgtttgctctgttgatagtttcttttgctatgaagaagctatttaattagttaaataggagtcactcttgctcaatattctggaacagttttaccagcattggcacaagttcttctttgtatgtctactagaattc

SEQ ID NO: 194053 - DNA, 394 bp, Homo sapiens
ctgactggtgtgagatattattccattgtggttttgatttgcatttctctgatgattagtgacacggagaactttttcatatgtttgttggccgtgtgcgtatcttcttttgagaagtgtctactcatgccttttgtctattttgaaataggattgttttttgktttttgatttgtttaagttccttatagtttctggatgttagacctttgtcggatgcatagtttgcaaatactttctcccattctgttggttgtctgtttgctctgttgatagtttcttttgctatgaagaagctatttaattagttaaataggagtcactcttgctcaatattctggaacagttttaccagcattggcacaagttcttctttgtatgtctactagaattc

SEQ ID NO: 194054 - DNA, 513 bp, Homo sapiens
tcagccacgtgacaggaaaaataggaaaatcaaaagagaaagagattcttatcatcttccccccatccatggctgtgttctacagatatggataagtttttttctagtcctatcatggtattttwgtcattgacctgttttgaagaattatctcttgatttaaaattgagtaaagagggtacttcactgaatttttaataaattctatttaacaattttatagttttacaatactctattcataacagtttctcatgtaaactgtatagccctgtacaaaaactaattatcaaaattggtgtcattgattgtcttcacttaaatgaacgatttataaatataagcattcagttaaaaatagaattaggaaatgatattttatatcaaaaagctaagttttagtaccctaaaatttgtatatgaaatcatagctagcctattaattttattataaagataatttacattttcaacaatttttggttgtcattttgacatctattttcttaggtc

SEQ ID NO: 194055 - DNA, 587 bp, Homo sapiens
ataatttaaaacagtaataacttacgcattcaatattgaagcaacaaaataaagactgtcatagaagtatcaacaaaacaaaaataatttagcatctgctctaacttcaaatacataaatataacatttagtttgatttaaattccaagtttaaccccttttattgtttattactgttttttacatcttgtctttcccattcttacattcttattttgatttatttcttgaataggttgtaacttcgtttagtttcccacccccagaaagctttatgaagtctttctcattttaaatatgtgtaaatatttctctgttacctttacatagmtcatttaattgaatgtggaattcatgttacatgaacctatgtatttggaattactggtcattagcatttagtgctgcagtttggaaatctgaggttagtaagacttttgttactttataagttacttgtattttttctgccttaatgcaaagatttttcttgatcttggaattaaaatgttcatcatgaatctttcttaataaaagaaagattatttttattagttttataataacatgtactatttgaaattcaa

SEQ ID NO: 194056 - DNA, 552 bp, Homo sapiens
aattctgttctctgacctatcacttcaccctgtactcttcacatgtcagcccactccaaaacccttaaaatgtctagtcccaaactctacagggagatggatttgagatttcctcccatcctctcattcagcagtcctacaattaaaccactttatctgatgcaaccctgtgtctcagtgtactgacttgctgagtattgataaatggacttattatggttacaaygcggatagcaatggtttttcttaacagtactgtgtgacagcacgcatggagtattgccaaacagggaaactcacccaaatcttggtgttcagaggtttattatggcttggccacataaacatcgctaaccacctgcctggctgacctatccccagctcctcaagtatcaagttaatactgcatggcccaagttctccaccataagtcatcgagtatctggaatggcccaagaccccctggtaaacagacacttttatcaagcaggacattccaagggcttaaaggttatctcccagaagctagttaaaggccaaatgattctctgg

SEQ ID NO: 194057 - DNA, 576 bp, Homo sapiens
gatagtgcttttagcaatttttattttccctgttaagtaattttttaattagtttacttttttagtgtcatatattatataaaaatgtattttctaagtttatttcacttgtggagaaactggagagtaatagagtgccatgttttaaaaacacaacactatacatgtggctgacatgtgaaagtcagggttacaagctcaaagtgtctractttcaaatacagcccaatcagtaaagacatgataaatgtacagaggaagcccattataatggtggtttgagtcactgggcaagagaagaagaaagatgacaaaagaacacgggctcacaagtaactattgctcattaattctgactgagatcaataagtgatgttccttgcattcacccacagcaagtatgggtacatttgagataaatgaaagcctcttctgcttaatgtaacagaaaaagtatgtattaaatggaatttttaatgtgaatgaatgctgacaatttcttgttaataatttcacttcattttggcaggaagagccaaatctcaaaataatattgaaaagtctgacaagaaaact

SEQ ID NO: 194058 - DNA, 576 bp, Homo sapiens
gatagtgcttttagcaatttttattttccctgttaagtaattttttaattagtttacttttttagtgtcatatattatataaaaatgtattttctaagtttatttcacttgtggagaaactggagagtaatagagtgccatgttttaaaaacacaacactatacatgtggctgacatgtgaaagtcagggttacaagctcaaagtgtctgactttcaaatacagcccaatcagtaaagacatgataaatgtacagaggaagcccattataatggtggtttgagtcactgggcaagagaagaagaaagatgacaaaagaacacgggctcacaagtaactattgctcattaattctgactgagatcaataagtgatgttccttgcattcacccacagcaagtatgggtacatttgagataaatgaaagcctcttctgcttaatgtaacagaaaaartatgtattaaatggaatttttaatgtgaatgaatgctgacaatttcttgttaataatttcacttcattttggcaggaagagccaaatctcaaaataatattgaaaagtctgacaagaaaact

SEQ ID NO: 194059 - DNA, 508 bp, Homo sapiens
tataccaaaattatttatgtacctaagtccctttatcatgtcatttacaacaaatagaayatgctggaaatattatgttttttagtagagtagcaggtagcctgataataaatttgacatctttaataaatactcattaactagatagtggatatataaatttatgaatattatagcattcattttattttaaacaaaaatcacttacaaattagtggagcctcattggtgataagttaaactctgcaaaattcacagtatctcaattctagtgctctgagcatcctcatgtttgattagaagggagtctaatattttccagtaatctttacattctgagggggatagagtgttggaagttgatctatgtcctacactgcagctcatttcctctggacagctggcctgtagtgctcttctctgaccaatgaagaggctctttcctctgctcactgacagctcttttatagaggtttccaaaagcagggcttcatgactcttaataata

SEQ ID NO: 194060 - DNA, 508 bp, Homo sapiens
tataccaaaattatttatgtacctaagtccctttatcatgtcatttacaacaaatagaatatgctggaaatattatgttttttagtagagtagcaggtagcctgataataaatttgacatctttaataaatactcattaactagatagtggatatataaatttatgaatattatakcattcattttattttaaacaaaaatcacttacaaattagtggagcctcattggtgataagttaaactctgcaaaattcacagtatctcaattctagtgctctgagcatcctcatgtttgattagaagggagtctaatattttccagtaatctttacattctgagggggatagagtgttggaagttgatctatgtcctacactgcagctcatttcctctggacagctggcctgtagtgctcttctctgaccaatgaagaggctctttcctctgctcactgacagctcttttatagaggtttccaaaagcagggcttcatgactcttaataata

SEQ ID NO: 194061 - DNA, 545 bp, Homo sapiens
attaccctccttgttatgtctgcaggctacattcaaggtgagttatatcattgtacggtctttcttttttttttktgtgtgtgtgtgtgtgtgtgtgtgtgtgtgtgtgtgtgacagagggaggcaggggagagagagagacagatcttatgcaagggattgttactcctaataagaattctacatagctttatttctagaaatgtctttcttgagaggttcactgtttgtttcttactgctttgggccccagggatgtcaccaagcttggatcagttttatgttaaagtttcagtttagagatttatttgcaacttgtgtattgtaaattcagatataatcccttgctcattgctagcttggagtttgtatcgcttacagaagacttttttttctcatctaaggtatcagaagaaataaggttcatgctttccatggtggtggatggaagttttcacagtcctcttctccagagagcactgagccagcttcttagggtacatatattaagtgtcctaattctaactgtctctcatgatgggctg

SEQ ID NO: 194062 - DNA, 568 bp, Homo sapiens
ggagagtttacccagcaggtataaaatcttggctggcttccctcatgggattaggtcattactgcttcttctacaagtctgagaatctgtctatatgccagttaagtggccactcctaatatttacattgctaggtctaatatgaacaatagcatttatttttataatttattataagcaatagagcttaaaatacattttgacacatattaatttatttgatcctcacaacagtcttttttggcacattggatagatatcattatcctatttttataaatgaaagagatggatttcaggaaggttaagtaaattgttctgaacaacacagctggcaaggcgtggctctggaactggaattaagatctttagactcctattcaagcatttttttcccactatatccctgtgattttggattgtggattytagtcagttctacaccaagatgctgactctacctaaataatttaaatttatttaaaccttgaccaaaaaaagagtctttaaataagtaaatatgacataaataaattaaataaaataaataggtttaatgagaagggga

SEQ ID NO: 194063 - DNA, 611 bp, Homo sapiens
taaatcacattctggtaaatatagttattcaacgcatttactgagaagctctgggctagatactgagagtataaattgctgaacacagcataaataatcctgctctcatggaaattcagtgttacaaggaatttgatgttttcaacatggggccaacatagtttaaagctcataacatatttcttctcttcttgtcttccattaatgggatacaatttgaaagtaactccttaatttcatactggagatggcagtctctcccatggattctatgataatgttagcatttatcatttttatatttgctcattaaactgttagagattcttcatgacgaaaggtagaaaaagactattcatgccaggactctgtyaccaaatacttttcagacttctatactttagctaactttttcttaccaaagctattcaaagtacagcagcttcttcctctgatattgctacatatgcactttaaggtttctcaatcctttgctcatttattatgttgtatatggattcaccttttaatagaaagataaaggtcaccttagcatgctttattataaatgggattgccaaagacaatagagtctttattgtaagagtcag

SEQ ID NO: 194064 - DNA, 635 bp, Homo sapiens
taggttgaataagctattggatttgtgtcaagatacctgatctctctatgctttaatttcctggtatttttaatggatttaacaattgtaccaaattcacagaagattatgaagatttaattggtaaatctatgcagagtccttaaaacagttcctggtgcataataataacataattgtttgctgctattatgattactatcatcatcattattattgggtctcatgagagtcctaggaaactttaatcaattccccatgtgattcagatacataattatatttcacaccattatagagtatgtcttaaaatgttagtaaattttaaaatttcatataaaagataatcgactttattttactctcacactttagaactcatgaagggttattagcattttttagaggaagaattaataaaacacctttgttagcttgagctaagtttgaagtttgatagtgaatgtgaatgcccaattaaaactagatttcaaagaccccaaktgaatatttatatatcttgggaattattagagaggaaatcacttttctgaagtgatatcaagatgactcactatactcttaatctgttaatcactatctaagcaccacaacaagccattttcagtgcaaag

SEQ ID NO: 194065 - DNA, 575 bp, Homo sapiens
attcttggttatgtatagttytactatgtatatatgtatagtaacttttactaactctttggttattcttaagaattactaatgctcagctgcacatacaccaatatataaaagcagaggtcagtaaaataatcaaaaatgcaaatttactggttattaatatttaagtaaagctatgcctcatgtctttgaatttaacatattactaaaacaaaaccatacagtgaattttctccatgaagaattgagtccaccatgtgtctaatatttccataaatattcttagtttctttcactgctcttgaacggacctcgtatctcttaagttcatctaaagtatcaacttaataaaactttttctttaccgtacttcttatggaacaaaaacaaatggtggtttggattattgttctaaaatttaagtatgaaaagtaggagcaaattatcagtcaatgcatttaaaataaatgaagtttgtctataaaagtagatgggtcagaaaagtaattaaacagaacattttggcttataatgagtaaacatgaacacaagttttgctaggtgtaacctcagtt

SEQ ID NO: 194066 - DNA, 537 bp, Homo sapiens
ggcaatagagaaaacaaatctgaagttttccttttacagagaaagtgagttaacgtagagaatgttttaatatcacttgtctagctttaatattaaatttcaggatgccagaaaataaactctctgttgaccataaacggtggtcaggcactgaagatttgagttgagcaggaataggtaagttctatacaaatattgaaatgaagatttcagagtttagctttggagatatgtatctgttygtattgtgacgaggagagttttactccagaaggttggttcctactcattcttacccttattttttcccatccccattgacttattaagtacctggtatcttttgtccctgagaaacgctgtagaaatagaggagccagctttaggaataccagtgctaaagacaaggctgtggttatgactctgtttgtcaaagaatagcagtaaaatatcaatctggaaaacaattgttaaggaaactgtggtattattgtttagtaaagacagtagactttgtcttcttttcactgctgggat

SEQ ID NO: 194067 - DNA, 537 bp, Homo sapiens
ggcaatagagaaaacaaatctgaagttttccttttacagagaaagtgagttaacgtagagaatgttttaatatcacttgtctagctttaatattaaatttcaggatgccagaaaataaactctctgttgaccataaacggtggtcaggcactgaagatttgagttgagcaggaataggtaagttctatacaaatattgaaatgaagatttcagagtttagctttggagatatgtatctgtttrtattgtgacgaggagagttttactccagaaggttggttcctactcattcttacccttattttttcccatccccattgacttattaagtacctggtatcttttgtccctgagaaacgctgtagaaatagaggagccagctttaggaataccagtgctaaagacaaggctgtggttatgactctgtttgtcaaagaatagcagtaaaatatcaatctggaaaacaattgttaaggaaactgtggtattattgtttagtaaagacagtagactttgtcttcttttcactgctgggat

SEQ ID NO: 194068 - DNA, 537 bp, Homo sapiens
ggcaatagagaaaacaaatctgaagttttccttttacagagaaagtgagttaacgtagagaatgttttaatatcacttgtctagctttaatattaaatttcaggatgccagaaaataaactctctgttgaccataaacggtggtcaggcactgaagatttgagttgagcaggaataggtaagttctatacaaatattgaaatgaagatttcagagtttagctttggagatatgtatctgtttgtattgtgacgaggagagttttactccagaaggttggttcctactcattcttacccttatttyttcccatccccattgacttattaagtacctggtatcttttgtccctgagaaacgctgtagaaatagaggagccagctttaggaataccagtgctaaagacaaggctgtggttatgactctgtttgtcaaagaatagcagtaaaatatcaatctggaaaacaattgttaaggaaactgtggtattattgtttagtaaagacagtagactttgtcttcttttcactgctgggat

SEQ ID NO: 194069 - DNA, 537 bp, Homo sapiens
ggcaatagagaaaacaaatctgaagttttccttttacagagaaagtgagttaacgtagagaatgttttaatatcacttgtctagctttaatattaaatttcaggatgccagaaaataaactctctgttgaccataaacggtggtcaggcactgaagatttgagttgagcaggaataggtaagttctatacaaatattgaaatgaagatttcagagtttagctttggagatatgtatctgtttgtattgtgacgaggagagttttactccagaaggttggttcctactcattcttacccttattttttcccatccscattgacttattaagtacctggtatcttttgtccctgagaaacgctgtagaaatagaggagccagctttaggaataccagtgctaaagacaaggctgtggttatgactctgtttgtcaaagaatagcagtaaaatatcaatctggaaaacaattgttaaggaaactgtggtattattgtttagtaaagacagtagactttgtcttcttttcactgctgggat

SEQ ID NO: 194070 - DNA, 603 bp, Homo sapiens
agtgacaatttaagaaaacagtgtcactattgcaaagaattactgtgacagaggctggaatatgagctcagagacctttatcctaagttaacttctctcatgctgaatataatagttttataaacgtgtattaataattagggactataattaaataacatttagcaaatgtattggatattatgagaaaaacatacaattgacatgcataataaaatagtatagttttcaagaacattttgaagccaggttttctgaaagcacctgtagatgtgtatgaactaggactcagtgtgtctttatatttggcctgtgagaacttgcccttcaaaggtgggctygtaatatgatgtcaatatttgtgtcctcttcaagaactgctgtttcaacataagacatcgtctgttctctaattatagtattcaaaagagacatacaattttaaacctctcttgatagttgaaaatattttttttgaaaggacataaaaacccttaagttcttgttctgggtaaccaagtatcatattttatttgtaatcctaactgctataaaagtgaattggtaatttttccatgtttttgagtctcttattagaattaa

SEQ ID NO: 194071 - DNA, 492 bp, Homo sapiens
atacctaatacattgtaaatgctacataaatcattgttacactgtattgttttatatttgtattatttttatcattgtacagttattttcaattttttttcccaaatatttttgattcttggttggttgaattcatgaatgtggaatccatggacacagaggggtgtgtgtgtgtgcgtgtgtgygtgtgtgtgtgtgtgtgtgtgtgtgtgtgtgtgtattgatccaggcaaaatcttaggcctttaaaattcaaaatacatatagcaaagttctttaaaactgaaaataaacatcgaaaatgtcttaataaggaaccataatggcataggcagtaatctttccttcaccaatttgtaacttaccctttcagtcaagattagtattttcactagtgaccacaagtgacttaaagatagcaatccagttttttaaaaaatcattcacatttttaatagctccttcatttttaatattttgcatttatagtat

SEQ ID NO: 194072 - DNA, 560 bp, Homo sapiens
gcttcttgggattgggctatcccatagggtagtctaatatgttctgatagccctatgtaatccatatttgcatcattattctactgaataccaaatgccttaaaattctaatcaygccatggcatcctaggagtctgagtgctatgctttgctgtctgcgttgcagatgtgatttaactctgattaccttgatttgtcagtgaatttaggcccagtagcatttaagatagtaactgtctgcggatatctgactgagtattagagagtattgtccctgatggcaatagctcagtaatttgaaatcctgtgaaagcttacatctggttgaagtagaaggtcatttcatgtgagagtagcactgtcacgtgtctgcattatccacacatttggttactgaaagactaatatatgcaagcccagcccagggtggtatgcaatggtaagccaaaggatgaggaggagctaaatcatgaaagaatcctgatattcacttggacacatgactgcctagagtagtctacattttccatgtaaaggatggaatgaaaggggaaatggtg

SEQ ID NO: 194073 - DNA, 552 bp, Homo sapiens
cctcattatttaatggacaccacgtgctttatgtgaaatatgttttaaccttcaaataattctattagaatcttcattttacagatgaggacattgaaaagtaagtggttaaataatttgctctaggaggtgggaacatcataatttcaatctaggtttgcctgaaggaaaactccaagtcttaactccactgactgtctgtaattggggctcatcaattttaggttgatgctcaaaataactttggatatacagtgggtattactgctgtaagcacaatccagaaaccaagactgtggacatgtccagagaaatacacacgtgcatacacacacacacacacacacacacacacacacaccacacattagaatttaccctttaataaaactaatgtttaagtttcactrtgaagtatttagataaacctcgaaaacagaaccttatagagataacagagagtataagggagttcaaaatatttgtatcttaagtgaatcctcaatttgttaaaatgtagtaccacagtgaataagtattttaataatttta

SEQ ID NO: 194074 - DNA, 443 bp, Homo sapiens
tatagggaaaataaacttaagtgaactcttgctgcaacaaccataatgtaaaatataaaaatatgaattgggactaccactgtgaaggagtaaataaagtttcttttctttttgaaaaataaatgagtaaacattatacgtgaattcatatgcagagcaaaagatattaatgtaataatatctgaaatagaaagtcaaattcatagccttgtttatctaaaaaggtaggaagaactcaggtccagacagatttacaataatgatttcatcaagcagacaaacagttttgatatataccacgyggagaaaacttagctctaattcgctttatcgaattaagaaatgaataacaacttcatgtgacaattatatttcaaagaaattattactgaaatttactgttttctttaaagttaataaggcagacaacatgagcctatata

SEQ ID NO: 194075 - DNA, 526 bp, Homo sapiens
tttgtttacaacaatgcctaactgtcttgaatcgccgtattttaccaaatagcacaggacagctttgaggatactaacccatttctgtggggcaacactgctaaaaaaatatataaatacatgagaaccaacccaaatggatttgcaacctaagcagatggttgagaaaccgaggaaaaatattaatagaatcattttaraaaatgtatttcctcaaatttaagatcaagaaaattactgaagtagttgacttgaaacacagaacagtatcccagatatgaaaactaaaaccatatatatctgccctcccatttgtcaataaatatttgataattttatgcagtaagctaaatctataatttaatttgttaaaggcttatcaaatttgtccaagtggtaaaaacttttactgtaattagcacccagtgatacgatattttttatgtctgatatactagttggttaaagcattattcaaaataaagccagggtcgtatttttttctttctctacagattaagtagtt

SEQ ID NO: 194076 - DNA, 403 bp, Homo sapiens
gcactggggcataaaattgtgtgtgcatgtgtgtgtgtgtggtgggggagggggaatacaatttagtgttaactgaagtgtgaaaatcaagatgggttacagcaggtgatgggaccaagtcagagacttaaccctcagagcaatgactggccactgcataattttaaatcacatttgcatcttagaaggattatacaggatgcagyttgggggattaatttaaggggccagaagaaagatagggaaacacgttaactggttctcaaaatggtctgagcaagtgatgtggtctgatgtacaacagtggtagacatgaaaatgggaaggttttttaaaggaaggagcattagctggtgatggctgggagagaagaatgggcagagggcataatctagaagaattc

SEQ ID NO: 194077 - DNA, 383 bp, Homo sapiens
taggcactggggcataaaattgtgtgtgcatgtgtgtgtgtgtggtgggggagggggaatacaatttagtgttaactgaagtgtgaaaatcaagatgggttacagcaggtgatgggaccaagtcagagacttaaccctcagagcaatgactggccactgcataattttaaatcacatttgcatcttagaaggattatacaggatgcagtttgggggattaatttaaggggccagaagaaagatagggaaacacgttaactggttctcaaaatggtctgagcaagtgatgtggtctgatgtacaacagtggtagacaygaaaatgggaaggttttttaaaggaaggagcattagctggtgatggctgggagagaagaatgggca

SEQ ID NO: 194078 - DNA, 436 bp, Homo sapiens
ttatttaaaaaataaagtcagtaagaacagcaaaagtctrtgtagggtaacatcaagactctgctccctctctccaccctcatagctcactggaatggaaactttactccagatagctgtagccaagaacacagggctccctttcacttcagtcagaggtctgtcttcccagaaatgtagggaccaacagttcttatcctgccttcacctatctattgataagagtaccttccaggcaagtgaagccaagagatgaggactccattcttctgttcaacctacactgcggaatagaaggtctgtgatcagtatggtgttgcctagaatactggggctctgatgtctcttgtcctattttataaggtagaggtcaaatgctggtagacgcaagctgataatatctgaggcaactggtagtaactacaccaagtgctca

SEQ ID NO: 194079 - DNA, 509 bp, Homo sapiens
ctattgggcacttgtatgcaaataaataagataatttagatcgaatggacaaattcccgtacaygcacaaactaccaaaactggctcaaaaaaaaaaaatagaccatctggatagacttatcataagtgaacagattgaattagtgatttcagaactacacacgaagaaaaacctaagcccagatggcttcagcacttcactctaccaaacatttaaagaaacactaataccaattcttcacaaactctactaaaaaacagagaagagaacatttcccaactagacaaagatatcccaaggtaagacagctacagactactatcttatgaaggcaaacatcctccacaaagtagtagcaaaccaaatccaacaacatgtgaaaataactaaacaccatgaccaagggaagcaagatgcctttaacacctcaaaatcaattaacacaatataacatgtcaaaaaaagaaaataaccacattattatttaattaacttaaaaaattaacac

SEQ ID NO: 194080 - DNA, 509 bp, Homo sapiens
ctattgggcacttgtatgcaaataaataagataatttagatcgaatggacaaattcccgtacacgcacaaactaccaaaactggctcaaaaaaaaaaaatagaccatctggatagacttatcataagtgaacagattgaattagtgatttcagaactacacacgaagaaaaacctaagcccagatggcttcagcacttcactctaccaaacatttaaagaaacactaataccaattcttcacaaactctactaaaaaacagagaagagaacatttcccaactagacaaagatatcccaaggtaagacagctacagactactatcttatgaaggcaaacatcctccacaaagtagtagcaaaccaaatccaacaacatgtgaaaataactaaacaccatgaccaagggaagcaagatgsctttaacacctcaaaatcaattaacacaatataacatgtcaaaaaaagaaaataaccacattattatttaattaacttaaaaaattaacac

SEQ ID NO: 194081 - DNA, 507 bp, Homo sapiens
tagtatatttcactttcttatttctgaaatctttggcactagattctttccttgtataatacgtatgtttggcccttgcatgcttagccttgtaaaactttttttttttttctctcttgcctagaggccatcaaactccaaatgatcagcaactggagccagccttgcacaatgtctctctttcaccaggcaaccccctgggaggaatctgactgcgattctttccaaaacaatgctctctatcatcaggaagtagctaagactggtcgtggtccatattctaatggcagttagatgtccctcttcagaggggagaaattatacagacarcaggcagggaaatagtgggtagaagagggtggtccccagtgagggccacatcctcaagcttatacccacagtccaaagtgagaacatgtattcctgttttcccacttgaatgttgccttttccaaaaccaacctgtcccgccccaccccccatcctgtacccataaaaaccccagac

SEQ ID NO: 194082 - DNA, 507 bp, Homo sapiens
tagtatatttcactttcttatttctgaaatctttggcactagattctttccttgtataatacgtatgtttggcccttgcatgcttagccttgtaaaactttttttttttttctctcttgcctagaggccatcaaactccaaatgatcagcaactggagccagccttgcacaatgtctctctttcaccaggcaaccccctgggaggaatctgactgcgattctttccaaaacaatgctctctatcatcaggaagtagctaagactggtcgtggtccatattctaatggcagttagatgtccctcttcagaggggagaaattatacagacagcaggcagggaaatagtgggtagaagagggtggtccccagtgagggccacatcctcaagcttatacccacagtccaaagtgagaacatgtattcctgttttcccacttgaatgttgccttttccaaaaccaacctgtcccgccccacccsccatcctgtacccataaaaaccccagac

SEQ ID NO: 194083 - DNA, 516 bp, Homo sapiens
ttgtcttctctctgataagctgcagacagatagttaagagcttttaacactgtgtggaagcacagatgtgctttgcagtgtacccacccacacagatacccgtacatgaaaactaatttaaaaaaaaaagctaaatacaacacatagttacacaacatggggggactaacacctattgagtgctcactttgtaccagacttttaagcagacataattcgagtgcgggaccagtcataaatgatgactaatttgtaaaactgatgtaaacatccattgaatacaatcaaataatcatccagtggttatcacttggcatccttggatagccaaatgtcatacacaatgtaatgcagagatgactcaacaacattcaacaaatatttattgaatactgagttggaaaacawctgtgtacatgccaaaaatgtcccgctgtcatggagcttatattctagctgaaagagagagacagaaagcagaaaatgtaataaataaataaaccaattgtatggtat

SEQ ID NO: 194084 - DNA, 565 bp, Homo sapiens
agatcttcttctgaatctctacttaattttcttcctgagtaggtgaacaagaggttcagaatggcycatcagctaggacccttgggtttttacctttctaggtttttcttttatcaaacactgtgagcttgatttggaaaaggatcttaattcatttctgtatttctaataatgcctggcacataaaagtgcttgctcagtgtgtagtgaactggatgagcagtggaggacagaaatgatgcttgaagtagatgattcttgctggtctctatagactctactgcttctcaagaagaactgatgtccaggacagctggagtatagctttatttgataacaactcctctcctccatatctaaggctatatggcagcttttctctgtaaagaatttccatttgtgctgcaaaaagaaatcagtggacctgagcaccaatcattttcctcttgccttcagagttatgatgcacttgatgcagctaggaatgaattattgcagcagagcttggaaggaatgttaaagaaagatttagcctatttattttgtaaagggaagaaattgaggt

SEQ ID NO: 194085 - DNA, 580 bp, Homo sapiens
tgtccaggtattatcctttggggatagaaatggttcgtaatgtttttatagttcatcctagaccatggctcagccttgccacccaacttccctgtccagggagatcagaagcaataggtggctatcaaggcatcatttgaatagggtggatatcaaatacagcatccccatctgtacaggactcagcctttgatagttcttgatctaccygccagcaaccattccttcctcccacttgcctttacctccacaggatcagtaagagcaagaaaagttcttctccttcttgatttatttcctcctacttaaacccaggcagagaaactggggcctaacttttatgaccttggtgttaggaaaacaaagcttactaataatattaaggaatagaagtaattttatgtccagggcctgttgaccagtataatgttttctctgatgcagttgactctctgaacctgaacatattctatataacttttacagctccctttcccaagggagataatcataacaatagtctctaggaaattcccttacatgggctgatatgtgctgtccttttttcctcatgtcccaa

SEQ ID NO: 194086 - DNA, 580 bp, Homo sapiens
tgtccaggtattatcctttggggatagaaatggttcgtaatgtttttatagttcatcctagaccatggctcagccttgccacccaacttccctgtccagggagatcagaagcaataggtggctatcaaggcatcatttgaatagggtggatatcaaatacagcatccccatctgtacaggactcagcctttgatagttcttgatctacctgccagcaaccattccttcctcccacttgcctttacctccacaggatcagtaagagcaagaaaagttcttctccttcttgatttatttcctcctacttaaacccaggcagagaaactggggcctaacttttatgaccttggtgttagkaaaacaaagcttactaataatattaaggaatagaagtaattttatgtccagggcctgttgaccagtataatgttttctctgatgcagttgactctctgaacctgaacatattctatataacttttacagctccctttcccaagggagataatcataacaatagtctctaggaaattcccttacatgggctgatatgtgctgtccttttttcctcatgtcccaa

SEQ ID NO: 194087 - DNA, 553 bp, Homo sapiens
gtggccacaatacctcttttatatcaagcctacctcaagcaattcaaaggcaaatggctttctattgtctcttatgattagaaaaatggaataaaaggtctaacattgagcacttcagttagatatactgcacactcttcaatgcaccaagttcctttttgacaccatgctatttattgcttctgttattgccctgactttaggggatatccactccccaacctgctgtactattcaattctgatccttcttttttgatcaaatttgaccttttccaaaaagtttttgctcccaaccttcaggcaatcatgataatgacaatatctttctttcatagcctttactattagtaccatgccctttggatcttcaactgagtaacagcatatactgtcttgtattggtcttgaatcttgcaggtttctaacacttgaatatacaacratacagtaagccctttaaggataaaggtcaatttatatttgttcagttaatatttgctcagtactggctctgtactatatcataattgcagtgaaaacaaatatgtaca

SEQ ID NO: 194088 - DNA, 592 bp, Homo sapiens
atattttcagatttgttaaattaatatgattaataacaaagatataccaactaaaatacataaaaagctacttaaagcaaggtattacaagacacagcaatacacttcagttcatctgggaaatctagaattaagtgtcaaagawaatcaattaaattttaatttgaaaatactcatttcaggtgtaaacatttccatttatacttacattatggtcttaacatgtggcaacataaagtcattaaaattattatttcagcagtacagaactatctaccttaaaatatgactctgtgcctaataaaatttcataggtgacacaatgtcttttctcaaagtaaatcatctctcacctctaccttttatttcctagaaatggggcacgtttctaagctggtatagtaaacacggttttcctttttttttattaaaacagctttgttgaaatataatttacatactatagaatgtatctgttttaacttaaagttaaaagaatttttagtccatttactgagttgtgcagccatctctacaatcaaactttacagcatttccatcactgcaagatccctgacgcccattagcagtc

SEQ ID NO: 194089 - DNA, 592 bp, Homo sapiens
atattttcagatttgttaaattaatatgattaataacaaagatataccaactaaaatacataaaaagctacttaaagcaaggtattacaagacacagcaatacacttcagttcatctgggaaatctagaattaagtgtcaaagataatcaattaaattttaatttgaaaatactcatttcaggtgtaaacatttccatttatacttacattatggtcttaacatgtggcaacataaagtcattaaaattattatttcascagtacagaactatctaccttaaaatatgactctgtgcctaataaaatttcataggtgacacaatgtcttttctcaaagtaaatcatctctcacctctaccttttatttcctagaaatggggcacgtttctaagctggtatagtaaacacggttttcctttttttttattaaaacagctttgttgaaatataatttacatactatagaatgtatctgttttaacttaaagttaaaagaatttttagtccatttactgagttgtgcagccatctctacaatcaaactttacagcatttccatcactgcaagatccctgacgcccattagcagtc

SEQ ID NO: 194090 - DNA, 565 bp, Homo sapiens
ttatgatcctctttctgatgaacatcatctagttgctgttcaatgcacggattttcatgttggagttgacatatcctctcttctacacagctccactttccagtggaattattcactttagcttctgcattttcatacatctctttcatttcctttrtttgctgctgtgtttggcttaggtcgtttggagagtttctaaagccaatgacttttttctgagagtatctctgttcttacggaacttatcttttaaggtattgaatttaatttgctttttagaaagttgttcagtaagaaactcattcttctacttcggaaatatcagaactcatttttacttgtacggaaacatcttgtgttcactctaatgcaagttttaggtttctttctgttttcacactttcactgtgcttacttatagcagcagtcagtctagactgatgattcaatttcagcttccagtcttttgttgctttcttcttccttcaacagttcggaattgagccttgtattctcagctttgagatcattaagctcttgttgataccggaatgctgttcttgtt

SEQ ID NO: 194091 - DNA, 565 bp, Homo sapiens
ttatgatcctctttctgatgaacatcatctagttgctgttcaatgcacggattttcatgttggagttgacatatcctctcttctacacagctccactttccagtggaattattcactttagcttctgcattttcatacatctctttcatttcctttatttgctgctgtgtttggcttaggtcgtttggagagtttctaaagccaatgacttttttctgagagtatctctkttcttacggaacttatcttttaaggtattgaatttaatttgctttttagaaagttgttcagtaagaaactcattcttctacttcggaaatatcagaactcatttttacttgtacggaaacatcttgtgttcactctaatgcaagttttaggtttctttctgttttcacactttcactgtgcttacttatagcagcagtcagtctagactgatgattcaatttcagcttccagtcttttgttgctttcttcttccttcaacagttcggaattgagccttgtattctcagctttgagatcattaagctcttgttgataccggaatgctgttcttgtt

SEQ ID NO: 194092 - DNA, 565 bp, Homo sapiens
ttatgatcctctttctgatgaacatcatctagttgctgttcaatgcacggattttcatgttggagttgacatatcctctcttctacacagctccactttccagtggaattattcactttagcttctgcattttcatacatctctttcatttcctttatttgctgctgtgtttggcttaggtcgtttggagagtttctaaagccaatgacttttttctgagagtatctctgttcttacggaacttatcttttaaggtattgaatttaatttgctttttagaaagttgytcagtaagaaactcattcttctacttcggaaatatcagaactcatttttacttgtacggaaacatcttgtgttcactctaatgcaagttttaggtttctttctgttttcacactttcactgtgcttacttatagcagcagtcagtctagactgatgattcaatttcagcttccagtcttttgttgctttcttcttccttcaacagttcggaattgagccttgtattctcagctttgagatcattaagctcttgttgataccggaatgctgttcttgtt

SEQ ID NO: 194093 - DNA, 565 bp, Homo sapiens
ttatgatcctctttctgatgaacatcatctagttgctgttcaatgcacggattttcatgttggagttgacatatcctctcttctacacagctccactttccagtggaattattcactttagcttctgcattttcatacatctctttcatttcctttatttgctgctgtgtttggcttaggtcgtttggagagtttctaaagccaatgacttttttctgagagtatctctgttcttacggaacttatcttttaaggtattgaatttaatttgctttttagaaagttgttcagtaagaaactcattcttctacttcggaaatatcagaactcatttttacttgtacggaaacatcttgtgttcactctaatgcaagttttaggtttctttctgttttcacactttcactgtrcttacttatagcagcagtcagtctagactgatgattcaatttcagcttccagtcttttgttgctttcttcttccttcaacagttcggaattgagccttgtattctcagctttgagatcattaagctcttgttgataccggaatgctgttcttgtt

SEQ ID NO: 194094 - DNA, 613 bp, Homo sapiens
gtaagaaccttagttcacacatatttggacagataaaatttcccagagttattacagttctgtttcactgataacattctattttaatttgactcttttaacacttttatagtcagttgaaagaattacatttactaaatcataaatctagacattatactagtcactcctatatacattcattgatgaacycatctagttaccacaaatttgaaaaagaaatgttaaaaatataagcaagctacaggattttccccaggacttcttactctacttctagttctctgagagatcacagttacttctgtggtgtaaatgtatcaatacgaaagaaaagttttatttcaaaacaccaatggtaaataagataaaatttatagagctcttcttagaatatcatgagattatttgtgattgcaataatttgtttcctctttatagtattaggtacagtaatcaatatgaaatggcaggaagtacaaggaacaattttactgggaacaaaatctttatcaataggttatcactaagtatatattatggcatattattgttttcaaaagctctttgtaataaaataatatcctatgtggatgccaagatttataataaa

SEQ ID NO: 194095 - DNA, 613 bp, Homo sapiens
gtaagaaccttagttcacacatatttggacagataaaatttcccagagttattacagttctgtttcactgataacattctattttaatttgactcttttaacacttttatagtcagttgaaagaattacatttactaaatcataaatctagacattatactagtcactcctatatacattcattgatgaacccatctagttaccacaaatttgaaaaagaaatgttaaaaatataagcaagctacaggattttccccaggacttcttactctacttctagttctctgasagatcacagttacttctgtggtgtaaatgtatcaatacgaaagaaaagttttatttcaaaacaccaatggtaaataagataaaatttatagagctcttcttagaatatcatgagattatttgtgattgcaataatttgtttcctctttatagtattaggtacagtaatcaatatgaaatggcaggaagtacaaggaacaattttactgggaacaaaatctttatcaataggttatcactaagtatatattatggcatattattgttttcaaaagctctttgtaataaaataatatcctatgtggatgccaagatttataataaa

SEQ ID NO: 194096 - DNA, 613 bp, Homo sapiens
gtaagaaccttagttcacacatatttggacagataaaatttcccagagttattacagttctgtttcactgataacattctattttaatttgactcttttaacacttttatagtcagttgaaagaattacatttactaaatcataaatctagacattatactagtcactcctatatacattcattgatgaacccatctagttaccacaaatttgaaaaagaaatgttaaaaatataagcaagctacaggattttccccaggacttcttactctacttctagttctctgagagatcacagttacttctgtggtgtaaatgtatcaatacgaaagaaaasttttatttcaaaacaccaatggtaaataagataaaatttatagagctcttcttagaatatcatgagattatttgtgattgcaataatttgtttcctctttatagtattaggtacagtaatcaatatgaaatggcaggaagtacaaggaacaattttactgggaacaaaatctttatcaataggttatcactaagtatatattatggcatattattgttttcaaaagctctttgtaataaaataatatcctatgtggatgccaagatttataataaa

SEQ ID NO: 194097 - DNA, 550 bp, Homo sapiens
tcaacttcttaaagaaaagaaatttcacgtagtatggcagagacagatataccatataataacatggtgttattatacatggttaaaagaaaaagaaatttcaacccagaatttcatgtccagcaaaattaagcatcataagtgaaggagaaacaagatccttttcagacaagcaaatgctgagagaattcattatcaccagatctaccttacaagagctcctgaatgaagcactaaatatggaaagaaaagaccatcaccagccactacaaaaatgcaccgaagtacacaraccagtaatgctaaaaaccaaccacatacacaagtctgcaaaataactagctgacagcatgacgacaggatctaatccacacataccattactaaccttaaatggaaatgggctaaatgctccgattgaaagacacaggggggcaagctggataaagaacaaagacccatttgagtatgctgtctccaagaaacccatctcacatgcagtgccatacataggctcaaaatgaaggaatggtgaaaaatctttcaagca

SEQ ID NO: 194098 - DNA, 623 bp, Homo sapiens
ataggcttacttacctatcatgctyttccttcagtttcttgggaaattgctgaggatacgttttcccaatctttctttctttggttaatctgtcagcagcagcagaagatgtactatgacatacattttctgatagttgtattttttcacttttgtttgtattatttccttctttgacctttaataaaagtaatatgaataataattattattttattcaataaaaaaactttttccctgattttttaacttgattcaggttaactatcaccattttaatgataaaagtattttgtgcttactttaattttatcattatacataataattataagatactcatcattttatcattgaaatttttgtcaagtctgctcatttctgtttgagtgaatggaagaattttccaaaatttcaaaaaggactcttctccattttgtgcttttattcgcatccactctttgctatctgatataaatgtttatgctagttgactggcagaaacagagaaataaaaagacacaggcataacatatatcttctgtcattgccacatggattttacatgaaatagccagattaagaggatgtaaccttgtaggccttcaagaacagtaaagaag

SEQ ID NO: 194099 - DNA, 412 bp, Homo sapiens
agtgtacagaactcaactttctactaaagagtcaaaggttaaatttttarctaagaaattatgcttcttacatgataaaaatcatacatgccaaaacttaccatactttattaaacaacataatgtaaggtctgattcaacagaaatattggagtggtgatttttttaaatatgtggaagtatatatttgttttcaaaatattggaaataaccatgatggaactataaattcaaacagtttgagctaagcagataaacttgcatgcatgaaaacacattaaacagactcatttgtctgggaatattcattgcaactctcaaggctagaagtgtttttgtggctcatctcagtcattgcttccctcccattgtattcccattctatcattaaataaatgtaattcatctctaa

SEQ ID NO: 194100 - DNA, 414 bp, Homo sapiens
cacagtgtacagaactcaactttctactaaagagtcaaaggttaaatttttagctaagaaattatgcttcttacatgataaaaatcatacatgccaaaacttaccatactttattaaacaacataatgtaaggtctgattcaacagaaatattggagtggtgattttttwaaatatgtggaagtatatatttgttttcaaaatattggaaataaccatgatggaactataaattcaaacagtttgagctaagcagataaacttgcatgcatgaaaacacattaaacagactcatttgtctgggaatattcattgcaactctcaaggctagaagtgtttttgtggctcatctcagtcattgcttccctcccattgtattcccattctatcattaaataaatgtaattcatctcta

SEQ ID NO: 194101 - DNA, 430 bp, Homo sapiens
ttgtctatctttagaacacagtgtacagaactcaactttctactaaagagtcaaaggttaaatttttagctaagaaattatgcttcttacatgataaaaatcatacatgccaaaacttaccatactttattaaacaacataatgtaaggtctgattcaacagaaatattggagtggtgatttttttaaatatgtggaagtatatatttgtttwcaaaatattggaaataaccatgatggaactataaattcaaacagtttgagctaagcagataaacttgcatgcatgaaaacacattaaacagactcatttgtctgggaatattcattgcaactctcaaggctagaagtgtttttgtggctcatctcagtcattgcttccctcccattgtattcccattctatcattaaataaatgtaattcatctcta

SEQ ID NO: 194102 - DNA, 239 bp, Homo sapiens
tttctactaaagagtcaaaggttaaatttttagctaagaaattatgcttcttacatgataaaaatcatacatgccaaaacttaccatactttattaaacaacataatgtaaggtctgattcaacagaaatattggagtggtgatttttttaaatatgtggaagtatatatttgttttcaaaatattggaaataaccatgatgkaactataaattcaaacagtttgagctaagcagataa

SEQ ID NO: 194103 - DNA, 412 bp, Homo sapiens
agtgtacagaactcaactttctactaaagagtcaaaggttaaatttttagctaagaaattatgcttcttacatgataaaaatcatacatgccaaaacttaccatactttattaaacaacataatgtaaggtctgattcaacagaaatattggagtggtgatttttttaaatatgtggaagtatatatttgttttcaaaatattggaaataaccatgatggaactataaattcaaacagtttgagctaagcagataaacttgcatgcatgaaaacacattaaacagactcatttgkctgggaatattcattgcaactctcaaggctagaagtgtttttgtggctcatctcagtcattgcttccctcccattgtattcccattctatcattaaataaatgtaattcatctctaa

SEQ ID NO: 194104 - DNA, 400 bp, Homo sapiens
ctcaactttctactaaagagtcaaaggttaaatttttagctaagaaattatgcttcttacatgataaaaatcatacatgccaaaacttaccatactttattaaacaacataatgtaaggtctgattcaacagaaatattggagtggtgatttttttaaatatgtggaagtatatatttgttttcaaaatattggaaataaccatgatggaactataaattcaaacagtttgagctaagcagataaacttgcatgcatgaaaacacattaaacagactcatttgtytgggaatattcattgcaactctcaaggctagaagtgtttttgtggctcatctcagtcattgcttccctcccattgtattcccattctatcattaaataaatgtaattcatctcta

SEQ ID NO: 194105 - DNA, 424 bp, Homo sapiens
aacacagtgtacagaactcaactttctactaaagagtcaaaggttaaatttttagctaagaaattatgcttcttacatgataaaaatcatacatgccaaaacttaccatactttattaaacaacataatgtaaggtctgattcaacagaaatattggagtggtgatttttttaaatatgtggaagtatatatttgttttcaaaatattggaaataaccatgatggaactataaattcaaacagtttgagctaagcagataaacttgcatgcatgaaaacacattaaacagactcatttgtctgggaatattcattgcaactctcaaggctagaagtgtttttgtgrctcatctcagtcattgcttccctcccattgtattcccattctatcattaaataaatgtaattcatctctaaatgacta

SEQ ID NO: 194106 - DNA, 404 bp, Homo sapiens
aacacagtgtacagaactcaactttctactaaagagtcaaaggttaaatttttagctaagaaattatgcttcttacatgataaaaatcatacatgccaaaacttaccatactttattaaacaacataatgtaaggtctgattcaacagaaatattggagtggtgatttttttaaatatgtggaagtatatatttgttttcaaaatattggaaataaccatgatggaactataaattcaaacagtttgagctaagcagataaacttgcatgcatgaaaacacattaaacagactcatttgtctgggaatattcattgcaactctcaaggctagaagtgtttttgtggctcatctcagtcattgcttccctcccrttgtattcccattctatcattaaataaatgt

SEQ ID NO: 194107 - DNA, 504 bp, Homo sapiens
tggtatttgggtttatacatttttccatttgcatgtcaaactcttaatcatctttcatttcaatcataattactgggttcyttactttttcagtttctatatcataacaaaaattttcatcatctgtgttagaaacaagctgtgtgtctggtttgttatcatttttatagtctgatttattttaatttaaatgaagcttagaagatgactggtaagtgtatttcagggacctggagtgtgaatggaataaaaagacatttgacatgggcttcctctgttcaggcgctgcctggactgccacagagctagaccctccagatacatttttctcctcacaatcagggacatgattcatcacactagagggcactccttttttgttcatccctctttagagttaccatgtaggagctcttcctcagggcaagcagtaattttggagttttcagaacttttaccaatattcagcttgaacttgtttgtaatgaattttaaagaaagtca

SEQ ID NO: 194108 - DNA, 504 bp, Homo sapiens
tggtatttgggtttatacatttttccatttgcatgtcaaactcttaatcatctttcatttcaatcataattactgggttctttactttttcagtttctatatcataacaaaaatttycatcatctgtgttagaaacaagctgtgtgtctggtttgttatcatttttatagtctgatttattttaatttaaatgaagcttagaagatgactggtaagtgtatttcagggacctggagtgtgaatggaataaaaagacatttgacatgggcttcctctgttcaggcgctgcctggactgccacagagctagaccctccagatacatttttctcctcacaatcagggacatgattcatcacactagagggcactccttttttgttcatccctctttagagttaccatgtaggagctcttcctcagggcaagcagtaattttggagttttcagaacttttaccaatattcagcttgaacttgtttgtaatgaattttaaagaaagtca

SEQ ID NO: 194109 - DNA, 504 bp, Homo sapiens
tggtatttgggtttatacatttttccatttgcatgtcaaactcttaatcatctttcatttcaatcataattactgggttctttactttttcagtttctatatcataacaaaaattttcatcatctgtgttagaaacaagctgtgtgtctggtttgttatcatttttatagtctgatttattttaawttaaatgaagcttagaagatgactggtaagtgtatttcagggacctggagtgtgaatggaataaaaagacatttgacatgggcttcctctgttcaggcgctgcctggactgccacagagctagaccctccagatacatttttctcctcacaatcagggacatgattcatcacactagagggcactccttttttgttcatccctctttagagttaccatgtaggagctcttcctcagggcaagcagtaattttggagttttcagaacttttaccaatattcagcttgaacttgtttgtaatgaattttaaagaaagtca

SEQ ID NO: 194110 - DNA, 361 bp, Homo sapiens
tgagatttaaattcacaaacttataagcaataaaatcaaagtaattttattataagttttttgacaccagattatatgtggtaaataatttactttctaatcaagcaattgacacatataaacctgaaatagagttttgccttttaattaactmattgttaagcaaagaatggttgaagcagcagttgagaattatctttttctctttttgctgttcttacaaggagagtttctagaattgttttcaaaacaatagaacagaaaatttcacttactcatttaatttaacttttgttaaagtactttgccaaaattagcaaactacgaaaggaaagtttaccttttcaatatatatgtaagt

SEQ ID NO: 194111 - DNA, 577 bp, Homo sapiens
tagcttcttatacgatatgttcagaaagaagaggtgtgttgcacaccaagggacatttccctggtcttagctcctaagtttctctgagaagaagcagttactactacagcagtkaaacacctgactcccaaattataaaagcctaagttatgattttaaatcattaattgtcacctgtgaatcataaagtctgaactctttaaattgcaaacacacatataaaagggattcttatacaaggatccatgagtggaactgcaaagttttgtcaaaatctgtatatatgttttctttttaagggtcatagatttcaatatatgttaaaagatatctgtagctagtaaagattaataaccattttcagttttgtgctgaaattggcaaatcatggcttttctccctccaacacaccccctcccgccccagcacacccctggttaatctttattttcaggagagaaaaagatgtttcatattaataaaggtagattatccacttgtttgttttatacttttccacctcttaagcttaatcgtgttttaataatatataattgaatacattaatatttagatg

SEQ ID NO: 194112 - DNA, 577 bp, Homo sapiens
tagcttcttatacgatatgttcagaaagaagaggtgtgttgcacaccaagggacatttccctggtcttagctcctaagtttctctgagaagaagcagttactactacagcagttaaacacctgactcccaaattataaaagcctaagttatgattttaaatcattaattgtcacctgtgaatcataaagtctgaactctttaaattgcaaacacacatataaaagggattcttatacaaggatccatgagtggaactgcaaagttttgtcaaaatctgtatatatgttttctttttaagggtcatagatttcaatatatgttaaaagatatctgtagctagtaaagattaataaccattttcagttttgtgctgaaattggcaaatcatggcttttctccctccaacacaccccctcccgccccagcacacccctggttaatctttattttcaggagagaaaaaratgtttcatattaataaaggtagattatccacttgtttgttttatacttttccacctcttaagcttaatcgtgttttaataatatataattgaatacattaatatttagatg

SEQ ID NO: 194113 - DNA, 500 bp, Homo sapiens
atgggtagcagggacatatgtctagtgacagatttcctatgcatatctgaccaaaaatccccctcatgattttcaaatcagatgcwtaactacatttaatgagtttcccgaatcattaatatcaggctctgaaaacaggatcattaaaaatgattaagactttcaacaacaaatatcttatctaaatagtaaggaaattatattagatggctccattccctgggcagtctagttaacaattcgacttgttcaaagctataaaatatggcaacttaaaaaattatgaaagtttttctaactttgtgcttaaggtagttggccattcttcctcttgggaataagaagggtagattttctgtcgaagcatttttctattgcttttcaatttccttttatggaaaatagataaaatagcaattttttaattataaatttaaagtcaaaatggagataattaagtatctccattaattaagtaaagattaattttttttaaaata

SEQ ID NO: 194114 - DNA, 573 bp, Homo sapiens
aattttgttttaacaaactactattaaaaaaattataggttatatatttctgaacacattggcagatgtaaatgacagttatattcacacaatcagtttttcttgcacrgaaatgacattttgtcaaaaagttaaaatctttgaaatgtattttctgtcctcatctttccccttttgagcatttttctccccctgggttggttataaaatgttccctaacttcaggcatctgattaaattttgggttttctcccttcctaccaattcatatggattggtaatgatctgatagaagacaattgccgaaaatcaatcaaatatattttaaattaaacttctccaagataatattcatattaatccttctttaattgctgaatgaggaataaatgttcactgacccttaaaatcctaaaacttaatcagctcactggagtggatgaatggatatttgtccagatgagaatgcttaaggtctacttcaaggagttcataatagtaaaaatgtccttttcttccatcagaagcttcatcctggatcttttcatccttatttttctactagctctcctt

SEQ ID NO: 194115 - DNA, 433 bp, Homo sapiens
ctgtcctcatctttccccttttgagcatttttctccccctgggttggttataaaatgttccctaacttcaggcatctgattaaattttgggttttctcccttcctaccaattcatatggattggtaatgatctgatagaagacaattgccraaaatcaatcaaatatattttaaattaaacttctccaagataatattcatattaatccttctttaattgctgaatgaggaataaatgttcactgacccttaaaatcctaaaacttaatcagctcactggagtggatgaatggatatttgtccagatgagaatgcttaaggtctacttcaaggagttcataatagtaaaaatgtccttttcttccatcagaagcttcatcctggatcttttcatccttatttttctactagctctccttctccaaatacactg

SEQ ID NO: 194116 - DNA, 433 bp, Homo sapiens
ctgtcctcatctttccccttttgagcatttttctccccctgggttggttataaaatgttccctaacttcaggcatctgattaaattttgggttttctcccttcctaccaattcatatggattggtaatgatctgatagaagacaattgccgaaaatcaatcaaatatrttttaaattaaacttctccaagataatattcatattaatccttctttaattgctgaatgaggaataaatgttcactgacccttaaaatcctaaaacttaatcagctcactggagtggatgaatggatatttgtccagatgagaatgcttaaggtctacttcaaggagttcataatagtaaaaatgtccttttcttccatcagaagcttcatcctggatcttttcatccttatttttctactagctctccttctccaaatacactg

SEQ ID NO: 194117 - DNA, 433 bp, Homo sapiens
ctgtcctcatctttccccttttgagcatttttctccccctgggttggttataaaatgttccctaacttcaggcatctgattaaattttgggttttctcccttcctaccaattcatatggattggtaatgatctgatagaagacaattgccgaaaatcaatcaaatatattttaaattaaacttctccaagataatattcatattaatccttctttaattgctgaatgaggaataawtgttcactgacccttaaaatcctaaaacttaatcagctcactggagtggatgaatggatatttgtccagatgagaatgcttaaggtctacttcaaggagttcataatagtaaaaatgtccttttcttccatcagaagcttcatcctggatcttttcatccttatttttctactagctctccttctccaaatacactg

SEQ ID NO: 194118 - DNA, 259 bp, Homo sapiens
tccttatttttctactagctctccttctccaaatacactgacttggaaccccagtttcagtggtggactgcgtggatttgattctwagctatgctataatgagaaagtagctctaaccctattctcattttcttcacctgtaatatagaaatcatcatcagacaatatacagataggggccatttatttcacagataataataggtgaaaatggagagtatgtgggtgtagacgggaaagtgagtttaaatggtttcag

SEQ ID NO: 194119 - DNA, 541 bp, Homo sapiens
gttcataatagtaaaaatgtccttttcttccatcagaagcttcatcctggatcttttcatccttatttttctactagctctccttctccaaatacactgacttggaaccccagtttcagtggtggactgcgtggatttgattcttagctatgctataatgagaaagtagctctaaccctattctyattttcttcacctgtaatatagaaatcatcatcagacaatatacagataggggccatttatttcacagataataataggtgaaaatggagagtatgtgggtgtagacgggaaagtgagtttaaatggtttcaggagtctgtggaagttgtctttggatgattcagtgttctcagggaagcacaaccaaaaagacattgaggatttctgggcaagtgttagggattagagacaggataagatacaaaactaggtaaattagagaatgaatagattggaacatatgtagtatgattgattgataggcagcactgagattctcattttcaagtgggatatttttcaatttgatccatat

SEQ ID NO: 194120 - DNA, 541 bp, Homo sapiens
gttcataatagtaaaaatgtccttttcttccatcagaagcttcatcctggatcttttcatccttatttttctactagctctccttctccaaatacactgacttggaaccccagtttcagtggtggactgcgtggatttgattcttagctatgctataatgagaaagtagctctaaccctattctcattttcttcacctgtaatatagaaatmatcatcagacaatatacagataggggccatttatttcacagataataataggtgaaaatggagagtatgtgggtgtagacgggaaagtgagtttaaatggtttcaggagtctgtggaagttgtctttggatgattcagtgttctcagggaagcacaaccaaaaagacattgaggatttctgggcaagtgttagggattagagacaggataagatacaaaactaggtaaattagagaatgaatagattggaacatatgtagtatgattgattgataggcagcactgagattctcattttcaagtgggatatttttcaatttgatccatat

SEQ ID NO: 194121 - DNA, 259 bp, Homo sapiens
tccttatttttctactagctctccttctccaaatacactgacttggaaccccagtttcagtggtggactgcgtggatttgattcttagctatgctataatgagaaagtagctctaaccctattctcattttcttcacctgtaatatagaaatcatcatcagacartatacagataggggccatttatttcacagataataataggtgaaaatggagagtatgtgggtgtagacgggaaagtgagtttaaatggtttcag

SEQ ID NO: 194122 - DNA, 259 bp, Homo sapiens
tccttatttttctactagctctccttctccaaatacactgacttggaaccccagtttcagtggtggactgcgtggatttgattcttagctatgctataatgagaaagtagctctaaccctattctcattttcttcacctgtaatatagaaatcatcatcagacaatatacagataggggccakttatttcacagataataataggtgaaaatggagagtatgtgggtgtagacgggaaagtgagtttaaatggtttcag

SEQ ID NO: 194123 - DNA, 500 bp, Homo sapiens
atgggtagcagggacatatgtctagtgacagatttcctatgcatatctgaccaaaaatccccctcatgattttcaaatcagatgcttaactacatttaatgagtttcccgaatcattaatatcaggctctgaaaacaggatcattaaaaatgattaagactttcaacaacaaatatcttatctaaatagtaaggaaattatattagatggctccattccctgggcagtctagttaacaattcgacttgttcaaagctrtaaaatatggcaacttaaaaaattatgaaagtttttctaactttgtgcttaaggtagttggccattcttcctcttgggaataagaagggtagattttctgtcgaagcatttttctattgcttttcaatttccttttatggaaaatagataaaatagcaattttttaattataaatttaaagtcaaaatggagataattaagtatctccattaattaagtaaagattaattttttttaaaata

SEQ ID NO: 194124 - DNA, 541 bp, Homo sapiens
gttcataatagtaaaaatgtccttttcttccatcagaagcttcatcctggatcttttcatccttatttttctactagctctccttctccaaatacactgacttggaaccccagtttcagtggtggactgcgtggatttgattcttagctatgctataatgagaaagtagctctaaccctattctcattttcttcacctgtaatatagaaatcatcatcagacaatatacagataggggccatttatttcacagataataataggtgaaaatggagagtatgtgggtgtagacgggaaagtgagtttaaatggtttcaggagtctgtggaagttgtctttggatgattcartgttctcagggaagcacaaccaaaaagacattgaggatttctgggcaagtgttagggattagagacaggataagatacaaaactaggtaaattagagaatgaatagattggaacatatgtagtatgattgattgataggcagcactgagattctcattttcaagtgggatatttttcaatttgatccatat

SEQ ID NO: 194125 - DNA, 500 bp, Homo sapiens
atgggtagcagggacatatgtctagtgacagatttcctatgcatatctgaccaaaaatccccctcatgattttcaaatcagatgcttaactacatttaatgagtttcccgaatcattaatatcaggctctgaaaacaggatcattaaaaatgattaagactttcaacaacaaatatcttatctaaatagtaaggaaattatattagatggctccattccctgggcagtctagttaacaattcgacttgttcaaagctataaaatatggcaacttaaaaaattatgaaagtttttctaactttgtgcttaaggtagttggccattcttcctcttgggaataagaagggtagattttctgtcgaagyatttttctattgcttttcaatttccttttatggaaaatagataaaatagcaattttttaattataaatttaaagtcaaaatggagataattaagtatctccattaattaagtaaagattaattttttttaaaata

SEQ ID NO: 194126 - DNA, 500 bp, Homo sapiens
atgggtagcagggacatatgtctagtgacagatttcctatgcatatctgaccaaaaatccccctcatgattttcaaatcagatgcttaactacatttaatgagtttcccgaatcattaatatcaggctctgaaaacaggatcattaaaaatgattaagactttcaacaacaaatatcttatctaaatagtaaggaaattatattagatggctccattccctgggcagtctagttaacaattcgacttgttcaaagctataaaatatggcaacttaaaaaattatgaaagtttttctaactttgtgcttaaggtagttggccattcttcctcttgggaataagaagggtagattttctgtcgaagcatttttctattgcttttcaatttccttttatggaaaatagataaaatagcaatttttwaattataaatttaaagtcaaaatggagataattaagtatctccattaattaagtaaagattaattttttttaaaata

SEQ ID NO: 194127 - DNA, 549 bp, Homo sapiens
aggctgcacagcctcattaacactagatattctggacattttatatagtatttcatctgatataaaaagtagaattctaatttgattatggttgttaatttatttttaactttttagtmattatgaaaatgtttaactatatgaaaagccaggaaagggttttttttaaggtagtacttcagaaatatttatgatacttaatttttaaaaattaactctaaaagaatcttgaaatgtctgtttaataaaataggacacaaatactggtcacattagtgaaaaatatttgtttaaaattaaaatatctgcagcaatcatgtagatattaataattttttaaagaatgacatcttcaaaatataactgttctaaactaatatgtctccattaatacatatagatacatataaataaataaatttgaagacttcaaattccaggtacaatataatttttttctatcctgtgatttgtcattcaggattttgtaatttgaacagaaatattttgccctaaccccatgtctgtcttttctcttacctaaaaata

SEQ ID NO: 194128 - DNA, 549 bp, Homo sapiens
aggctgcacagcctcattaacactagatattctggacattttatatagtatttcatctgatataaaaagtagaattctaatttgattatggttgttaatttatttttaactttttagtcattatgaaaatgtttaactatatgaaaagccaggaaagggttttttttaaggtagtacttcagaaatatttatgatacttaatttttaawaattaactctaaaagaatcttgaaatgtctgtttaataaaataggacacaaatactggtcacattagtgaaaaatatttgtttaaaattaaaatatctgcagcaatcatgtagatattaataattttttaaagaatgacatcttcaaaatataactgttctaaactaatatgtctccattaatacatatagatacatataaataaataaatttgaagacttcaaattccaggtacaatataatttttttctatcctgtgatttgtcattcaggattttgtaatttgaacagaaatattttgccctaaccccatgtctgtcttttctcttacctaaaaata

SEQ ID NO: 194129 - DNA, 549 bp, Homo sapiens
aggctgcacagcctcattaacactagatattctggacattttatatagtatttcatctgatataaaaagtagaattctaatttgattatggttgttaatttatttttaactttttagtcattatgaaaatgtttaactatatgaaaagccaggaaagggttttttttaaggtagtacttcagaaatatttatgatacttaatttttaaaaattaactctaaaagaatcttgaaatgtctgtttaataaaataggacacaaatactggtcacattagtgaaaaatrtttgtttaaaattaaaatatctgcagcaatcatgtagatattaataattttttaaagaatgacatcttcaaaatataactgttctaaactaatatgtctccattaatacatatagatacatataaataaataaatttgaagacttcaaattccaggtacaatataatttttttctatcctgtgatttgtcattcaggattttgtaatttgaacagaaatattttgccctaaccccatgtctgtcttttctcttacctaaaaata

SEQ ID NO: 194130 - DNA, 395 bp, Homo sapiens
cctaactcacggccaatttgggacatgggctcactggaaaagagtgtcragatcaattagaaatatccatcatgaacatacgaggcaggcattctggccaaaggggtgcgtcttcccactttgtaatccagagtgcgatttcttcttgctatctgtccctccataaataagcgttgggtgaaggacaagctagttaccattgaggatggaatgaaattctaccagaattgcaaaatgaactgagagccacgaaagttttcctctgtgaaccagcagagagatctgtggaaggcaaaggaagaggagccaagaggccagataacattcctgcttcccctacattgtgagagtgaaattgtcagcaacctatatcagtaattaaccagaggcttttt

SEQ ID NO: 194131 - DNA, 395 bp, Homo sapiens
cctaactcacggccaatttgggacatgggctcactggaaaagagtgtcaagatcaattagaaatatccatcatgaacatacgaggcaggcattckggccaaaggggtgcgtcttcccactttgtaatccagagtgcgatttcttcttgctatctgtccctccataaataagcgttgggtgaaggacaagctagttaccattgaggatggaatgaaattctaccagaattgcaaaatgaactgagagccacgaaagttttcctctgtgaaccagcagagagatctgtggaaggcaaaggaagaggagccaagaggccagataacattcctgcttcccctacattgtgagagtgaaattgtcagcaacctatatcagtaattaaccagaggcttttt

SEQ ID NO: 194132 - DNA, 417 bp, Homo sapiens
gatgttgaattgaaagtttaattttttaggcttgatagtcagattagggaagttttgggtacacctttcccactctagagccctctccctaactcacggccaatttgggacatgggctcactggaaaagagtgtcaagatcaattagaaatatccatcatgaacatacgaggcaggcattctggccaaaggggtgcgtcttcccactttgtaatccagagtgcgatttcttcttgctatctgtccctccataaataagckttgggtgaaggacaagctagttaccattgaggatggaatgaaattctaccagaattgcaaaatgaactgagagccacgaaagttttcctctgtgaaccagcagagagatctgtggaaggcaaaggaagaggagccaagaggccagataacattcctg

SEQ ID NO: 194133 - DNA, 395 bp, Homo sapiens
cctaactcacggccaatttgggacatgggctcactggaaaagagtgtcaagatcaattagaaatatccatcatgaacatacgaggcaggcattctggccaaaggggtgcgtcttcccactttgtaatccagagtgcgatttcttcttgctatctgtccctccataaataagcgttgggtgaaggacaagctagttaccattgaggatggaatgaaattctaccagaattgcaaaatgaactgagagccacgaaagtkttcctctgtgaaccagcagagagatctgtggaaggcaaaggaagaggagccaagaggccagataacattcctgcttcccctacattgtgagagtgaaattgtcagcaacctatatcagtaattaaccagaggcttttt

SEQ ID NO: 194134 - DNA, 462 bp, Homo sapiens
ccaactaacgcattccttaaatttagtgtacgtataaattctacatggtaagtgaagctgtctttatgaattgctgctatagaatatactagattgtgtaggttttagtacaatccaggtaattatcaagcctttgtaatattttcaggaaagtgatcctttcactttagtttatggaacttgaaaattttttagttgccaccgactagttagatcataaacttaattctatgtakctgaatttatttttctatttataaatttatctgggtgctttctcaaaagtttctcagattaaaaacctatggctttgtaaaattaaaacagaagtaataggaattgtgttaaaaaacagaatcaggccaagcctggtggcttatgcctctaatgccaacacttagggaggccaaggcgggaggatcatttgaggtcaggagttcaagaccagcctggacaacatgg

SEQ ID NO: 194135 - DNA, 611 bp, Homo sapiens
  misc_feature (1)...(611): n = A,T,C or G
nnnnnnnnnnnnnnnnnnnnntaattatgatctttacttcacatgcaaaagtcaacagaacaactcagtatttcaccaaattataaacaagaattacgctagagaaatgaaaccctaaagagaaacggtcatataactaacctcagtcaagtagttctggcagttatttgaagtctgaggtttgaagtaggaattcttacgggcatttggggaatatattttctgttgagtcctatactagtaagattttcaacacaaggtgactctcgacctcrccttgtaggaagagtgctgagaaaatatttcacctgctctttctccataaagagctgatactgatcattgctattttcttattcgatctgtaaaggtagcaaagacaaatgcttaatatttcatttttccttaaatgattcttaatgacttgcagtttttaaaaacttaccctgagagtaaaccaaattacccactaaatagtgttttcacacagaagatgtgtaagagcatacctgttgtaaggaattataattttaaaatcattctaaagaagcaccattgtttctaaggtgatttctactgaacaagcagttcaaacaaagtagacagggaag

SEQ ID NO: 194136 - DNA, 611 bp, Homo sapiens
  misc_feature (1)...(611): n = A,T,C or G
nnnnnnnnnnnnnnnnnnnnntaattatgatctttacttcacatgcaaaagtcaacagaacaactcagtatttcaccaaattataaacaagaattacgctagagaaatgaaaccctaaagagaaacggtcatataactaacctcagtcaagtagttctggcagttatttgaagtctgaggtttgaagtaggaattcttacgggcatttggggaatatattttctgttgagtcctatactagtaagattttcaacacaaggtgactctcgacctcaccttgtaggaagagtgctgagaaaatatttcacctgctctttctccataaagagctgatactgatcattgctattttcttattcgatctgtaaaggtagcaaagacaaatgcttaatatttcatwtttccttaaatgattcttaatgacttgcagtttttaaaaacttaccctgagagtaaaccaaattacccactaaatagtgttttcacacagaagatgtgtaagagcatacctgttgtaaggaattataattttaaaatcattctaaagaagcaccattgtttctaaggtgatttctactgaacaagcagttcaaacaaagtagacagggaag

SEQ ID NO: 194137 - DNA, 402 bp, Homo sapiens
attataattttaaaatcattctaaagaagcaccattgtttctaaggtgatttctactgaacaagcagttcaaacaaagtagacagggaagagaaatggctatcagtgatgtatggctcaacaggtaaaacttcctgccttctaaaatggctctacttggaagattctgaagattccattagaaatacttgtatttaaagggtaataatgtgggaaaatgaatatgttgatttgcttgattataagaaccacttcactagaaataattatatcaaaacatcatgttrtactccttaatgtaggttaagaaaactaaaatgaaagaaaaaaaatctaggaacacttgtgtttagtaaaccagttttagatttcactcttgtacacacccattatctaggaccaa

SEQ ID NO: 194138 - DNA, 518 bp, Homo sapiens
gcaaaggcttccttatattcttctaactcagttgtaacctcttcataagcagttttcattttgtagaatttacaatccacatctttaagtgtgagttccttcttatttagtgaagctgtatgatatccttgtttaactgctctaattgttttttatattgtgcttgttcctaaaacagaggaaaagaatacacttttaaaacaattataacctaattattatgtttgttgcctttcattttgagtcagcgattcaaagagtatttttgaatatgttaaaaaagaggatgaagtttaaaatatttcagcaatatcaaaactaataactgaattcagaattaagtctgatttgtaaaaatttgaaatcmtaattatgctagtattaatgtaatctggtcatataaaaagtaatagaatccattcatagttttaaaaagtgatcaatgaacactgtagcttaagaccaattcataattatcacataatttctaaaacacaattttttcctatgccaactgg

SEQ ID NO: 194139 - DNA, 578 bp, Homo sapiens
agcaatatcaaaactaataactgaattcagaattaagtctgatttgtaaaaatttgaaatcataattatgctagtattaatgtaatctggtcatataaaaagtaatagmatccattcatagttttaaaaagtgatcaatgaacactgtagcttaagaccaattcataattatcacataatttctaaaacacaattttttcctatgccaactggtcttaatcatcaaatgactccataatgagaatcattactctgaaagattgattttgttataataataatggaaatttaaatatttaaaagaaaaaacagataccatttttttctagaactctacaaagcagattgctacaagagaggcaatctctttatatatatatatatctccaaaatataatttgcagtgaaataaatgaaagcacattacaagtaaacttacctgatttaaacaactcacctgtaaatggatttcttctaatttttctactgcctgcattgccctttcatctagctctgatttatattcttgtagtttactaagttctaccatactgttttccatatgtgtcttaagattt

SEQ ID NO: 194140 - DNA, 518 bp, Homo sapiens
gcaaaggcttccttatattcttctaactcagttgtaacctcttcataagcagttttcattttgtagaatttacaatccacatctttaagtgtgagttccttcttatttagtgaagctgtatgatatccttgtttaactgctctaattgttttttatattgtgcttgttcctaaaacagaggaaaagaatacacttttaaaacaattataacctaattattatgtttgttgcctttcattttgagtcagcgattcaaagagtatttttgaatatgttaaaaaagaggatgaagtttaaaatatttcagcaatatcaaaactaataactgaattcagaattaagtctgatttgtaaaaatttgaaatcataattatgctagtattaatgtaatctggtcatataaaaagtaatagaatycattcatagttttaaaaagtgatcaatgaacactgtagcttaagaccaattcataattatcacataatttctaaaacacaattttttcctatgccaactgg

SEQ ID NO: 194141 - DNA, 518 bp, Homo sapiens
gcaaaggcttccttatattcttctaactcagttgtaacctcttcataagcagttttcattttgtagaatttacaatccacatctttaagtgtgagttccttcttatttagtgaagctgtatgatatccttgtttaactgctctaattgttttttatattgtgcttgttcctaaaacagaggaaaagaatacacttttaaaacaattataacctaattattatgtttgttgcctttcattttgagtcagcgattcaaagagtatttttgaatatgttaaaaaagaggatgaagtttaaaatatttcagcaatatcaaaactaataactgaattcagaattaagtctgatttgtaaaaatttgaaatcataattatgctagtattaatgtaatctggtcatataaaaagtaatagaatccattcatagttttaaaaagtgatcaatgaacactgtagctwaagaccaattcataattatcacataatttctaaaacacaattttttcctatgccaactgg

SEQ ID NO: 194142 - DNA, 513 bp, Homo sapiens
tgccctttcatctagctctgatttatattcttgtagtttactaagttctaccatactgttttccatatgtgtcttaagatttaatatttcttcttccaacatctttttatcttcctcaagtttttcacattcctgttgtacttttttcatagataataactcctgttgaaaaacttgattctctttagccaaattgacacattttgaagatacagcttccttctccgycataagatcatcaaactgcaagaataaaatagtataacttgataatgaagtaggctgagaataatctaatacaaaaccaatagcaaattttgaaatgcatttacttgcaataaaatgttatctgtaatgcagcagattcttcaaatgtgaacccttaaattactcagaattttaagaacaaagttaaagctaccatgagtcataaaaatatattctttactatcatcatctttgccacagaatttttgtacttaattttacttttatttttctgataattcattt

SEQ ID NO: 194143 - DNA, 377 bp, Homo sapiens
tactatcatcatctttgccacagaatttttgtacttaattttacttttatttttctgataattcatttttgttcctccttaaatggcacaaagttatctcctagtaaaaagtgtctaacccccttccttcattatcattccccacagtatgtcaaaaaaagtttcagagatatcatattgagttatttaggccaaagtcaataaatgggtctaggaataagactttgaaartgatattacactctatattaggcatggtggctcatgcctgtaatcctagcactttaaaaagctgtggcagaaagatcacttgaggccaggaatttaagatcagccagagcaacatagtgagacccccatctctacaaaaaaaaatt

SEQ ID NO: 194144 - DNA, 377 bp, Homo sapiens
tactatcatcatctttgccacagaatttttgtacttaattttacttttatttttctgataattcatttttgttcctccttaaatggcacaaagttatctcctagtaaaaagtgtctaacccccttccttcattatcattccccacagtatgtcaaaaaaagtttcagagatatcatattgagttatttaggccaaagtcaataaatgggtctaggaataagactttgaaagtratattacactctatattaggcatggtggctcatgcctgtaatcctagcactttaaaaagctgtggcagaaagatcacttgaggccaggaatttaagatcagccagagcaacatagtgagacccccatctctacaaaaaaaaatt

SEQ ID NO: 194145 - DNA, 520 bp, Homo sapiens
tacaatgtgatataatcttgcttcaatttgaataaattgctgtcattgaaaagacaaaaaaaatagcaaatgctggtgaggctccagagaacagtaaactcttacatgctgttggtgggaaggtaaattagtgcagccactatagagaacaacaggaggttttctcaaaaaaactaataatgggactgscgagggatccagcaaccccactaccgggtattcaggcaatagaaaagaaaacaatagatcaaaaggatatctgtcctcatatgtttactgtagcactatccacaacagcttgtgtatggaatcaacctacatgtccatcaccaaatgaatggacgaaaaactgtggcacacaaacacagtggaatactattcaccatataaaggaattaaatcctgttattcgtggccacgtggatcagtctgacggatgttatgttaagtgcagacacagaaagataaatactgcacattcttactcatgtgtgggagctaaaggaaaattgaaggctgg

SEQ ID NO: 194146 - DNA, 520 bp, Homo sapiens
tacaatgtgatataatcttgcttcaatttgaataaattgctgtcattgaaaagacaaaaaaaatagcaaatgctggtgaggctccagagaacagtaaactcttacatgctgttggtgggaaggtaaattagtgcagccactatagagaacaacaggaggttttctcaaaaaaactaataatgggactgccgagggatccagcaaccccactaccgggtattcaggcaatagaaaagaaaacaatagatcaaaaggatatctgtcctcatatgtttactgtagcactatccacaacagcttgtgtatggaatcaacmtacatgtccatcaccaaatgaatggacgaaaaactgtggcacacaaacacagtggaatactattcaccatataaaggaattaaatcctgttattcgtggccacgtggatcagtctgacggatgttatgttaagtgcagacacagaaagataaatactgcacattcttactcatgtgtgggagctaaaggaaaattgaaggctgg

SEQ ID NO: 194147 - DNA, 520 bp, Homo sapiens
tacaatgtgatataatcttgcttcaatttgaataaattgctgtcattgaaaagacaaaaaaaatagcaaatgctggtgaggctccagagaacagtaaactcttacatgctgttggtgggaaggtaaattagtgcagccactatagagaacaacaggaggttttctcaaaaaaactaataatgggactgccgagggatccagcaaccccactaccgggtattcaggcaatagaaaagaaaacaatagatcaaaaggatatctgtcctcatatgtttactgtagcactatccacaacagcttgtgtatggaatcaacctacatgtccatcaccaaatgaatggaygaaaaactgtggcacacaaacacagtggaatactattcaccatataaaggaattaaatcctgttattcgtggccacgtggatcagtctgacggatgttatgttaagtgcagacacagaaagataaatactgcacattcttactcatgtgtgggagctaaaggaaaattgaaggctgg

SEQ ID NO: 194148 - DNA, 520 bp, Homo sapiens
tacaatgtgatataatcttgcttcaatttgaataaattgctgtcattgaaaagacaaaaaaaatagcaaatgctggtgaggctccagagaacagtaaactcttacatgctgttggtgggaaggtaaattagtgcagccactatagagaacaacaggaggttttctcaaaaaaactaataatgggactgccgagggatccagcaaccccactaccgggtattcaggcaatagaaaagaaaacaatagatcaaaaggatatctgtcctcatatgtttactgtagcactatccacaacagcttgtgtatggaatcaacctacatgtccatcaccaaatgaatggacgaaaaactgtggcacacaaacacagtggaatactattcaccatataaaggaattaaatcctgttattcgtggccaygtggatcagtctgacggatgttatgttaagtgcagacacagaaagataaatactgcacattcttactcatgtgtgggagctaaaggaaaattgaaggctgg

SEQ ID NO: 194149 - DNA, 465 bp, Homo sapiens
agtgttaagacacaaatgcaacttctcctttaccttactccaagcttgtttgtatggagaagttaagaccatcccatttctatgttatgccacaatgcttctctatagcacacaacttggctctgaaattttgaaagtcaaaatactaatctactatgtgtctctgataaattgcctgaacgttacctgattttgaagtgctgcactcctaagactttttcttggaatgagttaaacgttttattccaagaatcctctactgagctagaaagcagagctgtgcatctctgtttcagtaaaaggaggtcaatayagggaactgtggtttctgagaatgcaagatctgcactaataaaaggattagccacagtgctacccaagagaaccagctaccaggaggaaagagggtctgtaaactgcaagatgatgacttcacttgatttccactgaggaaagctggtggct

SEQ ID NO: 194150 - DNA, 465 bp, Homo sapiens
agtgttaagacacaaatgcaacttctcctttaccttactccaagcttgtttgtatggagaagttaagaccatcccatttctatgttatgccacaatgcttctctatagcacacaacttggctctgaaattttgaaagtcaaaatactaatctactatgtgtctctgataaattgcctgaacgttacctgattttgaagtgctgcactcctaagactttttcttggaatgagttaaacgttttattccaagaatcctctactgagctagaaagcagagctgtgcatctctgtttcagtaaaaggaggtcaatatagggaactgtggtttctgagaatgcaagatctgcactaakaaaaggattagccacagtgctacccaagagaaccagctaccaggaggaaagagggtctgtaaactgcaagatgatgacttcacttgatttccactgaggaaagctggtggct

SEQ ID NO: 194151 - DNA, 578 bp, Homo sapiens
ttttcttggaatgagttaaacgttttattccaagaatcctctactgagctagaaagcagagctgtgcatctctgtttcagtaaaaggaggtcaatatagggaactgtggtttctgagaatgcaagatctgcactaataaaaggattagccacagtgctacccaagagaaccagctaccaggagraaagagggtctgtaaactgcaagatgatgacttcacttgatttccactgaggaaagctggtggctcagacttaaacttctccttcctagatggtaaacatctatggaaggttctatgaattataatgagttagtaaaacataatgcactgaatattagactatgtcagcagatcctgtaaccaaaactttctgaaaatataactatagtgggaggcaatggaaaagagactaaaggcttgaatggagaaaaaaagaaattaagtgtgtcttgtaagcctggcgtctgatcatgtcttagaggaagtaaggtataagctggccagagactcctttgtgacacaaaaggtgaagttacagacattccactaaatttaatttttattatgacataag

SEQ ID NO: 194152 - DNA, 578 bp, Homo sapiens
ttttcttggaatgagttaaacgttttattccaagaatcctctactgagctagaaagcagagctgtgcatctctgtttcagtaaaaggaggtcaatatagggaactgtggtttctgagaatgcaagatctgcactaataaaaggattagccacagtgctacccaagagaaccagctaccaggaggaaagagggtctgtaaactgcaagatgatgacttcacttgatttccactgaggaaagctggyggctcagacttaaacttctccttcctagatggtaaacatctatggaaggttctatgaattataatgagttagtaaaacataatgcactgaatattagactatgtcagcagatcctgtaaccaaaactttctgaaaatataactatagtgggaggcaatggaaaagagactaaaggcttgaatggagaaaaaaagaaattaagtgtgtcttgtaagcctggcgtctgatcatgtcttagaggaagtaaggtataagctggccagagactcctttgtgacacaaaaggtgaagttacagacattccactaaatttaatttttattatgacataag

SEQ ID NO: 194153 - DNA, 578 bp, Homo sapiens
ttttcttggaatgagttaaacgttttattccaagaatcctctactgagctagaaagcagagctgtgcatctctgtttcagtaaaaggaggtcaatatagggaactgtggtttctgagaatgcaagatctgcactaataaaaggattagccacagtgctacccaagagaaccagctaccaggaggaaagagggtctgtaaactgcaagatgatgacttcacttgatttccactgaggaaagctggtggctcagacttaaacttctccttcctagatggtaaacatctatggaaggttctatgaattataatgagttagtaaaacataatgcactgaatattagactatgtcagcagatcctgtaaccaaaacttwctgaaaatataactatagtgggaggcaatggaaaagagactaaaggcttgaatggagaaaaaaagaaattaagtgtgtcttgtaagcctggcgtctgatcatgtcttagaggaagtaaggtataagctggccagagactcctttgtgacacaaaaggtgaagttacagacattccactaaatttaatttttattatgacataag

SEQ ID NO: 194154 - DNA, 588 bp, Homo sapiens
aagcttaacaaaagaacaaaatgggaaaagaatagtcttttcaacaaatggtgctgggacaactgggtatccataagcaaaaaataaataaagttcgaccaaatatcwtatttaataattaactcaaaataaaacagttaactgtaaaagctaaaactataaaaccctcagaagaaaacactggcataaatctttgtgactgcatttgccagtgttttcttagctatgactccaaaggaaaaatggattcaatggacttcaaaattgaaaactgctgtgcctcagaagacagcatgaagaagtgaaaaggtaagacgccaagtagaagaaagtatttgaaaagcgtgtatctgataagggacttacatatataggaaatataaataactcttgcaattaataaataacaagataagccaattttaaaaaatgggcaaggattttgaatagatatatctgcaaagaagatataaagatggataagcacattaatagatgcttaatgtaattagtcattaggaaaatgtaaatcaaaaccacatgtggtatcacttcacaccacaggataaaatctttgttcaagaaaaa

SEQ ID NO: 194155 - DNA, 588 bp, Homo sapiens
aagcttaacaaaagaacaaaatgggaaaagaatagtcttttcaacaaatggtgctgggacaactgggtatccataagcaaaaaataaataaagttcgaccaaatatcatatttaataattaactcaaaataaaayagttaactgtaaaagctaaaactataaaaccctcagaagaaaacactggcataaatctttgtgactgcatttgccagtgttttcttagctatgactccaaaggaaaaatggattcaatggacttcaaaattgaaaactgctgtgcctcagaagacagcatgaagaagtgaaaaggtaagacgccaagtagaagaaagtatttgaaaagcgtgtatctgataagggacttacatatataggaaatataaataactcttgcaattaataaataacaagataagccaattttaaaaaatgggcaaggattttgaatagatatatctgcaaagaagatataaagatggataagcacattaatagatgcttaatgtaattagtcattaggaaaatgtaaatcaaaaccacatgtggtatcacttcacaccacaggataaaatctttgttcaagaaaaa

SEQ ID NO: 194156 - DNA, 588 bp, Homo sapiens
aagcttaacaaaagaacaaaatgggaaaagaatagtcttttcaacaaatggtgctgggacaactgggtatccataagcaaaaaataaataaagttcgaccaaatatcatatttaataattaactcaaaataaaacagttaactgtaaaagctaaaactataaaaccctcagaagaaaacactggcataaatctttgtgactgcatttgccagtgttttcttagctatgactccaaaggaaaaatggattcaatggacttcaaaattgaaaactgctgtgcctcagaagacagyatgaagaagtgaaaaggtaagacgccaagtagaagaaagtatttgaaaagcgtgtatctgataagggacttacatatataggaaatataaataactcttgcaattaataaataacaagataagccaattttaaaaaatgggcaaggattttgaatagatatatctgcaaagaagatataaagatggataagcacattaatagatgcttaatgtaattagtcattaggaaaatgtaaatcaaaaccacatgtggtatcacttcacaccacaggataaaatctttgttcaagaaaaa

SEQ ID NO: 194157 - DNA, 588 bp, Homo sapiens
aagcttaacaaaagaacaaaatgggaaaagaatagtcttttcaacaaatggtgctgggacaactgggtatccataagcaaaaaataaataaagttcgaccaaatatcatatttaataattaactcaaaataaaacagttaactgtaaaagctaaaactataaaaccctcagaagaaaacactggcataaatctttgtgactgcatttgccagtgttttcttagctatgactccaaaggaaaaatggattcaatggacttcaaaattgaaaactgctgtgcctcagaagacagcatgaagaagtgaaaaggtaagacgccaagtagaagaaagtatttgaaaagcgtgtatctgataagggacttacatatataggaaatataaataactcttgcaattaataaataacaagataagccaattttaaaaaatgggcaargattttgaatagatatatctgcaaagaagatataaagatggataagcacattaatagatgcttaatgtaattagtcattaggaaaatgtaaatcaaaaccacatgtggtatcacttcacaccacaggataaaatctttgttcaagaaaaa

SEQ ID NO: 194158 - DNA, 581 bp, Homo sapiens
gtgaaaaggtaagacgccaagtagaagaaagtatttgaaaagcgtgtatctgataagggacttacatatataggaaatataaataactcttgcaattaataaataacaagataagccaattttaaaaaatgggcaaggattttgaatagatatatctgcaaagaagatataaagatggataagcacattaatagatgcttaatgtaattagtcattaggaaaatgtaaatcaaaaccacatgtggtatcacttcacaccacaggataaaatctttgttcaagaaaaaagagtgttaggaaaaatgtaaagaaattaaaacccttatctaatgctgctgggaatgtaaagtgatgcagccactttggaaaacaaactggyagctccttaaagggttaagcatgaagttaccatatgacacagaaattccagtcataagtatatactccagaaaaataaaaacatacgcaagcacaaaaactcatacataaatgtttacagcagcattattaatagtagtcaaaaggtggaaagaaccagaacgtctgtcacctttggctgggagagaacccaaaggtccatc

SEQ ID NO: 194159 - DNA, 581 bp, Homo sapiens
gtgaaaaggtaagacgccaagtagaagaaagtatttgaaaagcgtgtatctgataagggacttacatatataggaaatataaataactcttgcaattaataaataacaagataagccaattttaaaaaatgggcaaggattttgaatagatatatctgcaaagaagatataaagatggataagcacattaatagatgcttaatgtaattagtcattaggaaaatgtaaatcaaaaccacatgtggtatcacttcacaccacaggataaaatctttgttcaagaaaaaagagtgttaggaaaaatgtaaagaaattaaaacccttatctaatgctgctgggaatgtaaagtgatgcagccactttggaaaacaaactggcagckccttaaagggttaagcatgaagttaccatatgacacagaaattccagtcataagtatatactccagaaaaataaaaacatacgcaagcacaaaaactcatacataaatgtttacagcagcattattaatagtagtcaaaaggtggaaagaaccagaacgtctgtcacctttggctgggagagaacccaaaggtccatc

SEQ ID NO: 194160 - DNA, 404 bp, Homo sapiens
gcagctccttaaagggttaagcatgaagttaccatatgacacagaaattccagtcataagtatatactccagaaaaataaaaacatacrcaagcacaaaaactcatacataaatgtttacagcagcattattaatagtagtcaaaaggtggaaagaaccagaacgtctgtcacctttggctgggagagaacccaaaggtccatcacctggcgaatggataaataaaatgtttgatgtatccatacaatggaatattactcagcaataagaagaaattaagtacagataccgtattaggaggagacagcaaaatgcctatgcagatacggaagggtccccggagaatctccaacgagccccacaagtgtttacaccagatgttatgtgcagataagggaacctgg

SEQ ID NO: 194161 - DNA, 512 bp, Homo sapiens
tccaacgagccccacaagtgtttacaccagatgttatgtgcagataagggaacctggacttgtcttgcctggacatgcccacagcagactggaggcccacatgcagtggggggatggggtggagtcaccaggaattcacacctkatgcagaggaggagcctggccgcttcagctcatgtgctcctggtattcaattgtgaggtggaaacctctttgcaggacccctctctttgctgagagctgtgctttcacataataaattctgccctcctcaatgtgtctgcatgcttaatttttcctggtcacgagagaagaacacagatgtagctgaactaaggagcaaaaacccagcatcaatacctgctacagcacagatgcagcatgaaaaattatgctaagtgaaataagccagtcccagcagaccacttgctttttatttcagaggcttataggcaaatctatacaaagaaggtgggtggttccctagggctgagggaggaagggaaaactag

SEQ ID NO: 194162 - DNA, 458 bp, Homo sapiens
gaattcacaccttatgcagaggaggagcctggccgcttcagctcatgtgctcctggtattcaattgtgaggtggaaacctctttgyaggacccctctctttgctgagagctgtgctttcacataataaattctgccctcctcaatgtgtctgcatgcttaatttttcctggtcacgagagaagaacacagatgtagctgaactaaggagcaaaaacccagcatcaatacctgctacagcacagatgcagcatgaaaaattatgctaagtgaaataagccagtcccagcagaccacttgctttttatttcagaggcttataggcaaatctatacaaagaaggtgggtggttccctagggctgagggaggaagggaaaactagtgaagatggctaaatgatgtggggtttgtttttagggtgatgaaaatgttctaaaattaattgtaatgatgacggca

SEQ ID NO: 194163 - DNA, 459 bp, Homo sapiens
gaattcacaccttatgcagaggaggagcctggccgcttcagctcatgtgctcctggtattcaattgtgaggtggaaacctctttgcaggacccctctctttgctgagagctgtsctttcacataataaattctgccctcctcaatgtgtctgcatgcttaatttttcctggtcacgagagaagaacacagatgtagctgaactaaggagcaaaaacccagcatcaatacctgctacagcacagatgcagcatgaaaaattatgctaagtgaaataagccagtcccagcagaccacttgctttttatttcagaggcttataggcaaatctatacaaagaaggtgggtggttccctagggctgagggaggaagggaaaactagtgaagatggctaaatgatgtggggtttgtttttagggtgatgaaaatgttctaaaattaattgtaatgatgacggcat

SEQ ID NO: 194164 - DNA, 462 bp, Homo sapiens
tggccgcttcagctcatgtgctcctggtattcaattgtgaggtggaaacctctttgcaggacccctctctttgctgagagctgtgctttcacataataaattctgccctcctcaatgtgtctgcatgcttaatttttcctggtcaygagagaagaacacagatgtagctgaactaaggagcaaaaacccagcatcaatacctgctacagcacagatgcagcatgaaaaattatgctaagtgaaataagccagtcccagcagaccacttgctttttatttcagaggcttataggcaaatctatacaaagaaggtgggtggttccctagggctgagggaggaagggaaaactagtgaagatggctaaatgatgtggggtttgtttttagggtgatgaaaatgttctaaaattaattgtaatgatgacggcataactctctgaaaatactaaagttaatgaattc

SEQ ID NO: 194165 - DNA, 464 bp, Homo sapiens
cctggccgcttcagctcatgtgctcctggtattcaattgtgaggtggaaacctctttgcaggacccctctctttgctgagagctgtgctttcacataataaattctgccctcctcaatgtgtctgcatgcttaatttttcctggtcacgagagaagaacmcagatgtagctgaactaaggagcaaaaacccagcatcaatacctgctacagcacagatgcagcatgaaaaattatgctaagtgaaataagccagtcccagcagaccacttgctttttatttcagaggcttataggcaaatctatacaaagaaggtgggtggttccctagggctgagggaggaagggaaaactagtgaagatggctaaatgatgtggggtttgtttttagggtgatgaaaatgttctaaaattaattgtaatgatgacggcataactctctgaaaatactaaagttaatgaattc

SEQ ID NO: 194166 - DNA, 463 bp, Homo sapiens
ctggccgcttcagctcatgtgctcctggtattcaattgtgaggtggaaacctctttgcaggacccctctctttgctgagagctgtgctttcacataataaattctgccctcctcaatgtgtctgcatgcttaatttttcctggtcacgagagaagaacacagatgtagctgaactaaggagcaaaaacccagcatcaatacytgctacagcacagatgcagcatgaaaaattatgctaagtgaaataagccagtcccagcagaccacttgctttttatttcagaggcttataggcaaatctatacaaagaaggtgggtggttccctagggctgagggaggaagggaaaactagtgaagatggctaaatgatgtggggtttgtttttagggtgatgaaaatgttctaaaattaattgtaatgatgacggcataactctctgaaaatactaaagttaatgaattc

SEQ ID NO: 194167 - DNA, 459 bp, Homo sapiens
gaattcacaccttatgcagaggaggagcctggccgcttcagctcatgtgctcctggtattcaattgtgaggtggaaacctctttgcaggacccctctctttgctgagagctgtgctttcacataataaattctgccctcctcaatgtgtctgcatgcttaatttttcctggtcacgagagaagaacacagatgtagctgaactaaggagcaaaaacccagcatcaatacctgctacagcacagatgcagcatgaaaaattatgctaagtgaaataagccagtcccagcagaccacttgctttttatttcasaggcttataggcaaatctatacaaagaaggtgggtggttccctagggctgagggaggaagggaaaactagtgaagatggctaaatgatgtggggtttgtttttagggtgatgaaaatgttctaaaattaattgtaatgatgacggcat

SEQ ID NO: 194168 - DNA, 459 bp, Homo sapiens
gaattcacaccttatgcagaggaggagcctggccgcttcagctcatgtgctcctggtattcaattgtgaggtggaaacctctttgcaggacccctctctttgctgagagctgtgctttcacataataaattctgccctcctcaatgtgtctgcatgcttaatttttcctggtcacgagagaagaacacagatgtagctgaactaaggagcaaaaacccagcatcaatacctgctacagcacagatgcagcatgaaaaattatgctaagtgaaataagccagtcccagcagaccacttgctttttatttcagaggcttataggcaaatctatacaaagaaggtgggtggttccctagggctgagggaggaagggaaaactagtgaagatggctaaatgatgtggggtttgtttttagggtgatgaaaatgttctawaattaattgtaatgatgacggcat

SEQ ID NO: 194169 - DNA, 450 bp, Homo sapiens
gaaaactctatatcactccctactctccgtgatttcctcttgccatgtgagacaattcactctttcattaccttgcacaatgattgaaagatttctgaggccccccagaagmagaagcactaagcttcctgtccactctgcagaaccatgagccaattaaacctctttttcaagataaatcttaccaaaaatggcaaatgaggactggagcattgctataaatatacctgaaaatgtggaagcaacttcggaactgggtaatgggtagaggttggaagagtttggagggctccaaagaagacagacagatgagaacatttttggatcatcttagagactggttaaatggctgtgacaagaatgctgacaaaaacatggacagtgaaggccaggctgagggggcctcagataaaaataagaagctttctggaaaatgtctctcttttggat

SEQ ID NO: 194170 - DNA, 450 bp, Homo sapiens
gaaaactctatatcactccctactctccgtgatttcctcttgccatgtgagacaattcactctttcattaccttgcacaatgattgaaagatttctgaggccccccagaagaagaagcactaagcttcctgtccactctgcagaaccatgagccaattaaacctctttttcaarataaatcttaccaaaaatggcaaatgaggactggagcattgctataaatatacctgaaaatgtggaagcaacttcggaactgggtaatgggtagaggttggaagagtttggagggctccaaagaagacagacagatgagaacatttttggatcatcttagagactggttaaatggctgtgacaagaatgctgacaaaaacatggacagtgaaggccaggctgagggggcctcagataaaaataagaagctttctggaaaatgtctctcttttggat

SEQ ID NO: 194171 - DNA, 450 bp, Homo sapiens
gaaaactctatatcactccctactctccgtgatttcctcttgccatgtgagacaattcactctttcattaccttgcacaatgattgaaagatttctgaggccccccagaagaagaagcactaagcttcctgtccactctgcagaaccatgagccaattaaacctctttttcaagataaatcttaccaaaaatggcaaatgaggactggagcattgctataaakatacctgaaaatgtggaagcaacttcggaactgggtaatgggtagaggttggaagagtttggagggctccaaagaagacagacagatgagaacatttttggatcatcttagagactggttaaatggctgtgacaagaatgctgacaaaaacatggacagtgaaggccaggctgagggggcctcagataaaaataagaagctttctggaaaatgtctctcttttggat

SEQ ID NO: 194172 - DNA, 450 bp, Homo sapiens
gaaaactctatatcactccctactctccgtgatttcctcttgccatgtgagacaattcactctttcattaccttgcacaatgattgaaagatttctgaggccccccagaagaagaagcactaagcttcctgtccactctgcagaaccatgagccaattaaacctctttttcaagataaatcttaccaaaaatggcaaatgaggactggagcattgctataaatatacctgaaaatgtggaagcaacttcggaactgggtaatgggtagaggttggaagagtttggagggctccaaagaagacagacagatgagaacatttttggaycatcttagagactggttaaatggctgtgacaagaatgctgacaaaaacatggacagtgaaggccaggctgagggggcctcagataaaaataagaagctttctggaaaatgtctctcttttggat

SEQ ID NO: 194173 - DNA, 292 bp, Homo sapiens
gactgtatcttgcaatgtgagaaggacatgagatttgtggggtcagggacagaataatacggtttttctctatgccccttccaaaactcatgtgaaagtacactccctaatgttagagtcggggcctaggtggaaaaagytttaatcataaaggggtgggagtggatccttcacaaatggcaaagcaccaagcccttaatgccatcctcctgatagtgagtgagttctcatgagatctagtagtttaaaaggctgtggaacctctttcctctctctgtcttgttccaacttc

SEQ ID NO: 194174 - DNA, 346 bp, Homo sapiens
gtagtttaaaaggctgtggaacctctttcctctctctgtcttgttccaacttctgccatatgaaacatgtcattgccgcttggatttccggygtggttaggaggggcctgatcagtgtgggcctggtcagtggacctaggtcagtgaggactatttagtgggatcatggtcagcagaggtctgcttagagagggtctcattagtggggtctagtagtgggggttttggtgagtggggacctattggctgccagttgtttggtgtctggtcagtgcaaacctgggctgtggggcttgatcagtggagacctggtcagctggggcttagtgctggcctggtcagcatg

SEQ ID NO: 194175 - DNA, 346 bp, Homo sapiens
gtagtttaaaaggctgtggaacctctttcctctctctgtcttgttccaacttctgccatatgaaacatgtcattgccgcttggatttccggcgtggttaggagggrcctgatcagtgtgggcctggtcagtggacctaggtcagtgaggactatttagtgggatcatggtcagcagaggtctgcttagagagggtctcattagtggggtctagtagtgggggttttggtgagtggggacctattggctgccagttgtttggtgtctggtcagtgcaaacctgggctgtggggcttgatcagtggagacctggtcagctggggcttagtgctggcctggtcagcatg

SEQ ID NO: 194176 - DNA, 265 bp, Homo sapiens
tctgaaaggacaaaggtaaaggaagagccagagtggctgcagagatggtcacagtctatgggctgcacaggatgraggaggccagggaacaggcagggtgggcagttggggttcagggagaggcaggtgcatgctgggaggtcagaccctgtgagggctttgggggcgtcaggttgggtaggctccaggcactctcactcacataggattccagaacactgctacaaggctctgagtgtttgtccctcacgtaggattccagaac

SEQ ID NO: 194177 - DNA, 503 bp, Homo sapiens
gtctaaatgtctctccctcacataagatttcaggacactgctacgaggttctgaatgtttgtccctcacataggattccagagcactcctgctgtggtctgaatatttgtccctcacataggattccagaacactgccacgtgggtctgaatgtttgccctcacataggattccagaacactcctgctgtggtckgaatgtttgaccctcacataggattccagaacattcctgctgtggtctgaaagtttgctcaccacataggactccagaacactgctaagagggtctgaatgtccctcacattgtattccagaacactccttctgtggtctgaatgtttgttcctcacataggattcgagaacactcctgctgtggtctgaatgtttgtcccttacctaggattcgagaacattcacactgggatgtaaatgcttgcccttaacataggatttcagaacactgctcctggggtctgaaagtttgtccctcacataggat

SEQ ID NO: 194178 - DNA, 432 bp, Homo sapiens
agaacactgctacgagggtctcaatgtttgtccctcacataagattccagaacactgctgctggggtctgaatgcttgtccctcacatacgattacagaacastgttgctggggtgtgaatgtttgtccctcacatggtattccagaccactgctgctggggtctcaatgtctgtccctcaaaaaaggattccagaacactgttacgagggtctgaatttttgttcctcacttaagactgcagaacactgcttcgagggtctaaatgtctgtccttcacataggattccagaacactgctacgagggtgtgaatgtttgtccttcacatagcatttcagaactgccatggtctgaatggttgtccctcacatagtattccagaaaactgctatgagggtctgaatgtttgtacctcacataggattccagaa

SEQ ID NO: 194179 - DNA, 432 bp, Homo sapiens
agaacactgctacgagggtctcaatgtttgtccctcacataagattccagaacactgctgctggggtctgaatgcttgtccctcacatacgattacagaacagtgttgstggggtgtgaatgtttgtccctcacatggtattccagaccactgctgctggggtctcaatgtctgtccctcaaaaaaggattccagaacactgttacgagggtctgaatttttgttcctcacttaagactgcagaacactgcttcgagggtctaaatgtctgtccttcacataggattccagaacactgctacgagggtgtgaatgtttgtccttcacatagcatttcagaactgccatggtctgaatggttgtccctcacatagtattccagaaaactgctatgagggtctgaatgtttgtacctcacataggattccagaa

SEQ ID NO: 194180 - DNA, 432 bp, Homo sapiens
agaacactgctacgagggtctcaatgtttgtccctcacataagattccagaacactgctgctggggtctgaatgcttgtccctcacatacgattacagaacagtgttgctggggwgtgaatgtttgtccctcacatggtattccagaccactgctgctggggtctcaatgtctgtccctcaaaaaaggattccagaacactgttacgagggtctgaatttttgttcctcacttaagactgcagaacactgcttcgagggtctaaatgtctgtccttcacataggattccagaacactgctacgagggtgtgaatgtttgtccttcacatagcatttcagaactgccatggtctgaatggttgtccctcacatagtattccagaaaactgctatgagggtctgaatgtttgtacctcacataggattccagaa

SEQ ID NO: 194181 - DNA, 565 bp, Homo sapiens
caagaaatgttaaatgaaattctttagagggaaacaaaagatatataactgaaacctggatcaacattttyttaaaaagagcattaaagaattgtggtacaataaaaacctatgtatttattcttaattgatctgaccaagaagttcatagacaataacaaatacacacagatagattatgtatgcttatacacaattgaaatgagtgacactaatacaaggaatggaatggaaggatgggagggaggaattgtggtacaataaaaacatgtatttattcataattgatctgaccaataagtttgtagataataataaatacacacagatagattatgtgtgcttatacacaagtgaaataaggaacaataatacaaggaatggaatggaaggatgggagggaggaatcaggtgttttctttgttaagcaggtagtcacccatgaagtgggatagtgttatctgaaagtggacttgaattggttgtaaatgtatattgaggaattaggtgtgttctttgttaagcaggtagtcttatttgtgggatagtgggatagtgttatttg

SEQ ID NO: 194182 - DNA, 565 bp, Homo sapiens
caagaaatgttaaatgaaattctttagagggaaacaaaagatatataactgaaacctggatcaacatttttttaaaaagagcattaaagaattgtggtacaataaaaacctatgtatttattcttaattgatctgaccaagaagttcatagacaataacaaatacacacagatagattatgtatgcttatacacaattgaaatgagtracactaatacaaggaatggaatggaaggatgggagggaggaattgtggtacaataaaaacatgtatttattcataattgatctgaccaataagtttgtagataataataaatacacacagatagattatgtgtgcttatacacaagtgaaataaggaacaataatacaaggaatggaatggaaggatgggagggaggaatcaggtgttttctttgttaagcaggtagtcacccatgaagtgggatagtgttatctgaaagtggacttgaattggttgtaaatgtatattgaggaattaggtgtgttctttgttaagcaggtagtcttatttgtgggatagtgggatagtgttatttg

SEQ ID NO: 194183 - DNA, 565 bp, Homo sapiens
caagaaatgttaaatgaaattctttagagggaaacaaaagatatataactgaaacctggatcaacatttttttaaaaagagcattaaagaattgtggtacaataaaaacctatgtatttattcttaattgatctgaccaagaagttcatagacaataacaaatacacacagatagattatgtatgcttatacacaattgaaatgagtgacactaatacaaggaatggaatggaaggatgggagggaggaattgtggtacaataaaaacatgtatttattcataattgatctgaccaataagtttgtagataataataaatacacacagatagattatgtgtgcttatacacaagtgaaataaggaacaataatacaaggaatggaatggaaggatgggagggaggaatcaggtgttttctttgttaagcaggtagtcacccatgaagtgggatagygttatctgaaagtggacttgaattggttgtaaatgtatattgaggaattaggtgtgttctttgttaagcaggtagtcttatttgtgggatagtgggatagtgttatttg

SEQ ID NO: 194184 - DNA, 313 bp, Homo sapiens
atttaagaaatgtgtacacacttgaggagacttaagaagtctctgactaaaacactagaaaagaaaagcagtgaaaagccaaataactattactcaacaataacaacatttgttactattatattaatattaaacacactattaagcaacaacatttcagttactcactgagcccaaagtcatttttcatgaaccmttcacaacactgataacctattgaaaaatgattgaaaacaaaaaagcttattgctttccaagtccttttaaagccttctcatgtgtcatttcatataatccttataacgaatctatg

SEQ ID NO: 194185 - DNA, 346 bp, Homo sapiens
ttaaaattttgacaaaataaggagatgaactgagtagtgtggaacagacattttgtgaagtcagcagagaaaggagagacaaatatggtaaggggaaaatggtatgaastaataatatctatgaagtgctttctaaagtataacacatgtaagttgtgttaaatgtaaactatcatgattatatcattactgtctgactgatacaactatatccacctcagttagccacataagatcaattttcctataccttagagaataccagtaacctccagttcagaaacagcataaatatttatccacagctgagcagacacatacagctagctaccagatgaaatgggct

SEQ ID NO: 194186 - DNA, 391 bp, Homo sapiens
atcattactgtctgactgatacaactatatccacctcagttagccacataagatcaattttcctataccttagagaataccagtaacctccagttcagaaacagcataaatatttatccacagctgagcagacacatacagctagctaccagatgaaatggrctatatcttcaaatactattgttttctgttttttaattgtggcaaaacacactcaacaatttgcatcttaaccactgttaagtatacaattcggtgtcattaaatgtattcacaatgttgtgcaagcatcaccaccacccatctccataattctttttgtcttgtaaaattgaaaccctgtacccattaaaagtgactccccattccccacccccccagggcaactaca

SEQ ID NO: 194187 - DNA, 391 bp, Homo sapiens
atcattactgtctgactgatacaactatatccacctcagttagccacataagatcaattttcctataccttagagaataccagtaacctccagttcagaaacagcataaatatttatccacagctgagcagacacatacagctagctaccagatgaaatgggctatatcttcaaatactattgttttctgttttttaattgtggcaaaacacactcaacaatttgcatcttaaccactgttaagtatacaattcggtgtcattaaatgtattcacaatgttgtgcaagcatcaccaccacccatctcmataattctttttgtcttgtaaaattgaaaccctgtacccattaaaagtgactccccattccccacccccccagggcaactaca

SEQ ID NO: 194188 - DNA, 365 bp, Homo sapiens
tttgcatcttaaccactgttaagtatacaattcggtgtcattaaatgtattcacaatgttgtgcaagcatcaccaccacccatctccataattctttttgtcttgtaaaattgaaaccctgtacccattaaaagtgactccccatkccccacccccccagggcaactacagctttgctttctgtcttgatgaatcatacaatatcaaatgtaatttttaagatatttaaaatcttttgtctggaagcaaagtggaagttaatatcaatggctatgccttcagtgagttctcagaccacattacaacgtagttaactatttatcttttattacgttctagacctattatttctttctggcacaaaa

SEQ ID NO: 194189 - DNA, 365 bp, Homo sapiens
tttgcatcttaaccactgttaagtatacaattcggtgtcattaaatgtattcacaatgttgtgcaagcatcaccaccacccatctccataattctttttgtcttgtaaaattgaaaccctgtacccattaaaagtgactccccattccccacccccccagggcaactacagctttrctttctgtcttgatgaatcatacaatatcaaatgtaatttttaagatatttaaaatcttttgtctggaagcaaagtggaagttaatatcaatggctatgccttcagtgagttctcagaccacattacaacgtagttaactatttatcttttattacgttctagacctattatttctttctggcacaaaa

SEQ ID NO: 194190 - DNA, 482 bp, Homo sapiens
taactatttatcttttattacgttctagacctattatttctttctggcacaaaaatatcttctttgtagattatggcatttacctctatctccacaccattttggtctctcatccacagatcatcagcctcttgcttagtcttcyatttaatgacaatttctatttagtatacaacagtccttccccctgcaatgcaatttcttcactctttaaagctctgagtctggctactggtctctgttatgtactcatccctagagccaagtcttcaaatatttctcagaacttcttcacatctaaaaatctaggattaatgtattgctctctgattatattcttctggtatttcaagtatcctgtataacttcttcatctgcccttgcttttcttctacatcaagatgtcaagttcatggacttcccaattaatcattttaaaaatgtatttcaagcctttatgagtcactaaaatatacatatgt

SEQ ID NO: 194191 - DNA, 482 bp, Homo sapiens
taactatttatcttttattacgttctagacctattatttctttctggcacaaaaatatcttctttgtagattatggcatttacctctatctccacaccattttggtctctcatccacagatcatcagcctcttgcttagtcttccatttaatgacaatttctatttagtatacaacagtccttccccctgcaatgcaatttcttcactctttaaagctctgagtctggctactggtctctgttatgtactcatccctagagccaagtcttcaaatatttctcagaacttcttcacatctaaaaatctaggattaatgtattgctctctgattatattcttctggtatttcaagtatcctgtataacttcttcatytgcccttgcttttcttctacatcaagatgtcaagttcatggacttcccaattaatcattttaaaaatgtatttcaagcctttatgagtcactaaaatatacatatgt

SEQ ID NO: 194192 - DNA, 484 bp, Homo sapiens
cttccccctgcaatgcaatttcttcactctttaaagctctgagtctggctactggtctctgttatgtactcatccctagagccaagtcttcaaatatttctcagaacttcttcacatctaaaaatctaggattaatgtattgctctctgattatattcttctggtatttcaagtatcctgtataacttcttcatctgcccttgcttttcttctacatcaagatgtcaagttcatggacttcccaattaatcattttaaaaatktatttcaagcctttatgagtcactaaaatatacatatgttctcaggaattatggccctacaatttgtatgtgagaatagttcctgtgtcaggcattatggacataagaggaaataaattctagcccctgcctacaaggagctaattcccagcctaagacagattgcaagccaataatatgcagacttgtaagtctaaggaaactgattgggatgtacctaa

SEQ ID NO: 194193 - DNA, 484 bp, Homo sapiens
cttccccctgcaatgcaatttcttcactctttaaagctctgagtctggctactggtctctgttatgtactcatccctagagccaagtcttcaaatatttctcagaacttcttcacatctaaaaatctaggattaatgtattgctctctgattatattcttctggtatttcaagtatcctgtataacttcttcatctgcccttgcttttcttctacatcaagatgtcaagttcatggacttcccaattaatcattttaaaaatgtatttcaagcctttatgagtcactaaaatatacatatgttctcaggaattatgrccctacaatttgtatgtgagaatagttcctgtgtcaggcattatggacataagaggaaataaattctagcccctgcctacaaggagctaattcccagcctaagacagattgcaagccaataatatgcagacttgtaagtctaaggaaactgattgggatgtacctaa

SEQ ID NO: 194194 - DNA, 428 bp, Homo sapiens
atttagcataaaacacaactttagcctaaaacacagatcatagggctcaaactttgttattttatgggattatactaatcagttaataatcaaaatttaccatttcaaaagaagaaatattggtctgggaaaattgccattgcttatacagaagaatggaggaatctttttgagaacaacaattctagtgatcttcctcatcactggttccaaaaccaagcccatgraaggcctgcatagggataatgtggagaacatgccagagaaatacacatcaccagctcctcaactcagagctccaagggaatggccaaggaagctgtattgtcctaagaaatttgagactgttttgacttacaataaatcctgctcaatcatatgtatgtatacacacacacacacccacacacacagacggtgttgtcagt

SEQ ID NO: 194195 - DNA, 428 bp, Homo sapiens
atttagcataaaacacaactttagcctaaaacacagatcatagggctcaaactttgttattttatgggattatactaatcagttaataatcaaaatttaccatttcaaaagaagaaatattggtctgggaaaattgccattgcttatacagaagaatggaggaatctttttgagaacaacaattctagtgatcttcctcatcactggttccaaaaccaagcccatgaaaggcctgcatagggataatgtggagaacatgcmagagaaatacacatcaccagctcctcaactcagagctccaagggaatggccaaggaagctgtattgtcctaagaaatttgagactgttttgacttacaataaatcctgctcaatcatatgtatgtatacacacacacacacccacacacacagacggtgttgtcagt

SEQ ID NO: 194196 - DNA, 428 bp, Homo sapiens
atttagcataaaacacaactttagcctaaaacacagatcatagggctcaaactttgttattttatgggattatactaatcagttaataatcaaaatttaccatttcaaaagaagaaatattggtctgggaaaattgccattgcttatacagaagaatggaggaatctttttgagaacaacaattctagtgatcttcctcatcactggttccaaaaccaagcccatgaaaggcctgcatagggataatgtggagaacatgccaragaaatacacatcaccagctcctcaactcagagctccaagggaatggccaaggaagctgtattgtcctaagaaatttgagactgttttgacttacaataaatcctgctcaatcatatgtatgtatacacacacacacacccacacacacagacggtgttgtcagt

SEQ ID NO: 194197 - DNA, 328 bp, Homo sapiens
tcataagtgtcacttactattcacattacacattaaaaggacatctcctaaattaaatcttgtctttgataaaaaggcagaaaatcatracccaaggctcatttataactgcagaaatgttcaagatagaccaaggcttgctatgtttaggaactgacaagtacaggtctttataatctaccattttgcctcatttgataccaggtgaccttcataatgcaggcaatagagaattgcaagatttgtcagagatttcaggtctttggaaagctatgctctttcacaagaacagccatggaaacaggaataaagtcaattcccacttaag

SEQ ID NO: 194198 - DNA, 447 bp, Homo sapiens
tgaagcctctaacaatgcatcttgactggacagatttgacaattaaaatggctggaagaaaataggcttcataagtgtcacttactattcacattacacattaaaaggacatctcctaaattaaatcttgtctttgataaaaaggcagaaaatcatgacccaaggctcatttataactgcagaaatgttcaagatagaccaaggcttgctatgtttaggaactgacaagtacaggtctttataatctaccattttgcctcatttgataccaggtgaccttcataatgcaggcaatagagaattgcaagatttgtcagagatttcaggtctttggaaagctrtgctctttcacaagaacagccatggaaacaggaataaagtcaattcccacttaaggtaatcagaatttacaaatattccttttttcattgaaatctcaataggcac

SEQ ID NO: 194199 - DNA, 447 bp, Homo sapiens
tgaagcctctaacaatgcatcttgactggacagatttgacaattaaaatggctggaagaaaataggcttcataagtgtcacttactattcacattacacattaaaaggacatctcctaaattaaatcttgtctttgataaaaaggcagaaaatcatgacccaaggctcatttataactgcagaaatgttcaagatagaccaaggcttgctatgtttaggaactgacaagtacaggtctttataatctaccattttgcctcatttgataccaggtgaccttcataatgcaggcaatagagaattgcaagatttgtcagagatttcaggtctttggaaagctatgctctttcacaagaacagccatggaaacaggaakaaagtcaattcccacttaaggtaatcagaatttacaaatattccttttttcattgaaatctcaataggcac

SEQ ID NO: 194200 - DNA, 395 bp, Homo sapiens
agattacatttccttccagatatttcatttagtatctccacagatcactaacttcctgaatagcattcttgtgtctccactgcctcacatttgatttcaggtcattccatcaattgtcaaagacgcatccaacattaactttccaactactggtttggattgtgtcaacattgtcattctgggccacaacaacacaaaaggctaactcagtgaggtaacatagacactgatcagtgagattttgctgatggrtggtaccattttttaccaagatcaagggtattcataccttcaggcatctagataacattgaaaagggcaggttcatagataaaaagggaaagaggaagggtttttgcactatacatgagctaccgtgtctcctgtttaacctg

SEQ ID NO: 194201 - DNA, 395 bp, Homo sapiens
agattacatttccttccagatatttcatttagtatctccacagatcactaacttcctgaatagcattcttgtgtctccactgcctcacatttgatttcaggtcattccatcaattgtcaaagacgcatccaacattaactttccaactactggtttggattgtgtcaacattgtcattctgggccacaacaacacaaaaggctaactcagtgaggtaacatagacactgatcagtgagattttgctgatggatggtacsattttttaccaagatcaagggtattcataccttcaggcatctagataacattgaaaagggcaggttcatagataaaaagggaaagaggaagggtttttgcactatacatgagctaccgtgtctcctgtttaacctg

SEQ ID NO: 194202 - DNA, 395 bp, Homo sapiens
agattacatttccttccagatatttcatttagtatctccacagatcactaacttcctgaatagcattcttgtgtctccactgcctcacatttgatttcaggtcattccatcaattgtcaaagacgcatccaacattaactttccaactactggtttggattgtgtcaacattgtcattctgggccacaacaacacaaaaggctaactcagtgaggtaacatagacactgatcagtgagattttgctgatggatggtaccattttttaccaagatcaagggtattcataccttcaggcatctagayaacattgaaaagggcaggttcatagataaaaagggaaagaggaagggtttttgcactatacatgagctaccgtgtctcctgtttaacctg

SEQ ID NO: 194203 - DNA, 395 bp, Homo sapiens
agattacatttccttccagatatttcatttagtatctccacagatcactaacttcctgaatagcattcttgtgtctccactgcctcacatttgatttcaggtcattccatcaattgtcaaagacgcatccaacattaactttccaactactggtttggattgtgtcaacattgtcattctgggccacaacaacacaaaaggctaactcagtgaggtaacatagacactgatcagtgagattttgctgatggatggtaccattttttaccaagatcaagggtattcataccttcaggcatctagataacattgaaaagggcaggttcatagataaaaarggaaagaggaagggtttttgcactatacatgagctaccgtgtctcctgtttaacctg

SEQ ID NO: 194204 - DNA, 557 bp, Homo sapiens
ttgtataaacttgcttgatgagcaactgttgtccactggtaccttcactgtacaatccacacacaacaaaacttcacaactggacacctaaatttgcactttgtttggtaaagttgaatgaaaaatgttgtcttttaagcttatgctctcttatgaaagctgttattagattaattttactccargatatgccagttaggaaataacttccaatttaatttcaccagctccctgtgggtagactaattactcacacatcacacttactctggtggtgaaatgcctcaaaagaaggtctccagagtgttgctctacctagaaggacaagaatgaagagacataaaaatcattcattaagaaggaagaagattttccttgcctagattttcacttgtaggatccaattaattttatcacttaatattttgtcctggtgggcattcactttacaaatttgtaaggtcagtagaaatggaaacttttggaaatcaaactgtaaatgttctgtagacgttgacagaaatagctatttggagctgtgcttttgccaactagac

SEQ ID NO: 194205 - DNA, 557 bp, Homo sapiens
ttgtataaacttgcttgatgagcaactgttgtccactggtaccttcactgtacaatccacacacaacaaaacttcacaactggacacctaaatttgcactttgtttggtaaagttgaatgaaaaatgttgtcttttaagcttatgctctcttatgaaagctgttattagattaattttactccaggatatgccagttaggaaataacttccaatttaatttcaccagctccctgtgggtrgactaattactcacacatcacacttactctggtggtgaaatgcctcaaaagaaggtctccagagtgttgctctacctagaaggacaagaatgaagagacataaaaatcattcattaagaaggaagaagattttccttgcctagattttcacttgtaggatccaattaattttatcacttaatattttgtcctggtgggcattcactttacaaatttgtaaggtcagtagaaatggaaacttttggaaatcaaactgtaaatgttctgtagacgttgacagaaatagctatttggagctgtgcttttgccaactagac

SEQ ID NO: 194206 - DNA, 194 bp, Homo sapiens
gtgttgctctacctagaaggacaagaatgaagagacataaaaatcattcattaagaaggaagaagattttccttgcctagattttcacttgtaggatccaattaattttatcacttaatattttgtcctggtgggcattcaytttacaaatttgtaaggtcagtagaaatggaaacttttggaaatcaaactgt

SEQ ID NO: 194207 - DNA, 552 bp, Homo sapiens
ctctccctcctgaccccaacaggccccagtgtttgttgttcccctccccgagtccatgtgctcttatcgttcagctcccacttataagtgagaagatgcagtgtttggttttttcttcctgcattagtttgctgaagatatcagcttygggttcatccatatccctgcaaagagcatgatctcattcatttttatggctccatagtattccatggtgtatatataccacattttctttatcccattatcactgataatgtccatctgtgttgattccatgtctttactattgtgaatagtgctgcagtgaacatgcaaatgcatgtatctttataatagaataatttatattccaacgtatggtaattttaaatcagttttggtattaaaaatcatgcattttggaaaatattgataatggaaaaatccaaattctgccaaaatatgttgagaaaatagagggtaaatatatcttttcaaactttaaatgcctcaggctcttagttaatcttccccagatctggaaagacctagaaggggagattgggctac

SEQ ID NO: 194208 - DNA, 440 bp, Homo sapiens
gaaatttcatttaatgatatagctttgaaaataatgaaaaacagtagaaactttctattttttatgaagcagaattgttgaattttcagtttcatttatttaatgttacaagatgacaaacawatttctttaattccttcttgttatttttgtctaacatcaaccaaagccatttctttcatttgaaggtgaaaactgctcatcaaaatccagtttaagctgagaaacaaagaactaaattttgcatgagagattatacactgcataagtataaaacaggaccagaaacaatggtggattcacaatttttaaaaagacaaaagcaggttatcatcaaatcaattgttaccaacacaccaattccacctctaggccagaaaattagccacttacccacaggaaaacaatgattgaagacaaagttcaccagtgaaagttgg

SEQ ID NO: 194209 - DNA, 440 bp, Homo sapiens
gaaatttcatttaatgatatagctttgaaaataatgaaaaacagtagaaactttctattttttatgaagcagaattgttgaattttcagtttcatttatttaatgttacaagatgacaaacatatttctttaattccttcttgttatttttgtctaacatcaaccaaagccatttctttcatttgaaggtgaaaactgctcatcaaaatccagtttaagctgagaaacaaagaactaaattttgcatgagagattatacactgcataagtataaaayaggaccagaaacaatggtggattcacaatttttaaaaagacaaaagcaggttatcatcaaatcaattgttaccaacacaccaattccacctctaggccagaaaattagccacttacccacaggaaaacaatgattgaagacaaagttcaccagtgaaagttgg

SEQ ID NO: 194210 - DNA, 440 bp, Homo sapiens
gaaatttcatttaatgatatagctttgaaaataatgaaaaacagtagaaactttctattttttatgaagcagaattgttgaattttcagtttcatttatttaatgttacaagatgacaaacatatttctttaattccttcttgttatttttgtctaacatcaaccaaagccatttctttcatttgaaggtgaaaactgctcatcaaaatccagtttaagctgagaaacaaagaactaaattttgcatgagagattatacactgcataagtataaaacaggaccagaaacaatggtggattcacaatttttaaaaagacaaaagcaggttatcatyaaatcaattgttaccaacacaccaattccacctctaggccagaaaattagccacttacccacaggaaaacaatgattgaagacaaagttcaccagtgaaagttgg

SEQ ID NO: 194211 - DNA, 440 bp, Homo sapiens
gaaatttcatttaatgatatagctttgaaaataatgaaaaacagtagaaactttctattttttatgaagcagaattgttgaattttcagtttcatttatttaatgttacaagatgacaaacatatttctttaattccttcttgttatttttgtctaacatcaaccaaagccatttctttcatttgaaggtgaaaactgctcatcaaaatccagtttaagctgagaaacaaagaactaaattttgcatgagagattatacactgcataagtataaaacaggaccagaaacaatggtggattcacaatttttaaaaagacaaaagcaggttatcatcaaatcaattsttaccaacacaccaattccacctctaggccagaaaattagccacttacccacaggaaaacaatgattgaagacaaagttcaccagtgaaagttgg

SEQ ID NO: 194212 - DNA, 552 bp, Homo sapiens
ctctccctcctgaccccaacaggccccagtgtttgttgttcccctccccgagtccatgtgctcttatcgttcagctcccacttataagtgagaagatgcagtgtttggttttttcttcctgcattagtttgctgaagatatcagctttgggttcatccatatccctgcaaagagcatgatctcattcatttttatggctccatagtattccatggtgtatatataccacattttctttatcccattatcactgataatgtccatctgtgttgattccatgtctttactattgtgaatagtgctgcagtgaacatgcaaatgcatgtatctttataatagaataatttatattccaacgtatggtamttttaaatcagttttggtattaaaaatcatgcattttggaaaatattgataatggaaaaatccaaattctgccaaaatatgttgagaaaatagagggtaaatatatcttttcaaactttaaatgcctcaggctcttagttaatcttccccagatctggaaagacctagaaggggagattgggctac

SEQ ID NO: 194213 - DNA, 517 bp, Homo sapiens
ttgaattacaaaatgtggtagtagctcaggtctaactcaaatgcagggaaaaaaaactattaactctaaaaaaaattaaatacacatttgatggtaatgagaaacagaaaacaggcagaaatagtagaatattcaaccactgatgaagtatttgaccactgaataaagaaaattgcaatgatttaaatttgcatcaatgtaacttcacacctgatgacacttcccagtctgtgcaaaattagatgtctaagagtaaagccgtgagttttactagcctgaggaataagagtacagagttccaggctgacagaaaagaagaaytgggaaatttgaatgacatgggagaaatctcacacaactgaaagtcacagaggagaatgtcacagagtaaaaatctaaaatcagcacttaaacttcattcagatatatgatggctgctacatttcacattcataaaagagactccatagaatccagcagaaaacaacagctaaattgctagtacagagcagagatt

SEQ ID NO: 194214 - DNA, 552 bp, Homo sapiens
ctctccctcctgaccccaacaggccccagtgtttgttgttcccctccccgagtccatgtgctcttatcgttcagctcccacttataagtgagaagatgcagtgtttggttttttcttcctgcattagtttgctgaagatatcagctttgggttcatccatatccctgcaaagagcatgatctcattcatttttatggctccatagtattccatggtgtatatataccacattttctttatcccattatcactgataatgtccatctgtgttgattccatgtctttactattgtgaatagtgctgcagtgaacatgcaaatgcatgtatctttataatagaataatttatattccaacgtatggtaattttaaatcagttttggtattaaaaatcatgcattttggaaaatattgataatggaaaaatccaaattctgccaaaatatgttgagaaaatagagrgtaaatatatcttttcaaactttaaatgcctcaggctcttagttaatcttccccagatctggaaagacctagaaggggagattgggctac

SEQ ID NO: 194215 - DNA, 387 bp, Homo sapiens
aatacctgcacataaagacataaaactaaagtaataaaaaaataagcaaactccacatccaaagagttttgctggtgaattctttcaaacgttttaaaaaaataaaatttttaaattatttcagaagaagggggaaattccaaacttgttttatgagtcagaatcctgatagcaaaactacaaaacccaggaatgcaamattgatttcaacttaaggggctatcaccattctaatctgtgattctaatgaatttggctatcttagatactttatacaagtggaatcatacagtttgtccttctgtgactgatttactttacttagcattaatgttctctaggttcatccatgttgcatattgccagattttcttgttttaaagctga

SEQ ID NO: 194216 - DNA, 387 bp, Homo sapiens
aatacctgcacataaagacataaaactaaagtaataaaaaaataagcaaactccacatccaaagagttttgctggtgaattctttcaaacgttttaaaaaaataaaatttttaaattatttcagaagaagggggaaattccaaacttgttttatgagtcagaatcctgatagcaaaactacaaaacccaggaatgcaaaattgatttcaacttaargggctatcaccattctaatctgtgattctaatgaatttggctatcttagatactttatacaagtggaatcatacagtttgtccttctgtgactgatttactttacttagcattaatgttctctaggttcatccatgttgcatattgccagattttcttgttttaaagctga

SEQ ID NO: 194217 - DNA, 387 bp, Homo sapiens
aatacctgcacataaagacataaaactaaagtaataaaaaaataagcaaactccacatccaaagagttttgctggtgaattctttcaaacgttttaaaaaaataaaatttttaaattatttcagaagaagggggaaattccaaacttgttttatgagtcagaatcctgatagcaaaactacaaaacccaggaatgcaaaattgatttcaacttaaggrgctatcaccattctaatctgtgattctaatgaatttggctatcttagatactttatacaagtggaatcatacagtttgtccttctgtgactgatttactttacttagcattaatgttctctaggttcatccatgttgcatattgccagattttcttgttttaaagctga

SEQ ID NO: 194218 - DNA, 387 bp, Homo sapiens
aatacctgcacataaagacataaaactaaagtaataaaaaaataagcaaactccacatccaaagagttttgctggtgaattctttcaaacgttttaaaaaaataaaatttttaaattatttcagaagaagggggaaattccaaacttgttttatgagtcagaatcctgatagcaaaactacaaaacccaggaatgcaaaattgatttcaacttaaggggctatcaccattctaatctgtgattctaatgaatttggctatcttagatacyttatacaagtggaatcatacagtttgtccttctgtgactgatttactttacttagcattaatgttctctaggttcatccatgttgcatattgccagattttcttgttttaaagctga

SEQ ID NO: 194219 - DNA, 523 bp, Homo sapiens
atgctgcaatgagcctgagaatcatcccaatctcaattctttcagataaataacctgaagtgagattgctagatcatatggtagttctactttcttaattttttttgaggaacmactgtactgttttccatagaggctgcacagttttactttcccagaaacactgtacaagtgttccaatttctccccattgttaacactcgttatctttttcttttaataagaccattctaacaggcttgaggcaatatctctttgtggttttgatttgcatttccctgatgattagtgatgctgagcatttttttcatgtacctgttggtaatttgtatattttctttggagaaatatctattgctgattaaaaaaaaaaaaaaaactctcagcaagctagaaaaagaaattttctcgaagtggtggaaagcaaccacaacaaaacatataaacaatattatatttaattgtgaaagcgtaaatgtttaaaccacatagattaggacaagaaaaggatgtgtgtgttcat

SEQ ID NO: 194220 - DNA, 523 bp, Homo sapiens
atgctgcaatgagcctgagaatcatcccaatctcaattctttcagataaataacctgaagtgagattgctagatcatatggtagttctactttcttaattttttttgaggaaccactgtactgttttccatagaggctgcacagttttactttcccagaaacactgtacaagtgttccaatttctccccattgttaacactcgttatctttttsttttaataagaccattctaacaggcttgaggcaatatctctttgtggttttgatttgcatttccctgatgattagtgatgctgagcatttttttcatgtacctgttggtaatttgtatattttctttggagaaatatctattgctgattaaaaaaaaaaaaaaaactctcagcaagctagaaaaagaaattttctcgaagtggtggaaagcaaccacaacaaaacatataaacaatattatatttaattgtgaaagcgtaaatgtttaaaccacatagattaggacaagaaaaggatgtgtgtgttcat

SEQ ID NO: 194221 - DNA, 523 bp, Homo sapiens
atgctgcaatgagcctgagaatcatcccaatctcaattctttcagataaataacctgaagtgagattgctagatcatatggtagttctactttcttaattttttttgaggaaccactgtactgttttccatagaggctgcacagttttactttcccagaaacactgtacaagtgttccaatttctccccattgttaacactcgttatctttttcttttaataagaccattctaacaggcttgaggcaatatctctttgtggttttgatttgcatttccctgatgattagtgatgctgagcatttttttcatgtacctgttggtaatttgkatattttctttggagaaatatctattgctgattaaaaaaaaaaaaaaaactctcagcaagctagaaaaagaaattttctcgaagtggtggaaagcaaccacaacaaaacatataaacaatattatatttaattgtgaaagcgtaaatgtttaaaccacatagattaggacaagaaaaggatgtgtgtgttcat

SEQ ID NO: 194222 - DNA, 523 bp, Homo sapiens
atgctgcaatgagcctgagaatcatcccaatctcaattctttcagataaataacctgaagtgagattgctagatcatatggtagttctactttcttaattttttttgaggaaccactgtactgttttccatagaggctgcacagttttactttcccagaaacactgtacaagtgttccaatttctccccattgttaacactcgttatctttttcttttaataagaccattctaacaggcttgaggcaatatctctttgtggttttgatttgcatttccctgatgattagtgatgctgagcatttttttcatgtacctgttggtaatttgtatattttctttggagaaatatctattgctgattaaaaaaaaaaaaaaaactctcagcaagctagaaaaagaaattttctcgaagtggtggaaagcawccacaacaaaacatataaacaatattatatttaattgtgaaagcgtaaatgtttaaaccacatagattaggacaagaaaaggatgtgtgtgttcat

SEQ ID NO: 194223 - DNA, 414 bp, Homo sapiens
gaccattctaacaggcttgaggcaatatctctttgtggttttgatttgcatttccctgatgattagtgatgctgagcatttttttcatgtacctgttggtaatttgtatattttctttggagaaatatctattgctgattaaaaaaaaaaaaaaaactctcagcaagctagaaaaagaaattttctcgaagtggtggaaagcaaccacaacaaaacatataaacaatattatatttaattgtgaaagcgtaaatgtttaaaccacatagattaggacaagaaaaggatgtgtgtgttcatcayctctattcaacattttactggtgatcctagattgagtataaatatttaggggataactattgtcactgaagcccaaatcttggtcatcctcaggaaaaaaaaaaaagttga

SEQ ID NO: 194224 - DNA, 414 bp, Homo sapiens
gaccattctaacaggcttgaggcaatatctctttgtggttttgatttgcatttccctgatgattagtgatgctgagcatttttttcatgtacctgttggtaatttgtatattttctttggagaaatatctattgctgattaaaaaaaaaaaaaaaactctcagcaagctagaaaaagaaattttctcgaagtggtggaaagcaaccacaacaaaacatataaacaatattatatttaattgtgaaagcgtaaatgtttaaaccacatagattaggacaagaaaaggatgtgtgtgttcatcatctctattcaamattttactggtgatcctagattgagtataaatatttaggggataactattgtcactgaagcccaaatcttggtcatcctcaggaaaaaaaaaaaagttga

SEQ ID NO: 194225 - DNA, 536 bp, Homo sapiens
ataatctaaatctacttgctaatttaatttctctaaaattacagcttgtatcaactctagaatttattgggcacctcctaggacataaacactggaatttggtgagagacatcaaataggaaagaacctggctctgacataaattcaacacacggagggggacacacgttatgagactgacctggcctcttcatctcataaaaggggttcttgttgctggtaacacagattaaaactatttcaattacattcaaggtaaaaagattagcaatgataggtaagatraaaaaatcaccccgcaggaagacaaaagtctcacaaaaggatatttaaactagccaacactttgaaattcaggcagagatcgtgctttctgggtgaactaaagtagcaagaacaaagtacaggctccaattctaggaaaaatggaccctaataaggtttacaatccagaaactcaagatatccagacagaaggatgcagtctccgctttcaaggcagtagcagtacctggattactatgccaatccccaac

SEQ ID NO: 194226 - DNA, 433 bp, Homo sapiens
  misc_feature (1)...(433): n = A,T,C or G
nnntttgtagatctcttccccccacccctgccccagcctaaccagtgttttcttacttttttgtgtacaggctacatcactggtctttcatttgtggctaaataaatgttgtgttagaagagtaaagagttcccagttacatgggatctatagttctacaaaatgaatgtatacataatccatgtaaataytccacttattttaaaacaattttttaatttttaaattaaatttaatttgtgcatgtgtgtgagaccagagatggcggcggtgaggggcggtggtctcaccatgttgcccaggctggtcttgaactccccttgaagtgcccccctcctcacctggcccccctcaccttgcctcctccccctcactcctatgccagtccctgccattccctaccccctctgctgaccgcaagactcaacaagtg

SEQ ID NO: 194227 - DNA, 433 bp, Homo sapiens
  misc_feature (1)...(433): n = A,T,C or G
nnntttgtagatctcttccccccacccctgccccagcctaaccagtgttttcttacttttttgtgtacaggctacatcactggtctttcatttgtggctaaataaatgttgtgttagaagagtaaagagttcccagttacatgggatctatagttctacaaaatgaatgtatacataatccatgtaaatattycacttattttaaaacaattttttaatttttaaattaaatttaatttgtgcatgtgtgtgagaccagagatggcggcggtgaggggcggtggtctcaccatgttgcccaggctggtcttgaactccccttgaagtgcccccctcctcacctggcccccctcaccttgcctcctccccctcactcctatgccagtccctgccattccctaccccctctgctgaccgcaagactcaacaagtg

SEQ ID NO: 194228 - DNA, 269 bp, Homo sapiens
acacaggaggccaagtacacaaaaaagcaaaagaactagcatgactttttcaatggatgtctattttacagggctggcttcagattattgttatagctttaaataaaaggaccgttttgtcatctcggcccatggcctacattatttctttactgtccattgccctgggcgcttgactaataatttaacagcaatttttttttaaaattttaaatcatgattcatygcattgctgtaagagtaattagaggtaaattagggcttgaaac

SEQ ID NO: 194229 - DNA, 555 bp, Homo sapiens
ggtgatagttttaattggctttttcctactagaaaaagtaagtgtactttacatgtctctttgttctccctctttccccttcaatttagtggttagcgtgtatttactatatcaggcttaatattcactaagcagtgttaagaagacttaggtaaatgattccctgatgaacacacttgatttccaaagcactttcctaacccatttttaattggaatagagtcaaaggtagatggcttattattagtcatctcatttaaacctcatggaattttcctgctaaatctcaaagtaaacaatttgttataggctgttttgtcaagtgcatggaagggacagcataagacatgtggtacttcatttcaaaattgcttgagatggttttcattataatcatacattatttgcttctggttttccrgaaaagccagctaaacctgtggttcatttagatataaatgaaatatcctcaaaggattgctcaaagtgacttatgcaacttgaatatatatttttttctgtagggtgtttattccaaattatctggccatttgt

SEQ ID NO: 194230 - DNA, 555 bp, Homo sapiens
ggtgatagttttaattggctttttcctactagaaaaagtaagtgtactttacatgtctctttgttctccctctttccccttcaatttagtggttagcgtgtatttactatatcaggcttaatattcactaagcagtgttaagaagacttaggtaaatgattccctgatgaacacacttgatttccaaagcactttcctaacccatttttaattggaatagagtcaaaggtagatggcttattattagtcatctcatttaaacctcatggaattttcctgctaaatctcaaagtaaacaatttgttataggctgttttgtcaagtgcatggaagggacagcataagacatgtggtacttcatttcaaaattgcttgagatggttttcattataatcatacattatttgcttctggttttccagaaaagccagctaaacctgtggttcatttagatataaatgaaatatcytcaaaggattgctcaaagtgacttatgcaacttgaatatatatttttttctgtagggtgtttattccaaattatctggccatttgt

SEQ ID NO: 194231 - DNA, 527 bp, Homo sapiens
cgtttctggaatcaagatttaatgtggacttggattggatattgaatatttttkatttgtctacttttctctccatagggagcttatagcttcattgcactgtgtgtgacatttgggtcctgtttggcagcaatgactgcctttctgtttagtgtctgtgtgctatgaagattgcacacaggggtccagatgcatcctgttttgagaatgttaatggatacaccagctgctgctttggatttcacccattggcggtttctataaaaactttagacacagtgagccactcttctcacggaatggtggaaaccctcccaattccaatttcctaaacaccagccaagggccagccttgcatgcaggcctttctaaggatggcagtctcttgcctgttatatgaaatcttttctgcacactttgtataaccccaacttaatttttggtgttgttttaaaatttcattttaataacataatattataagataaggtaacttggtactaatttctgttgtatgatccatctta

SEQ ID NO: 194232 - DNA, 527 bp, Homo sapiens
cgtttctggaatcaagatttaatgtggacttggattggatattgaatatttttgatttgtctacttttctctccatagggagcttatagcttcattgcactgtgtgtgrcatttgggtcctgtttggcagcaatgactgcctttctgtttagtgtctgtgtgctatgaagattgcacacaggggtccagatgcatcctgttttgagaatgttaatggatacaccagctgctgctttggatttcacccattggcggtttctataaaaactttagacacagtgagccactcttctcacggaatggtggaaaccctcccaattccaatttcctaaacaccagccaagggccagccttgcatgcaggcctttctaaggatggcagtctcttgcctgttatatgaaatcttttctgcacactttgtataaccccaacttaatttttggtgttgttttaaaatttcattttaataacataatattataagataaggtaacttggtactaatttctgttgtatgatccatctta

SEQ ID NO: 194233 - DNA, 527 bp, Homo sapiens
cgtttctggaatcaagatttaatgtggacttggattggatattgaatatttttgatttgtctacttttctctccatagggagcttatagcttcattgcactgtgtgtgacatttgggtcctgtttggcagcaatgactgcctttctrtttagtgtctgtgtgctatgaagattgcacacaggggtccagatgcatcctgttttgagaatgttaatggatacaccagctgctgctttggatttcacccattggcggtttctataaaaactttagacacagtgagccactcttctcacggaatggtggaaaccctcccaattccaatttcctaaacaccagccaagggccagccttgcatgcaggcctttctaaggatggcagtctcttgcctgttatatgaaatcttttctgcacactttgtataaccccaacttaatttttggtgttgttttaaaatttcattttaataacataatattataagataaggtaacttggtactaatttctgttgtatgatccatctta

SEQ ID NO: 194234 - DNA, 244 bp, Homo sapiens
agctggcctacagtttgaccatcagcctgcctgccttccaaatcctttctcttgctcctcagcatagattgatagatatctgtgcagyccttggatcaaagtataggtctgaatcagatcaatcagattcattaatttgattaacttctaaattaatgagagtttaaataccttgaactctcatttaagtttattgttagaatgtggttagtcctaataaatttgacgatttcagtggtaacca

SEQ ID NO: 194235 - DNA, 402 bp, Homo sapiens
tcattaatttgattaacttctaaattaatgagagtttaaataccttgaactctcatttaagtttattgttagaatgtggttagtcctaataaatttgacgatttcagtggtaaccagtatcttatttttaccttcaaaggctctagggcagatctgacttagctttggccataggactgtaagttttaccaaagcaagtttaggcaagtcttagagacaaattatttgacttcacagtttggttttccatttargcaagtatttctgcttacttccataatacattttttagtcttgttgctttttccatgacttttatataatcttgtcctcattttttaaaactttcttctctgtttttcttggtgtttcttttgttctattattttttcaaactctgct

SEQ ID NO: 194236 - DNA, 588 bp, Homo sapiens
tagatatctgtgcagcccttggatcaaagtataggtctgaatcagatcaatcagattcattaatttgattaacttctaaattaatgagagtttaaataccttgaactctcatttaagtttattgttagaatgtggttagtcctaataaatttgacgatttcagtggtaaccagtatcttatttttaccttcaaaggctctagggcagatctgacttagctttggccataggactgtaagttttaccaaagcaagtttaggcaagtcttagagacaaattatttgacttcacagtttggttttccatttaggcaagtatttctgcttacttccataatacattttttagtcttgttgctttttccatgacttttatataatcttgtcctcattttttaaaactttcttctctgtttttcttggtgtttcttttgttctattattttttcaaactctgctgcctatgtattccaagtttttctatagacagaatcaagaggacatagaattacagaattttaaggaatcttggaatgaattaaaataccttctagtatttttmtctgcgttgaacattctggtcaagtga

SEQ ID NO: 194237 - DNA, 436 bp, Homo sapiens
tttttctctgcgttgaacattctggtcaagtgattctctagatagagaatgtgaggctcaaagagattacgaagcttttttttagacataggaattggcagaaatgagatttgaactcatggtaaagcccagtactcttgcttctttctatgtcctattggcgtgtgttttaataatacaaacggaagtgagyctgtggatagaatgagaatggaattagctggtgaacccaatggaagtagataagaatggaatgagcaggggaagtccaagtttgaagataaacaacactggattggataggagtacggactcttctacaagagatcaaagtattggggtttatgacaagtttgataaagataaattataaaaatgaaggacacaagatgttgggaattatctacaaaggcacattaaaatagaaggttcaagg

SEQ ID NO: 194238 - DNA, 439 bp, Homo sapiens
gtaatactcatttgacttgcagatacctcaccccgaacccacctactataaygtaaaagccaagaatgcaaaccctttcctcaccccgtgaaggtaaagtcctcagagccaaggagagaaggctcaaggatggtacctgggtgtttccaacactaaccatgcattgtagtttttagtgttcaagtttaagcttcttatgttaaagttaccccagctttaattatattgtaacaagatttatttttgtaatcccatttttggattcttgatttcttggtaaagaaatacagttatttttgtataccaatcttatatagtgttacattccaaaatttgttcatgagtcctaacactttttagtaaatttcttatgattttctaaatgcaagatcatgtcatctgtacataaagataactgtacttcttcctttccaatcta

SEQ ID NO: 194239 - DNA, 436 bp, Homo sapiens
tttttctctgcgttgaacattctggtcaagtgattctctagatagagaatgtgaggctcaaagagattacgaagcttttttttagacataggaattggcagaaatgagatttgaactcatggtaaagcccagtactcttgcttctttctatgtcctattggcgtgtgttttaataatacaaacggaagtgagtctgtggatagaatgagaatggaattagctggtgaacccaatggaagtagataagaatggaatgagcaggggaagtccaagtttgaagataaacaacactggaytggataggagtacggactcttctacaagagatcaaagtattggggtttatgacaagtttgataaagataaattataaaaatgaaggacacaagatgttgggaattatctacaaaggcacattaaaatagaaggttcaagg

SEQ ID NO: 194240 - DNA, 628 bp, Homo sapiens
gggattgctagtttatgtggacctgaataaggtaggacctatagagtgaaaataatrggattttataattgtgaatattttaatctttctgggaaaagtattctcaataagaacatacatctttgctatttgacttctgtacatttagctttcatacatttcaaatattgtgttggttttcctgtaccaatttagggtaaaggaaagcaataggaccttcctaagttggatccatgctgaggaatcaagactaccattttgaagtgatgtagattagtcttttatccagagacagatcatggaaaagagacagtggatctttctaccttgttttaggtcatcagttttattccagtttagggaacaaaatttatgtcatccattaattgaattttaagttcagcttcaggacagataatttgtgagggcacattattgtcaggctctgccaatatattgactgtcactatttgttataaacctcaaggttagttttcattgaatattttatagatttagacaggtggaggcagaaataggtaactaaaatctctttttagaacagaggacatattttaattatatcaagaatcgtaatttaatatatagatcactgacttttccccag

SEQ ID NO: 194241 - DNA, 628 bp, Homo sapiens
gggattgctagtttatgtggacctgaataaggtaggacctatagagtgaaaataataggattttataattgtkaatattttaatctttctgggaaaagtattctcaataagaacatacatctttgctatttgacttctgtacatttagctttcatacatttcaaatattgtgttggttttcctgtaccaatttagggtaaaggaaagcaataggaccttcctaagttggatccatgctgaggaatcaagactaccattttgaagtgatgtagattagtcttttatccagagacagatcatggaaaagagacagtggatctttctaccttgttttaggtcatcagttttattccagtttagggaacaaaatttatgtcatccattaattgaattttaagttcagcttcaggacagataatttgtgagggcacattattgtcaggctctgccaatatattgactgtcactatttgttataaacctcaaggttagttttcattgaatattttatagatttagacaggtggaggcagaaataggtaactaaaatctctttttagaacagaggacatattttaattatatcaagaatcgtaatttaatatatagatcactgacttttccccag

SEQ ID NO: 194242 - DNA, 628 bp, Homo sapiens
gggattgctagtttatgtggacctgaataaggtaggacctatagagtgaaaataataggattttataattgtgaatattttaatctttctgggaaaagtattctcaataagaacatacatctttgctatttgacttctgtacatttagctttcatacatttcaaatattgtgttggttttcctgtaccaatttagggtaaaggaaakcaataggaccttcctaagttggatccatgctgaggaatcaagactaccattttgaagtgatgtagattagtcttttatccagagacagatcatggaaaagagacagtggatctttctaccttgttttaggtcatcagttttattccagtttagggaacaaaatttatgtcatccattaattgaattttaagttcagcttcaggacagataatttgtgagggcacattattgtcaggctctgccaatatattgactgtcactatttgttataaacctcaaggttagttttcattgaatattttatagatttagacaggtggaggcagaaataggtaactaaaatctctttttagaacagaggacatattttaattatatcaagaatcgtaatttaatatatagatcactgacttttccccag

SEQ ID NO: 194243 - DNA, 628 bp, Homo sapiens
gggattgctagtttatgtggacctgaataaggtaggacctatagagtgaaaataataggattttataattgtgaatattttaatctttctgggaaaagtattctcaataagaacatacatctttgctatttgacttctgtacatttagctttcatacatttcaaatattgtgttggttttcctgtaccaatttagggtaaaggaaagcaataggaccttcctaagttggatccatgctgaggaatcaagactaccattttgaagtgatgtagattagtsttttatccagagacagatcatggaaaagagacagtggatctttctaccttgttttaggtcatcagttttattccagtttagggaacaaaatttatgtcatccattaattgaattttaagttcagcttcaggacagataatttgtgagggcacattattgtcaggctctgccaatatattgactgtcactatttgttataaacctcaaggttagttttcattgaatattttatagatttagacaggtggaggcagaaataggtaactaaaatctctttttagaacagaggacatattttaattatatcaagaatcgtaatttaatatatagatcactgacttttccccag

SEQ ID NO: 194244 - DNA, 601 bp, Homo sapiens
tagtcttttatccagagacagatcatggaaaagagacagtggatctttctaccttgttttaggtcatcagttttattccagtttagggaacaaaatttatgtcatccattaattgaattttaagttcagcttcaggacagataatttgtgagggcacattattgtcaggctctgccaatatattgactgtcactatttgttataaacctcaaggttagttttcattgaatattttatagatttagacaggtggaggcagaaataggtaactaaaatctmtttttagaacagaggacatattttaattatatcaagaatcgtaatttaatatatagatcactgacttttccccagattatgttttcctttttttgagggggaagctggatataaactggcagttaaaaaaattgtaaagaaatcaacttgctcattttcattgtgtatttttgctctcaagcattttgcatgaactgtgtgtggattcattgcctacattggatgatgaagacttgagtgttgctactaaggtaaagtggtctcttgtaaaattaatcttctcactctgggtgtagttttgcatagtatttacttttcaaat

SEQ ID NO: 194245 - DNA, 601 bp, Homo sapiens
tagtcttttatccagagacagatcatggaaaagagacagtggatctttctaccttgttttaggtcatcagttttattccagtttagggaacaaaatttatgtcatccattaattgaattttaagttcagcttcaggacagataatttgtgagggcacattattgtcaggctctgccaatatattgactgtcactatttgttataaacctcaaggttagttttcattgaatattttatagatttagacaggtggaggcagaaataggtaactaaaatctctttttagaacagaggacatattttaattatatcaagaatcrtaatttaatatatagatcactgacttttccccagattatgttttcctttttttgagggggaagctggatataaactggcagttaaaaaaattgtaaagaaatcaacttgctcattttcattgtgtatttttgctctcaagcattttgcatgaactgtgtgtggattcattgcctacattggatgatgaagacttgagtgttgctactaaggtaaagtggtctcttgtaaaattaatcttctcactctgggtgtagttttgcatagtatttacttttcaaat

SEQ ID NO: 194246 - DNA, 601 bp, Homo sapiens
tagtcttttatccagagacagatcatggaaaagagacagtggatctttctaccttgttttaggtcatcagttttattccagtttagggaacaaaatttatgtcatccattaattgaattttaagttcagcttcaggacagataatttgtgagggcacattattgtcaggctctgccaatatattgactgtcactatttgttataaacctcaaggttagttttcattgaatattttatagatttagacaggtggaggcagaaataggtaactaaaatctctttttagaacagaggacatattttaattatatcaagaatcgtaatttaatatatagatcactgacytttccccagattatgttttcctttttttgagggggaagctggatataaactggcagttaaaaaaattgtaaagaaatcaacttgctcattttcattgtgtatttttgctctcaagcattttgcatgaactgtgtgtggattcattgcctacattggatgatgaagacttgagtgttgctactaaggtaaagtggtctcttgtaaaattaatcttctcactctgggtgtagttttgcatagtatttacttttcaaat

SEQ ID NO: 194247 - DNA, 601 bp, Homo sapiens
tagtcttttatccagagacagatcatggaaaagagacagtggatctttctaccttgttttaggtcatcagttttattccagtttagggaacaaaatttatgtcatccattaattgaattttaagttcagcttcaggacagataatttgtgagggcacattattgtcaggctctgccaatatattgactgtcactatttgttataaacctcaaggttagttttcattgaatattttatagatttagacaggtggaggcagaaataggtaactaaaatctctttttagaacagaggacatattttaattatatcaagaatcgtaatttaatatatagatcactgacttttccccagattatgttttcctttttttgagggggaagctggatataaactggcagttaaaaaaattgtaaagaaatcaacttgctcattttcattgtgtatttttgctctcaagcattttgcatgaactgtgtgtggattcattgcctacattggatgatgaagwcttgagtgttgctactaaggtaaagtggtctcttgtaaaattaatcttctcactctgggtgtagttttgcatagtatttacttttcaaat

SEQ ID NO: 194248 - DNA, 495 bp, Homo sapiens
atcctcctggtaatttttagtggcagaaatgttcagcacatagcatatagcttttgttcttggaaacttatcattttggtgtcatatagtttttaggagagattgtttctctacttatattattggttctgtagtgagactaaaaaagtattaaaarttgtagaaaaatagctgagtttggtggtgtacacctgtagtccctgctacttgggagtttgagacagtaagattgcttgaacacaggagtttgagaacagcctgggtaacattgtatctgatttaaaaatataaattgtggaaatgtagaaatttaaatttatgttctcaagatttgtattgcaaagggatttttatgtgatttatgagttgtccatgaagagtttatataaaacacttcatctaattgaataacatgtattttcctgcaaataaccagttctagaagcagagactcttaataccaatatggtaagtctttatcatcataattttgtc

SEQ ID NO: 194249 - DNA, 495 bp, Homo sapiens
atcctcctggtaatttttagtggcagaaatgttcagcacatagcatatagcttttgttcttggaaacttatcattttggtgtcatatagtttttaggagagattgtttctctacttatattattggttctgtagtgagactaaaaaagtattaaaagttgtagaaaaatagctgagtttggtggtgtacacctgtagtccctgctacttgggagtttgagacagtaagattgcttgaacacaggagtttgagaacarcctgggtaacattgtatctgatttaaaaatataaattgtggaaatgtagaaatttaaatttatgttctcaagatttgtattgcaaagggatttttatgtgatttatgagttgtccatgaagagtttatataaaacacttcatctaattgaataacatgtattttcctgcaaataaccagttctagaagcagagactcttaataccaatatggtaagtctttatcatcataattttgtc

SEQ ID NO: 194250 - DNA, 455 bp, Homo sapiens
taggtcacccataagaacacaagctgttcaatgtaggcaggacacctcttgtgctatgctgcctagatgttcatttcaccagatacatcctaaatcatcacccccaagttcatagtttcacagatctccagggcagggtccccatgcagccagcttctttgctaaggccaatcaaatgtaatcttgtctcttgttcataggaaattcctcattttcatctgagaacttttaggtctggacttcagtgtttacacttttgtcagccttcctatcacaagtatttaacaattctctatagtggtccaatattttcctcatcttgctgtcttctaagytttcccaactcttctgacctctgtcttttacccacttctgaacctggttctacattgtcagctatctttatcacagcctggcaatgtggtaaaacagaaaagtccattttcagggggaaa

SEQ ID NO: 194251 - DNA, 617 bp, Homo sapiens
tctttgctaaggccaatcaaatgtaatcttgtctcttgttcataggaaattcctcattttcatctgagaacttttaggtctggacttcagtgtttacacttttgtcagccttcctatcacaagtatttaacaattctctatagtggtccaatattttcctcatcttgctgtcttctaagctttyccaactcttctgacctctgtcttttacccacttctgaacctggttctacattgtcagctatctttatcacagcctggcaatgtggtaaaacagaaaagtccattttcagggggaaagttcatgaaggattcagatatttgcatgaaaagaagctgagtgctggttgccaagacaaaggggaaagggccttgaaggcatttcatggctccacttcatagtactaattttctgcatgatcataaagaaaagaggtttaattggctcacggtccagcaggctgtaaaggaagcacagtggcttctgcttctgggaggatcagatcaggaagccttccaatcataccagaaggccaaggggcaatgagatgtttcaaatggcaggggtagaagaaagactgagagaggaaagaggtgccaccccctgttatataacc

SEQ ID NO: 194252 - DNA, 429 bp, Homo sapiens
tcttgtctcttgttcataggaaattcctcattttcatctgagaacttttaggtctggacttcagtgtttacacttttgtcagccttcctatcacaagtatttaacaattctctatagtggtccaatattttcctcatcttgctgtcttctaagctttcccaactcttctgacctctgtcttttacccacttctgaacctggttctacattgtcagctatctttatcacagcctggcaatgtggtaaaacagaaaagtccattttcaggrggaaagttcatgaaggattcagatatttgcatgaaaagaagctgagtgctggttgccaagacaaaggggaaagggccttgaaggcatttcatggctccacttcatagtactaattttctgcatgatcataaagaaaagaggtttaattggctcacggtcc

SEQ ID NO: 194253 - DNA, 559 bp, Homo sapiens
ctattacatttaccaatgcagatcaatcatgtcaacaatagaaatggcagttttggcatttggttattcaatgaaactatatttgtagctttttatttacaatgtttcaaggtatgggcgaagatatgaaaatttcattatgttctattgtatttgatatgtaaatgttctggcacaattatatacattttrgattatatattgacagtaaattatttctcctttgttagcttcagaacaaaattaatattttcaacaacttcaatgcatacattgtgttctcactaatagtttagaatagtgaaggggtctttgaagaatttcttatgaagtagaggcattgggtcagacagagccgaaaaccattgacttagattaatcactatttatcctagggctgaagagggccaattgaagacacaaatgtccaatccctctataaccttggagatctatgaaccagagaaatagagactggttcttaaggaggtaataagtgtgccttctatggtttataataatatgcattgtcttaacaatcgaatacttaaaagttaat

SEQ ID NO: 194254 - DNA, 310 bp, Homo sapiens
gtccctgtgcttggactcataaagcagaaatgcttaccttgcttttatgtcactaacaaacaattktgcctagtcattgaattctaatgcatttaagccatcttgagagtagagcccctagggaaaactacaaatggaaaattcattgatttttgattttgctttcctatggattaaatttaacactttcttgtaaatctctccctttgcagatcatatgtgataaatagttatccaactttctagatatccacccagagctgcttccatatgaagaggtggaaacggattctgtgcatgatactggtta

SEQ ID NO: 194255 - DNA, 310 bp, Homo sapiens
gtccctgtgcttggactcataaagcagaaatgcttaccttgcttttatgtcactaacaaacaattttgcctagtcattgaattctaatgcatttaagccatcttgagagtagagcccctagggaaaactacaaatggaaaattcattgatttttgattttgctttcctatggatyaaatttaacactttcttgtaaatctctccctttgcagatcatatgtgataaatagttatccaactttctagatatccacccagagctgcttccatatgaagaggtggaaacggattctgtgcatgatactggtta

SEQ ID NO: 194256 - DNA, 625 bp, Homo sapiens
tagttgtataacaggatgtctcacctctttcctctctctgtcttgcttctactcctgccatatgaaatatttcattgccgcttggccttctggtataattgggaggctttctgagtcctcctacaagcagaaaccactatgctttctttacagcctgaagaactgtgagtcaattagacctcttttctttatgtagatacagaaaattaatgctgtgaagtgaagttatgaaatgacttctaggcgtttcccccattctcttggctattagcrctgagctttattcaatgcaaatattggaggccatcttgatgtttcccctgataatggacttttcttcttttaccatatcgccaggctgcaacaaagatagctgacagtgtagaagcaggttccaaattgggtaatggccagaggttagagagtttggagagcttggaagaagatagcaagatgagggaaagtttggaccattgcagagacttgttaaatagttatgattaaaaggctgacagaaggatggacactgaaggccaggcttgtaaggtctcagatgaaaatgaggaacttactgggaaaaggagccaaggtttttttcttttgccttagcaaagtaattggctac

SEQ ID NO: 194257 - DNA, 625 bp, Homo sapiens
tagttgtataacaggatgtctcacctctttcctctctctgtcttgcttctactcctgccatatgaaatatttcattgccgcttggccttctggtataattgggaggctttctgagtcctcctacaagcagaaaccactatgctttctttacagcctgaagaactgtgagtcaattagacctcttttctttatgtagatacagaaaattaatgctgtgaagtgaagttatgaaatgacttctaggcgtttcccccattctcttggctattagcgctgagctttwttcaatgcaaatattggaggccatcttgatgtttcccctgataatggacttttcttcttttaccatatcgccaggctgcaacaaagatagctgacagtgtagaagcaggttccaaattgggtaatggccagaggttagagagtttggagagcttggaagaagatagcaagatgagggaaagtttggaccattgcagagacttgttaaatagttatgattaaaaggctgacagaaggatggacactgaaggccaggcttgtaaggtctcagatgaaaatgaggaacttactgggaaaaggagccaaggtttttttcttttgccttagcaaagtaattggctac

SEQ ID NO: 194258 - DNA, 602 bp, Homo sapiens
cctctttcctctctctgtcttgcttctactcctgccatatgaaatatttcattgccgcttggccttctggtataattgggaggctttctgagtcctcctacaagcagaaaccactatgctttctttacagcctgaagaactgtgagtcaattagacctcttttctttatgtagatacagaaaattaatgctgtgaagtgaagttatgaaatgacttctaggcgtttcccccattctcttggctattagcgctgagctttattcaatgcaaatattggaggccatcttgatgtttcccctgataatggacttttcttcttttaccatatygccaggctgcaacaaagatagctgacagtgtagaagcaggttccaaattgggtaatggccagaggttagagagtttggagagcttggaagaagatagcaagatgagggaaagtttggaccattgcagagacttgttaaatagttatgattaaaaggctgacagaaggatggacactgaaggccaggcttgtaaggtctcagatgaaaatgaggaacttactgggaaaaggagccaaggtttttttcttttgccttagcaaagtaattggctac

SEQ ID NO: 194259 - DNA, 549 bp, Homo sapiens
tgaacagacagttctcaaaataacacacataagtggccaacaaacattaaaaaatgcttaccattgctaatcatcagaaaaatgccaaacaaaacatcaattaaataccatttcacaycagtcacaatgacttttgttaaaaacaaataataaataaaaacttaaaaaaggatgttggggaggctgtggagaaaagggaacacaaaccgtttgtggcaatgtaaattaattcagctactatggagagcagtttggaaattaagaactaagaatgactgttggatgcagcaaccccattactatactaggggtatatcgaaaggacaataaatcattgtaacaaaaagatgtatacacatgtatgttcattgcagcactattcacaatagcaaagacgtggagtcaatccaggtacatccaaggtagattgaaaatccaaggtagattggaaaattccatatataccatggaatactatgcagccatgaaaagaacaaaatcacatcatttgcagcaacatgaatacagctggaatccactctcctaagc

SEQ ID NO: 194260 - DNA, 280 bp, Homo sapiens
gttgaaaaactacttcttgggtcctatgctcacaamctgtgtgatgggtttaattgtactgcaaacctcggtatccctcaatatgcctttggaagaaatttacagaggtaccacgttaatttagaatacaaactagaaaaaaaaagaaaagtttcctataagtagagaacagaaatttctttttaagataaaatttattgaagtaaaaaatggattaaatttttataaagggcagagttttctaagaatttcaaagcaatgcattcattgcaaaagatgg

SEQ ID NO: 194261 - DNA, 284 bp, Homo sapiens
cagggttgaaaaactacttcttgggtcctatgctcacaaactgtgtgatgggtttaattgtactgcaaacctcggtatccctcaatatgcctttggaagaaayttacagaggtaccacgttaatttagaatacaaactagaaaaaaaaagaaaagtttcctataagtagagaacagaaatttctttttaagataaaatttattgaagtaaaaaatggattaaatttttataaagggcagagttttctaagaatttcaaagcaatgcattcattgcaaaagatgg

SEQ ID NO: 194262 - DNA, 280 bp, Homo sapiens
gttgaaaaactacttcttgggtcctatgctcacaaactgtgtgatgggtttaattgtactgcaaacctcggtatccctcaatatgcctttggaagaaatttacagaggtaccacgttaatttagaatacaaactagaaaaaaaaagaaaagtttmctataagtagagaacagaaatttctttttaagataaaatttattgaagtaaaaaatggattaaatttttataaagggcagagttttctaagaatttcaaagcaatgcattcattgcaaaagatgg

SEQ ID NO: 194263 - DNA, 280 bp, Homo sapiens
gttgaaaaactacttcttgggtcctatgctcacaaactgtgtgatgggtttaattgtactgcaaacctcggtatccctcaatatgcctttggaagaaatttacagaggtaccacgttaatttagaatacaaactagaaaaaaaaagaaaagtttcctataagtagagaacagaaatttctttttaagataaaatttattgaagtaaaaaatggattaaayttttataaagggcagagttttctaagaatttcaaagcaatgcattcattgcaaaagatgg

SEQ ID NO: 194264 - DNA, 606 bp, Homo sapiens
ttaaatttttataaagggcagagttttctaagaatttcaaagcaatgcattcattgcaaaagatggctttaattacttaatcttttttttttttttttttttgtgagacagggtctcactctstcaccaggctggagtgcagcggtgcagtcttggctcactgcaacctccacctcctggcttcaagcaattctcctgccttagtatcccaagtagctgggactacaggtgcacatcaccacgcccagctaatttttgtatttttagtagagatggggtttccccatgttggccaggatggtcacgatctcctgaccttgtgatctgcttgctttggcctccccaagtgctgggattacaggtatgagccaccatgcctggccattgtttaacctttgtactaataaaacactacctttctaaaatcatgtatatgcaatagatcaatattaactgcatttttgtcagattactctaaacagcattacacatatacatcctctgttatctaaacttaaaataagtagaaattttattttatttatgtgattatttttctatttaagcaaacttcaagtaatgtctagtcactaaaaatactaaagg

SEQ ID NO: 194265 - DNA, 606 bp, Homo sapiens
ttaaatttttataaagggcagagttttctaagaatttcaaagcaatgcattcattgcaaaagatggctttaattacttaatcttttttttttttttttttttgtgagacagggtctcactctgtcaccaggctggagtgcagcggtgcagtcttggctcactgcaacctccacctcctggcttcaagcaattctcctgccttagtatcccaagtagctgggactacaggtgcacatcaccacgcccagctaatttttgtatttttagtagagatggggtttccccatgttggccaggatggtcacgatctcctgaccttgtgatctgcttgctttggcctccccaagtgctgggrttacaggtatgagccaccatgcctggccattgtttaacctttgtactaataaaacactacctttctaaaatcatgtatatgcaatagatcaatattaactgcatttttgtcagattactctaaacagcattacacatatacatcctctgttatctaaacttaaaataagtagaaattttattttatttatgtgattatttttctatttaagcaaacttcaagtaatgtctagtcactaaaaatactaaagg

SEQ ID NO: 194266 - DNA, 606 bp, Homo sapiens
ttaaatttttataaagggcagagttttctaagaatttcaaagcaatgcattcattgcaaaagatggctttaattacttaatcttttttttttttttttttttgtgagacagggtctcactctgtcaccaggctggagtgcagcggtgcagtcttggctcactgcaacctccacctcctggcttcaagcaattctcctgccttagtatcccaagtagctgggactacaggtgcacatcaccacgcccagctaatttttgtatttttagtagagatggggtttccccatgttggccaggatggtcacgatctcctgaccttgtgatctgcttgctttggcctccccaagtgctgggattacaggtatgagccaccatgcctggccattgtttaacctttgtactaataaaacactacctttctaaaatcatgtatatgcaatagatcaatattaactgcatttttgtcagattactctaaacagcattacacatatacatcctctgttatctaaacttaaaataagtagaaattttattttatttatgtgattatttttctatttaagcaaacttcaagtwatgtctagtcactaaaaatactaaagg

SEQ ID NO: 194267 - DNA, 516 bp, Homo sapiens
gatcaatattaactgcatttttgtcagattactctaaacagcattacacatatacatcctctgttatctaaacttaaaataagtagaaattttattttatttatgtgattatttttctatttaagcaaacttcaagtaatgtctagtcactaaaaatactaaaggccacattttgtaagtgatacatgattttcatgataatgtttcttgtttaatttagacattattattatttttacttattttagatggggctggactgtgtagaataaataattagagaaacaaagagaagtacgttgacaaaatttattaattaaatttaggtttattttagaaataaagtgtaaatagcaaatggcattccttttcattcttgggttagtagatactacatcaatattttttcttacacacatctaatgaaagatgtgaaaacaaaaactttcacagagaagactgyacttatgcaccataaattcatcatgttccaaagcttaaacagttcccaagaag

SEQ ID NO: 194268 - DNA, 561 bp, Homo sapiens
atcatgttccaaagcttaaacagttcccaagaagtctgtgcatctcttcttcactggttctacactttcttaagttttgccatcctcatggaactgtcagccagcacactgaaacgattctcagaaaacaaaagcatcatcaagttctcagggtttyggtagagattgaaggccaacagacctaagactcattcagaaatacttagctgagcaataacccttcataagcagtcacttgacaggtgacattttaaatctcctctaatttactgtgtcattggcttacacttgttctcaggaaaagttccaaatttttcaccatgaaataaaaacacccatgtcaatgtaattcttgccaagttactcagccttgtttctcaccacttactgcactctgccctttgctctagcaccaaactggatggagtggaactctgcagggctcttcctcacctcaggctctttgcctttgcctctttcctctatctgggaagctttttcttgtccttcaggtatcaacctatgttatctcctccaccagaaagcccatgatattgacat

SEQ ID NO: 194269 - DNA, 561 bp, Homo sapiens
atcatgttccaaagcttaaacagttcccaagaagtctgtgcatctcttcttcactggttctacactttcttaagttttgccatcctcatggaactgtcagccagcacactgaaacgattctcagaaaacaaaagcatcatcaagttctcagggtttcggtagagattgaaggccaacagacctaagactcattcagaaatacttagctgagcaataacccttcataagcagtcacttgacaggtgacattttaaatctcctctaatttactgtgtcattggcttacacttgttctcaggaaaagttccaaatttttcaccatgaaataaaaacacccatgtcaatgtaattcttgccaagttactcagccttgtttctcaccacttaytgcactctgccctttgctctagcaccaaactggatggagtggaactctgcagggctcttcctcacctcaggctctttgcctttgcctctttcctctatctgggaagctttttcttgtccttcaggtatcaacctatgttatctcctccaccagaaagcccatgatattgacat

SEQ ID NO: 194270 - DNA, 561 bp, Homo sapiens
atcatgttccaaagcttaaacagttcccaagaagtctgtgcatctcttcttcactggttctacactttcttaagttttgccatcctcatggaactgtcagccagcacactgaaacgattctcagaaaacaaaagcatcatcaagttctcagggtttcggtagagattgaaggccaacagacctaagactcattcagaaatacttagctgagcaataacccttcataagcagtcacttgacaggtgacattttaaatctcctctaatttactgtgtcattggcttacacttgttctcaggaaaagttccaaatttttcaccatgaaataaaaacacccatgtcaatgtaattcttgccaagttactcagccttgtttctcaccacttactgcactctgccctttgctstagcaccaaactggatggagtggaactctgcagggctcttcctcacctcaggctctttgcctttgcctctttcctctatctgggaagctttttcttgtccttcaggtatcaacctatgttatctcctccaccagaaagcccatgatattgacat

SEQ ID NO: 194271 - DNA, 553 bp, Homo sapiens
tggctgttgattacatgaatgaagactgaaaaagctctgatatttaaacacaattasaattaatgccatgtgtaaattattaaatagtaattttgtattgtaaatgtacatacatatttctcattcttattaactctgataaagttctcaagtctttagtttttaaactcactcttagttaactgaagtgttttaggtaaagaacaaaattctttatttttctttccagctgttgctgtattggacacttgctcccatctactttcttctctagaatccacgggtaagccacatctaatgaagagaatatttaaccataaagtcttaaggaaaaattctatgatgatttaaaagattataaaactttattactgggctatttacacattttaattgtttctcataaaatatataacattccaatatttactgaagtaggatatttttgtatcatatgtatgattataatttataggatattttaaatgatgttttttggcctccttaagttttaagtggatcttgcaaatgaaaaccagtattattgagtttg

SEQ ID NO: 194272 - DNA, 553 bp, Homo sapiens
tggctgttgattacatgaatgaagactgaaaaagctctgatatttaaacacaattagaattaatgccatgtgtaaattattaaatagtaattttgtattgtaaatgtacatacatatttctcattcttattaactctgataaagttctcaagtctttagtttttaaactcacwcttagttaactgaagtgttttaggtaaagaacaaaattctttatttttctttccagctgttgctgtattggacacttgctcccatctactttcttctctagaatccacgggtaagccacatctaatgaagagaatatttaaccataaagtcttaaggaaaaattctatgatgatttaaaagattataaaactttattactgggctatttacacattttaattgtttctcataaaatatataacattccaatatttactgaagtaggatatttttgtatcatatgtatgattataatttataggatattttaaatgatgttttttggcctccttaagttttaagtggatcttgcaaatgaaaaccagtattattgagtttg

SEQ ID NO: 194273 - DNA, 467 bp, Homo sapiens
aaactcactcttagttaactgaagtgttttaggtaaagaacaaaattctttatttttctttccagctgttgctgtattggacacttgctcccatctactttcttctctagaatccacgggtaagccacatctaatgaagagaatatttaaccataaagtcttaagraaaaattctatgatgatttaaaagattataaaactttattactgggctatttacacattttaattgtttctcataaaatatataacattccaatatttactgaagtaggatatttttgtatcatatgtatgattataatttataggatattttaaatgatgttttttggcctccttaagttttaagtggatcttgcaaatgaaaaccagtattattgagtttgacatactcaaattgcccaaatttcagctgtttaaacaaccaagtcatcattgatactttagtaaaggttagtaaatgt

SEQ ID NO: 194274 - DNA, 467 bp, Homo sapiens
aaactcactcttagttaactgaagtgttttaggtaaagaacaaaattctttatttttctttccagctgttgctgtattggacacttgctcccatctactttcttctctagaatccacgggtaagccacatctaatgaagagaatatttaaccataaagtcttaaggaaaaattctatgatgatttaaaagattataaaactttattactgggctatttacacattttaattgtttctcataaaatatataacattccaatatttactgaagtaggatatttttgtatcatatgtatgattataatttataggrtattttaaatgatgttttttggcctccttaagttttaagtggatcttgcaaatgaaaaccagtattattgagtttgacatactcaaattgcccaaatttcagctgtttaaacaaccaagtcatcattgatactttagtaaaggttagtaaatgt

SEQ ID NO: 194275 - DNA, 247 bp, Homo sapiens
acatacacacacacacacaggcacayatgcatacacaaatacattgcatacacacatgtcagttcaggggatagaggacactgactctgggccctgttgacccaagcagactcccatggtggtgggttgtgtcaccccacaatgtcactgttgctgagtccccatcgcctctgtgttgtggagcagttagagacacacagcagtgtctgtgagtagctctgcgtgaaggaccattttctagatgaga

SEQ ID NO: 194276 - DNA, 274 bp, Homo sapiens
cacatacacacacacacacaggcacacatgcatacacaaatacattgcatacacacatgtcagttcaggggatagaggacactgactctgggccctgttgacccaagcagactcccatggtggtgggttgtgtcaccccacaatgtcactgttgctgagtccccatcrcctctgtgttgtggagcagttagagacacacagcagtgtctgtgagtagctctgcgtgaaggaccattttctagatgagaggcacatctcaacacagctcactgat

SEQ ID NO: 194277 - DNA, 549 bp, Homo sapiens
aataggcaaatcaatcttgaagcagaacaaaattaaaggtctcaaaacaattacaaaactgcaataagccaaaaaaaaagtggtcatggcgtaaagacatacttgacacacttatggaccaacacaacagagacctcagaaaccaaccctggcatatatggtctgatgatcttccacaaggatgccaagaccactcaatggcgaaggacagtttcttcaacaaatggtgttgggaaaattgtatatctacatgcaaaataatgaagttggactcttaccttacaccacgttaaaattaattcaaagtgaattataaaccyaaaagtaaaactagaactatcaaactcctagggaaaacaaatttggaaaatgctttatgatgatgaatttgtcaataatttttaggatatgacattaaaagctcaggcagtaaaagcaaaaatatatcaaacctaaaaacttctgtaccacaaaggtcacaaccaacagggtaaaaggcaaactgtagaataaaagaaaataccagttgagtgtcccttatttgaaatg

SEQ ID NO: 194278 - DNA, 561 bp, Homo sapiens
gccaacactgctcctgtccttacagagagaccctacacaggattcccagatatacatggaaggacaacatcttatcaggtcctctctgtgcagatgtggttatcattccaaataatgagctccagccccaagactgttccatcctcaattgctttgagtgggcaatgtaggctctccacacacgasctacgtgtaggttccttgggtacccagatgggagccatgaaacacaaaccctccatggtcaggtctgtatttgtttcctgcctttttcccagcaatccccaggccccagcagtggtggtctacctctgctgattctcattcagaatctaaacttagaaacaattataacctagaccccaattctacctgaaagtaacagaataacataatctataccctgcagcatgactgtttgcccaacgtaatgaggatgaactgagagataatgaaccatcatgaccctggcccaagtaatgagaatgaactgtgagataaatgaatgatcatgacaaaaaccccgctacaacccaacaacaaaataaaatgattaaaaaa

SEQ ID NO: 194279 - DNA, 561 bp, Homo sapiens
gccaacactgctcctgtccttacagagagaccctacacaggattcccagatatacatggaaggacaacatcttatcaggtcctctctgtgcagatgtggttatcattccaaataatgagctccagccccaagactgttccatcctcaattgctttgagtgggcaatgtaggctctccacacacgagctacgtgtaggttccttgggtacccagatgggagccatgaaacacaaaccctccatggtcaggtctgtatttgtttcctgcctttttcccagcaatccccaggccccagcagtggtggtctacctctgctgattctcattcagaatctaaacttagaaacaattataacctagaccccaattctacctgaaagtaacagaataacataatctataccctgcagcatgactgtttgcccaacgtaatgaggatgaactgagagataatgaaycatcatgaccctggcccaagtaatgagaatgaactgtgagataaatgaatgatcatgacaaaaaccccgctacaacccaacaacaaaataaaatgattaaaaaa

SEQ ID NO: 194280 - DNA, 561 bp, Homo sapiens
gccaacactgctcctgtccttacagagagaccctacacaggattcccagatatacatggaaggacaacatcttatcaggtcctctctgtgcagatgtggttatcattccaaataatgagctccagccccaagactgttccatcctcaattgctttgagtgggcaatgtaggctctccacacacgagctacgtgtaggttccttgggtacccagatgggagccatgaaacacaaaccctccatggtcaggtctgtatttgtttcctgcctttttcccagcaatccccaggccccagcagtggtggtctacctctgctgattctcattcagaatctaaacttagaaacaattataacctagaccccaattctacctgaaagtaacagaataacataatctataccctgcagcatgactgtttgcccaacgtaatgaggatgaactgagagataatgaacsatcatgaccctggcccaagtaatgagaatgaactgtgagataaatgaatgatcatgacaaaaaccccgctacaacccaacaacaaaataaaatgattaaaaaa

SEQ ID NO: 194281 - DNA, 426 bp, Homo sapiens
ggaacccagagaagaagcagatatgattcagagcagagcttacagagcagatggtatctgagccgagactgatagaataacattawtaagggcattcacggccatttattatcacttaactgcaatgcattttgtataagttatttctactcttcatatcaaccatggaaaataatacttattcttctcttttgaagttaaagaagtggtaagtggtctaagaagataaattaacataccaacaccaaatagctcaagttcagtgactcaagagggcccgtgtctccccaagaggttgctcagcaggcagacgaggtagagagcccttccaagaagtgacagtgagatgtgaaaggtcccagtgtgtctctgagaacaacagaaaccagtatgtagaccaagtgggaaaagccacggaagaggcag

SEQ ID NO: 194282 - DNA, 426 bp, Homo sapiens
ggaacccagagaagaagcagatatgattcagagcagagcttacagagcagatggtatctgagccgagactgatagaataacattaataagggcattcacggccatttattatcacttaactgcaatgcattttgtataagttatttctactcttcatatcraccatggaaaataatacttattcttctcttttgaagttaaagaagtggtaagtggtctaagaagataaattaacataccaacaccaaatagctcaagttcagtgactcaagagggcccgtgtctccccaagaggttgctcagcaggcagacgaggtagagagcccttccaagaagtgacagtgagatgtgaaaggtcccagtgtgtctctgagaacaacagaaaccagtatgtagaccaagtgggaaaagccacggaagaggcag

SEQ ID NO: 194283 - DNA, 426 bp, Homo sapiens
ggaacccagagaagaagcagatatgattcagagcagagcttacagagcagatggtatctgagccgagactgatagaataacattaataagggcattcacggccatttattatcacttaactgcaatgcattttgtataagttatttctactcttcatatcaaccatggaaaataatacttattcttctcttttgaagttaargaagtggtaagtggtctaagaagataaattaacataccaacaccaaatagctcaagttcagtgactcaagagggcccgtgtctccccaagaggttgctcagcaggcagacgaggtagagagcccttccaagaagtgacagtgagatgtgaaaggtcccagtgtgtctctgagaacaacagaaaccagtatgtagaccaagtgggaaaagccacggaagaggcag

SEQ ID NO: 194284 - DNA, 426 bp, Homo sapiens
ggaacccagagaagaagcagatatgattcagagcagagcttacagagcagatggtatctgagccgagactgatagaataacattaataagggcattcacggccatttattatcacttaactgcaatgcattttgtataagttatttctactcttcatatcaaccatggaaaataatacttattcttctcttttgaagttaaagaagtggtaagtggtctaagaagataaattaacataccaacaccaaatagctcaagttcagtgactcaagagggcccgtgtctccccaagaggttgctcagcaggcagacgaggtagagagcccttccaagaagtgacagtgagatgtgaaaggtcccagtgtgtctctgagaacaacagaaaccagtawgtagaccaagtgggaaaagccacggaagaggcag

SEQ ID NO: 194285 - DNA, 395 bp, Homo sapiens
tcataataggaactgttacagtgaactaaatatggcctgggaaggactctgtacttctagatttgagtccctgtggacaaastgcaacctaacttaataggtagaaagactgaaaacctaacttaggagtatgtgcctaaaacagtagctgagtcgtggccaatcccaacagccaaacttctgccactcacacactgctgagtgttcagctgtgttcaaataaggcaaatgctgagcactgtaaccagtccagttgtttctggacctcactgctgagaactgtaatggacccagttgcttctagacctcactcctcacttcagatttttgtacatcatgttccctttattgtctataaatcttccaccatgtgtctgtgctggagtctcaccaaa

SEQ ID NO: 194286 - DNA, 395 bp, Homo sapiens
tcataataggaactgttacagtgaactaaatatggcctgggaaggactctgtacttctagatttgagtccctgtggacaaactgcaacctaacttaataggtagaaagactgaaaacctaacttaggagtatgtgcctaaaacagtagctgagtcgtggccaatcccaacagccaaacttctsccactcacacactgctgagtgttcagctgtgttcaaataaggcaaatgctgagcactgtaaccagtccagttgtttctggacctcactgctgagaactgtaatggacccagttgcttctagacctcactcctcacttcagatttttgtacatcatgttccctttattgtctataaatcttccaccatgtgtctgtgctggagtctcaccaaa

SEQ ID NO: 194287 - DNA, 578 bp, Homo sapiens
aagaactgtcagtgaggtcataataggaactgttacagtgaactaaatatggcctgggaaggactctgtacttctagatttgagtccctgtggacaaactgcaacctaacttaataggtagaaagactgaaaacctaacttaggagtatgtgcctaaaacagtagctgagtcgtggccaatcccaacagccaaacttctgcmactcacacactgctgagtgttcagctgtgttcaaataaggcaaatgctgagcactgtaaccagtccagttgtttctggacctcactgctgagaactgtaatggacccagttgcttctagacctcactcctcacttcagatttttgtacatcatgttccctttattgtctataaatcttccaccatgtgtctgtgctggagtctcaccaaatctgctgtgattctgggggctgcctgattcgtgaatcattcattgctcaattaagttcctttaaatttaattcagctgaagattttcttttaatagatggtgtcagaagtgggatctgtgggagcaggactgctagggcctctggagctatactgtggtgagcagt

SEQ ID NO: 194288 - DNA, 395 bp, Homo sapiens
tcataataggaactgttacagtgaactaaatatggcctgggaaggactctgtacttctagatttgagtccctgtggacaaactgcaacctaacttaataggtagaaagactgaaaacctaacttaggagtatgtgcctaaaacagtagctgagtcgtggccaatcccaacagccaaacttctgccactcacacactgctgagtgttcagytgtgttcaaataaggcaaatgctgagcactgtaaccagtccagttgtttctggacctcactgctgagaactgtaatggacccagttgcttctagacctcactcctcacttcagatttttgtacatcatgttccctttattgtctataaatcttccaccatgtgtctgtgctggagtctcaccaaa

SEQ ID NO: 194289 - DNA, 578 bp, Homo sapiens
aagaactgtcagtgaggtcataataggaactgttacagtgaactaaatatggcctgggaaggactctgtacttctagatttgagtccctgtggacaaactgcaacctaacttaataggtagaaagactgaaaacctaacttaggagtatgtgcctaaaacagtagctgagtcgtggccaatcccaacagccaaacttctgccactcacacactgctgagtgttcagctgtgttcaaataaggyaaatgctgagcactgtaaccagtccagttgtttctggacctcactgctgagaactgtaatggacccagttgcttctagacctcactcctcacttcagatttttgtacatcatgttccctttattgtctataaatcttccaccatgtgtctgtgctggagtctcaccaaatctgctgtgattctgggggctgcctgattcgtgaatcattcattgctcaattaagttcctttaaatttaattcagctgaagattttcttttaatagatggtgtcagaagtgggatctgtgggagcaggactgctagggcctctggagctatactgtggtgagcagt

SEQ ID NO: 194290 - DNA, 578 bp, Homo sapiens
aagaactgtcagtgaggtcataataggaactgttacagtgaactaaatatggcctgggaaggactctgtacttctagatttgagtccctgtggacaaactgcaacctaacttaataggtagaaagactgaaaacctaacttaggagtatgtgcctaaaacagtagctgagtcgtggccaatcccaacagccaaacttctgccactcacacactgctgagtgttcagctgtgttcaaataaggcaaatgctgagcactgtaaccagtccagttgtttctggacctcactgctgagaactgtaatggacccagttgcttctagacctcactcctcacttcagatttttgtacatcatgttccctttattgtctataaatcttccaccatgtgtctgtgctggagtctcaccaaatctgctgtgattctgggggctgcctgattcgtgaatcattcattgctcaattaagytcctttaaatttaattcagctgaagattttcttttaatagatggtgtcagaagtgggatctgtgggagcaggactgctagggcctctggagctatactgtggtgagcagt

SEQ ID NO: 194291 - DNA, 620 bp, Homo sapiens
caagcttctgggtgccactgcattccctgatayccacagtggaagctgtttgcagtcggcctggtccagctgcagcctcacagggagctggcatctgtgcctggagctgcccaccccactgcagctggcatgcttggctgtgtgcagtggccagatcccatgctcgcttgctcacacacccctcactgctctgtacccagctcgcccttggcaggtgtgggatccagaccactagcatgagctgagtggacagaactaacccagtgggcccaagcaaaacacaggtaaaggctccaccagccagaggtttcaggcagaaaagtgacgcctcagattctgtaacacttgtgtcctttgatctctcggagcagctggggatcatggtaaattttctctcggatttcagagctccatggatttgtgttttgagctctgagtttctttgagcaaatttctgttccaaactgctatccagccatgactggctggatgttttagaagttatgacagaaaagggaccaggtccaggatcagatttgatccagtagttaactggcttgaatccagttccagttagaggcctcctacatctgactgggtcagaaggaaagtggtagtaa

SEQ ID NO: 194292 - DNA, 559 bp, Homo sapiens
ccaggttctctctacgcatgtgccaccccgcccacttcgccattttcctccggaagtgcggatcccagcggtggtcgtgtagctgagcaggcctggggcttggttctatgtccctgtgggtaggtgcgagggcgaggaggaacctgtgggcctcgggggatcccggggggccagaccagtgttccccatttgtgggggcagacgcgtgggcgcatcgcgggcaggaggggcctgacgtgcatttgcgggccgtggaccctggcgggggctgggaggacagacgtggggtcccagcagtgaagcgggttccagaggcacaggagtgggtaggcgaggctggtggccctgggcccggagtctgcaggccgckctcctgtcctgccgctgagggacccggttaccaaccctcatgtagctcagtttgcccatctgtccccgtgctaacacacagttctcgggagacgttccccattcccagaggagtagtgcgaaatgcgtgtgcctctagtcttaagctgggcgtttgtattagttgggtttcctggtgtctatttagcaa

SEQ ID NO: 194293 - DNA, 387 bp, Homo sapiens
tcttcagccttaagggtacttcagtcttmactgtgtgttataaagtttgaaagggagggttccctatgaataagaagcgcacttgaaagaacagccctgtggtctaacctctcactggtgcttcagaggaggataaaaggtcgcaggtgaagatcccagttttcctcgctcaggaaatattaattctactccctggaatgcacaagatttgcaaagactaggtgatagtggaaggtttggaagaactttcagaaggttgaggtgaattcagctgagaagaacaggcaaggacctaggaaatattccttatttgaaggggcctgaaagtgtggtctggggtgcaggagtgacctgtcatacttgaaaagattgaaatactctccaaat

SEQ ID NO: 194294 - DNA, 387 bp, Homo sapiens
tcttcagccttaagggtacttcagtcttaactgtgtgttataaagtttgaaagggagggttccctatgaataagaagcgcacttgaaagaacagccctstggtctaacctctcactggtgcttcagaggaggataaaaggtcgcaggtgaagatcccagttttcctcgctcaggaaatattaattctactccctggaatgcacaagatttgcaaagactaggtgatagtggaaggtttggaagaactttcagaaggttgaggtgaattcagctgagaagaacaggcaaggacctaggaaatattccttatttgaaggggcctgaaagtgtggtctggggtgcaggagtgacctgtcatacttgaaaagattgaaatactctccaaat

SEQ ID NO: 194295 - DNA, 556 bp, Homo sapiens
gtgaggtacagaaacaactcagcgtttgccttgtttgagcacagtttgaacatttggcagtgcctgaktggttgaagtttggccattgggattggccaagatgtagctgttgtttgaggtgcatacactcaagttaggttttcattcttgtttacctattaaggtaggttgcaggtcatccacaaggactcatatatataattatggagtccttctcaggacatacttagttcactttaacaatgccttccctttggttattttctcaattttgagagattagccaaaacttcagtcactggtgtcactattacccttgcaaatgtacttatttggtttagaaacccactgggaaatagaacagtgagatttgaaaaggtggaacaaggacttgagtagaaggtgtcttcttatgctggaatatcctgtttacaggagaaaaacaaaacctggtttgttctaggatttatgtgtttccttaaagtcttagtttgattatgttccatttagcatgagtgactccattttggtttggtttgttctgttgggacctatt

SEQ ID NO: 194296 - DNA, 556 bp, Homo sapiens
gtgaggtacagaaacaactcagcgtttgccttgtttgagcacagtttgaacatttggcagtgcctgattggttgaagtttggccattgggattgrccaagatgtagctgttgtttgaggtgcatacactcaagttaggttttcattcttgtttacctattaaggtaggttgcaggtcatccacaaggactcatatatataattatggagtccttctcaggacatacttagttcactttaacaatgccttccctttggttattttctcaattttgagagattagccaaaacttcagtcactggtgtcactattacccttgcaaatgtacttatttggtttagaaacccactgggaaatagaacagtgagatttgaaaaggtggaacaaggacttgagtagaaggtgtcttcttatgctggaatatcctgtttacaggagaaaaacaaaacctggtttgttctaggatttatgtgtttccttaaagtcttagtttgattatgttccatttagcatgagtgactccattttggtttggtttgttctgttgggacctatt

SEQ ID NO: 194297 - DNA, 556 bp, Homo sapiens
gtgaggtacagaaacaactcagcgtttgccttgtttgagcacagtttgaacatttggcagtgcctgattggttgaagtttggccattgggattggccaagatgtagctgttgtttgaggtgcatacactcaagttaggttttcattcttgtttacctattaaggtaggttgcaggtcatccacaaggactcatatatataattatggagtccttctcaggacatacttagttcactttaacaatgccttccctttggttattttctcaattttgagagaytagccaaaacttcagtcactggtgtcactattacccttgcaaatgtacttatttggtttagaaacccactgggaaatagaacagtgagatttgaaaaggtggaacaaggacttgagtagaaggtgtcttcttatgctggaatatcctgtttacaggagaaaaacaaaacctggtttgttctaggatttatgtgtttccttaaagtcttagtttgattatgttccatttagcatgagtgactccattttggtttggtttgttctgttgggacctatt

SEQ ID NO: 194298 - DNA, 556 bp, Homo sapiens
gtgaggtacagaaacaactcagcgtttgccttgtttgagcacagtttgaacatttggcagtgcctgattggttgaagtttggccattgggattggccaagatgtagctgttgtttgaggtgcatacactcaagttaggttttcattcttgtttacctattaaggtaggttgcaggtcatccacaaggactcatatatataattatggagtccttctcaggacatacttagttcactttaacaatgccttccctttggttattttctcaattttgagagattrgccaaaacttcagtcactggtgtcactattacccttgcaaatgtacttatttggtttagaaacccactgggaaatagaacagtgagatttgaaaaggtggaacaaggacttgagtagaaggtgtcttcttatgctggaatatcctgtttacaggagaaaaacaaaacctggtttgttctaggatttatgtgtttccttaaagtcttagtttgattatgttccatttagcatgagtgactccattttggtttggtttgttctgttgggacctatt

SEQ ID NO: 194299 - DNA, 452 bp, Homo sapiens
caaatttttaattctaattcaaatgatatactatgatagtgttatgtatctagatagaatttctgcttatatccrcttctaatatattttaagttccggtagtgatagggtttggattttttaaattttagtaatgtttactatgtatttatgttgaaataaagttattgttcacaccctgacaccaaaggtcccattctgcaaggtaggattctcttaataggcaactgcattgacttttatgaccccattcactccctgaacacagacacagaagtcagctggtgaccacaaaacagaataaatctttaacctcggcactggtgaccagcaatataaaactgcaacatttgaaacactggcaatgatgactcctttaacactagtttaactcagtggccattgttgttaaactgttcataatttctattcctcagtaatatgacccaata

SEQ ID NO: 194300 - DNA, 452 bp, Homo sapiens
caaatttttaattctaattcaaatgatatactatgatagtgttatgtatctagatagaatttctgcttatatccacttctaatatattttaagttccggtagtgatagggtttggattttttaaattttagtaatgtttactatgtatttatgttgaaataaagttattgttcacaccctgacaccaaagrtcccattctgcaaggtaggattctcttaataggcaactgcattgacttttatgaccccattcactccctgaacacagacacagaagtcagctggtgaccacaaaacagaataaatctttaacctcggcactggtgaccagcaatataaaactgcaacatttgaaacactggcaatgatgactcctttaacactagtttaactcagtggccattgttgttaaactgttcataatttctattcctcagtaatatgacccaata

SEQ ID NO: 194301 - DNA, 452 bp, Homo sapiens
caaatttttaattctaattcaaatgatatactatgatagtgttatgtatctagatagaatttctgcttatatccacttctaatatattttaagttccggtagtgatagggtttggattttttaaattttagtaatgtttactatgtatttatgttgaaataaagttattgttcacaccctgacaccaaaggtcccattctgcaaggtaggattctcttaataggcaactgcattgacttttatgaccccattcactccctgaacacagacacagaagtcarctggtgaccacaaaacagaataaatctttaacctcggcactggtgaccagcaatataaaactgcaacatttgaaacactggcaatgatgactcctttaacactagtttaactcagtggccattgttgttaaactgttcataatttctattcctcagtaatatgacccaata

SEQ ID NO: 194302 - DNA, 493 bp, Homo sapiens
attgttcacaccctgacaccaaaggtcccattctgcaaggtaggattctcttaataggcaactgcattgacttttatgaccccattcactccctgaacacagacacagaagtcagctggtgaccacaaaacagaataaatctttaacctcggcactggtgaccagcaatataaaactgcaacatttgaarcactggcaatgatgactcctttaacactagtttaactcagtggccattgttgttaaactgttcataatttctattcctcagtaatatgacccaatacttcatgttaccttgtgtattatgagtaaggttacataaataaaacagcaagataattctgaaaatttcttgcctcaattccaagggtaaagacaactatgagttactagagatactaagaattactagaataactaatagttactagagatagtaagaatatcttaagtttcataactggttaagatgttttaaaaattaaatata

SEQ ID NO: 194303 - DNA, 522 bp, Homo sapiens
gtggccattgttgttaaactgttcataatttctattcctcagtaatatgacccaatacttcatgttaccttgtgtattatgagtaaggttayataaataaaacagcaagataattctgaaaatttcttgcctcaattccaagggtaaagacaactatgagttactagagatactaagaattactagaataactaatagttactagagatagtaagaatatcttaagtttcataactggttaagatgttttaaaaattaaatataaaattatgatctattggattctaaaggtatagtctgaaaggtcatgtcatttggactatgctttgttagtaaagcaaaaaaaacctaatattaaacaagaacttaaattttcatatacctgtgattgcttcttttcacttctttcacacctttcttgctcttcctctaaagccactggtaaggtttgttctgttgacaaattcattgatttagttcaaatgaactaagaagagttagataaagactataatctttata

SEQ ID NO: 194304 - DNA, 522 bp, Homo sapiens
gtggccattgttgttaaactgttcataatttctattcctcagtaatatgacccaatacttcatgttaccttgtgtattatgagtaaggttacataaataaaacagcaagataattctgaaaatttcttgcctcaattccaagggtaaagacaactatgagttactagagatactaagaattactagaataactaatagttactagagatagtaagaatatcttaagtttcataactggttaagatgttttaaaaattamatataaaattatgatctattggattctaaaggtatagtctgaaaggtcatgtcatttggactatgctttgttagtaaagcaaaaaaaacctaatattaaacaagaacttaaattttcatatacctgtgattgcttcttttcacttctttcacacctttcttgctcttcctctaaagccactggtaaggtttgttctgttgacaaattcattgatttagttcaaatgaactaagaagagttagataaagactataatctttata

SEQ ID NO: 194305 - DNA, 522 bp, Homo sapiens
gtggccattgttgttaaactgttcataatttctattcctcagtaatatgacccaatacttcatgttaccttgtgtattatgagtaaggttacataaataaaacagcaagataattctgaaaatttcttgcctcaattccaagggtaaagacaactatgagttactagagatactaagaattactagaataactaatagttactagagatagtaagaatatcttaagtttcataactggttaagatgttttaaaaattaaatataaaattatgatctattggrttctaaaggtatagtctgaaaggtcatgtcatttggactatgctttgttagtaaagcaaaaaaaacctaatattaaacaagaacttaaattttcatatacctgtgattgcttcttttcacttctttcacacctttcttgctcttcctctaaagccactggtaaggtttgttctgttgacaaattcattgatttagttcaaatgaactaagaagagttagataaagactataatctttata

SEQ ID NO: 194306 - DNA, 565 bp, Homo sapiens
tttgtattttatattttgagagtttgaatgaaacaatgtttactgaaatatttacttctgtaagaaatacttctaattatccaaaacktcaacaaaccacttggggagacaccagatatcaccagattcaagccatgcaaaatctcagggacactcacaaattgttccacccaacataagtcaacaaaactgttggaaacaaaacagaaatttgaaatacagtcaaaatatacaatgtaatgctttactatacttcataacagtatctttttaacaagacactaattgagttagcagttactaataatttgcaaaattattgttgtttatacctcaattagtgtgcaccccattttttatatcacaaatgttttcccctgctattctgaaaaatttattttcatcttttaagactcagaaagtaggctgggcataatagctcacatctgtaatcccagcactttggaaggccaaaatgggagaattgctcaaggccaaaagtttaagaccagcctgggaaccataggtaaccttgactctacaaaaaattagacaggtatggtga

SEQ ID NO: 194307 - DNA, 565 bp, Homo sapiens
tttgtattttatattttgagagtttgaatgaaacaatgtttactgaaatatttacttctgtaagaaatacttctaattatccaaaacttcaacaaaccacttggggagacaccagatatcaccagattcaagccatgcaaaatctcagggwcactcacaaattgttccacccaacataagtcaacaaaactgttggaaacaaaacagaaatttgaaatacagtcaaaatatacaatgtaatgctttactatacttcataacagtatctttttaacaagacactaattgagttagcagttactaataatttgcaaaattattgttgtttatacctcaattagtgtgcaccccattttttatatcacaaatgttttcccctgctattctgaaaaatttattttcatcttttaagactcagaaagtaggctgggcataatagctcacatctgtaatcccagcactttggaaggccaaaatgggagaattgctcaaggccaaaagtttaagaccagcctgggaaccataggtaaccttgactctacaaaaaattagacaggtatggtga

SEQ ID NO: 194308 - DNA, 565 bp, Homo sapiens
tttgtattttatattttgagagtttgaatgaaacaatgtttactgaaatatttacttctgtaagaaatacttctaattatccaaaacttcaacaaaccacttggggagacaccagatatcaccagattcaagccatgcaaaatctcagggacactcacaaattgttccacccaacataagtcaacaaaactgttggaaacaaaacagaaatttgaaatacagtcaaaatatacaatgtaatgctttactatacttcataacagtatctttttaacaagacactaattgagttrgcagttactaataatttgcaaaattattgttgtttatacctcaattagtgtgcaccccattttttatatcacaaatgttttcccctgctattctgaaaaatttattttcatcttttaagactcagaaagtaggctgggcataatagctcacatctgtaatcccagcactttggaaggccaaaatgggagaattgctcaaggccaaaagtttaagaccagcctgggaaccataggtaaccttgactctacaaaaaattagacaggtatggtga

SEQ ID NO: 194309 - DNA, 565 bp, Homo sapiens
tttgtattttatattttgagagtttgaatgaaacaatgtttactgaaatatttacttctgtaagaaatacttctaattatccaaaacttcaacaaaccacttggggagacaccagatatcaccagattcaagccatgcaaaatctcagggacactcacaaattgttccacccaacataagtcaacaaaactgttggaaacaaaacagaaatttgaaatacagtcaaaatatacaatgtaatgctttactatacttcataacagtatctttttaacaagacactaattgagttagcagttactaataatttgcaaaattattgttgtttatacctcaattagtgtgcaccccattttttayatcacaaatgttttcccctgctattctgaaaaatttattttcatcttttaagactcagaaagtaggctgggcataatagctcacatctgtaatcccagcactttggaaggccaaaatgggagaattgctcaaggccaaaagtttaagaccagcctgggaaccataggtaaccttgactctacaaaaaattagacaggtatggtga

SEQ ID NO: 194310 - DNA, 466 bp, Homo sapiens
cttttttaaaaatacaattttaaacttagaggttttgtacctcaagtcacatatgtggcacatttataaaataatcatgcctttgcatatttttcctttgatatcttagctgtatatacaagccacttrtgttttttaattgccacaaatattgcactgaaatagagcactagttgcaaaaatgcctggtataacatttcttcttgttcttgaaagtaattttaataccccatgtttaagatattcctagacaactataagtaactataattatttctgctaggtagaagcatctttgtggtcaacatttgtgaagtgccttgtaaataaaaatatgcttgagtagaaatagtattttgcaaatatagccctaaatagagctactgattttaccaaaaattaaggactccaaactctgtctttgtctttcaaatttggtttataggaacatctcattacaatgagc

SEQ ID NO: 194311 - DNA, 391 bp, Homo sapiens
tgcaccccattttttatatcacaaatgttttcccctgctattctgaaaaatttattttcatcttttaagactcagaaagtaggctgggcataatagctcacatctgtaatcccagcactttggaaggccaaaatgggagaattgctcaaggccaaragtttaagaccagcctgggaaccataggtaaccttgactctacaaaaaattagacaggtatggtgatatgttcctgttgtccccgctactcaagaagcttagatgagaagatccctcgagcccagaagtctgaggtttcagtgagtctcaatcatgccattgcactccaatcctgggtgatagagtaagaacttgtctccaaaaagaggaagaaaaaaaggctcagaatgctatg

SEQ ID NO: 194312 - DNA, 397 bp, Homo sapiens
ggtaaccttgactctacaaaaaattagacaggtatggtgatatgttcctgttgtccccgctactcaagaagcttagatgagaagatccctcgagcccagaagtctgaggtttcagtgagtctcaatcatgccattgcactccaatcctgggtgatagagtaagaacttgtctccaaaaagaggaaraaaaaaaggctcagaatgctatgtgaaatcttccttgattctagctatctttctccacacacacaggtgtctgcttcgttggggtcccttagtaccttgtcaatttttctagtgtcactttaccacctgacctgcacatcatgtctttacatgttgaccccctttgctgctagactgtagaggacaatcttttgaatcatctttgtataaa

SEQ ID NO: 194313 - DNA, 397 bp, Homo sapiens
ggtaaccttgactctacaaaaaattagacaggtatggtgatatgttcctgttgtccccgctactcaagaagcttagatgagaagatccctcgagcccagaagtctgaggtttcagtgagtctcaatcatgccattgcactccaatcctgggtgatagagtaagaacttgtctccaaaaagaggaagaaaaaaaggctcagaatgctatgtgaaatcttccttgattctagstatctttctccacacacacaggtgtctgcttcgttggggtcccttagtaccttgtcaatttttctagtgtcactttaccacctgacctgcacatcatgtctttacatgttgaccccctttgctgctagactgtagaggacaatcttttgaatcatctttgtataaa

SEQ ID NO: 194314 - DNA, 291 bp, Homo sapiens
ctgcttcgttggggtcccttagtaccttgtcaatttttctagtgtcwctttaccacctgacctgcacatcatgtctttacatgttgaccccctttgctgctagactgtagaggacaatcttttgaatcatctttgtataaacagtcttaattttgctaaataattacttattgagttcctgctaagtgttaggcactggggaataaggaaggaaaatagaagctgtcagggatggctttcctaaagatcacccatgagctgagacttagagagtgaggttagccagattaa

SEQ ID NO: 194315 - DNA, 588 bp, Homo sapiens
tgactttttaaaagtcagaactatggtagcatgaagccaaacgaggtaatctasaataaaattttctatgcttctttcccttctttgctctctttctactctaataactgcgattcacacaggtaaagaagagtgtaattccttgatagaaacacagctccaagattaatcctttctttaactatgaagttcgcgtgtccaaaatctgtggtagttgctgtctgatttttatcactgatggtgatacagatatttatcatcaactcacaacttcccaaatctttgaaaagtcttactattgatggttcaactagtagaaacatgatgtaaaatatctgaaaataaagtttttatttattagaatgtaaataataatacaaattgtaataaggtgtaaaagttctttcttcactgaagcagtaccatgttgtcctctaccccacaaatgcagtactcccccgtggtttaatgtattttaaaagtcttgtaattgctattaactcagaaaagtttacttaacttgttgtaagcttttggtatttactacagtttactttcaatcactcaaccatgtctgttatatatgtt

SEQ ID NO: 194316 - DNA, 588 bp, Homo sapiens
tgactttttaaaagtcagaactatggtagcatgaagccaaacgaggtaatctagaataaaattttctatgcttctttyccttctttgctctctttctactctaataactgcgattcacacaggtaaagaagagtgtaattccttgatagaaacacagctccaagattaatcctttctttaactatgaagttcgcgtgtccaaaatctgtggtagttgctgtctgatttttatcactgatggtgatacagatatttatcatcaactcacaacttcccaaatctttgaaaagtcttactattgatggttcaactagtagaaacatgatgtaaaatatctgaaaataaagtttttatttattagaatgtaaataataatacaaattgtaataaggtgtaaaagttctttcttcactgaagcagtaccatgttgtcctctaccccacaaatgcagtactcccccgtggtttaatgtattttaaaagtcttgtaattgctattaactcagaaaagtttacttaacttgttgtaagcttttggtatttactacagtttactttcaatcactcaaccatgtctgttatatatgtt

SEQ ID NO: 194317 - DNA, 588 bp, Homo sapiens
tgactttttaaaagtcagaactatggtagcatgaagccaaacgaggtaatctagaataaaattttctatgcttctttcccttctttgctctctttctactctaataactgcgattcacacaggtaaagaagagtgtaattccttgatagaaacacagctccaagattaatcctttctttaactatgaagttcgcgtgtccaaaatctgtggtagttgctgtctgatttttatcactgatggtgatacagatatttatcatcaactcacaacttcccaaatctttgaaaagtcttactattgrtggttcaactagtagaaacatgatgtaaaatatctgaaaataaagtttttatttattagaatgtaaataataatacaaattgtaataaggtgtaaaagttctttcttcactgaagcagtaccatgttgtcctctaccccacaaatgcagtactcccccgtggtttaatgtattttaaaagtcttgtaattgctattaactcagaaaagtttacttaacttgttgtaagcttttggtatttactacagtttactttcaatcactcaaccatgtctgttatatatgtt

SEQ ID NO: 194318 - DNA, 478 bp, Homo sapiens
gttcgcgtgtccaaaatctgtggtagttgctgtctgatttttatcactgatggtgatacagatatttatcatcaactcacaacttcccaaatctttgaaaagtcttactattgatgrttcaactagtagaaacatgatgtaaaatatctgaaaataaagtttttatttattagaatgtaaataataatacaaattgtaataaggtgtaaaagttctttcttcactgaagcagtaccatgttgtcctctaccccacaaatgcagtactcccccgtggtttaatgtattttaaaagtcttgtaattgctattaactcagaaaagtttacttaacttgttgtaagcttttggtatttactacagtttactttcaatcactcaaccatgtctgttatatatgttgttttccatgagaaatttgtttattagtaattaagattcttcaggtataagaaaatatttcaataactaagtttgtgc

SEQ ID NO: 194319 - DNA, 478 bp, Homo sapiens
gttcgcgtgtccaaaatctgtggtagttgctgtctgatttttatcactgatggtgatacagatatttatcatcaactcacaacttcccaaatctttgaaaagtcttactattgatggttcaactagtagaaacatgatgtaaaatatctgaaaataaagtttttatttattagaatgtaaataataatacaaattgtaataaggtgtaaaagttctttcttcactgaagcagtaccatgttgtcctstaccccacaaatgcagtactcccccgtggtttaatgtattttaaaagtcttgtaattgctattaactcagaaaagtttacttaacttgttgtaagcttttggtatttactacagtttactttcaatcactcaaccatgtctgttatatatgttgttttccatgagaaatttgtttattagtaattaagattcttcaggtataagaaaatatttcaataactaagtttgtgc

SEQ ID NO: 194320 - DNA, 478 bp, Homo sapiens
gttcgcgtgtccaaaatctgtggtagttgctgtctgatttttatcactgatggtgatacagatatttatcatcaactcacaacttcccaaatctttgaaaagtcttactattgatggttcaactagtagaaacatgatgtaaaatatctgaaaataaagtttttatttattagaatgtaaataataatacaaattgtaataaggtgtaaaagttctttcttcactgaagcagtaccatgttgtcctctaccccacaaatgcagtactcccccgtggtttaatgtattttaaaagtcytgtaattgctattaactcagaaaagtttacttaacttgttgtaagcttttggtatttactacagtttactttcaatcactcaaccatgtctgttatatatgttgttttccatgagaaatttgtttattagtaattaagattcttcaggtataagaaaatatttcaataactaagtttgtgc

SEQ ID NO: 194321 - DNA, 498 bp, Homo sapiens
tcatgatcactggacattcacaaactatactgttcaaaacattagatctgaattttgatccgagtatccctttagtagcagtttcattcaaggatgtccaagaggtaaaataagacaatatcatttgctattttcagttttcttttctgagaacagcccagcattcttcttcagagaaatgaattgtgctaacttcataggctaaaggctcatgagtcatagttctaagggyattaataaaatatggtggtgtatgcttgtattctgaacttttcaggtttaaactctcatatagtaaacgctaatagatacaaaccaattaaagaaaagccctcttaatctgacattatttttctttttatttcttcatttatcagcaacaggagagtctaactaaatgtggtaaagtggtatgagggaatacaatgaacagtgtaaaatgaattaaaccagggataatcacaccaatgtgggtacagagtggaaaatatatacata

SEQ ID NO: 194322 - DNA, 498 bp, Homo sapiens
tcatgatcactggacattcacaaactatactgttcaaaacattagatctgaattttgatccgagtatccctttagtagcagtttcattcaaggatgtccaagaggtaaaataagacaatatcatttgctattttcagttttcttttctgagaacagcccagcattcttcttcagagaaatgaattgtgctaacttcataggctaaaggctcatgagtcatagttctaagggtattaataaaatatggtggtgyatgcttgtattctgaacttttcaggtttaaactctcatatagtaaacgctaatagatacaaaccaattaaagaaaagccctcttaatctgacattatttttctttttatttcttcatttatcagcaacaggagagtctaactaaatgtggtaaagtggtatgagggaatacaatgaacagtgtaaaatgaattaaaccagggataatcacaccaatgtgggtacagagtggaaaatatatacata

SEQ ID NO: 194323 - DNA, 498 bp, Homo sapiens
tcatgatcactggacattcacaaactatactgttcaaaacattagatctgaattttgatccgagtatccctttagtagcagtttcattcaaggatgtccaagaggtaaaataagacaatatcatttgctattttcagttttcttttctgagaacagcccagcattcttcttcagagaaatgaattgtgctaacttcataggctaaaggctcatgagtcatagttctaagggtattaataaaatatggtggtgtatgcttgtattctgaacttttcaggtttaaactctcatatagtaaaygctaatagatacaaaccaattaaagaaaagccctcttaatctgacattatttttctttttatttcttcatttatcagcaacaggagagtctaactaaatgtggtaaagtggtatgagggaatacaatgaacagtgtaaaatgaattaaaccagggataatcacaccaatgtgggtacagagtggaaaatatatacata

SEQ ID NO: 194324 - DNA, 498 bp, Homo sapiens
tcatgatcactggacattcacaaactatactgttcaaaacattagatctgaattttgatccgagtatccctttagtagcagtttcattcaaggatgtccaagaggtaaaataagacaatatcatttgctattttcagttttcttttctgagaacagcccagcattcttcttcagagaaatgaattgtgctaacttcataggctaaaggctcatgagtcatagttctaagggtattaataaaatatggtggtgtatgcttgtattctgaacttttcaggtttaaactctcatatagtaaacgctaatagatacaaaccrattaaagaaaagccctcttaatctgacattatttttctttttatttcttcatttatcagcaacaggagagtctaactaaatgtggtaaagtggtatgagggaatacaatgaacagtgtaaaatgaattaaaccagggataatcacaccaatgtgggtacagagtggaaaatatatacata

SEQ ID NO: 194325 - DNA, 336 bp, Homo sapiens
tagtattttgcaaatatagccctaaatagagctactgattttaccaaaaattaaggactccaaactctgtctttgtctttcaaatttggtttataggaacatctcattacaatgagcaaaaagcctatctgatcactaaagagataattttgacacttccaaatgacacagctaatttgtagtaggtttttgaagtgcaaattacatgtttctgtttaaataatgacagtaaaatatggacastatctattcacactctatatacacaactacaacttgtccctagaagaaaagtttaatttttcaggtctcatccacaaaacgaagtgttaataa

SEQ ID NO: 194326 - DNA, 588 bp, Homo sapiens
ttcaggtttaaactctcatatagtaaacgctaatagatacaaaccaattaaagaaaagccctcttaatctgacattatttttctttttatttcttcatttatcagcaacaggagagtctaactaaatgtggtaaagtggtatgagggaatacaatgaacagtgtaaaatgaattaaaccagggataatcacaccaatgtgggtacagagtggaaaatatatacataacacaccaaagaaagtggcagaaaggtatataaagtgtataaccactcacatacyattttaggacacaaaaaattctgcatattatttatgagcatcacaatgtaattaaagatttcaaaagggcattgaaatgaaaaacaaccaaacttatgatgttggtagcctctatgcaatcatgttttaaaaactttaacaccaaaaaggctcaaaatcaccattttaaaagactgtgtctaccagtcataaatgaatcattactttcgtcatttgtaatagtcaaagatgccacaagcgcacgcatacacacatctatatatacacctacacacacagtcttgctcattagaacatctgataggtt

SEQ ID NO: 194327 - DNA, 588 bp, Homo sapiens
ttcaggtttaaactctcatatagtaaacgctaatagatacaaaccaattaaagaaaagccctcttaatctgacattatttttctttttatttcttcatttatcagcaacaggagagtctaactaaatgtggtaaagtggtatgagggaatacaatgaacagtgtaaaatgaattaaaccagggataatcacaccaatgtgggtacagagtggaaaatatatacataacacaccaaagaaagtggcagaaaggtatataaagtgtataaccactcacataccattttaggacacaaaaaattctgcatattatttatgagcatcacaatgtarttaaagatttcaaaagggcattgaaatgaaaaacaaccaaacttatgatgttggtagcctctatgcaatcatgttttaaaaactttaacaccaaaaaggctcaaaatcaccattttaaaagactgtgtctaccagtcataaatgaatcattactttcgtcatttgtaatagtcaaagatgccacaagcgcacgcatacacacatctatatatacacctacacacacagtcttgctcattagaacatctgataggtt

SEQ ID NO: 194328 - DNA, 588 bp, Homo sapiens
ttcaggtttaaactctcatatagtaaacgctaatagatacaaaccaattaaagaaaagccctcttaatctgacattatttttctttttatttcttcatttatcagcaacaggagagtctaactaaatgtggtaaagtggtatgagggaatacaatgaacagtgtaaaatgaattaaaccagggataatcacaccaatgtgggtacagagtggaaaatatatacataacacaccaaagaaagtggcagaaaggtatataaagtgtataaccactcacataccattttaggacacaaaaaattctgcatattatttatgagcatcacaatgtaattaaagatttcaaaagggcattgaaatgaaaaacaaccaaacttatgatgttggtagcctctatgcaatcatgttttaaaaactttaacacyaaaaaggctcaaaatcaccattttaaaagactgtgtctaccagtcataaatgaatcattactttcgtcatttgtaatagtcaaagatgccacaagcgcacgcatacacacatctatatatacacctacacacacagtcttgctcattagaacatctgataggtt

SEQ ID NO: 194329 - DNA, 588 bp, Homo sapiens
ttcaggtttaaactctcatatagtaaacgctaatagatacaaaccaattaaagaaaagccctcttaatctgacattatttttctttttatttcttcatttatcagcaacaggagagtctaactaaatgtggtaaagtggtatgagggaatacaatgaacagtgtaaaatgaattaaaccagggataatcacaccaatgtgggtacagagtggaaaatatatacataacacaccaaagaaagtggcagaaaggtatataaagtgtataaccactcacataccattttaggacacaaaaaattctgcatattatttatgagcatcacaatgtaattaaagatttcaaaagggcattgaaatgaaaaacaaccaaacttatgatgttggtagcctctatgcaatcatgttttaaaaactttaacaccaaaaaggctcaaaatcaccattttaaaagactgtgtctaccagtcataaatgaatcattactttcgtcatttgtaatagtsaaagatgccacaagcgcacgcatacacacatctatatatacacctacacacacagtcttgctcattagaacatctgataggtt

SEQ ID NO: 194330 - DNA, 367 bp, Homo sapiens
tgaagttaaaacagaaactgacactttaataagtaaagctttcctctaggtaaagatcagaactccaactagcacttaactcactggaaatatcttaagagtctcaaaattcactgctttgaatccctgacaagtataaaaattttatactgaaaacttcatgctattcaaaacatttawacagaaacatctgacttaaagcttacatttttaaaatcttttttatgcttctaaatttgtttttattcaaatatggataccaacaataacatttatgtcaatgccttctgttcaatattgaacaaatagaattaggaataagaataatatgagtacatccaatcattgaatgtactttatttccagt

SEQ ID NO: 194331 - DNA, 482 bp, Homo sapiens
aaaacatttaaacagaaacatctgacttaaagcttacatttttaaaatcttttttatgcttctaaatttgtttttattcaaatatggataccaacaataacatttatgwcaatgccttctgttcaatattgaacaaatagaattaggaataagaataatatgagtacatccaatcattgaatgtactttatttccagtattccattaaatgtacctgctctcaatgtctgtacatactttctttgtactgctcctttcacagcaggatcttccacttcagtgctaggctgaatgggttttaaaagataacgattcataaatcatatatattttatacaacatggagttagtgattcaaaaatatacataattaattaccttcaaggaaggatgttttgcaggaggccctacaaagcaaaggggatatgtcatcaattatatgtaagtatgacaaggccaaccaaacattcatgcagtgttac

SEQ ID NO: 194332 - DNA, 367 bp, Homo sapiens
tgaagttaaaacagaaactgacactttaataagtaaagctttcctctaggtaaagatcagaactccaactagcacttaactcactggaaatatcttaagagtctcaaaattcactgctttgaatccctgacaagtataaaaattttatactgaaaacttcatgctattcaaaacatttaaacagaaacatctgacttaaagcttacatttttaaaatcttttttatgcttctaaatttgtttttattcaaatatggataccaacaataacatttatgtcaawgccttctgttcaatattgaacaaatagaattaggaataagaataatatgagtacatccaatcattgaatgtactttatttccagt

SEQ ID NO: 194333 - DNA, 161 bp, Homo sapiens
gattcaaaaatatacataattaattaccttcaaggaaggatgttttgcaggaggccctrcaaagcaaaggggatatgtcatcaattatatgtaagtatgacaaggccaaccaaacattcatgcagtgttactgtcgagctgaattctcaggcctggctata

SEQ ID NO: 194334 - DNA, 161 bp, Homo sapiens
gattcaaaaatatacataattaattaccttcaaggaaggatgttttgcaggaggccctacaaagcaaaggggatatgtcatcaattatatgtaagtatgacarggccaaccaaacattcatgcagtgttactgtcgagctgaattctcaggcctggctata

SEQ ID NO: 194335 - DNA, 374 bp, Homo sapiens
ttcaggtctcatccacaaaacgaagtgttaataagctgtatctttatactcayttttaagtaatttcttcttaaccattgtataacactaccacagtttgtatggagataaaataactcatggtgagaaatccagttctttaaaaaatcattttaccttcaatcacttttaggatgtctatggttttagagtaaggacgaaaatttataaacatttgttaaattatgcaactgtgtttgaagatgtttcaaaattacattttccttattttacaactagttttcatgtattcacaaacgagacacatgagaattattaatgcaaaagcacagcatatcaacaaagtttataatgtaaatagtttagttaggaaa

SEQ ID NO: 194336 - DNA, 539 bp, Homo sapiens
ggttttaaaagataacgattcataaatcatatatattttatacaacatggagttagtgattcaaaaatatacataattaattaccttcaaggaaggatgttttgcaggaggccctacaaagcaaaggggatatgtcatcaattatatgtaagtatgacaaggccaaccaaacattcatgcagtgttactgtcgagctgaattctcaggcctggctataaaaataattacttaaggttttgagggttcttcttggcttcttcttttcattgcctaggacagcaacatgacagaaacacaatgaggaaaataggaatataggattcccaaaatgcacagtttatatttcrgtagtgagattatgtttcaaatgcctatacttaaaatagaaaagcattgatataaccgtgaacatgtggactgatgaggagaaaagggaccattaaacagaggggcaaatcaaacctgagagaatcaatgtcaaagctgatggtgaatgtacagagtattttaactccacacaccagaggcattgctgcca

SEQ ID NO: 194337 - DNA, 539 bp, Homo sapiens
ggttttaaaagataacgattcataaatcatatatattttatacaacatggagttagtgattcaaaaatatacataattaattaccttcaaggaaggatgttttgcaggaggccctacaaagcaaaggggatatgtcatcaattatatgtaagtatgacaaggccaaccaaacattcatgcagtgttactgtcgagctgaattctcaggcctggctataaaaataattacttaaggttttgagggttcttcttggcttcttcttttcattgcctaggacagcaacatgacagaaacacaatgaggaaaataggaatataggattcccaaaatgcacagtttatatttcagtagtgagattatgtttcaaatgcctatacttaaaatagaaaagcattgatataacygtgaacatgtggactgatgaggagaaaagggaccattaaacagaggggcaaatcaaacctgagagaatcaatgtcaaagctgatggtgaatgtacagagtattttaactccacacaccagaggcattgctgcca

SEQ ID NO: 194338 - DNA, 564 bp, Homo sapiens
gtgaaatgagctgctgtggtttaccccaactctagcactccctcctgtctccagtactctccacagcaataacctcttttgtgagactgggcatatgctgaagcaactggaagtgagttgtctcaagttaacttggctttaactcccaagaccccagcaaatgtctttctttcctccttttgtgtccwttcaccatccctcttcctttgaaaaaatgattatcagaactgtcatcctgatgcttcccttcctaactgctttttatggatgattgtgaccacttttttcatctgtattcagcagtagtatacacctgtaatctctcttttttcatctcattttccttcccctgtggctagaatcatgctcagaaataaaaggaaattaaagctttccctggattctgttatcttttaaattgctctccagtggttctttttccagatttctctaaaggaaggctattcccttgctattcagagctgtgtccaaggaccagcacaaacatcacctgagtgctcatgagaaatgcagactccaatacctgctgagtcagaatgtgca

SEQ ID NO: 194339 - DNA, 374 bp, Homo sapiens
ttcaggtctcatccacaaaacgaagtgttaataagctgtatctttatactcacttttaagtaatttcttcttaaccattgtataacactaccacagtttgtatggagataaaataactcatggtgagaaatccagttctttaaaaaatcattttaccttcaatcamttttaggatgtctatggttttagagtaaggacgaaaatttataaacatttgttaaattatgcaactgtgtttgaagatgtttcaaaattacattttccttattttacaactagttttcatgtattcacaaacgagacacatgagaattattaatgcaaaagcacagcatatcaacaaagtttataatgtaaatagtttagttaggaaa

SEQ ID NO: 194340 - DNA, 374 bp, Homo sapiens
ttcaggtctcatccacaaaacgaagtgttaataagctgtatctttatactcacttttaagtaatttcttcttaaccattgtataacactaccacagtttgtatggagataaaataactcatggtgagaaatccagttctttaaaaaatcattttaccttcaatcacttttaggatrtctatggttttagagtaaggacgaaaatttataaacatttgttaaattatgcaactgtgtttgaagatgtttcaaaattacattttccttattttacaactagttttcatgtattcacaaacgagacacatgagaattattaatgcaaaagcacagcatatcaacaaagtttataatgtaaatagtttagttaggaaa

SEQ ID NO: 194341 - DNA, 457 bp, Homo sapiens
gcaaatgtctttctttcctccttttgtgtcctttcaccatccctcttcctttgaaaaaatgattatcagaactgtcatcctgatgcttcccttcctaactgctttttatggatgattgtgaccacttttttcatctgtattcagcagtagtatacacctgtaatctctcttttttcatctcattttccttcccytgtggctagaatcatgctcagaaataaaaggaaattaaagctttccctggattctgttatcttttaaattgctctccagtggttctttttccagatttctctaaaggaaggctattcccttgctattcagagctgtgtccaaggaccagcacaaacatcacctgagtgctcatgagaaatgcagactccaatacctgctgagtcagaatgtgcactttccagaagctcctcaacgtattcatgacaatttgaatgccttgttc

SEQ ID NO: 194342 - DNA, 622 bp, Homo sapiens
acttaatcatatcttattcactcatgtcagtgaaacttctctccctgaggcctgacagttatcaagtgaaatgagctgctgtggtttaccccaactctagcactccctcctgtctccagtactctccacagcaataacctcttttgtgagactgggcatatgctgaagcaactggaagtgagttgtctcaagttaacttggctttaactcccaagaccccagcaaatgtctttctttcctccttttgtgtcctttcaccatccctcttcctttgaaaaaatgattatcagaactgtcatcctgatgcttcccttcctaactgctttttatggatgattgtgaccacttttttcatctgtattcagcagtagtatacacctgtaatctctcttttttcatctcattttccttcccctgtggctagaatcatgctcagaaataaaaggaaattaaagctttccctggattctgttatcttttaaattgctctccagtggttctttttccagatttctctaaaggaargctattcccttgctattcagagctgtgtccaaggaccagcacaaacatcacctgagtgctcatgagaaatgcagactccaatacctgctgagtcaga

SEQ ID NO: 194343 - DNA, 199 bp, Homo sapiens
tggttctttttccagatttctctaaaggaaggctattcccttgctattcagagctgtgtccaaggaccagcacaaacatcacytgagtgctcatgagaaatgcagactccaatacctgctgagtcagaatgtgcactttccagaagctcctcaacgtattcatgacaatttgaatgccttgttctacactggtgtgctt

SEQ ID NO: 194344 - DNA, 374 bp, Homo sapiens
ttcaggtctcatccacaaaacgaagtgttaataagctgtatctttatactcacttttaagtaatttcttcttaaccattgtataacactaccacagtttgtatggagataaaataactcatggtgagaaatccagttctttaaaaaatcattttaccttcaatcacttttaggatgtctatggttttagagtaaggacgaaaatttataaacatttgttaaattatgcaactgtktttgaagatgtttcaaaattacattttccttattttacaactagttttcatgtattcacaaacgagacacatgagaattattaatgcaaaagcacagcatatcaacaaagtttataatgtaaatagtttagttaggaaa

SEQ ID NO: 194345 - DNA, 621 bp, Homo sapiens
agttatttcacaggtaggatgtttatcagtaatttgatttacccaataagctgccttgccttttttatttgtgcttccaaatcctccagttcatttaatttcactttttcccattccmacatacggctcactcaggagctgtgctatgcgcactcctggctgtgctttccagggaacagaactaaatatcacaatttgaatttcctcattgtaatctgaatcaatgactccagtgtgtatttgtaccccttttaaacttaaactagaccttcctaaaagtaatcccattgtccctgctcgcaacagtccacagactcctgttgggaccttttgcgggggttccccaggcagaaggctcacagcttttgtgcagcatggatctactgcagcactatgggctgtggtggggaaagataacgtatgggggtgagggaatggcctgagatggaaatgccctggtttagaacagggcctgggatgggcccctcagggagtttcccaaaatcgggttcccttctttatcaaacttagagtgacactgattagcccaaagttttccttttttacattttggacatatttcaggatcagcagttttgttttttcccctatctagtggcc

SEQ ID NO: 194346 - DNA, 526 bp, Homo sapiens
atggcatcatcctgcatgaccacttgtacatgtaaaccagcccagccaccaacccccaaaagttggtctgcagttatattaatttgaggttgggcccaggcattgcgagcagcctgaatggaagcttcatctgccyactaagttttaaattgtaagaactgagcaggagttagacaagctagagtaaaagtgtcccagtcagtaggaatcatccgactggaaacagcaacattctttaacagtcccatttcaaaaggagaacctggtccatactgatttatagcttgtttaatttttttgagtgatttaaaaggaaaaggcccaaatgtagctataatatttccctgttgatctggggggtgtattcaaacagggaactgccaagcctctaaatcccacttttgtctagcttgctgtattcctgcctgaatagaacgaagaacagtcgctcaaggcgctgctcagtcaccagggcaactacttttcacccagtgtcctccagaaaagaaagatctggagggtcgtt

SEQ ID NO: 194347 - DNA, 526 bp, Homo sapiens
atggcatcatcctgcatgaccacttgtacatgtaaaccagcccagccaccaacccccaaaagttggtctgcagttatattaatttgaggttgggcccaggcattgcgagcagcctgaatggaagcttcatctgcctactaagttttaaattgtaagaactgagcaggagttagacaagctagagtaaragtgtcccagtcagtaggaatcatccgactggaaacagcaacattctttaacagtcccatttcaaaaggagaacctggtccatactgatttatagcttgtttaatttttttgagtgatttaaaaggaaaaggcccaaatgtagctataatatttccctgttgatctggggggtgtattcaaacagggaactgccaagcctctaaatcccacttttgtctagcttgctgtattcctgcctgaatagaacgaagaacagtcgctcaaggcgctgctcagtcaccagggcaactacttttcacccagtgtcctccagaaaagaaagatctggagggtcgtt

SEQ ID NO: 194348 - DNA, 526 bp, Homo sapiens
atggcatcatcctgcatgaccacttgtacatgtaaaccagcccagccaccaacccccaaaagttggtctgcagttatattaatttgaggttgggcccaggcattgcgagcagcctgaatggaagcttcatctgcctactaagttttaaattgtaagaactgagcaggagttagacaagctagagtaaaagtgtcccagtcagtaggaatcatccgactggaaacagcaacattctttaacagtcccatttcaaaaggagaacctggtccatactgatttatagcttgtttaatttttttgagtratttaaaaggaaaaggcccaaatgtagctataatatttccctgttgatctggggggtgtattcaaacagggaactgccaagcctctaaatcccacttttgtctagcttgctgtattcctgcctgaatagaacgaagaacagtcgctcaaggcgctgctcagtcaccagggcaactacttttcacccagtgtcctccagaaaagaaagatctggagggtcgtt

SEQ ID NO: 194349 - DNA, 460 bp, Homo sapiens
gttttaaattgtaagaactgagcaggagttagacaagctagagtaaaagtgtcccagtcagtaggaatcatccgactggaaacagcaacattctttaacagtcccatttcaaaaggagaacctggtccatactgatttatagcttgtttaatttttttgagtgatttaaaaggaaaaggcccaaatgtagctataatatttccctgttgatctggggggtgtattcaaacagggaactgccaagcctctaaatcccacttttrtctagcttgctgtattcctgcctgaatagaacgaagaacagtcgctcaaggcgctgctcagtcaccagggcaactacttttcacccagtgtcctccagaaaagaaagatctggagggtcgttttcttcaaaatagtaatgagggtgtgcagaaggatagggatgaacctctccctccttttctgctttagctttagg

SEQ ID NO: 194350 - DNA, 526 bp, Homo sapiens
atggcatcatcctgcatgaccacttgtacatgtaaaccagcccagccaccaacccccaaaagttggtctgcagttatattaatttgaggttgggcccaggcattgcgagcagcctgaatggaagcttcatctgcctactaagttttaaattgtaagaactgagcaggagttagacaagctagagtaaaagtgtcccagtcagtaggaatcatccgactggaaacagcaacattctttaacagtcccatttcaaaaggagaacctggtccatactgatttatagcttgtttaatttttttgagtgatttaaaaggaaaaggcccaaatgtagctataatatttccctgttgatctggggggtgtattcaaacagggaactgccaagcctctaaatcccacttttgtctagcttgctgwattcctgcctgaatagaacgaagaacagtcgctcaaggcgctgctcagtcaccagggcaactacttttcacccagtgtcctccagaaaagaaagatctggagggtcgtt

SEQ ID NO: 194351 - DNA, 357 bp, Homo sapiens
aggccttgaagagagggttctcatgcttctaggcctgatacaaactgtcacaaaataccgcaaaatccacaaccttgcacaaaggccatagcaaccttacacaaaatacacttctgtgaggacatctatccagcaaccacttgctcaaacttcarctgacatcgaccttgttgttgatctttatagtcaaagataactataacaaaacaattatataagcctgttcatttttcctttatttatttttttctactcccccataattccaggttgatcgcttttcttttaaagaccttgtcttcctttaccatttgaatctacacagtttgctttgtcatgcatattcccattgcagtg

SEQ ID NO: 194352 - DNA, 609 bp, Homo sapiens
caaaggttgccaatttcttgtagatccttctagagttaaacttcatttaagtawtcattaaaagctgcatttattccctcacttgaacttttgatttcacactattaggactaatcctctaagtctttgctaagttatgttccttcttttcttgtggcttgactctgatgctctctatatgcaacatcaattgatgtaaagtacattcagggcaatagagtttctttaaatattactttgttattcaaaataatcacaaagcactcatcgtaggaaaacttggaggactcaaatatagggaaatactttttctttctaaggcacaattctctaaagaagttcaccttaacttgaatatacatgggaaaatatccttgttcactaatagtctatattcactctgttttcttccctcatagaccagccggttcactattattctccaaatgatgtgtgcctctctagagtccaggctatctgcatatctaatttttcccacaaattactgttttgaattgcactgaattcaattcaaggggatgtcatttataaacagtgcaaatatatactgcacgagggatcttagaaatcatacacatggtttgatcc

SEQ ID NO: 194353 - DNA, 609 bp, Homo sapiens
caaaggttgccaatttcttgtagatccttctagagttaaacttcatttaagtattcattaaaagctgcatttattccctcacttgaacttttgatttcacactattaggactaatcctctaagtctttgctaagttatgttcctycttttcttgtggcttgactctgatgctctctatatgcaacatcaattgatgtaaagtacattcagggcaatagagtttctttaaatattactttgttattcaaaataatcacaaagcactcatcgtaggaaaacttggaggactcaaatatagggaaatactttttctttctaaggcacaattctctaaagaagttcaccttaacttgaatatacatgggaaaatatccttgttcactaatagtctatattcactctgttttcttccctcatagaccagccggttcactattattctccaaatgatgtgtgcctctctagagtccaggctatctgcatatctaatttttcccacaaattactgttttgaattgcactgaattcaattcaaggggatgtcatttataaacagtgcaaatatatactgcacgagggatcttagaaatcatacacatggtttgatcc

SEQ ID NO: 194354 - DNA, 480 bp, Homo sapiens
gattgctaacacataaggtcaatgagagaacactcagagaaagcttcatgaaaacaataaattgtctgccacktctgagtgaatgaggctagatgaatagaaactgagaaggcagaaaggatagcatgagcaagacaagtgctgaaatctgcccaattaactctgaggataaagtccaatggcagagaaataaaaacgcgtgtccacataataacctgtaagtgaatgttcgcagcagcatttttcataagagctaaacagtggaaactaacctaaaggtccatcaaccgatgaatgaatggaaaaccagtatagacatggaatagaatatcacttaactgtaagaagaaataaactaccaatgtgtgctaaaacattatgctaagtgaattctgaaaacattatgctaagtgaaaaagccagtcacaaaggactacgtattgtataactctatgtatatgaaataggcagaacaggcga

SEQ ID NO: 194355 - DNA, 480 bp, Homo sapiens
gattgctaacacataaggtcaatgagagaacactcagagaaagcttcatgaaaacaataaattgtctgccacttctgagtgaatgaggctagatgaatagaaactgagaaggcagaaaggatagcatgagcaagacaagtgctgaaatctgcccaattaactctgaggataaagtccaatggcagagaaataaaaacgcktgtccacataataacctgtaagtgaatgttcgcagcagcatttttcataagagctaaacagtggaaactaacctaaaggtccatcaaccgatgaatgaatggaaaaccagtatagacatggaatagaatatcacttaactgtaagaagaaataaactaccaatgtgtgctaaaacattatgctaagtgaattctgaaaacattatgctaagtgaaaaagccagtcacaaaggactacgtattgtataactctatgtatatgaaataggcagaacaggcga

SEQ ID NO: 194356 - DNA, 480 bp, Homo sapiens
gattgctaacacataaggtcaatgagagaacactcagagaaagcttcatgaaaacaataaattgtctgccacttctgagtgaatgaggctagatgaatagaaactgagaaggcagaaaggatagcatgagcaagacaagtgctgaaatctgcccaattaactctgaggataaagtccaatggcagagaaataaaaacgcgtgtccacataataacctgtaagtgaatgttcgcagcagcatttttcataagagctaaacagtggaaactaacctaaaggtccatcaaccgatgaatgaatggaaaaccagtatagacatggaatagaatatcacttaactrtaagaagaaataaactaccaatgtgtgctaaaacattatgctaagtgaattctgaaaacattatgctaagtgaaaaagccagtcacaaaggactacgtattgtataactctatgtatatgaaataggcagaacaggcga

SEQ ID NO: 194357 - DNA, 480 bp, Homo sapiens
gattgctaacacataaggtcaatgagagaacactcagagaaagcttcatgaaaacaataaattgtctgccacttctgagtgaatgaggctagatgaatagaaactgagaaggcagaaaggatagcatgagcaagacaagtgctgaaatctgcccaattaactctgaggataaagtccaatggcagagaaataaaaacgcgtgtccacataataacctgtaagtgaatgttcgcagcagcatttttcataagagctaaacagtggaaactaacctaaaggtccatcaaccgatgaatgaatggaaaaccagtatagacatggaatagaatatcacttaactgtaagaagaaataaactaccaatgtgtgctaaaacattatgctaagtgaattctgaaaacattatgctaagtgaaaaagccagtcacaaaggactacgtattgtataaytctatgtatatgaaataggcagaacaggcga

SEQ ID NO: 194358 - DNA, 492 bp, Homo sapiens
attttttctttcttaaatatttggtagaagccaccggtgaagtcaagttggcttgaagtttccttcatttgaaggattttacctacaaactcaattccacaaatccttatataacaatttagactatgtatttcttctacagcaagctttgattgtttgagactttcaaggttataacatttcatcgaagttgttgattttayggtatttaagttgttcataatatttatttccttattattctttcattgtctgtaatatctacaaggagattctgcttatcttcttgatattttgacaataatttctcttttttatctctttcttttttcagactccctttctctctctctctctcttcagtcaagacggctgaaggtttataaattgcattgatgttttcaaatagctagctttttatttgactgattttcttgttgatattccctgttttcagtttcattgatatcttatacattaattacttccttc

SEQ ID NO: 194359 - DNA, 583 bp, Homo sapiens
ggtttttgagttgccagagttcttctgttaattatttctcatctgggagagtgaatgttcctttaccctttgaagttgttgtcctttgaacggggctttttgtttctatcatttttattgcctatgagggtttgactgtggcataagtttgrtacagttgagtggcttcattcccgagtgcctttagagggcaaggatcagccccacactcctgggctgtatgttctaaccataggaggctggtctaagtccacagctttgtcctctagcttctcaaagtcaagccccatttgtgctggaggggctgagtttctcccagatcactggcaactgcactccttaggataaggcagtagaggcatgggtgtaagtgttctggtgggaagaatgggtaccccacagggaggagacactccagtggggggtgtcacaagcaggagttgctccaatgggggcaccatgggcaagagatcctccagcaggggcagcagtggcacggcatatgggaggcactccatcagggttgctgaaagcaagaggtgctctggtgtaggggcacttgggcaggggacacttctgcata

SEQ ID NO: 194360 - DNA, 583 bp, Homo sapiens
ggtttttgagttgccagagttcttctgttaattatttctcatctgggagagtgaatgttcctttaccctttgaagttgttgtcctttgaacggggctttttgtttctatcatttttattgcctatgagggtttgactgtggcataagtttggtacagttgagtggcttcattcccgagtrcctttagagggcaaggatcagccccacactcctgggctgtatgttctaaccataggaggctggtctaagtccacagctttgtcctctagcttctcaaagtcaagccccatttgtgctggaggggctgagtttctcccagatcactggcaactgcactccttaggataaggcagtagaggcatgggtgtaagtgttctggtgggaagaatgggtaccccacagggaggagacactccagtggggggtgtcacaagcaggagttgctccaatgggggcaccatgggcaagagatcctccagcaggggcagcagtggcacggcatatgggaggcactccatcagggttgctgaaagcaagaggtgctctggtgtaggggcacttgggcaggggacacttctgcata

SEQ ID NO: 194361 - DNA, 553 bp, Homo sapiens
ctaaggcagaaaaaaactaagatattctggatataaatttggtgaataaccaattagacctaatagaaaactgcagaatattccaccaataaccaattagacctaatacaaawctgcagaatattccaccaatcaaccacataatatacattcttctcatctgcacacagcatatactctatgatcaatcacaggctcagccataaagcaagtctcaacaaattaaaaatgaaaagaaatcatatcatttatactctgagaatacagcacacacacaaaatattatagaaatcaatactaaaaagatccgtttaaaccacacaattacatggaagttaaacaatctgctcctaaatgacttttgaggaaataatgaaattaaggaaattttaaaaattctttgaaaataatgaaaacagcgacacaacatagcacaatctctggaacacagctagagcaatattaagaggaaagtttatgacactaaatgcctacatcaagaatttaggaagatttcaaattatcaactaactgttgcacctagaggaactag

SEQ ID NO: 194362 - DNA, 553 bp, Homo sapiens
ctaaggcagaaaaaaactaagatattctggatataaatttggtgaataaccaattagacctaatagaaaactgcagaatattccaccaataaccaattagacctaatacaaatctgcagaatattccaccaatcaaccacataatatacattcttctcatctgcacacagcatatactctatgatcaatcacaggctcagccataaagcaagtctcaacaaattaaaaatgaaaagaaatcatatcatttatactctgagaatacagcacacacacaaaatattatagaaatcaatactaaaaagatccgtttaaaccacacaattacatggaagttaaacaatctgctcctaaatgacttttgaggaaataatgaaattaaggaaattttaaaaattctttgaaaatartgaaaacagcgacacaacatagcacaatctctggaacacagctagagcaatattaagaggaaagtttatgacactaaatgcctacatcaagaatttaggaagatttcaaattatcaactaactgttgcacctagaggaactag

SEQ ID NO: 194363 - DNA, 371 bp, Homo sapiens
agcagaatagcttggcatgttaaaaagactgtgtagatctatctgtttttattacacatgtcctttaaagcttagaagagtgcacattgtatgatttgtactgggttttaaaaaatagatttgtatattcacctacagrtaaatataggaataaagatacactttttacttatatgctgtactagaaagatgcaaaaagtacatgcctatgttagttctaaagatgaaaaagaaaaagttgatggtgaataagtttgagaattaaaattagggtctggggaatgagagggaaacattttcttgtcattttgcttcattttgtactgtttgacattctaggtagatgattgtgttcattttattgaaaacta

SEQ ID NO: 194364 - DNA, 630 bp, Homo sapiens
tcctttgcatttggttttcagtaagtctaaagtcttcttttgtgaggtgctcattaaaacatttgactcatcttcaactgcttttttattcttattgttgacttgtaagcattttttacatattctagatagttctttgacactacgtttgcaggtagtttctattaactgccttttattttcacaacactgtcttttaaagaacagctatatttaatgtcaataaagtgaatttatcatatttccatgatgcctatggttttggtgttctaagaaatctttgcytgtgaaaatattctccacccctgcacacactctgctgaaggcaaagatatttatacatttgtattttgcttggattttactcctactcactctctgatcagtatccatgttgctataatctggaataatatttcaaattgctgttaaggtaattatttaatagtatcaatatttatttatatctaacatgtttaattgatatgtgtgttgtctacagccataccacctgaacataccagatctcttctaactgatatgtgtgctctttactgcttcttgaaacacccattttattctgaatccacttttctttttttgctgaagtacattctctattaatgtgtt

SEQ ID NO: 194365 - DNA, 632 bp, Homo sapiens
tcttttttgacccatcggttgttcaagagtgtattgcttcattttcatatatttttgaattttctattctaggtgcttttttttcctggccctagtttattgcatttggtggccagaaaatatatttcatatatattcattttaattttctcaaatgtcttaaaacttgtattatgacctaacacatgatctgtcgtggagagtgtttcctatgcattcttctgtggtgggtgaaatgttctctatatgcctcttagtatcccttggtctgtctatagtgttgttcatgtcctgttttcttattattcttctgtctttgttatatctattattgaaagtgggatatctgtcatctatttacttaatttatttcactatacatgtacagcagtatcagcactgttaaccccttcaccataagatatacttaatccacttatgtacatttcttatgcacagtttatgtcctcaytggtttttacagacacaattaatgtccaaaatttcttaggttgacatctttctgccatccttttcagtgacgttgttttatagctttgttatataattagatttttgttacattctgcatttcatatcaggattcctgtcagtttctaagtttattttta

SEQ ID NO: 194366 - DNA, 602 bp, Homo sapiens
gccaatatattgtctaattcccagtaaagttccaytgctcttaacagtcgatcaatgtcaacacactagggatagagagcctcatctacttatttttaaaaatggagataagagataatttctgaaaatggtccactgatatggatttaatatacacttgaaacaaaagctgatttagatatatacatatatcttcaaagaagcattcacattttgacttgtgactctttctggtgctatattggaagagtcacttcactgcaagaattctgagttgtttccatcttaagacactgacagcatctcaataacataagttatcacctaactgacacttccacctggagtgcttgctctatttcagatcttcatatgaccaggctcttttcaccacttagattctctctttagagatctaaacacatagtcactccttgaacacacagtcaatttttaccactttgctttaatttattttattcatgacactagtgacagtacgtaataaatttgttgattaggttatttttacttatttgtgttcatttttttctactaaactataagccatataacagtatggatattgtctatcttgtttg

SEQ ID NO: 194367 - DNA, 602 bp, Homo sapiens
gccaatatattgtctaattcccagtaaagttccactgctcttaacagtcgatcaatgtcaacacactagggatagagagcctcatctacttatttttaaaaatggagataagagataatttctgaaaatggtccactgatatggatttaatatacacttgaaacaaaagctgatttagatatatacatatatcttcaaagaagcattcacattttgacttgtgactctttctggtgctatattggaagagtcacttcactgcaagaattctgagttgtttccatcttaagacactgacagcatctcaataacataagttatcacctaactgacacttccacctggagtgcttgctctatttcagatcttcatatgaccaggctcttttcaccacttagattctctctttagagatctaaacacatagtcactccttgaacacacagtcaatttttaccactttgctytaatttattttattcatgacactagtgacagtacgtaataaatttgttgattaggttatttttacttatttgtgttcatttttttctactaaactataagccatataacagtatggatattgtctatcttgtttg

SEQ ID NO: 194368 - DNA, 606 bp, Homo sapiens
tatgcaccatgatctgcaatatcattatgattttcatacaggtcagtaggacttttattgtggtaaagagtctgttttgtcagtattgggatttttatttttatgttagtgctgattagttgtgcctaaattttcaaaggaggaagttayagtgagacatctctgactcctcacgtcccattatggccacaactagttcgtctggtttctttgggattccctttgggcaagagcagggttcagtagtcaattcagtctttgggggtctttaggattttattttttagtttatatgtctccttttttgtcaaagtatgctagtagtggtactgatggctaagtttttatttttgtctcatgccgatgccagagtggtgtgtggcctgacctggttctatcatggccctaggtgggtcccctatggccaaggaacttacagccagaagactcatactcaattacatgttctaggacagatgggaatggaggagggcaagtatgcattaacctttaaaacccattttaaacaacattagagccaaaaattaaaagccaaaaggcaaggatacaaaattgacttatttataaattttatgaattgagcta

SEQ ID NO: 194369 - DNA, 606 bp, Homo sapiens
tatgcaccatgatctgcaatatcattatgattttcatacaggtcagtaggacttttattgtggtaaagagtctgttttgtcagtattgggatttttatttttatgttagtgctgattagttgtgcctaaattttcaaaggaggaagttatagtgagacatctctgactcctcacgtcccattatggccacaactagttcgtctggtttctttgggattccctttgggcaagagcagggttcagtagtcaattcagtctttgggggtctttaggattttattttttagtttatatktctccttttttgtcaaagtatgctagtagtggtactgatggctaagtttttatttttgtctcatgccgatgccagagtggtgtgtggcctgacctggttctatcatggccctaggtgggtcccctatggccaaggaacttacagccagaagactcatactcaattacatgttctaggacagatgggaatggaggagggcaagtatgcattaacctttaaaacccattttaaacaacattagagccaaaaattaaaagccaaaaggcaaggatacaaaattgacttatttataaattttatgaattgagcta

SEQ ID NO: 194370 - DNA, 559 bp, Homo sapiens
tagatcctgcaggtgtgcttcattttaaaaattccttttcttttgtctcctctgactgtgtattttcaaataggaataaaccctatttgattattgtatattaatgttttataccttgctgaatttgatttgcttgcattttatggaagatgatatatatatgaaaattaattatataatgcattaatattttattaaatttaagaaataaagctaatgccaattagcaaattgaattactttgagctaaataaaaataattagcacatccatcaaaattgtgctttaatgcaactctacctgtatatgtatctatatatttatttacatatataaatttaagtatagaaatttatmcttagtgagaaaacattttatacatttttagactatacaaactagctgatttttttaaaaaataaaaatatataacattccattatttctcagctctaaattccagaaagtgtaaacaaaaaaaaaaaaaccaaaatattttgaaagtaaaattattataaatatgatctttaattttcctcagttttattccttacagagt

SEQ ID NO: 194371 - DNA, 559 bp, Homo sapiens
tagatcctgcaggtgtgcttcattttaaaaattccttttcttttgtctcctctgactgtgtattttcaaataggaataaaccctatttgattattgtatattaatgttttataccttgctgaatttgatttgcttgcattttatggaagatgatatatatatgaaaattaattatataatgcattaatattttattaaatttaagaaataaagctaatgccaattagcaaattgaattactttgagctaaataaaaataattagcacatccatcaaaattgtgctttaatgcaactctacctgtatatgtatctatatatttatttacatatataaatttaagtatagaaatttatccttagtgagaaaacattttatacatttttagactatacaaactagctgattttttwaaaaaataaaaatatataacattccattatttctcagctctaaattccagaaagtgtaaacaaaaaaaaaaaaaccaaaatattttgaaagtaaaattattataaatatgatctttaattttcctcagttttattccttacagagt

SEQ ID NO: 194372 - DNA, 583 bp, Homo sapiens
tccaggaacaaatttatacaaatatacaaaataataaatataggactatggctctatattttgtataatataatataacattaattataactattaacagtcattctatttgtgatgtattttttagtacgttctttgcaatatgcaattttccttaagaacaactttctggattcttgtgttatttaacattggaagagttctttgacagtgcgagtatgtgggcctctctcctgtcattttcagtagtaaagtgaaatgattttcagtttccagtgaattcactgctctcttaattgccccckgaagagcaaactgtcagcaagaatttctaccgaatcttgcataatgattaaaaatggagaaaccaaggcagctacagaaaaggtcactgtataatctcctcttattgaaacaaatagatttaatggaagtactccatcttttcggtagatattggtgacttttctcagtcttgaagaaaagatcccttccgattttattacactgaattaaatgttatgtttatgagtttcttcttttcaacagtaatgaggtgagagtctttaactttcattgtttc

SEQ ID NO: 194373 - DNA, 583 bp, Homo sapiens
tccaggaacaaatttatacaaatatacaaaataataaatataggactatggctctatattttgtataatataatataacattaattataactattaacagtcattctatttgtgatgtattttttagtacgttctttgcaatatgcaattttccttaagaacaactttctggattcttgtgttatttaacattggaagagttctttgacagtgcgagtatgtgggcctctctcctgtcattttcagtagtaaagtgaaatgattttcagtttccagtgaattcactgctctcttaattgcccccggaagagcaaactgtcagcaagaatttytaccgaatcttgcataatgattaaaaatggagaaaccaaggcagctacagaaaaggtcactgtataatctcctcttattgaaacaaatagatttaatggaagtactccatcttttcggtagatattggtgacttttctcagtcttgaagaaaagatcccttccgattttattacactgaattaaatgttatgtttatgagtttcttcttttcaacagtaatgaggtgagagtctttaactttcattgtttc

SEQ ID NO: 194374 - DNA, 583 bp, Homo sapiens
tccaggaacaaatttatacaaatatacaaaataataaatataggactatggctctatattttgtataatataatataacattaattataactattaacagtcattctatttgtgatgtattttttagtacgttctttgcaatatgcaattttccttaagaacaactttctggattcttgtgttatttaacattggaagagttctttgacagtgcgagtatgtgggcctctctcctgtcattttcagtagtaaagtgaaatgattttcagtttccagtgaattcactgctctcttaattgcccccggaagagcaaactgtcagcaagaatttctaccgaatcttgcataatgattaaaaatggagaaaccaaggcagctacagaaaaggtcactgtataatctcctcttattgaaacaaatagatttaatggaagtactccatcttttcggtagatwttggtgacttttctcagtcttgaagaaaagatcccttccgattttattacactgaattaaatgttatgtttatgagtttcttcttttcaacagtaatgaggtgagagtctttaactttcattgtttc

SEQ ID NO: 194375 - DNA, 556 bp, Homo sapiens
agatcttttaaagatttgttccctctcgttttttatattcatttatgctgctcagatcaaaccaagtaggacgtttgctgctcagttactaaggaagaagaaattttaacagcttgctaagtgtagagttccattaagtgaccytaggactccttagaattgaagaggctccaaaaaaagagtatagcatcttgctttgatacgcaacctggaatttttaaaatgagactttttcttatcaattgttgcaggttttatttaattgacagtgttgaaatatttgtattttgaagagttgtatacagtcctatatcatgtacatttactgaaaatcagtccttcaagatgttatacagtcttaagccataaactaactgctctgttccaaactggctacaaaaaaataaataaattaaataaaataagacccatttatcctcctttacatttgaggttttaatttcagaaatatttcattcagattacttactggggaaaaaaaatccaatttgtatctctactaggacaaaatgtgattttacttttcacacgtctg

SEQ ID NO: 194376 - DNA, 612 bp, Homo sapiens
gtattgagttgaatctaattgaattgccagtgataaagatgtatatttttaaactcgcattgcttaataagagtaagggactcattcacagtttgctaaattaatgagaaaagaacaatttatttcctcttgtttaagcaatttttatttttaaagcatgttatgcattatttattgttctaagtacagtgttaaagagaaatgatcacctgtttagagaccttccaaaacacatcggattcaataggctaagtgaaaggtgktaatcacatgcaagcaacctatttccctttttaacctttacatttccattagttttgaagttattttaatagtgacaagattggcttaactggtatgttacagtatttctgaaagatgggaaataataacagcagaaatgatacaaagtcaagcttggaatagaatagtaaataatggtgcctgctataataatcacgaaaacaatgcaatgtattctatatttatgttatatctttcatcatatcagtattcatttttatctataaatatgacaatatacatgtgtactgccctggcctggtataatatttatccttactttgactgaaccgcttattcaaagaagtc

SEQ ID NO: 194377 - DNA, 523 bp, Homo sapiens
tattttattgctctaaacacatgtaacagtaatatatccttatgccatttaccagtgttccagatagagcatgttagccaattaaacttatgaacaagttttaaagagaaattaagcaattttatgttaagctctaagcatgttacgtgaaccaaaaaawaaaaaataaaaatacatatgtatacatataagtgtatgtatgtaaataagtatgtgtgtgtgtgtgtgtgtgtgtgtgtgtgtatacacacacagggtggggtaagggaaagagatgaaattttacaatttgggtccaatatatggatacctgtttgtttataggcttataatttattgacttatctaaacagagaagaatatccacattgtcttatatagcaaggaagaaaattaatagcaaaaagactgtgaaaaaaatctttcactcagctacattatttcaatacaaagttcatgtttataaaactctgacttaagttcattagtccccacttactggcagttttgctttctatggttt

SEQ ID NO: 194378 - DNA, 542 bp, Homo sapiens
tggctacagttttctacctgtaagttaaaaagacagcagraagcaccaaaaggggggggaacattcagtgatacatagtgcataaaatattttggcacactgacagatttaaagtcagctcgaccatttacttgctgtgcaatgtgggagacatttcttacctgcacagagatcagtttctctgtcagttagaaactataaactgctgccagaaacagaaactaaactttgatggctgaacacaaatgggtttattcttgcctctaaagtaagcatgaggagacagtccagggttggtatgaaaactccaaaaagtcatagaaaacttgggtccttatctctgctttctttagtagatgtcttctgtcctcaaggctacctcagattcatggtggctccagttatcacatccacactccaggcatgtgttaaaaatgtgtgcattggtagggaagaggataagaaggggacatgccaaatatttgcacttctctgcaggaaattctctaacagtactatcaaatagtattttgcttctcatt

SEQ ID NO: 194379 - DNA, 532 bp, Homo sapiens
tcattaccagttatccatttaacatctgtctttcccccactagggtataagctccatgagagtggagactatgactacttcatstactttcaatagtatctggcacatagtgcttaagaaatatttatcaggaagaatattatgaatgcatgcctctcactggtctatatttgaaggtgacatttcaacagatgttctgaataaagtcactcccgacacttaatgtgaagaattctgactatacctgacctatctagaactccaataaatgttttgtggataaactttggaaatgtcatctgagtctcagattactaaatgaaaaagatttcttatataaaataatatgcccttcaatttattttagttaacttaatgttcaaagattttattctttaacatcaatgttattaatataaaatcagtttccatctatttcaagtaccacacatagccatatttctgaatgacctaagttacagcaacaaagtaaattacttttatttttgatgttttcataattaaatgactc

SEQ ID NO: 194380 - DNA, 560 bp, Homo sapiens
gggatgattccctcctcaagtagaggacaacaaatgggtaactygttccccatattcatgtagatgatagctccagctttggctaatagatccctccccaataagtgtgtgggactttcaggcataacaagaaatgcatgtgaaaagagcaaagtctcccaattacaactgaggaggtgggagaaatacctagttgcaggctgtcccaggattcctcagatggtaacagactttgaagacagccacctagggcaggaaattaacattgagaatgccacgccggtgtccaggaagaagtcaatttcctggccctcaatggttaaacttacccgggcctcagtgagggtgatgacatgagctgatgcttgccctgggcatcctcagtcctgttgttggatcacttggttgggggcttctggcccagagaacctttgtcctctggggcagtgggccttccagtgattgccttggcataatggacatgagcaagggggcggcttgtttctcgttggacaatcttttttaagatgtccttgcagaccacactgataacaagccct

SEQ ID NO: 194381 - DNA, 560 bp, Homo sapiens
gggatgattccctcctcaagtagaggacaacaaatgggtaacttgttccccatattcatgtagatgatagctccagctttggctaatagatccctccccaataagtgtgtgggactttcaggcataacaagaaatgcatgtgaaaagagcaaagtctcccaattacaactgaggaggtgggagaaatacctagttgcaggctgtcccaggattcctcagatggtaacagactttgaagacagccacctagggcaggaaattaacattgagaatgccacgccggtgtccaggaagaagtcaatttcctggccctcaatggttaaacttacccgggcctcagtgagggtgatgacatgagctgatgcttgccctgggcatcctcagtcctgttgttggatcacytggttgggggcttctggcccagagaacctttgtcctctggggcagtgggccttccagtgattgccttggcataatggacatgagcaagggggcggcttgtttctcgttggacaatcttttttaagatgtccttgcagaccacactgataacaagccct

SEQ ID NO: 194382 - DNA, 560 bp, Homo sapiens
gggatgattccctcctcaagtagaggacaacaaatgggtaacttgttccccatattcatgtagatgatagctccagctttggctaatagatccctccccaataagtgtgtgggactttcaggcataacaagaaatgcatgtgaaaagagcaaagtctcccaattacaactgaggaggtgggagaaatacctagttgcaggctgtcccaggattcctcagatggtaacagactttgaagacagccacctagggcaggaaattaacattgagaatgccacgccggtgtccaggaagaagtcaatttcctggccctcaatggttaaacttacccgggcctcagtgagggtgatgacatgagctgatgcttgccctgggcatcctcagtcctgttgttggatcacttggttgggggcttctggcccagagaacctttgtcctctggggcagtgggccttccagtgattgccttggcataatggacatgagcaagggggcggcttgtttctcgttggacaatcttttttaagatgtccttgcaraccacactgataacaagccct

SEQ ID NO: 194383 - DNA, 460 bp, Homo sapiens
tccccacttgacccaggaagtccagcyggcctcacctctcaatttgcctcagagtttcaacattattagtgtatagaaatgctgctgaatctagtacattcattttgtaccctgattctttactgaaatcattttcaaattgcaggagtcatttgatggagtgtttaggattttctagggaatcatatcatctatgaagagagatattttgatttcttctttttctatttggatgccttttattttcttcactgattgttctggcaaagacttcctgtagtatgttttataggagtgatgagagtgggcatccttgtctttcccagttctcaaggggaatgtttccagcttttgtccatttagtatgatgttggatgtggattcatcgtacatagctcttattttttggaggtgtgttgcttcagtgtctattttattggtcatttgtatcatgtaagga

SEQ ID NO: 194384 - DNA, 555 bp, Homo sapiens
gtgggccctgcagctggttatctgggcgaacaacactgcaggaagaaaacagaaagtgcaaagcagaggtgtgctattttggggagacagcaaaagccatgtgcaggaagytgaagagcagagcagatggggatgagactcgagagtgggagcggaattgtttagcgcttcatttgaaagttaacattgtggagagaatacaaaaaaaataccacagatgatttcaaactatacaagtcaggtattatggggctacacccaccagacttgccatatttgtgaatccttgagaaaactttgagctgtgcctcaaaagtatttaaaccaaagagctgtgtctctgaagtatttaaagtattatgacatttaaagcgcacagctacatggcgaagcagtaacacgtgaaagatgctcctcctctacccttcaacttctagaaacagctgctaggtcagcagtggcataatgtgcccaaggtggtggctttcccacaccagtgccaccgtgaaggggctctctgctggacggattcaaatatcccatttcttgctgaac

SEQ ID NO: 194385 - DNA, 559 bp, Homo sapiens
ttatactatacaaaactaatactataaaacaataatgaaataaattgaagaggcaacaagaaatggtggtttatgctaattattggaaaaattaatamtgttaaaatgaaaatattattcaaagcaatttacatattcaatgacatctctatcaaaataccaatgacattcttccgggaaataggaaaaaaaaatgcctaacacttacgtggatccacaaaagacttcgaatagccaaagcaatcctgaacataagggacaaaagcagaagtgttacaatacctgatttcaaaatatctcacaaggctatagtaacaaaatcagcatgctactggggtaaaaacagaaacatagagcactggaacgtaatagagaacccagatataaatccacacagttacagccaattcagttttgacaaaggcaccaagaacatacaatggggaacaacagccttttaaataaatactggtagggaaacttgataaccatatgcagaagaatgaaactatatccctcttctcaccatatacaaaaataaaatcaaaacagattaaac

SEQ ID NO: 194386 - DNA, 426 bp, Homo sapiens
acttcatgtcctccctaactgctaatttctcccaacactgggttacctgccctcctatttgctgccaaagcagattttaaatcctccattaaaacactgtatataattccattttacatgtctctcccaagctacactgtaaataccttgagaacaccatttcttcctggcatccaacatcttggtcattgcataggtaytcaactatatttattgagttgaataaacaagtgaacacactaaataaataaatggaataaataaataggaaacaaaataaaattttacctaactggggttttgccatggtagtgacagcatggcacttttgcctattctttttgtgcaacaatttatgatattaaacccaacatgaccaggcaaaagccccttagtttgccgtgaccattaaaacacctgcggtca

SEQ ID NO: 194387 - DNA, 561 bp, Homo sapiens
attttaatatgtcaccatcctctttagatggtagtagctggattaaatgaaatccttcaaagcagcagcatccagagagactacagtctctggttcaggcaccgtatttccatcagtgtmgcctaatctactcttcttttgatgcagaaaatcacattgtggcctaatattatacccctctattaataaccatgaagctatatcttttcaaccttctactaaaatatttgattattattatctaggcaatggaatgtttcagtgaatttcacagtgagttctgctttctttatcaaaattccaaaatataaaggcagtctgatatgctgtttctcccttatccctctttccctccctcttttttcctttccttccaaaagaggttattcctggcaaagtctgtgcaagggagtatgataccacatgagaagcaaaacagacccagatacaaatcattttactgaagtcttggagcagccttcgaagaaaaacaaatttcataccagccagaacctgagtggaggccaagaactgccaacatatttggaaggccaaactcct

SEQ ID NO: 194388 - DNA, 363 bp, Homo sapiens
ctcctggggaggtgaatgacaggatttctgctgcgacccaggagttagcggtgaggttaggatactgggaagagtgcagtcaagtgttgaataggtgctgtaggggatrgaaaaggaagccaaccggtaatgagcaacaagattggtaaacagtatctagctaaagatgaaaaacgtcacaaatttctcatatagctaattagtataggtataccaattttctgctgcaacattcaacagtcaaggtacagacagttgtgttgatatcactactaattcttaatttcacagacacatgttgcttgatgtccctggagtcccccaaatacttgtagtcactcttcttttattaagatctgtgat

SEQ ID NO: 194389 - DNA, 600 bp, Homo sapiens
ttgacaagagacaaatgtttcattcaratgctgcatttcgcatattggaaactgtaatgaatttttgtgcacctctctacctagttcacaatgtcaggcccaggcattgaagcacctcaggcttccctcacaaaattaaatttaatgctataccctccagtaaaatggtacataaatcaagcatttgatttgcatggactgcagcaagcagctccgttctggacaaatataaacccaactctgaatattatgtcagggacaggaacaaagcaatctaggacttccaataaaagtctggtaccaagggtaattcatgctggtattactgctctgtgttaagcctgttattagaactcttgttttaacctccttttttcatttcaaaagaaaatgttttttttttttttgacctccctgtattcagaaaaccagtgcacactcaaaccagtactatttataaactggtatctactaggacaaccatgggcatatttattttcttcccccacctacccctaccaacatagagtacaggaatggggtacatatgagtaatcaagaggaaagaaagaaaacaaagggcatggaataaaatatacc

SEQ ID NO: 194390 - DNA, 470 bp, Homo sapiens
aatttgtgaatattaaaaagataacataaaaatttaccaacaactcttgaattgaaaatagaaatcaactgatattgaaaagatcacttattttacgttatgaaaacgaataacaaaataatgcaaaattacaatagagcaggtggttgtaatggagcaacaactaaacctcaccacaaagaacacgaactagaastaggtttcatctacctgttggcagcgggtgcttgggggcctgtgtggagaatgattcagaaactgttctgagctcacctggtgtgatggtgtgaatgttgtgtctccccaaaatgcataattgaaacctaatcaccaatgtgagagtattaggagctggggcctgggataggattagtgtccttctaaaaaagaccccgaagagctgccttgccccttctaccatgtgaggacaaaacaagaaaacactaggaaccacaaagagagtcctcaca

SEQ ID NO: 194391 - DNA, 371 bp, Homo sapiens
tgctgaaggctctaggggagggtatgttccatgcttttctcgcagctctgggtggtgccaatgatactggctctccttggmgtgtagatgcatcattacaatttcagcctcttcttttccatggcattctctgtgcctatcttctccttttcttataaagatccatgttgtattagattaagggctcactctactctagcattacctcatcttaactaattgcatcttaaattaccttatttccaaataagtttacaaacctgaggttctgtgaagggcatgaactttggggggactctatccaacccagtacaatacataaggggttccttcactgaaacactcattaatgcatgaaatcactatattaa

SEQ ID NO: 194392 - DNA, 400 bp, Homo sapiens
tcaagatgtcagcagagccatgctcttgctgaaggctctaggggagggtatgttccatgcttttctcgcagctctgggtggtgccaatgatactggctctccttggcgtgtagatgcatcattacaatttcagcctcttcttttccatggcattctctgtgcctatcttctccttttcttataaagatccatgttrtattagattaagggctcactctactctagcattacctcatcttaactaattgcatcttaaattaccttatttccaaataagtttacaaacctgaggttctgtgaagggcatgaactttggggggactctatccaacccagtacaatacataaggggttccttcactgaaacactcattaatgcatgaaatcactatattaactt

SEQ ID NO: 194393 - DNA, 371 bp, Homo sapiens
tgctgaaggctctaggggagggtatgttccatgcttttctcgcagctctgggtggtgccaatgatactggctctccttggcgtgtagatgcatcattacaatttcagcctcttcttttccatggcattctctgtgcctatcttctccttttcttataaagatccatgttgtattagattaagggctcactctactctagcattacctcatmttaactaattgcatcttaaattaccttatttccaaataagtttacaaacctgaggttctgtgaagggcatgaactttggggggactctatccaacccagtacaatacataaggggttccttcactgaaacactcattaatgcatgaaatcactatattaa

SEQ ID NO: 194394 - DNA, 648 bp, Homo sapiens
tctacaacatgcaggtatcaatacatttttatctacaaagatcatgaagaatcaagaaaacataatactatcaaaggaaaaaaacaaagctgtagtaaacagtactaaagaaatagagatccacaaactgcctggcaaagaattcaaaattaaagaacctcagtgagctacaaacgaacatagatatagatataaattttatatatacacacacacacacacacacacacacacacacaactaaatggaatcagaaaaacaatacatgaacaaaatgagttcaacaaagaagcagaaatcagaaaaaacaagcaaacagaaawcttaaaactgaagaatgcagtgactcaactgaaacatttaagagagagcttcggcagcagactgacttgatcaagcagaagaaagaattggtgaactcaacggcaggtcatttgaaatatctactcacaggagtgaaaaagaaaaaaagaatgaaaatggtgaaggaagcctataatatgtaagggatatgatcaagtgaacaaatatatgaattatgatcattttaggaggagagagagagaaaagggaagaattctatttaaagaaatagctgaaaacttcccaaatctggggagagagaggactatctaaattcatgaaacc

SEQ ID NO: 194395 - DNA, 648 bp, Homo sapiens
tctacaacatgcaggtatcaatacatttttatctacaaagatcatgaagaatcaagaaaacataatactatcaaaggaaaaaaacaaagctgtagtaaacagtactaaagaaatagagatccacaaactgcctggcaaagaattcaaaattaaagaacctcagtgagctacaaacgaacatagatatagatataaattttatatatacacacacacacacacacacacacacacacacaactaaatggaatcagaaaaacaatacatgaacaaaatgagttcaacaaagaagcagaaatcagaaaaaacaagcaaacagaaaacttaaaactgaagaatgcagtgactcaactgaaacatttaagagagagcttcggcagcagactgacttgatcaagcagaagaaagaattggtgaactcaamggcaggtcatttgaaatatctactcacaggagtgaaaaagaaaaaaagaatgaaaatggtgaaggaagcctataatatgtaagggatatgatcaagtgaacaaatatatgaattatgatcattttaggaggagagagagagaaaagggaagaattctatttaaagaaatagctgaaaacttcccaaatctggggagagagaggactatctaaattcatgaaacc

SEQ ID NO: 194396 - DNA, 389 bp, Homo sapiens
agcttaaactcagagttccgagaagtgacatttgaagtagattacaaagggtaatgggttaaaggcatgagaataaggacaattaaggaaatcataaagggagagatatggagacatgtttggataatgatgaacagaagtgagaggcttggcagttgtgtggaatggaagtggaggctgaaaatgttctcctgagccacatggtrcaggccttgtttgcctggctatggtgaagataacctgaagactagagccattgagtgtttcatgatgtcttgcagaaggtaatggtggaaccatgatgagacttaaggtcttatcttccataaagttctctttaacaaaggatcaaatcttgttacctcattttagcagaaagggtggaaata

SEQ ID NO: 194397 - DNA, 447 bp, Homo sapiens
ggttgcagtgagctgagattgcaccactgccctccagcctgggggacagagtgagactccatcacaaaaaaagagaaaaaaaaaagaaagagagcgagaatggtaaactgatatatagaaaacacagtgtagcgggagaacagaggaggacmcagagtaagaactaaagatggggacaataggatgaaaccggtctcctgaaatacaactctgagtccagtatgaagggtaaagagggagagactgaagacataagctaatactcacaccaataaggataacatttattatttacatcatgctaagcattgtgcaaagtgctttatagcctaaaactcattgaatcctctcaatagccctatgagataggtagctatggtagacagaataatgtccccaaagatgctcatgtcctaatccctggaaactgtcaatatgcaaaaggag

SEQ ID NO: 194398 - DNA, 592 bp, Homo sapiens
atatgtagcatagcaaattgtaaaacataatgctgacaatttaaaatagtggaaaaaaactaaaaaaggaaaraataaccccagaaaaccccccaagaaatgaaaaagaaaatttgacatatggaaaagtatatggaaatagtttatgggcaattgcatggagatagtccctaagagctgactgattttcaccatcattgactatattttgaagtcttccacagtgaggcatggctgcattttttcttttagggcacgacccaccttggagaatatgctcactctggtgctgctctttttaaaattcttctatgatttgctgtaccccaacatgagcattttctattaaaatttctcatcttctgtgccatcttccatgttgctttgaacatgtggaaattcatttcccatgcactcatatacagaccaaaaatttgggagaaacaatattggcgatggaacagcaacactgttgcatgtcttcttattcttctgtgcatataattatttttgaaccagtctgtaacttcattaggcttcttcaggcaaatatggctttaactcataaaagctcaaggaatttcgtcagctg

SEQ ID NO: 194399 - DNA, 635 bp, Homo sapiens
ctggcacaatttaagaaatgtggttcagaaatttgcctgtgaatggtacataggtgctggagcttcctttctcagattgcctggtgcacacagcagggattaatgtatcaacttcatgtatgccctggactggaaaacctcccaatttttatttcctttttcttgcacccatttcctcaaaatcttactcattaaaattgacagtgtagactggcaggtcgagaatgtgatggcaaagagaaagttgcaagttcccttgaatgkttaatcctaatcacacatgcatttattatttgcacatttttttttttttttttggaggggggacagagtctcactctattgcccaggctagagtgcagtggtgtgatctcagctcactgcaacctcagcctcccggattcaagtgattctcctgccccagcctcccaggtagctgggattacaggctcccaccaccacacctggctaatttttgtatttttagtagatatggggtttcaccacattgaccaggctggtctcgaactcctgatctcaagtgatctgcccacctcagcctcccaaagtggtgggattacaggcgtgagccaccatgcccagcctatttgcgcatgtttcctactgccggaaga

SEQ ID NO: 194400 - DNA, 635 bp, Homo sapiens
ctggcacaatttaagaaatgtggttcagaaatttgcctgtgaatggtacataggtgctggagcttcctttctcagattgcctggtgcacacagcagggattaatgtatcaacttcatgtatgccctggactggaaaacctcccaatttttatttcctttttcttgcacccatttcctcaaaatcttactcattaaaattgacagtgtagactggcaggtcgagaatgtgatggcaaagagaaagttgcaagttcccttgaatggttaatcctaatcacacatgcatttattatttgcacatttttttttttttttttggaggggggacagagtctcactctattgcccaggctagagtgcagtggtgtgatctcagctcactgcaacctcagcctcccggattcaagtgattctcctgccccagcctcccaggtagctgggattayaggctcccaccaccacacctggctaatttttgtatttttagtagatatggggtttcaccacattgaccaggctggtctcgaactcctgatctcaagtgatctgcccacctcagcctcccaaagtggtgggattacaggcgtgagccaccatgcccagcctatttgcgcatgtttcctactgccggaaga

SEQ ID NO: 194401 - DNA, 440 bp, Homo sapiens
tggaactatctgcctgtatttaccatcattgctgtacctgttggggsattctcccatctcatgcctcaaccaggatgagagattgcagtgcccttgggtcctgttccttttctgtcttgctgactatgcctcaccaccatcaaacacactaggctacacccaaaccctgtccttcctctcacctgctttgatttgctatgataaactgcactgccttatagctgaatctcaaaatagtacaaacacagtggtgcacaacatgactataattaggcagtaaataaggagaatgaagtcatagtctaatacttgacacttggcaatataatctgttgagatgagcctgagacgtctgattttttttttttttttggcacctaaatctaagcaaattgcactatgtctccatctccacattggtatagtacaaggaccaacga

SEQ ID NO: 194402 - DNA, 624 bp, Homo sapiens
ttgggtcaaataatgcttctttgttttttcctgctatactttgccctttattatttcttccctacttccctgtcttagcatgccattatccccaattcatttcatacttattattcataattcaatcttcatamaatgacttctatgattctatgacactgtgattctatgacattaactcagctgacatttctaatcctgacaacctaactcatcctccaggttaacaacatcagtgcttgcagtaaagctcaccccttttccttaagcctggaaaccaccttgtttattcctttttacagtaggctgagctaaattgatccttgtgagtaaatcaccctaggtcttcatttctccaattacattgccatattgccctttcccacacaaacttgaaataccaagttccaccttcaaggtagagatagcttattaagccctcctttgtactggccacatactataaacacatttcaattattataactatctcactgcaatgtaatatttgtttacctctttgtttcccctactagatctaaactactcctaggcaggcattcaattaattactctgctgtctccaatatttagcctagtatctggcacaaagtgggcatttaa

SEQ ID NO: 194403 - DNA, 607 bp, Homo sapiens
aaacatttgttctaacacttacaaatctgctggttactataatttggctgatctaggctgggctctgctgggcacctctgcttcaggctgaaagttggctgggcttgactttgagctatcagttggattcaggtcagcttctggggcccagccagcctaaagtggcagcaactacacagaggaaattcctgcacaagcgtakgtcaagcctctgttcatgtcagatctgctaacatcccattgaccaaggcaagacatatagccaaacccaagtccagggacaagcgaacatatcccacgtaccacaagcccatggcatgagcttgggtatgtgattcaaccactctctgacaactcattggctttctggcatttcttttatcccatcttaaccccaccaatattccaactaacatctccagcagttcccaacttttttggaccacaggactttcttctgactaatatttaccaaaactagttccgtggaatatatttaatgttcgtctatacacaactggctgtacgcattcctgtggaatgaggctcaattttcaaacacaagattctttacagtgtaagagaaaaagggggaaaaaatctctca

SEQ ID NO: 194404 - DNA, 549 bp, Homo sapiens
ttctaattccaatagatccttataattccctatcaggaaggctcccaaacagtgcaccctggattgattttacatgagatgcatctcaccatgggttctggagtctacctggatttgaatcttatctctgccattgatttacctgtgcaacctgggaaaggtgcttaagttctatggaatttatttgtttataaaatagggattaagaaaccttcttttctattttttaatgtctgaaaaccattgtttkatagattttctcagttttaaatacagtagactttatttttgagaacagttttagattttcagaaaagtcgaggaggtagtataaagttcccacataccccataccattttctcttttatcaatatcttacattaggatggtacatttgtcataattaatgaatcaatattgacacattattattaagtaaagtccatagttaattttatttctttagttttcccctaatgtcccttttcttctttaggagcctatccaagatgccgcatcacatttagttgtgatgtctctctagggtc

SEQ ID NO: 194405 - DNA, 503 bp, Homo sapiens
ttgatgattgactgtgtctcccatgtccacgtcaaaagatcagtaacagttacccggattcatatatcatgacaaagaaaagcaaaaccttctaaaactaaactctggagtgtgggttatgagcctgctctgtttaatagatgaggagatactggctggagggcttttaccaggctcaaaccttgagcatcatcataattcttagtgcttaaaagggcagctcagaatattcagcacctgcctttgtggctgaaaccagccccaggaaacacttgataaatagtcatagttattaatatttgcccctatatcacctagttccactgatcacctgtagccatctgttctagttctgctgtgtgagaagctttgatggaaatgcccattaatcacagcatcacagctggccttttgrggattgatggcaattagttgacaatatttatttgagaagctgtattactttgtgattatattacagaaccatgagtaaatcatgctcc

SEQ ID NO: 194406 - DNA, 595 bp, Homo sapiens
gaaatcttttgttttcataaaatgttagcaaaagggctctgtacattaatatctcttactcttgattctcctgacttctttttaatgtcccttttacaaaataaaaattgttttttaaaaaatgactatctagattcccttctcaaggtgtaaacagctaaactaaaaatatttctctctctgacaagaggtgagaagatttagggctggactgggtctctcttttctgttcatttacttttcttcctcaatctttctaaattcttgacttttgggtttctggtactggaaagatatgcagttattcagaaaatgccaacatcagtgagctgtcaactttacttatttgtgttraatctaggtttgttaccaactggtatcattttgagaaaatattccattgatttgtgtgagttaagtagatttagtatggaggaaattaacaagatacagacaccaggaaagaaaaggaaagtgaaaatatattgggaaggaagaggagagagagagagaagctaggaagcaacatgaattgagtcagaaaatatacttggattaacctgtgaccatgatgtcaaattttggttggataata

SEQ ID NO: 194407 - DNA, 608 bp, Homo sapiens
gaacatttctgctctggcagtaggtcacagcagaaaatctgcctcaagccatttaggcataaggaggtaacctcttgaggattccactgagaagacttgcaagcttggctaagggttttctttcctttacatgatgggcaaagaaggaagtccataattattttcaccagaataatgtgatatataagagacttatacattcatactttaaaactcatttgctactagaaaagagttgcttaacttagtgtctcttgtgtttaaacagggcctgtgaaataaaaggtttgggatatcctggaaccctaaggttcatgttagaagcaaggagaggagccattgctcagtctccatggtgagagacaaacacatctgaatgcccagtcagccaagatgggcatttaaaacaagcaagacttcccaagtactagtaagagcttgttcatttcagtggagtatgtggtgtttctttattatgcacttaaaataggtagtttctataacaacagtcttaacttaaatagatgcatgctcatctctttgttatggaggataacatttcaaagacactgttctsctttgtaaatcactttcaagacagaaaaaga

SEQ ID NO: 194408 - DNA, 525 bp, Homo sapiens
ccaattcctcgtaataaatctctttcyatatgtatatgtgtgtatgtgtgtgtgcaagcatatacatatatgtatgtatgtgtgtatgtgtgtgtgtgtatatatatatctgtgtgtgtgtgcatatatatatatctgtgtgtgtgtgtgcgtatttggttctttttctctagagaaccctgactaatacacacaggatactctgggaagaatagtcaggcctgcactagttttgaggatcctgtccgtatttgttgagattgtttaaaccccataaggcccagaacagcacctgccgcaagataggagctgaactgatctgctcttatattcctaaccttctgctatcatgagatcacatatatgaatttgctctcagtgctctcaaaacataagtaaaagtaaaagttaatgtttgttttaattataaggtatataagccaaataatctggtctgattccaaagcgtagcactcaacgattttcatcagagccacaaaaaaggaggggatttacaaaacaaaa

SEQ ID NO: 194409 - DNA, 582 bp, Homo sapiens
caaccagcagcccttggggctgctgtgcctatggagtagccattcttttgcttctttactttctcaataaacttgttttcactttatkgatatgcctcaaattcttgcgtgagatccaagaacagcacaatcatggctcactgcagccatcttgggttcaagccatcctcccacctcagcctcctgagtagctgggactatagataggggaaagtcaccacacccagctacctttgtttattttttgtagagatggggcttccaccatgttgcccaggctgatcttgaacttctgggctgaagctatcctcacacctcagccttcctaagtgctaacattacaggcatgagctactgcacgcagcctatttttttaattctaaggtaacttcagtgtgaggctaaggttgagaaccaggatagtaagagatataaaagtatgtcttaaatgaataagataaacctgtgtctctctgaagcttcatcatctgtgtctgacacttttgttgccattcacccaatttctgaagcccaatgcctaggagtgccccttgattctcccgttagccttaaataatgagg

SEQ ID NO: 194410 - DNA, 522 bp, Homo sapiens
aggaatgcaaaataaatcaataccttcatgctacactgacctgtcygtactcagactcttacatggtcatatcacaaactaacctgattcaatttgaaagtttctgatgtctagcttgtgtcagaaaaataaacaatatttaagtataatctctattttttattgttttgcatgtttcaataattaaagacatatggaaaatgttacttttagaccttggctactctgggcacactgcctatggggtaatcctgctccacaaggagcagtgaaaaaaaaaaaaaaaagacctactagatgtcacaaatacaataggaatgtattaaactaaattattatatccagtaacgtactaattattcctagttgtcaacctgctctgcacccattaaaataaaatttgtattgctccaggaaaaagataaatagagattagaattagaaacttaatatttggctttgtctttcaaaacagtcttctaagatctaagtctctatacttaagtctgaagtttttggttt

SEQ ID NO: 194411 - DNA, 384 bp, Homo sapiens
ccttactcaccaatattttatcaacatcatttaattttataagccatgctctttaaaatgtatcattggctttaaaaatgtataaaattctcttctttattaattgcctttagatattgttagatttaacaaattatgttttctaatatcaccaaactttttaaattaaaaaaattaccactaaaactttcaaattcagtttgttttcttctactaagatagagcagacacttttaggtttctgactcaatatccatcctatctccttcttcttacctaacaaaattcacagagccaccaattccccataatggcaatgggtcaggggaaatggatcccatcttagggattctatgttgtctragctaatcataaaaattccac

SEQ ID NO: 194412 - DNA, 457 bp, Homo sapiens
ttgtttatcaggggcaagaatcttatgggacatcctagaattctgcctaccatatggagaaaagttaaatcattttaatagttcagcagcagaattttagagcaatcatttggcattcaagtgtgtcatatttcctaactgtgaaactgttaagaatgaattttaattttacatagatttatttcattcttcaattttagcataagctctctcttttcccccctcctccatcactctcaccyctcttacccaaatccttggtatcacttattttctcttgctgtgatctcgagctgctgagacaatctcctgagagggcaggaacactggtgttttcaggatctggcgccatgcctctgccctcattagtgcatgcagttgtgcatattaaagaaataaatctttctagtgactactctgtgtcagaattaccttcacttaaatgaaattataacat

SEQ ID NO: 194413 - DNA, 587 bp, Homo sapiens
agctaattattattttcagggggagtcactattasaagaaaaattcatgtttctgttcttaccttcttttcaataagcactaagaaggttcattttcagagacatccttgctacgctgagacttgtttaaaagtgaagcaaagaacagttgcaaaaagaatattcaaatatgaagattcttgatgaaacttgagtcataaaaacttgagcctcaaaacaatgttttaagaatgatgatctcaatctcgatgtaaaacttttgctatttgaattagaaaaatataatttgtgctgtagctcattatagtacttataaaactatagattaactaaatttttccacataaatcacattgctgacaaattgtttgtatatacttttgctatctgagattaattaagcatattgttttccaaagttcttcaagtttgcatgccacactgtatttttggtaaaatcatataaggtaatccttcaagtgagaactcctaatttttggtcatttcataagttttctagtttatgtatcaatttggtatagactgtacaagagtatatatttgagatacttgagacattcaactta

SEQ ID NO: 194414 - DNA, 587 bp, Homo sapiens
agctaattattattttcagggggagtcactattacaagaaaaattcatgtttctgttcttaccttcttttcaataagcactaagaaggttcattttcagagacatccttgctacgctgagacttgtttaaaagtgaagcaaagaacagttgcaaaaagaatattcaaatatgaagattcttgatgaaacttgagtcataaaaacttgagcctcaaaacaatgttttaagaatgatgatctcaatctcgatgtaaaacttttgctatttgaattagaaaaatataatttgtgctgtagctcattatagtacttataaaactatagattaactaaatttttccacataaatcacattgctgacaaattgtttgtatakacttttgctatctgagattaattaagcatattgttttccaaagttcttcaagtttgcatgccacactgtatttttggtaaaatcatataaggtaatccttcaagtgagaactcctaatttttggtcatttcataagttttctagtttatgtatcaatttggtatagactgtacaagagtatatatttgagatacttgagacattcaactta

SEQ ID NO: 194415 - DNA, 588 bp, Homo sapiens
atgcagataatatttatttattatttgtatatatgactaaataccttttgaaaattgatagaccttgccacaatagtatctctagagactacagttatctcaattcttcataaacacttacaaatatataaatacacatatacatatatacatacatacatatggatgttctctcacacacatacactgtgatctgaatcatagtgttagttccagcttttatccatcaactttacccatttatataaaatccaattgaatgtagactatggttgttctctccatactcttatgattgacttaggtcctcactgttcacctgaaattgccctcagaaaagtaatgaataaccttttcatcactagataaatgagaatctatatttttttcacatttttagtatcttctcaatgtccacatggttaatctttattcctttatgtattccctaacatttccaaatttctgaggatgtactgaatctcggttcttttcaaagcagtcaaaacctcgtcactctttctttcrattattcctacttcccctcttttgttacagagctacataaagttcaagtgaatgttttac

SEQ ID NO: 194416 - DNA, 601 bp, Homo sapiens
attttttagattgttcaaaaatttaaaaatgtatatatctgtcagtgtaagtattgtttatcttaagtttcacattactgtttaatttgcattgtacagatttgtcctcaatgaatgatttgaataatgagattaactctaaacaaaatcagtttggtttgctatatatttaaagaaatgaaccaatcatcaaagaaaaaaaacaggccaaaaaatgtgtccttttggtgactacccagggaacacatttggaattgactatcccttcaatttctaaggcatgttgctatttgctgaatttagttttgtgaaagatggaattaggctccactaagattattccatacacaaattccagatatattcaagacttcaatgggttttacccacaaacaagaaaaatgtgaaaatgaagttcaacaactattggtatgtcatcaaaacattttttctcccagaaagcagastctactatgcatgttatccatcattactgttactctctgatccaaatctgaagcttgcatcttcgtatggatcttttttccttttgcttacttgacattaaaaaaaaaatcatacctacataataaataatatg

SEQ ID NO: 194417 - DNA, 506 bp, Homo sapiens
accatgacaattctgaaaaaaaagggccataaaaagagggtttgtttccaatcatgtgttgtaaaattaaaccattaaaacaagatgtctcttgatttggtatagacacatagatcaatgaaaaagaataaagagctcagaaacaaagtatgcgcatttagaaataaagggagcatttgaaatcagggaaatgacagatgattcaagcaataactttgagacagttgagtttcatcttggaaaaaaagatgaataaaaaaggcaacatcataatataaaccaaaaattaattcaaggtggattaaagtgctgaaagttgaaaagagaactatgttttatcagttggtgaagaagtcctttctaaataaaacacaaaaccaaaagacatagaaaaaatcgrcatatttgactacatagaaatgtaattctcctgaatggttaaatatactattaacagacttaaaacaggaggtccagactgggacaaaatgtttggaaaatatgga

SEQ ID NO: 194418 - DNA, 408 bp, Homo sapiens
gaattcacctattccctaaaatttatttggaaccctcaaatcaaaactctggcacctggtagtggggtaccctcaggcaagccatttaacattcctgaacattttctctcttgcaaaataaaaaawaaacaaaaagaagaatctactaggatgagttgttttttaggatttaaaattataatatatgtaagattatgtatctataaatatagatacataagtatgtatatactttcccgaggatcaatgattcagtatttgctaattcagaatttgcaacaattttatagaatatagataacagagaaaataagaatggaatctgtgtgtgtgtacatatgtataataaacatgtaaaattgctcaacctcacctgtaataatggaaatgcatgtaaatatcatgata

SEQ ID NO: 194419 - DNA, 408 bp, Homo sapiens
gaattcacctattccctaaaatttatttggaaccctcaaatcaaaactctggcacctggtagtggggtaccctcaggcaagccatttaacattcctgaacattttctctcttgcaaaataaaaaaaaaacaaaaagaagaatctactaggatgagttgttttttaggatttaaaattataatatatgtaagattatgtatctataaatatagatacataagtatgtatatactttcccgaggatcaatgattcagtatttgctaattcagaatttgcaacaattttatagaatatagataacagagaaaataagaatggawtctgtgtgtgtgtacatatgtataataaacatgtaaaattgctcaacctcacctgtaataatggaaatgcatgtaaatatcatgata

SEQ ID NO: 194420 - DNA, 586 bp, Homo sapiens
tataaccatttaattttagacaacataaacttcggggcaaaagaattagtagagataaagaaaaactacatatgtgatatgctttaatttaccaataagatataataactccaaattggtgtacatctaaaaacatagcttcaaaatatgtaaagcaaaagaaaatttggcaaccacaaaaataaattgacaagcccgtgmccagaatagattttaacacagctctttgtatacgactgaagttaataaactaagcatcaaacataaggaattcgtagaaaaatgacataatgaacccaagaaaagcagagataaggaaataataaagataatatgacaaattaataaaatataaaaggaaaacacaatagagaaaattaaagaacaaagtcaaaagtctggcctgtaaaaagactctgtagtagaattgagaattatttggcaagactaattaaagagaataaaacaaaatataacaatcaaacaatattaggaattaaaaaaatgatacgaacacaggtgtagtagagattgttaaataatctctactaaacatgactaatataacatgactacaataaacatg

SEQ ID NO: 194421 - DNA, 509 bp, Homo sapiens
  misc_feature (1)...(509): n = A,T,C or G
nnnnnnnnnnnnnnnnnnnnnnnnnnnnnnnnnnnnnnnatcagaagagatttgtattctattctatcttcaaggtgctaaaggaaaaaaaaggacaatctcaaattttgtattttgccagaataagcttcataaatgaaggagaaacaaagtctttcccagacaaacaaatgctgaggaaaytcattaccactagattggtcctacaataaagctcgagagaattctaaacatggaaacaaaagattgatactcaccatggtaaaaacacacgaaagtgtaaaactcatggatcttataaaaacaattacacaaatgagagggtaaagaaactaggtaacattgtgattatgacaggaacaaaacctgacatatcaatattaattttaaatgtaaatggattaactgctccacttaaaagatatagattagtggatagagaaaaaaacgtaatataatcacatgctgattaaaagaaagaaacccacctaactggcaaaactcctgta

SEQ ID NO: 194422 - DNA, 582 bp, Homo sapiens
gcatatctttatacactattgccaatgcatatctccaacamtttctttgaaactagaataatttaataaattggctattttaaaagtggagatctattactctccatgtgaattttataaatatatatttccacaagcaattatagcattgtcaacctcactactttcagaataaatgtaataatttcaacatttatccacaaggcagacaaaagcggtatttactgctgtttaatttgtatttatttcatgaatatgaagaataagacttttatgcagttagtaattcagcagttaactctactggcctcaaagaatgggctgattagaaaacatgattactaatgcaaaaaatgttttcagcaagcaaacttctgtggatataaggaggcatgtgggaactttggagtggtgcataatattctgtatcttgattgtgagtggtaattatacagaatctgttggaatctgttgaacaatgttgttaaaatgggtgaattataaatcaataaacttggccttttaaaaaaagatcaaggctatgcatatatatataatattgtcattctatgcatattggta

SEQ ID NO: 194423 - DNA, 472 bp, Homo sapiens
tctcactcatgagttggagctgtcctaaatgtccacctcttaacactatcacatgaggtcttagggtccaacacaggaattatgagataactcatacattcaaaccatagcaggtacagagtcttgcgcacttccccacacacaatgatcttgtaatttaaaagaaattaaaacwaacccctcaccttacagtgaggaaataagaacagattgcagacatagggtagcccattttcaaagggagactacaatactttctgaataccagattcctcaaagctccagaaaaaaaaaacaaaaaaaaaaaaacaaaaaaaaaaaccagccatattttcaaggtgccaaaatgttatgcaagattctaagagatgaggctaatgtcactcagtaccgcaacgatcagagttgtgtacacacacagacagctttgtgttttacttgttgagttcaaacagtagcaaatatagcatat

SEQ ID NO: 194424 - DNA, 555 bp, Homo sapiens
tccttcctttttaagtctgactaatattccattgtacgtatagtccacattttgtttatcattcacacatttcattcatccatggatggttgggttcgttccaccttctggctattgtgaatactgctgctgtgaacaggagcacacaaatatctgttctgagtccctgctttccattctttggggtatatatccagaagtggaattgctttgatttattttatgttgatgaaatattagaagcaatcatcatgtacaacaaatcagggaattgttggttaaattatgtacagacccttgatcttctgtctcctttggaaatgaggactctggagacctcccatgctgtctgcggcagcctttcctggccaggctgtccrtgtcctgcccttgcctctgtcacagcacctgttccatcatgttggcattcccctgattgtttccccaaccagagctctgtcaggagagtgactttatcttccatctctggcctcaattccccaattcctggcacataatatgagcttgaaaactgttgactgagtaaaaaataaa

SEQ ID NO: 194425 - DNA, 660 bp, Homo sapiens
acagccagacaaaccaatccaggtagtgcgggccataaaaaacatttcgaggtgcctgaattatccaggttcactgctaactttgttcaaatgaactggatcacagccagccccacacagcattgtgtgcttttaaatatagtgcaaggggaacctgcaccagcagacatgaggaggggaggggcaggtgtcggtgacccttggacccagacagcatctgacaaagggtgacattaggctttggcagagcctyggctgcactgtctgcaaagcagttatcacatggaagacagggcggcctgccaaaatacagacactgggaccaaccaaaggataattgctataaattccatacagggagcggagagagagatgtcagcagaacacaaatcctggctgggtagcagcacacacaggactgcagggtagagtacgacaagaaagggaatatttttttgaaaaggccaaatttgttcaaacaaggtatggcaggccagctggaagacatgtcagtcaaggactagactctctgctcagaggtatttctgtcacttgcacacgacagcttctcaaaactaaatataaggaaaaattagagctagattttctccaggtatggggtgagttctaattgtaatttagaaactggcagattgacta

SEQ ID NO: 194426 - DNA, 559 bp, Homo sapiens
aatggcctcttcattccaggcacttctaaagtccaagtggtcaaataccagcctctttttaccaatgttcccacctgtttcattcagccaaatttcattagatgaaggtaaagctaatgattccctcattctctgtagtttgactctctcgaagtggctaatraggagaacaaatacaacttagacatcatgccacatttagggcaaaggcagctaatactaatgtacaaaagcagtactgatgttttttaagtcaatacagggggttgggtcttcattttgctttgaaaatatctttttgtggaagataggtttcactttatgtacacagatgattcgtataaataataataactgtaataatgaaaataatgtctacttagtgtaatttaatctttaatttgtcttatggagataaaaaatttacaaatggaaaaggcaagaccacgtttgagaaaaatacagagggagaaagagtaggatgcacagagataagtgttgtccaggattttcatcttctctcttctctcctgtggctcaggctaagaatggcatgggt

SEQ ID NO: 194427 - DNA, 460 bp, Homo sapiens
ctctacgaagtaaagcaagaagacaaagagatggaaagtaggagtcagggacagtgaaattaaagggaaaagccaggaggatgaatatctaataaacaggaattccaaaatgactgagcaagaaaaatggagcagagggacaatgaacaatttatagactgtcccagaagagaatggcatgcgactgcagactgaaagggcctgttgagcatttctgcaattttgataaatacatacacacaccraggaacaataccagaaagtttcaggaatatggacaaacaaaagcttctctacaagcttctgaaagaaataaatccgtggctcttatacaaagatcagagatcagaaggactacatatttcttgatagcaatattaagaagaagaagttaatgaaatggtcggttcaatattctccaaaaaaataatattcggtcttgtctgtcttgcccaacaag

SEQ ID NO: 194428 - DNA, 570 bp, Homo sapiens
ttgaagctatgcatgattggaccacagactgggtggcttataagcaacagaaatatacttctcactgttctggagactgggaagtccaagaccaaggtgccaacagattcaatgtctggtaagggccctctttctggtttatagatgataycttctggctgtgtcttcacatggcagaagggcaaaaggtcttcattgaggatctcttgctggagcactaatgctattcatgagatttccaccttcacacctaagcgcctcacaaaggccccacctcctaaaaccatcaccttaggagttaggatttcaacatataaatcttggtggtgaggccacaaatattcacaccatagcaaatctttaactcttaatatcgattcatttttaagttacattaaatgaagaaatattaccaaaaaaatcaatctacaaagtacaggaaatttaagtaatttgttaccaaaaggataacagataaaatattttacttttattttcaccattggctagaagaaaaataaagaaaaaaagttgaatagtgaaaaaaccatatctatcaggaggcactta

SEQ ID NO: 194429 - DNA, 416 bp, Homo sapiens
tctacacatttcctctggcttgcatgcttcctgcatattaaacagatctgtagggaaatatgttgggaaagaagcccaaccaccaacccaccaaggcacatggccaacatgtaattacaacttacactgacttccacttcttactatttcctttagatttttcttttcatttatataattaaaactgcattgaattaaatatgctttttgatagaaactattgtgttttttcattgaggtgtgccctaagtttgaataatgctgggcatttgaataaaacttgatagattttaaaggatttgcatatttattacctaattttgattctcaaattacagcttgtawaaatagatactattattttatttaaaactataaaaactgagactgtaggagattatgtcatgttttcaagg

SEQ ID NO: 194430 - DNA, 631 bp, Homo sapiens
aagtttctactcatggagaaatattcaaatttagggagccaaatgcaggcagaataaatctgcatgttgctgtttttcactcttcagggactacatgttgaaaaatcactctggtgacaaaatatggttcaagactacagagcaggactaacccccaacttataatgctttaagaagaagtcaaaaaagaatagaaaatatattatagttgactaagctaatagataatcattggataatcagcttcttatttgatgtaataagttgacatatattttactccaatagtttcttttcttcaggtcatcaccaaagcaaatcaatatcacactgttggttttgaaagtatgtaattcatgtttttgatcttattagcaatagatttaaacsacttgagttagaggtataaaaattttaacgttttggtttatttaaggaaaatattttatataaaataattgataaatacactttagaggttgaagatttatatggaaacacaaaacccttaaaattcctcaggtagctaaatattttcaaatctatcaaaaaataagcctactaatttaaaatttacctttagaagacaaattatttggaaacattatggtgcctcatttaaatttgaagt

SEQ ID NO: 194431 - DNA, 567 bp, Homo sapiens
cttccttatgcattgcacattgaatacatatgtgccacatttagtacactcgggggagcggggtgcagattatctatgcgacttagcatttacctgtgtttctaggacataacctctttctttcttcttcatcacttttaactaaaaatgaacatacggctctgtcaatgacataatgttttcatgaaagttctactaattaaaaatcctcaccataccagacctaaaaaatgagcacactcttgccaagtgttattcaccacagagaagctcttgtagctacgttttaaaggaagatagagagggggatggtatggagggagaaagtctactaacatatgcattgaagtataacagttgtcaacatcagaaggacagattatttttaatacagatccttcaagaaaaaaaaaaagaggagaaaaaataatgtatctccaaagagctgagaagtaatggatgtgcagttttggataatagaagctttcactggaatgaaggaatgaaggaccacaattayaggaaacatctgttttttcaaagcaaaagatgataggtcatttttaa

SEQ ID NO: 194432 - DNA, 559 bp, Homo sapiens
cctgtgctcaccatatttgtatacaacttatggaatgactcttgtatcttccatcgcattaaatgttttaaatagaatttcttgatctgtatatgtatttcaactgctttttttttttttttcattttaaacaacattttgttctcctttttccttttttttttttttttttgagacaaattcatctctgtcgctcaggctggaatgcaatggcacgatcttggctcactgcaacctctgcctcccgggttcaagtgattctcctgcctcagcctcctgagtagctgggattacaggcacgtgccaccaagaccggctaattttttgtatctttagtagagacagggtttcaccatgttggccaggctggtctcgaactcctgacctcgtgatccacccgcctcggcctcccaaagtgctgggattacaggcgtgagccaccgagcccggctgttttcatttttaaaaggcacacttacctaatggggctggaaataraatctgggtcccttgccattacagtaccaatgattgtgcccacttcaatatcttcatgaac

SEQ ID NO: 194433 - DNA, 544 bp, Homo sapiens
taagtaattctccttaatatacataataaagtccagacctcttagcttgtcacagtcttgcctgaatatgtctctcctatatcattttgcatttagtcacttccatgaaagatatggaccaaactgggcttttcaaagttttctaggcaaaacttaatttcctatattactatttcttcttkctttctctctttcttttcttttcttttctttctttgtttcttttctttttttttcttgatggagtctcagtcactcagtgctggagtgcagtgacatgatcttggctcactgcacccttacctcccgggttcaagtgattctcgtgcctcagcctcctgagtagatgggactataggcacctgccaccacaccaggctaatttttatatttttagtagagaccggattttaccatattggtcaggctggtctcgaactcctgacctccggcgatcctctcacctcaacctcccaaagtgctgggattacaggcatgagccactgtgcccggcccctatatcactatttctatatttctctca

SEQ ID NO: 194434 - DNA, 544 bp, Homo sapiens
taagtaattctccttaatatacataataaagtccagacctcttagcttgtcacagtcttgcctgaatatgtctctcctatatcattttgcatttagtcacttccatgaaagatatggaccaaactgggcttttcaaagttttctaggcaaaacttaatttcctatattactatttcttcttgctttctctctttcttttcttttcttttctttctttgtttcttttctttttttttcttgatggagtctcagtcactcagtgctggagtgcagtgacatgatcttggctcactgcacccttacctcccgggttcaagtgattctcgtgcctcagcctcctgagtagatgggactataggcacctgscaccacaccaggctaatttttatatttttagtagagaccggattttaccatattggtcaggctggtctcgaactcctgacctccggcgatcctctcacctcaacctcccaaagtgctgggattacaggcatgagccactgtgcccggcccctatatcactatttctatatttctctca

SEQ ID NO: 194435 - DNA, 627 bp, Homo sapiens
agaattcagtgtgtcctgcctgaattttgccctataatctatgtaaaagtagtgaactacagaattaactaaagtgggatgcatcaaggaagattaaatttttgatgtgccaatatctttctaggtgtagtgctttgaagcacaggcttaaaagccgaataacctggatccgcaacctgcttcttatttatttcatgaacaagtgactttacatttacatgattctgtttttttaactaatgaaaaggggtagatttatgttggtgcaaaagtaatcgcagtttttgctattaatggaaaaattacttttgcaccaacctaatacattgtctatctcatacggatgatgtaaagattgagtttatatttgcacaatattttacagtagtatttagtrcatgctatatcaatgcctaatactattatttttacactgttgctgttttatttacttgggcaaaccagataatccttttttaagtaatttaataagataaagtcagtagccctacaatggcattcagacaaaacaaacaaacaagcatgcataggtatgacatctcttttaggttcctcataattctggaattgtttacagttgcttctgaattggttgtagttgtgtat

SEQ ID NO: 194436 - DNA, 627 bp, Homo sapiens
agaattcagtgtgtcctgcctgaattttgccctataatctatgtaaaagtagtgaactacagaattaactaaagtgggatgcatcaaggaagattaaatttttgatgtgccaatatctttctaggtgtagtgctttgaagcacaggcttaaaagccgaataacctggatccgcaacctgcttcttatttatttcatgaacaagtgactttacatttacatgattctgtttttttaactaatgaaaaggggtagatttatgttggtgcaaaagtaatcgcagtttttgctattaatggaaaaattacttttgcaccaacctaatacattgtctatctcatacggatgatgtaaagattgagtttatatttgcacaatattttacagtagtatttagtgcatgctatatcaatgcctaatactattatttttacactgttgctgttttatttacttgggcaaaccagataatccttttttaagtaatttaataagataaagtcagtagccctacaatggcattcagacaaaacaaacaaacaagcatgcataggtatgacatctcttttaggttcckcataattctggaattgtttacagttgcttctgaattggttgtagttgtgtat

SEQ ID NO: 194437 - DNA, 363 bp, Homo sapiens
gttctggaattctatgtgactgacaaacattcagactccagcagcagtgttctgtaatcctatgtgagggacaaacattcagaycccaagagcagtgttctgaaatcctatgttaagggaaacattgagaccccagcatgaatgttctggaatcctatgtgagggacaaacattcagaccacagcaggagtgttctggaatcctataagaggtataaacattcagaccctcatagcagtgttctggaatcctatgtgagggagaagcattcagagcacagcaggagtgctctgaaatcctatgttagggacaaacattcagaacctcgtaacattgtgctgggaacctatgtgagggacagac

SEQ ID NO: 194438 - DNA, 411 bp, Homo sapiens
gaattctatgtgactgacaaacattcagactccagcagcagtgttctgtaatcctatgtgagggacaaacattcagaccccaagagcagtgttctgaaatcctatgttaagggaaacattgagaccccagcatgaatgttctggaatcctatgtgagggacaaacattcagaccacagcaggagtgttctggaatcctatawgaggtataaacattcagaccctcatagcagtgttctggaatcctatgtgagggagaagcattcagagcacagcaggagtgctctgaaatcctatgttagggacaaacattcagaacctcgtaacattgtgctgggaacctatgtgagggacagacatttagaccctcgcagcagtgttctggaatcccatgtgagggtcaaacattcag

SEQ ID NO: 194439 - DNA, 404 bp, Homo sapiens
agcagcagtgttctgtaatcctatgtgagggacaaacattcagaccccaagagcagtgttctgaaatcctatgttaagggaaacattgagaccccagcatgaatgttctggaatcctatgtgagggacaaacattcagaccacagcaggagtgttctggaatcctataagaggtataarcattcagaccctcatagcagtgttctggaatcctatgtgagggagaagcattcagagcacagcaggagtgctctgaaatcctatgttagggacaaacattcagaacctcgtaacattgtgctgggaacctatgtgagggacagacatttagaccctcgcagcagtgttctggaatcccatgtgagggtcaaacattcagatcctcgcagtagtgttctggaattc

SEQ ID NO: 194440 - DNA, 410 bp, Homo sapiens
aattctatgtgactgacaaacattcagactccagcagcagtgttctgtaatcctatgtgagggacaaacattcagaccccaagagcagtgttctgaaatcctatgttaagggaaacattgagaccccagcatgaatgttctggaatcctatgtgagggacaaacattcagaccacagcaggagtgttctggaatcctataagaggtataaacattcagaccctcatagcagygttctggaatcctatgtgagggagaagcattcagagcacagcaggagtgctctgaaatcctatgttagggacaaacattcagaacctcgtaacattgtgctgggaacctatgtgagggacagacatttagaccctcgcagcagtgttctggaatcccatgtgagggtcaaacattcag

SEQ ID NO: 194441 - DNA, 404 bp, Homo sapiens
agcagcagtgttctgtaatcctatgtgagggacaaacattcagaccccaagagcagtgttctgaaatcctatgttaagggaaacattgagaccccagcatgaatgttctggaatcctatgtgagggacaaacattcagaccacagcaggagtgttctggaatcctataagaggtataaacattcagaccctcatagcagtgttctggaatcctatgtgagggaraagcattcagagcacagcaggagtgctctgaaatcctatgttagggacaaacattcagaacctcgtaacattgtgctgggaacctatgtgagggacagacatttagaccctcgcagcagtgttctggaatcccatgtgagggtcaaacattcagatcctcgcagtagtgttctggaattc

SEQ ID NO: 194442 - DNA, 363 bp, Homo sapiens
gttctggaattctatgtgactgacaaacattcagactccagcagcagtgttctgtaatcctatgtgagggacaaacattcagaccccaagagcagtgttctgaaatcctatgttaagggaaacattgagaccccagcatgaatgttctggaatcctatgtgagggacaaacattcagaccacagcaggagtgttctggaatcctataagaggtataaacattcagaccctcatagcagtgttctggaatcctatgtgagggagaagcattcagagcacagcaggagtgctctgraatcctatgttagggacaaacattcagaacctcgtaacattgtgctgggaacctatgtgagggacagac

SEQ ID NO: 194443 - DNA, 404 bp, Homo sapiens
agcagcagtgttctgtaatcctatgtgagggacaaacattcagaccccaagagcagtgttctgaaatcctatgttaagggaaacattgagaccccagcatgaatgttctggaatcctatgtgagggacaaacattcagaccacagcaggagtgttctggaatcctataagaggtataaacattcagaccctcatagcagtgttctggaatcctatgtgagggagaagcattcagagcacagcaggagtgctctgaaatcctatgttagggacaaacattcagaacctygtaacattgtgctgggaacctatgtgagggacagacatttagaccctcgcagcagtgttctggaatcccatgtgagggtcaaacattcagatcctcgcagtagtgttctggaattc

SEQ ID NO: 194444 - DNA, 404 bp, Homo sapiens
agcagcagtgttctgtaatcctatgtgagggacaaacattcagaccccaagagcagtgttctgaaatcctatgttaagggaaacattgagaccccagcatgaatgttctggaatcctatgtgagggacaaacattcagaccacagcaggagtgttctggaatcctataagaggtataaacattcagaccctcatagcagtgttctggaatcctatgtgagggagaagcattcagagcacagcaggagtgctctgaaatcctatgttagggacaaacattcagaacctcgtaacattgtgstgggaacctatgtgagggacagacatttagaccctcgcagcagtgttctggaatcccatgtgagggtcaaacattcagatcctcgcagtagtgttctggaattc

SEQ ID NO: 194445 - DNA, 413 bp, Homo sapiens
tggaattctatgtgactgacaaacattcagactccagcagcagtgttctgtaatcctatgtgagggacaaacattcagaccccaagagcagtgttctgaaatcctatgttaagggaaacattgagaccccagcatgaatgttctggaatcctatgtgagggacaaacattcagaccacagcaggagtgttctggaatcctataagaggtataaacattcagaccctcatagcagtgttctggaatcctatgtgagggagaagcattcagagcacagcaggagtgctctgaaatcctatgttagggacaaacattcagaacctcgtaacattgtgctgggaacctatgtgagrgacagacatttagaccctcgcagcagtgttctggaatcccatgtgagggtcaaacattcag

SEQ ID NO: 194446 - DNA, 554 bp, Homo sapiens
actcaccaaaacccccactactagaccccactaatgagaccctctctaagcagacccctgctgaccacgatcccactaaatagtcctcactgacctaggtccactgaccaggcccacactgatcaggcccctcctaaccacacyggaaatccaaggggcaatgacatgtttcatatggcagaagttggaacaagacagagagaggaaagaggttccacagccttttaaactactagatctcacgagaactcactcactatcaggaggatggcattaagggcttggtgctttgccatttgtgaaggatccactcccacacctttatgattaaagctttttccacctaggccccgactctaacattagggagtgtactttcacaggagttttggaaggggcatagagaaaaaccgtattattctgtccctgaccccacaaatctcatgtccttctcacattgcaagatacagtcatgccttgccagcagtctcccaaagtcttaactcatttcagcattaactcaaagttacaaagtgcaaagtctcatctgggtc

SEQ ID NO: 194447 - DNA, 478 bp, Homo sapiens
ccactcaccaaaacccccactactagaccccactaatgagaccctctctaagcagacccctgctgaccacgatcccactaaatagtcctcactgacctaggtccactgaccaggcccacactgatcaggcccctcctaaccacaccggaaatccaaggggcaatgacatgtttcatatggcaraagttggaacaagacagagagaggaaagaggttccacagccttttaaactactagatctcacgagaactcactcactatcaggaggatggcattaagggcttggtgctttgccatttgtgaaggatccactcccacacctttatgattaaagctttttccacctaggccccgactctaacattagggagtgtactttcacaggagttttggaaggggcatagagaaaaaccgtattattctgtccctgaccccacaaatctcatgtccttctcacattgcaagatacagtcatgc

SEQ ID NO: 194448 - DNA, 478 bp, Homo sapiens
ccactcaccaaaacccccactactagaccccactaatgagaccctctctaagcagacccctgctgaccacgatcccactaaatagtcctcactgacctaggtccactgaccaggcccacactgatcaggcccctcctaaccacaccggaaatccaaggggcaatgacatgtttcatatggcagaagttggaacaagacagagagasgaaagaggttccacagccttttaaactactagatctcacgagaactcactcactatcaggaggatggcattaagggcttggtgctttgccatttgtgaaggatccactcccacacctttatgattaaagctttttccacctaggccccgactctaacattagggagtgtactttcacaggagttttggaaggggcatagagaaaaaccgtattattctgtccctgaccccacaaatctcatgtccttctcacattgcaagatacagtcatgc

SEQ ID NO: 194449 - DNA, 554 bp, Homo sapiens
actcaccaaaacccccactactagaccccactaatgagaccctctctaagcagacccctgctgaccacgatcccactaaatagtcctcactgacctaggtccactgaccaggcccacactgatcaggcccctcctaaccacaccggaaatccaaggggcaatgacatgtttcatatggcagaagttggaacaagacagagagaggaaagaggttccacagccttttaaactactagatctcacgagaactcactcactatcaggaggatggcattaagggcttggtgctttgccatttgtgaaggatccactcccacacctttatgattaaagctttttccacctaggccccgactctaacattagggagtgtactttcacaggagttttggaaggggcatagagaaaaaccgtattattctgtccctgaccccacaaatctcatgtccttctcacattgcaaratacagtcatgccttgccagcagtctcccaaagtcttaactcatttcagcattaactcaaagttacaaagtgcaaagtctcatctgggtc

SEQ ID NO: 194450 - DNA, 223 bp, Homo sapiens
tcacgagaagtcactcatgattgtgaggacagtaccaaggggatggtgctgaaccactcatgagaaatttgccttcatgattcartcaccttataccaggatccacctccaacattaggaagcataactcaacatgagatttggtggggatacatattcgaattgcctcatcagtctttgagtataaagacatccatagcaggctttatccagccagcttctt

SEQ ID NO: 194451 - DNA, 223 bp, Homo sapiens
tcacgagaagtcactcatgattgtgaggacagtaccaaggggatggtgctgaaccactcatgagaaatttgccttcatgattcagtcaccttataccaggatccacctccaacattaggaagcataaytcaacatgagatttggtggggatacatattcgaattgcctcatcagtctttgagtataaagacatccatagcaggctttatccagccagcttctt

SEQ ID NO: 194452 - DNA, 223 bp, Homo sapiens
tcacgagaagtcactcatgattgtgaggacagtaccaaggggatggtgctgaaccactcatgagaaatttgccttcatgattcagtcaccttataccaggatccacctccaacattaggaagcataactcaacawgagatttggtggggatacatattcgaattgcctcatcagtctttgagtataaagacatccatagcaggctttatccagccagcttctt

SEQ ID NO: 194453 - DNA, 223 bp, Homo sapiens
tcacgagaagtcactcatgattgtgaggacagtaccaaggggatggtgctgaaccactcatgagaaatttgccttcatgattcagtcaccttataccaggatccacctccaacattaggaagcataactcaacatgagatttggtggggayacatattcgaattgcctcatcagtctttgagtataaagacatccatagcaggctttatccagccagcttctt

SEQ ID NO: 194454 - DNA, 410 bp, Homo sapiens
caattggcctctattgaaatttctccattattttcacaatgtcccaggctgtgaaaccaggatttaataaagaaccagaatgccacatctgtgtcaactgggtagggaccagtcctgatacattaagtccgggtctctgggtaactggactcaactgctgggcaaaacagaatgtccggcktgggttcctaaagggggaccgcaaagcctcatgggaattgtagtgtcaccttccaatgatgttaccatcaaggaccttgggaaccagcttttctctctgcacaagcgccgcccggcccactccgccattttcctccggaagtgtggcacccagaggcggtcctgtagctgggccggcttggggcttggttctatgtccctgtgggtcggtgcaagggtcaagaggaacc

SEQ ID NO: 194455 - DNA, 410 bp, Homo sapiens
caattggcctctattgaaatttctccattattttcacaatgtcccaggctgtgaaaccaggatttaataaagaaccagaatgccacatctgtgtcaactgggtagggaccagtcctgatacattaagtccgggtctctgggtaactggactcaactgctgggcaaaacagaatgtccggcgtgggttcctaamgggggaccgcaaagcctcatgggaattgtagtgtcaccttccaatgatgttaccatcaaggaccttgggaaccagcttttctctctgcacaagcgccgcccggcccactccgccattttcctccggaagtgtggcacccagaggcggtcctgtagctgggccggcttggggcttggttctatgtccctgtgggtcggtgcaagggtcaagaggaacc

SEQ ID NO: 194456 - DNA, 410 bp, Homo sapiens
caattggcctctattgaaatttctccattattttcacaatgtcccaggctgtgaaaccaggatttaataaagaaccagaatgccacatctgtgtcaactgggtagggaccagtcctgatacattaagtccgggtctctgggtaactggactcaactgctgggcaaaacagaatgtccggcgtgggttcctaaagggggaccgcaaagcctcatgggaattgtagtgtcaccttccaatgatgttaccatcaaggaccttgggaaccagcttttctctctgcacaagcgccgcccggcccactccgccattttcctccggaagtgyggcacccagaggcggtcctgtagctgggccggcttggggcttggttctatgtccctgtgggtcggtgcaagggtcaagaggaacc

SEQ ID NO: 194457 - DNA, 410 bp, Homo sapiens
caattggcctctattgaaatttctccattattttcacaatgtcccaggctgtgaaaccaggatttaataaagaaccagaatgccacatctgtgtcaactgggtagggaccagtcctgatacattaagtccgggtctctgggtaactggactcaactgctgggcaaaacagaatgtccggcgtgggttcctaaagggggaccgcaaagcctcatgggaattgtagtgtcaccttccaatgatgttaccatcaaggaccttgggaaccagcttttctctctgcacaagcgccgcccggcccactccgccattttcctccggaagtgtggcacccagaggcggtcctgtagcygggccggcttggggcttggttctatgtccctgtgggtcggtgcaagggtcaagaggaacc

SEQ ID NO: 194458 - DNA, 438 bp, Homo sapiens
gaattctgttcacttaggtgtaacagttaatacttgctgtttaaggaactaattaaaccttactggcttataaaaaacaaccaccattttatttgtttgaagttctgtggatctgcattttggtgtggtggattcacctgggtagttgatatatttgtgttgcctggatcacaaaaaggccttagtcacctggtgcsttgactgagcctggttggtttaagatagtttctttcacaatctggtggtttgtggtgactcttggctaggccctgtgtctccaacagggtagctccagacctcttcacaatttctcccaaaaagggaagaaccaatggatatttgcatcacattttccattgtccattcactggacaagtcagatggaaaagcccaatttattgtcagagcataatatgagggcttggatagaaggaaagg

SEQ ID NO: 194459 - DNA, 438 bp, Homo sapiens
gaattctgttcacttaggtgtaacagttaatacttgctgtttaaggaactaattaaaccttactggcttataaaaaacaaccaccattttatttgtttgaagttctgtggatctgcattttggtgtggtggattcacctgggtagttgatatatttgtgttgcctggatcacaaaaaggccttagtcacctggtgcgttgactgagcctggttggtttaagatagtttcyttcacaatctggtggtttgtggtgactcttggctaggccctgtgtctccaacagggtagctccagacctcttcacaatttctcccaaaaagggaagaaccaatggatatttgcatcacattttccattgtccattcactggacaagtcagatggaaaagcccaatttattgtcagagcataatatgagggcttggatagaaggaaagg

SEQ ID NO: 194460 - DNA, 380 bp, Homo sapiens
ctggcaacttgactttagccttaatagacctattttggacttctggcccccagacctcttagttagtagatttgtggtgtattaagccactcaatgtagggtagtttgtaacagcrgcaaaaagaaatgaacatgaagccagaattggtggcccacacctataattccagctatttaggaggctgaggcaggatggttgctttggcccaggagttcacgataagtctgggcaacaaaatgataccctgtctacatggaaaaaaaaattagcgggtgtcgtggcatgcacttgtagtcttaggtactagaggccctgagacaggacaatttcttgacctaggagctccaggtctcagtgcgttgtgatcgtgccatggcac

SEQ ID NO: 194461 - DNA, 380 bp, Homo sapiens
ctggcaacttgactttagccttaatagacctattttggacttctggcccccagacctcttagttagtagatttgtggtgtattaagccactcaatgtagggtagtttgtaacagcagcaaraagaaatgaacatgaagccagaattggtggcccacacctataattccagctatttaggaggctgaggcaggatggttgctttggcccaggagttcacgataagtctgggcaacaaaatgataccctgtctacatggaaaaaaaaattagcgggtgtcgtggcatgcacttgtagtcttaggtactagaggccctgagacaggacaatttcttgacctaggagctccaggtctcagtgcgttgtgatcgtgccatggcac

SEQ ID NO: 194462 - DNA, 380 bp, Homo sapiens
ctggcaacttgactttagccttaatagacctattttggacttctggcccccagacctcttagttagtagatttgtggtgtattaagccactcaatgtagggtagtttgtaacagcagcaaaaagaaatgaacatgaagccagaattggtggcccacacctataattccagctatttaggaggctgaggcaggatggttgctttggcccaggagttcacgataagtctgggcaacaaaatgataccctgtctacatggaaaaaaaaattagcgggtgtsgtggcatgcacttgtagtcttaggtactagaggccctgagacaggacaatttcttgacctaggagctccaggtctcagtgcgttgtgatcgtgccatggcac

SEQ ID NO: 194463 - DNA, 380 bp, Homo sapiens
ctggcaacttgactttagccttaatagacctattttggacttctggcccccagacctcttagttagtagatttgtggtgtattaagccactcaatgtagggtagtttgtaacagcagcaaaaagaaatgaacatgaagccagaattggtggcccacacctataattccagctatttaggaggctgaggcaggatggttgctttggcccaggagttcacgataagtctgggcaacaaaatgataccctgtctacatggaaaaaaaaattagcgggtgtcgtggcatgcacttgtagtcttagstactagaggccctgagacaggacaatttcttgacctaggagctccaggtctcagtgcgttgtgatcgtgccatggcac

SEQ ID NO: 194464 - DNA, 482 bp, Homo sapiens
attatatgaagtatgggatgctagattacagaaatcttaagtcgggccaggtgaagtggcttatgcccgtagcttcagcactttgggaggcagagatgggagaatggtttgagtccaggagtttgagaccaccctgggcaacacagcaagacctcctgtctatgcaaataaaaattaataaaatataattatcccggcatagtggtattttcctgtagaacctgttacttaggttgttgaggtgggcagatctcttgagggcgggagtttgaggccagcttgggcaacatagcaaggctcctctttctacaaaaaaaaaaaattagttgggtgttttggtgytcatctgtagccgtagctatggtgagggtgaggcaggaggatccccggagcccaggaggtcacggctgcagttagctatgagtgcacccctgcattgcagccagagtgacagagtgagacccgttctcagaatacagata

SEQ ID NO: 194465 - DNA, 482 bp, Homo sapiens
attatatgaagtatgggatgctagattacagaaatcttaagtcgggccaggtgaagtggcttatgcccgtagcttcagcactttgggaggcagagatgggagaatggtttgagtccaggagtttgagaccaccctgggcaacacagcaagacctcctgtctatgcaaataaaaattaataaaatataattatcccggcatagtggtattttcctgtagaacctgttacttaggttgttgaggtgggcagatctcttgagggcgggagtttgaggccagcttgggcaacatagcaaggctcctctttctacaaaaaaaaaaaattagttgggtgttttggtgctcatctgtagccgtagctatggtgagggtgaggcargaggatccccggagcccaggaggtcacggctgcagttagctatgagtgcacccctgcattgcagccagagtgacagagtgagacccgttctcagaatacagata

SEQ ID NO: 194466 - DNA, 609 bp, Homo sapiens
gaattctcctttgaatagcttgtaactattcaaacctcttattggttctataattaattctttttctaattagctttttaaaaatcagaattgatattagactaatcagttattagtgaggagatgaaattgagttgtttgtacactttatctaagataatgttatattggctaactcaaatcagtagttcagcaaatgcagaatcagagcttcttcagcgcggwactctcttgtggttcttgaagatgccatttctttttctttttttttttttttttgagacagcatcttcctctgtcaccaggctcgagtgcagtggcacaatctcaattcacagcaacttctgcctcccagttcagggttcaagcatttcttttgcctcagcctctgaagtagctgggactacagggatgtgtcaccatgcccagctaagctttgtattttctgtagttacggggtttcagcatgttggacaggctggtcttgaactcctgaccttgtgatccactggccttggactcctaaagtgctgggattacaggtgtgagccaccgtgcctggcctcttttttcagtctttaataaactgctgccatcatttcagaccac

SEQ ID NO: 194467 - DNA, 526 bp, Homo sapiens
aatcagttattagtgaggagatgaaattgagttgtttgtacactttatctaagataatgttatattggctaactcaaatcagtagttcagcaaatgcagaatcagagcttcttcagcgcggaactctcttgtggttcttgaagatgccatttctttttctttttttttttttttttgagacagcatcttcctctgtcaccaggctcgagtgcagtggcacaatctcaattcacagcaacttctgcctcccagttcagggttcaagcatttcttttgcctcagcctctgaagtagctgggacwacagggatgtgtcaccatgcccagctaagctttgtattttctgtagttacggggtttcagcatgttggacaggctggtcttgaactcctgaccttgtgatccactggccttggactcctaaagtgctgggattacaggtgtgagccaccgtgcctggcctcttttttcagtctttaataaactgctgccatcatttcagaccacttgctattttaggcacttag

SEQ ID NO: 194468 - DNA, 441 bp, Homo sapiens
gcagaatcagagcttcttcagcgcggaactctcttgtggttcttgaagatgccatttctttttctttttttttttttttttgagacagcatcttcctctgtcaccaggctcgagtgcagtggcacaatctcaattcacagcaacttctgcctcccagttcagggttcaagcatttcttttgcctcagcctctgaagtagctgggactacagggatgtgtcaccatgcccagctaagctttgtattttctgtagttacggggtttcagcatgttggacaggctggtcttgaactcctgaccttgtgatccactggycttggactcctaaagtgctgggattacaggtgtgagccaccgtgcctggcctcttttttcagtctttaataaactgctgccatcatttcagaccacttgctattttaggcacttagaaatttttca

SEQ ID NO: 194469 - DNA, 344 bp, Homo sapiens
tcttaattgaattaatacaagtttaggtgtaaagatgawgtttatgttgacaaaaattattaatgttttacatatatgaaagtaacaatatcatatatttttcatacttgtacaatactttgaaatctattattagctaatattttatattcattttgggttttcacattattgttagatccagagaaaagtaatattgtgtgaatactcaaatcataaacattttgctggatgcattcatagatactttatttaaaaagtacactaattgaagttttacaccattttatgattcatcaaacacagcaactgaatactggcttatagcaacattacagatgatg

SEQ ID NO: 194470 - DNA, 344 bp, Homo sapiens
tcttaattgaattaatacaagtttaggtgtaaagatgaagtttatgttgacaaaaattattaatgttttacatatatgaawgtaacaatatcatatatttttcatacttgtacaatactttgaaatctattattagctaatattttatattcattttgggttttcacattattgttagatccagagaaaagtaatattgtgtgaatactcaaatcataaacattttgctggatgcattcatagatactttatttaaaaagtacactaattgaagttttacaccattttatgattcatcaaacacagcaactgaatactggcttatagcaacattacagatgatg

SEQ ID NO: 194471 - DNA, 344 bp, Homo sapiens
tcttaattgaattaatacaagtttaggtgtaaagatgaagtttatgttgacaaaaattattaatgttttacatatatgaaagtaacaatatcatatatttttcatacttgtacaatactttgaaatctattattagctaatattttatattcattttgsgttttcacattattgttagatccagagaaaagtaatattgtgtgaatactcaaatcataaacattttgctggatgcattcatagatactttatttaaaaagtacactaattgaagttttacaccattttatgattcatcaaacacagcaactgaatactggcttatagcaacattacagatgatg

SEQ ID NO: 194472 - DNA, 338 bp, Homo sapiens
tgtagcagtacatagaatggataataaactgtgaacaaattaaatttctagcaagattgcaaagttaatttattatttgaaagatcagtttaatcaattttattcacctggatggttacatctggcaaaactcagcaaactgtgcactttaaaatagtatttattttatgtaaattatgtttcaatacaattgattttttaagaaaaaaaaaacgtttcccagagtgatcaaagtggagggcagggaacagtaaacatcagtgcttatgttatagctactagaagcctcccaattccaacgacatgctttcaagcwggtctgatccttcccctggagg

SEQ ID NO: 194473 - DNA, 470 bp, Homo sapiens
attctatttccaaaggacatttgtgaagccagtggaaagcgaacaaacaagctgctaaataagtcacaagtgtgttctcrtacagttttgcgattaactaaataggacattcaacagataaaatttgttttacatagttactcctctaataggatgaagttgtggattgtgagatagggctgatataacctgttttctctctgcctcttttttttcccccaagttttgtgtgcaatacattaggaaaaatataattgggctacaaagctacaaaaatggcttcctggaagttccatgcttgtttccatgtggtgcctatgttagacactgtgttctcatttgcactttcctacttgattagttaatgtatgaaggacaagcctgatctctactgtgagtttttaccaaggtattctagtagaaaaatgagtatgtaatggtgctgtggaatgctaaagtgtgtaaaacat

SEQ ID NO: 194474 - DNA, 470 bp, Homo sapiens
attctatttccaaaggacatttgtgaagccagtggaaagcgaacaaacaagctgctaaataagtcacaagtgtgttctcgtacagttttgcgattaactaaataggacattcaacagataaaatttgttttacatagttactcctctaataggatgaasttgtggattgtgagatagggctgatataacctgttttctctctgcctcttttttttcccccaagttttgtgtgcaatacattaggaaaaatataattgggctacaaagctacaaaaatggcttcctggaagttccatgcttgtttccatgtggtgcctatgttagacactgtgttctcatttgcactttcctacttgattagttaatgtatgaaggacaagcctgatctctactgtgagtttttaccaaggtattctagtagaaaaatgagtatgtaatggtgctgtggaatgctaaagtgtgtaaaacat

SEQ ID NO: 194475 - DNA, 470 bp, Homo sapiens
attctatttccaaaggacatttgtgaagccagtggaaagcgaacaaacaagctgctaaataagtcacaagtgtgttctcgtacagttttgcgattaactaaataggacattcaacagataaaatttgttttacatagttactcctctaataggatgaagttgtggattgtgagatagggctgatataacctgttttctctctgcctcttttttttcccccaagttttgtgtgcaatacattaggaaaaatataattgggctacaaagctacaaaaatggcttcctggmagttccatgcttgtttccatgtggtgcctatgttagacactgtgttctcatttgcactttcctacttgattagttaatgtatgaaggacaagcctgatctctactgtgagtttttaccaaggtattctagtagaaaaatgagtatgtaatggtgctgtggaatgctaaagtgtgtaaaacat

SEQ ID NO: 194476 - DNA, 470 bp, Homo sapiens
attctatttccaaaggacatttgtgaagccagtggaaagcgaacaaacaagctgctaaataagtcacaagtgtgttctcgtacagttttgcgattaactaaataggacattcaacagataaaatttgttttacatagttactcctctaataggatgaagttgtggattgtgagatagggctgatataacctgttttctctctgcctcttttttttcccccaagttttgtgtgcaatacattaggaaaaatataattgggctacaaagctacaaaaatggcttcctggaagttccatgcttgtttccatgtggtgcctatgttagacactgtgttctcatttgcactttcctrcttgattagttaatgtatgaaggacaagcctgatctctactgtgagtttttaccaaggtattctagtagaaaaatgagtatgtaatggtgctgtggaatgctaaagtgtgtaaaacat

SEQ ID NO: 194477 - DNA, 479 bp, Homo sapiens
aaacaagagtgaaactctgtctcaaaagaaaaaaaattaaaaataaaagaacaaggaaacaaaagtaacaaggcttgacaccagatgagcctgaatctaagcaagaaaagcccagaagaaatcccattttgggtcactggctgcatggtagtaataccatacacataagggaagagaggaggatgtggctttcactttgaattttttgagcttaaggtaacttttgcgtagctacaaagaagcattcaacagagagttaaacctatgatggaaagactgaaggggtccaagctgtagagaaacaggactgcaaaccacaaagggctgaatcagtcaaggagaactgcagggcgggatgaacaggractaatggaacatttggataagctgttgagaagaaaggagaattcagagaaaaagaactgtcagtgaggtcataataggaactgttacagtgaactaaatatggcctgggaagg

SEQ ID NO: 194478 - DNA, 549 bp, Homo sapiens
tttgccctttaaaaattttttaagtcatgattttaggtaaatgaatgacttacgttgacatggaattctatttcataacatcaagtgtttaaacctttaatatatttaatatgcttcccaaaatcaaattgcaacttcaaaattttatgttctgacctctaactttgggatactacagaggcccctgaagcacccaaaagagaggtaaccaggactatttaccatgttaagtcacatggctagcactgtcaaaatamaaaataatgttgacccttctttaggttatattcagtgtatgtcatcaatccattctaaaattgtatagaatttctaaaattcttgtattttttttttttctgagaaggagtcttgctctgacacccaggctggagtacagtggtgcaatcttggctcactgcaacctccacctcccgggttcatgccattctcctgcctcggcctcctgagtagctgggactacaggcacccaccaccatgccaggctaatttttgtatttttagcaaagacggatttcactgtgttagcca

SEQ ID NO: 194479 - DNA, 549 bp, Homo sapiens
tttgccctttaaaaattttttaagtcatgattttaggtaaatgaatgacttacgttgacatggaattctatttcataacatcaagtgtttaaacctttaatatatttaatatgcttcccaaaatcaaattgcaacttcaaaattttatgttctgacctctaactttgggatactacagaggcccctgaagcacccaaaagagaggtaaccaggactatttaccatgttaagtcacatggctagcactgtcaaaataaaaaataatgttgacccttctttaggttatattcrgtgtatgtcatcaatccattctaaaattgtatagaatttctaaaattcttgtattttttttttttctgagaaggagtcttgctctgacacccaggctggagtacagtggtgcaatcttggctcactgcaacctccacctcccgggttcatgccattctcctgcctcggcctcctgagtagctgggactacaggcacccaccaccatgccaggctaatttttgtatttttagcaaagacggatttcactgtgttagcca

SEQ ID NO: 194480 - DNA, 549 bp, Homo sapiens
tttgccctttaaaaattttttaagtcatgattttaggtaaatgaatgacttacgttgacatggaattctatttcataacatcaagtgtttaaacctttaatatatttaatatgcttcccaaaatcaaattgcaacttcaaaattttatgttctgacctctaactttgggatactacagaggcccctgaagcacccaaaagagaggtaaccaggactatttaccatgttaagtcacatggctagcactgtcaaaataaaaaataatgttgacccttctttaggttatattcagtgtatgtcatcaatccattctaaaattgtatagratttctaaaattcttgtattttttttttttctgagaaggagtcttgctctgacacccaggctggagtacagtggtgcaatcttggctcactgcaacctccacctcccgggttcatgccattctcctgcctcggcctcctgagtagctgggactacaggcacccaccaccatgccaggctaatttttgtatttttagcaaagacggatttcactgtgttagcca

SEQ ID NO: 194481 - DNA, 549 bp, Homo sapiens
tttgccctttaaaaattttttaagtcatgattttaggtaaatgaatgacttacgttgacatggaattctatttcataacatcaagtgtttaaacctttaatatatttaatatgcttcccaaaatcaaattgcaacttcaaaattttatgttctgacctctaactttgggatactacagaggcccctgaagcacccaaaagagaggtaaccaggactatttaccatgttaagtcacatggctagcactgtcaaaataaaaaataatgttgacccttctttaggttatattcagtgtatgtcatcaatccattctaaaattgtatagaatttctaaaattcttgtattttttttttttctgagaaggagtcttgctctgwcacccaggctggagtacagtggtgcaatcttggctcactgcaacctccacctcccgggttcatgccattctcctgcctcggcctcctgagtagctgggactacaggcacccaccaccatgccaggctaatttttgtatttttagcaaagacggatttcactgtgttagcca

SEQ ID NO: 194482 - DNA, 397 bp, Homo sapiens
actaggcttttgctttagaccattcatggttttmttcctcttcaaatcagtaatcaataaatcgtcttcaagtcaataaatttccactcctttaggaaaccctgatcttctggtcacaccaaggtttaattaactggtttgattgtttttctgttttcttggattttttttccttcttcctgggggtttctagtaattctagtttgatgtctcactttctccattttttatttcttagttttcttctgtgattattttcactgcagctgcagggcctaatcctgggttagcagagaactagcacttactctgccctaattggaatccaggagagataggaggttccctagtgtgaaaatgtgtttgctcctctctgcttctggtagtctctctgtag

SEQ ID NO: 194483 - DNA, 397 bp, Homo sapiens
actaggcttttgctttagaccattcatggttttcttcctcttcaaatcagtaatcaataaatcgtcttcaagtcaataaatttccactcctttaggaaaccctgatcttctggtcacaccaaggtttaattawctggtttgattgtttttctgttttcttggattttttttccttcttcctgggggtttctagtaattctagtttgatgtctcactttctccattttttatttcttagttttcttctgtgattattttcactgcagctgcagggcctaatcctgggttagcagagaactagcacttactctgccctaattggaatccaggagagataggaggttccctagtgtgaaaatgtgtttgctcctctctgcttctggtagtctctctgtag

SEQ ID NO: 194484 - DNA, 397 bp, Homo sapiens
actaggcttttgctttagaccattcatggttttcttcctcttcaaatcagtaatcaataaatcgtcttcaagtcaataaatttccactcctttaggaaaccctgatcttctggtcacaccaaggtttaattaactggtttgattgtttttctgttttcttggattttttttccttyttcctgggggtttctagtaattctagtttgatgtctcactttctccattttttatttcttagttttcttctgtgattattttcactgcagctgcagggcctaatcctgggttagcagagaactagcacttactctgccctaattggaatccaggagagataggaggttccctagtgtgaaaatgtgtttgctcctctctgcttctggtagtctctctgtag

SEQ ID NO: 194485 - DNA, 397 bp, Homo sapiens
actaggcttttgctttagaccattcatggttttcttcctcttcaaatcagtaatcaataaatcgtcttcaagtcaataaatttccactcctttaggaaaccctgatcttctggtcacaccaaggtttaattaactggtttgattgtttttctgttttcttggattttttttccttcttcctgggggtttctagtaattctagtttgatgtctcactttctccattttttatttcttagttttcttctgtgattattttcactgcagctgcagggcctaatcctgggttagcagagaactagcacttaytctgccctaattggaatccaggagagataggaggttccctagtgtgaaaatgtgtttgctcctctctgcttctggtagtctctctgtag

SEQ ID NO: 194486 - DNA, 616 bp, Homo sapiens
atataacggggtggcaactctttcctctcgcagtcttgcttctactcctgccatttgaaatatctcattgccccttggccttctggtatgattgggaggcttcctgatctgatcctcccagaagcagaagccactaygcttcctttacagcctgctgtatagtgagccaattaaacctcttttctttatgatcatacagaaaatcagtgctatgaagtggagccatgaaatgccttcaaggccctttcccctttgtcttggcaaccagcactcagcttcttttcatgcaaatatctgaagccttcgtgaattttcccccgaaaatggacttttctgttttaccacattgccaggctctgataaagatagctgacaatgtagaaccaggttcagaagtgagtaaaagacagaggtcagaagaattgggaaagcttagaagacagcaagatgaggaaaatattggaccactatagagaattgttaaatacttgtgattagaaggctgacaaaagtttaaacactgaagtccagacttaaaaggtctcagatgaaaatgaggaatttcctattaatagaagccaagattacatttgattggccttagcaaagaagctgg

SEQ ID NO: 194487 - DNA, 214 bp, Homo sapiens
aatctcaaatactaaaatcataaataaaagaggtgacagtacaacagattccacagaaatgaaaaagattacaagagactaatgtgagcaaccatatgccacaraactgggcaacctagaataaatttataaattcctagaaacacaaaccaccatactgcatcatggagaaataaaaaatccaaagagacctgtaactagtaagaagattcaa

SEQ ID NO: 194488 - DNA, 628 bp, Homo sapiens
agatctcgagggcaaggtcgccctgcagccatrttctttgctatagcaaaacaaaagtaaccttggctcctgttcccagtaatttcctcattttcatctgagaccttgtaagcctggccttcactgtccatccttctgccagccttttaatcacaactattcaacaagtgcctactatggtccaaaatttctttcatcttcctgtcttctttcaagctctccaaactctccaacctctggctgttacccacttctgaacctgctttacattttcagctatctttattgcagcctggcaatgtagaagaaaaagaagtccattttcagggggaaacttcaaaaggcttcagatatttgcattaaaaagaagtccagtgctaatagccaagacgatggggaaatgtcattgcagatatttcatagctccacttcacagtactttattttctgtatgatcataatgaaaaggggtttaattggctcatggttctgcaggctgtaaagaaagcatagtggcttctgcttctgggaggactcaggaagcctcccaatcataccagtaggaaaacagcaatgaaatgtttcatacggcaggagtaagagcaaggctgagagaggaaagaagtgc

SEQ ID NO: 194489 - DNA, 628 bp, Homo sapiens
agatctcgagggcaaggtcgccctgcagccatattctttgctatagcaaaacaaaagtaaccttggctcctgttcccagtaatttcctcattttcatctgagaccttgtaagcctggccttcactgtccatccttctgccagccttttaatcacaactattcaacaagtgcctactatggtccaaaatttctttcatcttcctgtcttctttcaagctctccaaactctccaacctctggctkttacccacttctgaacctgctttacattttcagctatctttattgcagcctggcaatgtagaagaaaaagaagtccattttcagggggaaacttcaaaaggcttcagatatttgcattaaaaagaagtccagtgctaatagccaagacgatggggaaatgtcattgcagatatttcatagctccacttcacagtactttattttctgtatgatcataatgaaaaggggtttaattggctcatggttctgcaggctgtaaagaaagcatagtggcttctgcttctgggaggactcaggaagcctcccaatcataccagtaggaaaacagcaatgaaatgtttcatacggcaggagtaagagcaaggctgagagaggaaagaagtgc

SEQ ID NO: 194490 - DNA, 375 bp, Homo sapiens
ctccaacctctggctgttacccacttctgaacctgctttacattttcagctatctttrttgcagcctggcaatgtagaagaaaaagaagtccattttcagggggaaacttcaaaaggcttcagatatttgcattaaaaagaagtccagtgctaatagccaagacgatggggaaatgtcattgcagatatttcatagctccacttcacagtactttattttctgtatgatcataatgaaaaggggtttaattggctcatggttctgcaggctgtaaagaaagcatagtggcttctgcttctgggaggactcaggaagcctcccaatcataccagtaggaaaacagcaatgaaatgtttcatacggcaggagtaaga

SEQ ID NO: 194491 - DNA, 375 bp, Homo sapiens
ctccaacctctggctgttacccacttctgaacctgctttacattttcagctatctttattgcagcctggcaatgyagaagaaaaagaagtccattttcagggggaaacttcaaaaggcttcagatatttgcattaaaaagaagtccagtgctaatagccaagacgatggggaaatgtcattgcagatatttcatagctccacttcacagtactttattttctgtatgatcataatgaaaaggggtttaattggctcatggttctgcaggctgtaaagaaagcatagtggcttctgcttctgggaggactcaggaagcctcccaatcataccagtaggaaaacagcaatgaaatgtttcatacggcaggagtaaga

SEQ ID NO: 194492 - DNA, 370 bp, Homo sapiens
acctctggctgttacccacttctgaacctgctttacattttcagctatctttattgcagcctggcaatgtagaagaaaaagaagtccattttcagggggaaacttcaaaaggcttcagatatttgcattaaaaagaagtccartgctaatagccaagacgatggggaaatgtcattgcagatatttcatagctccacttcacagtactttattttctgtatgatcataatgaaaaggggtttaattggctcatggttctgcaggctgtaaagaaagcatagtggcttctgcttctgggaggactcaggaagcctcccaatcataccagtaggaaaacagcaatgaaatgtttcatacggcaggagtaaga

SEQ ID NO: 194493 - DNA, 370 bp, Homo sapiens
acctctggctgttacccacttctgaacctgctttacattttcagctatctttattgcagcctggcaatgtagaagaaaaagaagtccattttcagggggaaacttcaaaaggcttcagatatttgcattaaaaagaagtccagtgytaatagccaagacgatggggaaatgtcattgcagatatttcatagctccacttcacagtactttattttctgtatgatcataatgaaaaggggtttaattggctcatggttctgcaggctgtaaagaaagcatagtggcttctgcttctgggaggactcaggaagcctcccaatcataccagtaggaaaacagcaatgaaatgtttcatacggcaggagtaaga

SEQ ID NO: 194494 - DNA, 628 bp, Homo sapiens
agatctcgagggcaaggtcgccctgcagccatattctttgctatagcaaaacaaaagtaaccttggctcctgttcccagtaatttcctcattttcatctgagaccttgtaagcctggccttcactgtccatccttctgccagccttttaatcacaactattcaacaagtgcctactatggtccaaaatttctttcatcttcctgtcttctttcaagctctccaaactctccaacctctggctgttacccacttctgaacctgctttacattttcagctatctttattgcagcctggcaatgtagaagaaaaagaagtccattttcagggggaaacttcaaaaggcttcagatatttgcattaaaaagaagtccagtgctaatagccaagacgakggggaaatgtcattgcagatatttcatagctccacttcacagtactttattttctgtatgatcataatgaaaaggggtttaattggctcatggttctgcaggctgtaaagaaagcatagtggcttctgcttctgggaggactcaggaagcctcccaatcataccagtaggaaaacagcaatgaaatgtttcatacggcaggagtaagagcaaggctgagagaggaaagaagtgc

SEQ ID NO: 194495 - DNA, 375 bp, Homo sapiens
ctccaacctctggctgttacccacttctgaacctgctttacattttcagctatctttattgcagcctggcaatgtagaagaaaaagaagtccattttcagggggaaacttcaaaaggcttcagatatttgcattaaaaagaagtccagtgctaatagccaagacgatggggaaatgtcattgmagatatttcatagctccacttcacagtactttattttctgtatgatcataatgaaaaggggtttaattggctcatggttctgcaggctgtaaagaaagcatagtggcttctgcttctgggaggactcaggaagcctcccaatcataccagtaggaaaacagcaatgaaatgtttcatacggcaggagtaaga

SEQ ID NO: 194496 - DNA, 375 bp, Homo sapiens
ctccaacctctggctgttacccacttctgaacctgctttacattttcagctatctttattgcagcctggcaatgtagaagaaaaagaagtccattttcagggggaaacttcaaaaggcttcagatatttgcattaaaaagaagtccagtgctaatagccaagacgatggggaaatgtcattgcagatatttcatagctccacttcrcagtactttattttctgtatgatcataatgaaaaggggtttaattggctcatggttctgcaggctgtaaagaaagcatagtggcttctgcttctgggaggactcaggaagcctcccaatcataccagtaggaaaacagcaatgaaatgtttcatacggcaggagtaaga

SEQ ID NO: 194497 - DNA, 438 bp, Homo sapiens
gtccaaccacttcaggcacacccttgcaaacrcggctggttgctttttgagccagcttggccttgcccggcatacacaagcctcaatgcaacaactgtgctaaaaatggagccacacagaggaaatgagcagcaagctcagaagcagggtgtgcactgcctttggggctccagtccatgcctcagggcttgtatgggactgcaggattcttggttgccaagaggtagaccatagaccagccgaggaggactttatgttcaagggcagaaagcagccaggtttaccacccaggggactcggccttctgtggccccggtcagacttagaatttggctcaaagcaggaccagctcactcggagtagtgtgtcagtagctggggcctgtacatgctaggcaaggctaagctggctcaaagagcaaccagctaccactgcaag

SEQ ID NO: 194498 - DNA, 438 bp, Homo sapiens
gtccaaccacttcaggcacacccttgcaaacacggctggttgctttttgagccagcttggccttgcccggcatacacaagcctcaatgcarcaactgtgctaaaaatggagccacacagaggaaatgagcagcaagctcagaagcagggtgtgcactgcctttggggctccagtccatgcctcagggcttgtatgggactgcaggattcttggttgccaagaggtagaccatagaccagccgaggaggactttatgttcaagggcagaaagcagccaggtttaccacccaggggactcggccttctgtggccccggtcagacttagaatttggctcaaagcaggaccagctcactcggagtagtgtgtcagtagctggggcctgtacatgctaggcaaggctaagctggctcaaagagcaaccagctaccactgcaag

SEQ ID NO: 194499 - DNA, 438 bp, Homo sapiens
gtccaaccacttcaggcacacccttgcaaacacggctggttgctttttgagccagcttggccttgcccggcatacacaagcctcaatgcaacaactgtgctaaaaatggagccacacagaggaaatgagcagcaagctcagaagcagggtgtgcactgcctttggggctccagtccatgcctcagggcttgtatgggactgcaggattcttggttgccaagaggtagaccatagaccagccgaggaggactttatgttcaagggcagaaagcagccaggtttaccacccaggggactcggccttctgtggccccggycagacttagaatttggctcaaagcaggaccagctcactcggagtagtgtgtcagtagctggggcctgtacatgctaggcaaggctaagctggctcaaagagcaaccagctaccactgcaag

SEQ ID NO: 194500 - DNA, 238 bp, Homo sapiens
attacattccactcgggttgaatccattcctttccattccaatccattccaatccattccattcctttccaatccattccattccattcaattccacttggattcaatstattctttccattccattctgttctgttgcattccattccattgcattagataccattccattccactcgggatgattccatttaattccattacattccgttcaattccgtttcattccattccattc

SEQ ID NO: 194501 - DNA, 238 bp, Homo sapiens
attacattccactcgggttgaatccattcctttccattccaatccattccaatccattccattcctttccaatccattccattccattcaattccacttggattcaatgtattctttccattccattctgttctgttgcattccatkccattgcattagataccattccattccactcgggatgattccatttaattccattacattccgttcaattccgtttcattccattccattc

SEQ ID NO: 194502 - DNA, 238 bp, Homo sapiens
attacattccactcgggttgaatccattcctttccattccaatccattccaatccattccattcctttccaatccattccattccattcaattccacttggattcaatgtattctttccattccattctgttctgttgcattccattccattgcattagataccattccattccactcgggatgattccattyaattccattacattccgttcaattccgtttcattccattccattc

SEQ ID NO: 194503 - DNA, 238 bp, Homo sapiens
attacattccactcgggttgaatccattcctttccattccaatccattccaatccattccattcctttccaatccattccattccattcaattccacttggattcaatgtattctttccattccattctgttctgttgcattccattccattgcattagataccattccattccactcgggatgattccatttaattccattayattccgttcaattccgtttcattccattccattc

SEQ ID NO: 194504 - DNA, 596 bp, Homo sapiens
cattttaaaatttgctatttgttttgtattagattattctcagcctacttcattatcaagctatactattttatttatgcagtttgatgatcttacggcagaggaggaagctgtatcttcaaaatgtgtcaatttggctaaagacaatcaagttatccaacaggagttattatctatgaaaaaagtacaacaagaatgtgaaaaacttgaggagaatcaaaagatgttggaagaagaaatattaaatctcaagacacatatggaaaacagtatcgtagaacttagtgarctacaagaatataaatcagagctagatgaaagggcaatgcaggcagtagaaaaatgaaaagaaatccatttacaggttacttgtttaaatcaggtaagtttacctgtaatgtgctttcatttatttcactgcaaattatattttggagattttatatatatatatatatatatatatatagtgtttcctctgcctctcttgtagcaatctgctttgtagagttgtagaaaaaaatggcatctgttttttcttttaaatatttaaatttccattattattatgagaaaatcaatctttcagagtaatg

SEQ ID NO: 194505 - DNA, 596 bp, Homo sapiens
cattttaaaatttgctatttgttttgtattagattattctcagcctacttcattatcaagctatactattttatttatgcagtttgatgatcttacggcagaggaggaagctgtatcttcaaaatgtgtcaatttggctaaagacaatcaagttatccaacaggagttattatctatgaaaaaagtacaacaagaatgtgaaaaacttgaggagaatcaaaagatgttggaagaagaaatattaaatctcaagacacatatggaaaacagtatcgtagaacttagtgagctacaagaatataaatcagagctagatgaaagggcaatgcaggcagtagaaaaatkaaaagaaatccatttacaggttacttgtttaaatcaggtaagtttacctgtaatgtgctttcatttatttcactgcaaattatattttggagattttatatatatatatatatatatatatatagtgtttcctctgcctctcttgtagcaatctgctttgtagagttgtagaaaaaaatggcatctgttttttcttttaaatatttaaatttccattattattatgagaaaatcaatctttcagagtaatg

SEQ ID NO: 194506 - DNA, 451 bp, Homo sapiens
cttctgcagtctcgccagatcttcaggctctgtctctgattctagtgctcttgttatttccaccatatctgcagttacctcctccacagaagtsgtgaacccctgtgtcatctgtgacggttggaataatcttcccaacttctctctctctctctctctctctttttttttttgagatgaagtcttgcctgggctggagtgcagtgatgcgatctcagctcactgcaacctccatctcccaggttcaagcaattctgcctcagcctcccaagtgtttgggattacggtcaccccggccaggcccagctaatttttttgtgtttttagtacagacaggatttcactatgttggccaggctggtatcaaattcctgacctcgtgatccacgttccttggcctcccaacatgctgggattacaagtgtgagccaccacgcctggccccaacttc

SEQ ID NO: 194507 - DNA, 513 bp, Homo sapiens
tattttttaagtgataagacttgaaagttsaaattattctttgatccaagggcaccagaatgaatgttggtttagtaggcatgaaaacaatattcagctctttatacatctctgtaaaagcccttgagtaccaggggcattgtcagtgagcggtaatactttgaaaggaatcttatttcttgagcagtaggtgtcaacagtgggcttaagatattcagtaaaccgtatttgtaaaccgatagtctgtcatccaggctttgttcccatttgtagagtacagacagagctgtgttttatcataattcttcagggcccttggattttcagaataataaatcatcattggtttcaagttaacatcaccaactgcattagcccttaacaaaagagtcagcatgtcctttgaagccttaaagccaggcatcaactcctctctagctgggaacatcctagatggcatctccttctagtagaaggctgttttgtctccattgcaaatctatttagtgtagc

SEQ ID NO: 194508 - DNA, 180 bp, Homo sapiens
aaatatattttttaagtgataagacttgaaagttgaaattattctttgatccaagggcaccagaatgaatgttggtttagtaggcaygaaaacaatattcagctctttatacatctctgtaaaagcccttgagtaccaggggcattgtcagtgagcggtaatactttgaaaggaatctta

SEQ ID NO: 194509 - DNA, 513 bp, Homo sapiens
tattttttaagtgataagacttgaaagttgaaattattctttgatccaagggcaccagaatgaatgttggtttagtaggcatgaaaacaatattcwgctctttatacatctctgtaaaagcccttgagtaccaggggcattgtcagtgagcggtaatactttgaaaggaatcttatttcttgagcagtaggtgtcaacagtgggcttaagatattcagtaaaccgtatttgtaaaccgatagtctgtcatccaggctttgttcccatttgtagagtacagacagagctgtgttttatcataattcttcagggcccttggattttcagaataataaatcatcattggtttcaagttaacatcaccaactgcattagcccttaacaaaagagtcagcatgtcctttgaagccttaaagccaggcatcaactcctctctagctgggaacatcctagatggcatctccttctagtagaaggctgttttgtctccattgcaaatctatttagtgtagc

SEQ ID NO: 194510 - DNA, 512 bp, Homo sapiens
attttttaagtgataagacttgaaagttgaaattattctttgatccaagggcaccagaatgaatgttggtttagtaggcatgaaaacaatattcagctctttatacatctctgtaaawgcccttgagtaccaggggcattgtcagtgagcggtaatactttgaaaggaatcttatttcttgagcagtaggtgtcaacagtgggcttaagatattcagtaaaccgtatttgtaaaccgatagtctgtcatccaggctttgttcccatttgtagagtacagacagagctgtgttttatcataattcttcagggcccttggattttcagaataataaatcatcattggtttcaagttaacatcaccaactgcattagcccttaacaaaagagtcagcatgtcctttgaagccttaaagccaggcatcaactcctctctagctgggaacatcctagatggcatctccttctagtagaaggctgttttgtctccattgcaaatctatttagtgtagc

SEQ ID NO: 194511 - DNA, 305 bp, Homo sapiens
tattttttaagtgataagacttgaaagttgaaattattctttgatccaagggcaccagaatgaatgttggtttagtaggcatgaaaacaatattcagctctttatacatctctgtaaaagcccttgagtaccaggggcattgtcagtgagyggtaatactttgaaaggaatcttatttcttgagcagtaggtgtcaacagtgggcttaagatattcagtaaaccgtatttgtaaaccgatagtctgtcatccaggctttgttcccatttgtagagtacagacagagctgtgttttatcataattc

SEQ ID NO: 194512 - DNA, 517 bp, Homo sapiens
aaatatattttttaagtgataagacttgaaagttgaaattattctttgatccaagggcaccagaatgaatgttggtttagtaggcatgaaaacaatattcagctctttatacatctctgtaaaagcccttgagtaccaggggcattgtcagtgagcggtaatactttgaaaggaatcttatttcttgagcagtaggtgtcaacagtgggcttaagatattcagtaaaccgtatttgtaaaccgatagtctgtcatccaggctttgttcccatttgtagagtacagrcagagctgtgttttatcataattcttcagggcccttggattttcagaataataaatcatcattggtttcaagttaacatcaccaactgcattagcccttaacaaaagagtcagcatgtcctttgaagccttaaagccaggcatcaactcctctctagctgggaacatcctagatggcatctccttctagtagaaggctgttttgtctccattgcaaatctatttagtgtag

SEQ ID NO: 194513 - DNA, 513 bp, Homo sapiens
tattttttaagtgataagacttgaaagttgaaattattctttgatccaagggcaccagaatgaatgttggtttagtaggcatgaaaacaatattcagctctttatacatctctgtaaaagcccttgagtaccaggggcattgtcagtgagcggtaatactttgaaaggaatcttatttcttgagcagtaggtgtcaacagtgggcttaagatattcagtaaaccgtatttgtaaaccgatagtctgtcatccaggctttgttcccatttgtagagtacagacagagctgtgttttatcataattcttcagggcccttggattttcagaatartaaatcatcattggtttcaagttaacatcaccaactgcattagcccttaacaaaagagtcagcatgtcctttgaagccttaaagccaggcatcaactcctctctagctgggaacatcctagatggcatctccttctagtagaaggctgttttgtctccattgcaaatctatttagtgtagc

SEQ ID NO: 194514 - DNA, 493 bp, Homo sapiens
acttgaaagttgaaattattctttgatccaagggcaccagaatgaatgttggtttagtaggcatgaaaacaatattcagctctttatacatctctgtaaaagcccttgagtaccaggggcattgtcagtgagcggtaatactttgaaaggaatcttatttcttgagcagtaggtgtcaacagtgggcttaagatattcagtaaaccgtatttgtaaaccgatagtctgtcatccaggctttgttcccatttgtagagtacagacagagctgtgttttatcataattcttcagggcccttggattttcagaataataaatyatcattggtttcaagttaacatcaccaactgcattagcccttaacaaaagagtcagcatgtcctttgaagccttaaagccaggcatcaactcctctctagctgggaacatcctagatggcatctccttctagtagaaggctgttttgtctccattgcaaatctatttagtgta

SEQ ID NO: 194515 - DNA, 517 bp, Homo sapiens
aaatatattttttaagtgataagacttgaaagttgaaattattctttgatccaagggcaccagaatgaatgttggtttagtaggcatgaaaacaatattcagctctttatacatctctgtaaaagcccttgagtaccaggggcattgtcagtgagcggtaatactttgaaaggaatcttatttcttgagcagtaggtgtcaacagtgggcttaagatattcagtaaaccgtatttgtaaaccgatagtctgtcatccaggctttgttcccatttgtagagtacagacagagctgtgttttatcataattcttcagggcccttggattttcagaataataaatcatcattggtttcaagttaacatcaccaactrcattagcccttaacaaaagagtcagcatgtcctttgaagccttaaagccaggcatcaactcctctctagctgggaacatcctagatggcatctccttctagtagaaggctgttttgtctccattgcaaatctatttagtgtag

SEQ ID NO: 194516 - DNA, 504 bp, Homo sapiens
gtttgctgtcttatcctggtgtgatttgtggttcccaaaacaatgacaacagtagcattaaagatcactgattacagatcaccacaacagattcaataataagaatcttaaaatactgtgagaatgaccgaaatgtgacacagagacgtgaagtgagcacgtgctgtaggaacaatggtgccagtcagacctgcttattgcagggtggccacaaaccttcaatatgtaaaacacatggtcacaaaacacaataaagcaaagtgcagtgaaacaagatgtgtctgtcttttgacagactgtgacaatctctacctttgaattggtacattcataccattaacattcaaagtgattattgatatcattggattaatatctactatatttgttactgttttctattcattctcctcagtcttcattcttttgtctaccactctttttctcccttttgcarttttcattgatgattttagatgactacattttccctgtctttcttag

SEQ ID NO: 194517 - DNA, 389 bp, Homo sapiens
agtttaatagagcaataaacgattcacgaatcagacagtccccagaatcacagcagattcacagagactccagcgcaktcatgtggtggaagaagatttatagacaaaagggaaatggcataccgaaatcggaagtgaggtacagaaacaactcagtgtttgccttgtttgaacacattttgaacatttggcagtgcctgagtggttgaagtttggccattgggattggccaagatgtagctgtttttccaggtgcatactcttaagttagtttttcattcttctatacctattaaggtaggttacagttcatccacaatgactcatatatagaattatggagtccttctcaggccatacttagttcactttaacaatgccttcccttt

SEQ ID NO: 194518 - DNA, 389 bp, Homo sapiens
agtttaatagagcaataaacgattcacgaatcagacagtccccagaatcacagcagattcacagagactccagcgcattcatgtggtggaagaagatttatagacaaaagggaaatggcataccgaaatcggaagtgaggtacagaaacaactcagtgtttgccttgtttgaacacaktttgaacatttggcagtgcctgagtggttgaagtttggccattgggattggccaagatgtagctgtttttccaggtgcatactcttaagttagtttttcattcttctatacctattaaggtaggttacagttcatccacaatgactcatatatagaattatggagtccttctcaggccatacttagttcactttaacaatgccttcccttt

SEQ ID NO: 194519 - DNA, 389 bp, Homo sapiens
agtttaatagagcaataaacgattcacgaatcagacagtccccagaatcacagcagattcacagagactccagcgcattcatgtggtggaagaagatttatagacaaaagggaaatggcataccgaaatcggaagtgaggtacagaaacaactcagtgtttgccttgtttgaacacattttgaacatttggcagtgcctgagtkgttgaagtttggccattgggattggccaagatgtagctgtttttccaggtgcatactcttaagttagtttttcattcttctatacctattaaggtaggttacagttcatccacaatgactcatatatagaattatggagtccttctcaggccatacttagttcactttaacaatgccttcccttt

SEQ ID NO: 194520 - DNA, 474 bp, Homo sapiens
acattcccgtcagctctcgactccatggtcagaccttctgttctcacattctgtagttcagtaggactgggcggtagataaggttgatttgtttttgtagaacttacaattttgtgatttttagttctaatgagtagacctttttcrtgaatagtagttacgttcaaacacctctgaccaaatgtgcatgtggagtttctacactaattttcagacaatctggatcccaactgggtatcccacaattccatcctgacactccctggagttagtgcagaccccgcaggatgggagctcagtcccaggagtccaccctcactccacatgcaaattgcaagtcttgggttgttacatgtagttttgaccaaccagttagaaaacagagtttcatgacccccattggtgggtggaatcatttgcttggacagcttgcagaactcagaaaaacagattgttttcttttttttctgagat

SEQ ID NO: 194521 - DNA, 474 bp, Homo sapiens
acattcccgtcagctctcgactccatggtcagaccttctgttctcacattctgtagttcagtaggactgggcggtagataaggttgatttgtttttgtagaacttacaattttgtgatttttagttctaatgagtagacctttttcgtgaatagtagttacgttcaaacacctctgaccaaatgtgcatgtggagtttctacactrattttcagacaatctggatcccaactgggtatcccacaattccatcctgacactccctggagttagtgcagaccccgcaggatgggagctcagtcccaggagtccaccctcactccacatgcaaattgcaagtcttgggttgttacatgtagttttgaccaaccagttagaaaacagagtttcatgacccccattggtgggtggaatcatttgcttggacagcttgcagaactcagaaaaacagattgttttcttttttttctgagat

SEQ ID NO: 194522 - DNA, 598 bp, Homo sapiens
  misc_feature (1)...(598): n = A,T,C or G
ttataagagcttgagaagctctgtgccaggatgaggggcagaaaccaaatgtgtatttcttttctttttcttttgaacacagagtctgtttcacccaatctggagtgcagtgatggtgttgtagctaactgcagcctcaaccacctgtgctcaagcaattctcccacctcagccttccaagcatctgggactacaggtgcacaccatccatgcccagctaatttttgtattttttttttttgtagagatgggatcttgttatattgccgaggctggtcttgaactctggggctaaagcgatcctttcaccacaacctctcaagtagctgaaactacagatgcatactaccatgcccagctaattttttcttatttctttttgttgtttaattgagggggtctcgccgtgtttcccaggctggtcttgaagttttggcctcaagsgtttctcctgctttgacctcctaaactgttgggattatgggttgtgagccacggcctctgtgtccagcaaacacaagaggtctttataagtgaaagagggaggtaagagagtccgaattgaaggagatttgatgnnnnnnnnnnnnnnnnnnnn

SEQ ID NO: 194523 - DNA, 527 bp, Homo sapiens
tatggaaagaaaagaccatcaccagccactacaaaaatgcaccgaagtacacagactattaatgctaaaaaccaaccacatacacaagtctgcaaaataactagctgacagcatgacgacaggatctaatccacacataccattactaaccttaaatggaaatgggctaaatgctccgattgaaagacacaggggggcaagctggataaagaaccaagacccatttgagtatgccrtctccaagaaacccatctcacattcagtatcatacataggctcaaaatgaaggaatggtgaaaaatctttcaagccaatggaaaacagaagaaatcaggtgttacactcccagtttcgacaaaacgtatataccaataaagataaaaaaagacagagaaggacattacaaaggtggtcctgacctttgataaatctcgttattgattgataccaacctgggctatctttattgcccaaaccaacaggataatttgctgaggttgtggagcttctcccctgcaaagagtccc

SEQ ID NO: 194524 - DNA, 326 bp, Homo sapiens
cacaggggggcaagctggataaagaaccaagacccatttgagtatgccatctccaagaaacccatctcacattcagtrtcatacataggctcaaaatgaaggaatggtgaaaaatctttcaagccaatggaaaacagaagaaatcaggtgttacactcccagtttcgacaaaacgtatataccaataaagataaaaaaagacagagaaggacattacaaaggtggtcctgacctttgataaatctcgttattgattgataccaacctgggctatctttattgcccaaaccaacaggataatttgctgaggttgtggagcttctccc

SEQ ID NO: 194525 - DNA, 326 bp, Homo sapiens
cacaggggggcaagctggataaagaaccaagacccatttgagtatgccatctccaagaaacccatctcacattcagtaycatacataggctcaaaatgaaggaatggtgaaaaatctttcaagccaatggaaaacagaagaaatcaggtgttacactcccagtttcgacaaaacgtatataccaataaagataaaaaaagacagagaaggacattacaaaggtggtcctgacctttgataaatctcgttattgattgataccaacctgggctatctttattgcccaaaccaacaggataatttgctgaggttgtggagcttctccc

SEQ ID NO: 194526 - DNA, 527 bp, Homo sapiens
tatggaaagaaaagaccatcaccagccactacaaaaatgcaccgaagtacacagactattaatgctaaaaaccaaccacatacacaagtctgcaaaataactagctgacagcatgacgacaggatctaatccacacataccattactaaccttaaatggaaatgggctaaatgctccgattgaaagacacaggggggcaagctggataaagaaccaagacccatttgagtatgccatctccaagaaacccatctcacattcagtatcatacataggctcaaaatgaaggaatggtgaaaaatctttcaagccaatggaaaacagaakaaatcaggtgttacactcccagtttcgacaaaacgtatataccaataaagataaaaaaagacagagaaggacattacaaaggtggtcctgacctttgataaatctcgttattgattgataccaacctgggctatctttattgcccaaaccaacaggataatttgctgaggttgtggagcttctcccctgcaaagagtccc

SEQ ID NO: 194527 - DNA, 326 bp, Homo sapiens
cacaggggggcaagctggataaagaaccaagacccatttgagtatgccatctccaagaaacccatctcacattcagtatcatacataggctcaaaatgaaggaatggtgaaaaatctttcaagccaatggaaaacagaagaaatcaggtgttacactcccagtttcgacaaaacgtatataccaataaagataaaaaaagacagagaaggacattacaaaggtggtcctgacctttgataaatctcrttattgattgataccaacctgggctatctttattgcccaaaccaacaggataatttgctgaggttgtggagcttctccc

SEQ ID NO: 194528 - DNA, 602 bp, Homo sapiens
gcatccaaacactttaccacatatggatgtttattatttagtagaatccaaaataattgcattttattaattaaacaaaacactaaaatattcagttccatttttatgttaaaagctttgtgcttggccaggcacggtggctcacacttgtaatcccaaaatttggggaggccgaggcaggtgaatcacttgaggtcaggagtttgagaacagcctggccaacrtgatgaaacctgtctccagtaaacatacaaaagttagcaaggggtgttggcaggcatgtgtaatctcagatattcaggaggctgaggcaggagaatcacttgaacccaggagacagaggttgcagtaagccaagatcataccactgcactatagcctgggtgatggagactccatctcaaaaaaaataaaaataaaaaaataaaaatgtttgtgcttttcttacataagagtacatcttctgactgtaaaaatcctggaagaaaacctaggaaattctcctctagacatcatatttgtcaattaatttatggctaagtcctcaaaagcaattgcaagaataacaaaaattgacaagtgtgatccaatttagctaaata

SEQ ID NO: 194529 - DNA, 602 bp, Homo sapiens
gcatccaaacactttaccacatatggatgtttattatttagtagaatccaaaataattgcattttattaattaaacaaaacactaaaatattcagttccatttttatgttaaaagctttgtgcttggccaggcacggtggctcacacttgtaatcccaaaatttggggaggccgaggcaggtgaatcacttgaggtcaggagtttgagaacagcctggccaacgtgatgaaacctgtctccagtaaacatacaaaagttagcaaggggtgttggcaggcatgtgtaatctcagataytcaggaggctgaggcaggagaatcacttgaacccaggagacagaggttgcagtaagccaagatcataccactgcactatagcctgggtgatggagactccatctcaaaaaaaataaaaataaaaaaataaaaatgtttgtgcttttcttacataagagtacatcttctgactgtaaaaatcctggaagaaaacctaggaaattctcctctagacatcatatttgtcaattaatttatggctaagtcctcaaaagcaattgcaagaataacaaaaattgacaagtgtgatccaatttagctaaata

SEQ ID NO: 194530 - DNA, 602 bp, Homo sapiens
gcatccaaacactttaccacatatggatgtttattatttagtagaatccaaaataattgcattttattaattaaacaaaacactaaaatattcagttccatttttatgttaaaagctttgtgcttggccaggcacggtggctcacacttgtaatcccaaaatttggggaggccgaggcaggtgaatcacttgaggtcaggagtttgagaacagcctggccaacgtgatgaaacctgtctccagtaaacatacaaaagttagcaaggggtgttggcaggcatgtgtaatctcagatattcaggaggctgaggcaggagaatcacttgaacccaggagacagaggttgcagtaagccaagrtcataccactgcactatagcctgggtgatggagactccatctcaaaaaaaataaaaataaaaaaataaaaatgtttgtgcttttcttacataagagtacatcttctgactgtaaaaatcctggaagaaaacctaggaaattctcctctagacatcatatttgtcaattaatttatggctaagtcctcaaaagcaattgcaagaataacaaaaattgacaagtgtgatccaatttagctaaata

SEQ ID NO: 194531 - DNA, 585 bp, Homo sapiens
tcttgtttaacttaaacattattattatttttacttattttagatggagccggactgtrtagaacaaataattagagaaacaaagagaagtacgttgccaaaatttattaattaaatttaggtttattttagaaataaagtgtaaaaagcaaatggcattccttttcattcttgggttagtagatactacatcaatattttttttcttacacacatctaatgaaagatgtgaaaacagaaactttcacagagaagactgtgcttatacaccataaattcatcatgttccaaagcttaaacagttcccaagaagtctgtgcatctctttttcactggctctacactttcttaagttttgccatcctcatggaactgccatccagcacactgaaacgattctcagaaaacaaaagcatcatcaagttctcagggtttcggtagagattgaaggccaacagacctaagactcattcagaaatacttatctgagcaataacccttcataagcagtcacttgacaggtgacattttaaatctcctgtcaattactatgtcattggcttacacttgttctcaggaaaagtt

SEQ ID NO: 194532 - DNA, 585 bp, Homo sapiens
tcttgtttaacttaaacattattattatttttacttattttagatggagccggactgtgtagaacaaataattagagaaacaaagagaagtackttgccaaaatttattaattaaatttaggtttattttagaaataaagtgtaaaaagcaaatggcattccttttcattcttgggttagtagatactacatcaatattttttttcttacacacatctaatgaaagatgtgaaaacagaaactttcacagagaagactgtgcttatacaccataaattcatcatgttccaaagcttaaacagttcccaagaagtctgtgcatctctttttcactggctctacactttcttaagttttgccatcctcatggaactgccatccagcacactgaaacgattctcagaaaacaaaagcatcatcaagttctcagggtttcggtagagattgaaggccaacagacctaagactcattcagaaatacttatctgagcaataacccttcataagcagtcacttgacaggtgacattttaaatctcctgtcaattactatgtcattggcttacacttgttctcaggaaaagtt

SEQ ID NO: 194533 - DNA, 585 bp, Homo sapiens
tcttgtttaacttaaacattattattatttttacttattttagatggagccggactgtgtagaacaaataattagagaaacaaagagaagtacgttgccaaaatttattaattaaatttaggtttattttagaaataaagtgtaaaaagcaaatggcattccttttcattcttgggttagtagatactacatcaatattttttttcttacacacatctaatgaaagatgtgaaaacagaaactttcacagagaagactgtgcttatacaccataaattcatcatgttccaaagcttaaacagttcccaagaagtctgtgcatctctttttcactgrctctacactttcttaagttttgccatcctcatggaactgccatccagcacactgaaacgattctcagaaaacaaaagcatcatcaagttctcagggtttcggtagagattgaaggccaacagacctaagactcattcagaaatacttatctgagcaataacccttcataagcagtcacttgacaggtgacattttaaatctcctgtcaattactatgtcattggcttacacttgttctcaggaaaagtt

SEQ ID NO: 194534 - DNA, 585 bp, Homo sapiens
tcttgtttaacttaaacattattattatttttacttattttagatggagccggactgtgtagaacaaataattagagaaacaaagagaagtacgttgccaaaatttattaattaaatttaggtttattttagaaataaagtgtaaaaagcaaatggcattccttttcattcttgggttagtagatactacatcaatattttttttcttacacacatctaatgaaagatgtgaaaacagaaactttcacagagaagactgtgcttatacaccataaattcatcatgttccaaagcttaaacagttcccaagaagtctgtgcatctctttttcactggctctacactttcttaagttttgccatcctcatggaactgccatccagcacactgaaacgattctcagaaaacaaaagcatcatcaagttctcagggtttcggtagagattgaaggccaacagacmtaagactcattcagaaatacttatctgagcaataacccttcataagcagtcacttgacaggtgacattttaaatctcctgtcaattactatgtcattggcttacacttgttctcaggaaaagtt

SEQ ID NO: 194535 - DNA, 545 bp, Homo sapiens
gattgaaggccaacagacctaagactcattcagaaatacttatctgagcaataacccttcataagcagtcacttgacaggtgacattttaaatctcctgtcaattactatgtcattggcttacacttgttctcaggaaaagttccaaayttttcaccatgaaatgaaaacacccatatcaaagtaattctcgtcaagttactcaaccttgtctctcgccacttactgcactctgtcctttgctctagcaccaaactggatggagtggaactctgcagggctcttcctcacctctggctctttgccttcccctcttccctctatctgggaagctttttcttgtccttcaggtatcaacctatgttatctcctccaccagaaagcccatgatattgacataaaagtgggtagatgtcccttctatgtgttccagtagtgccctgctgtatacctgtcatggtatctttgactctatatggacattgcctgcctgtctgtttttttaggttatagcatatgactgttgggaggtggaccatgccatct

SEQ ID NO: 194536 - DNA, 545 bp, Homo sapiens
gattgaaggccaacagacctaagactcattcagaaatacttatctgagcaataacccttcataagcagtcacttgacaggtgacattttaaatctcctgtcaattactatgtcattggcttacacttgttctcaggaaaagttccaaatttttcaccatgaaatgaaaacacccatatcaaagtaattctcgtcaagttactcarccttgtctctcgccacttactgcactctgtcctttgctctagcaccaaactggatggagtggaactctgcagggctcttcctcacctctggctctttgccttcccctcttccctctatctgggaagctttttcttgtccttcaggtatcaacctatgttatctcctccaccagaaagcccatgatattgacataaaagtgggtagatgtcccttctatgtgttccagtagtgccctgctgtatacctgtcatggtatctttgactctatatggacattgcctgcctgtctgtttttttaggttatagcatatgactgttgggaggtggaccatgccatct

SEQ ID NO: 194537 - DNA, 499 bp, Homo sapiens
ccaagtgtaggttgttggcatttattctgcctggtgttctcggagcttcctggatctttggtttggtgtctgacattaatactggaagttctcagacatggttgttacagaactttcytctatttcttctcctcctggtattctcattactctgtttcactttttgtagttgtcccacagtcttgaatatcatcttctgttcttttcagtgtttcttttctttagtttttgaagtttctgatgataaatcctcaagctcagagatttttactgagctgagtccagtctactaataagccatcagaggtattcttcagttatttaccacgtttttcatcactacattatgttgaaagttcttacgatgtttgtctttctgataacattacccatctacacttgaatactgtctacttcattcattaggcccttagcatattctccagaggtttaaaaaaaattccaaagtcatatctttgtctgcttctgaagcttgctc

SEQ ID NO: 194538 - DNA, 496 bp, Homo sapiens
tgagggacaaacactcagaagccagctggagtgttctagaatcctatgtgagggccaaacattcagaccccagcagtagtgttgtggaatcctatgtgagggacaaactttcaaacccttgtagcagtgttctggaatgctatgtgagggacaaacattcagaccacgggagcagtgttctggaattctatgtgaaggacaaacattaagactctcatagcagtgtcctggaatcatatgtgagggacaaccattcagacaccagcagaagtgttctggaatcctaggtgtgggaaaaacattcagaacctagtagcagtgttctggaatcctatgtgagggacatacattcagaccacggtagcagtgttctggaatggtatgtgaaggacaaacattcagacccttgtagcagtgttccggaattctaygtgagggacaaacattcagaccacagcagcagtgttctggaatcctatatgatggaccaacatgc

SEQ ID NO: 194539 - DNA, 427 bp, Homo sapiens
ccccacactcgatatcaggagaaggggaggcctggggagcagaagggcccccgatcaaggaggaaaaaggcaggagaaagtcaggagaggggcagggtctgcaggatcccaggaccaggaagagttcacggcctccctgggactggggctgcgtcgctgcgctccaggagctgacgagggagcggagtggatgggaagctcccagggcgggaatcaaccttgcggtgaggactttaaaaaaggtgcrggccagtgcaggggacactgaaggatttgaggcaggaaaactccgcgataagagctgtctatatggccctgtggcagaagcacgggggacacgaccccatggaactgtgtccattaaacctctttgtcttcataaattacccagtctcgggtatttctttattagcagcgtgagaacaga

SEQ ID NO: 194540 - DNA, 562 bp, Homo sapiens
agtaaaaccccatctgaatttttaaaaatactacatatttttgaatgtgaacatttactagagattggaattgaagtttctatgttttttaatgatctgccatttttaatagcttaatattcaaaaatgtttatcaactaaattgagtacaatttctacatttttagtgttgtaaacaatgtggtcctcattttagggacgcttgacattcatggaygtggccatcgaattctctcaggaggagtggaaatccctggaccctggacagagggctttatacagggacgtgatgttggagaactacaggaacctggtctttctgggtgaggatgacttccctccagaagccgggatctgctctaatctgtctttgcattttctcttgcgtgcctcttgggagcccctaaattgcttaactgaggtagaaaccttgttgactcagaaatgaaaagctctattatgctctctggatttgaaatgcgtcctttcttcagatgtaccgcccccttcataatacatcattgggtggcaccggataaccagttctctgttttctcccctg

SEQ ID NO: 194541 - DNA, 324 bp, Homo sapiens
aagctttccacctgattttttctaggagttttatggttttaggtcttagttttaggtcatgaattgrctttcagataatttttgcatacggtgtaataagagttcaacttcattcctttcttgtggatatccagtttcctcagcactatttgataaagagactgtcctctctcgttacatggtcttggcagccttattgaacatcatttgaccaaatatttgagggtttgtttctggcctgtctgttctagtccattggcttatatgtctgccttcatggcagtacagttctattttgatgaaggtagcttagtaataagtttt

SEQ ID NO: 194542 - DNA, 372 bp, Homo sapiens
gttgtaggtgcaggtggtccttttcccccgatatgattgtttacracaggattctgctgtctgcctcttagtagtggagacatacactgacgtcttttagggatcccttgcatatttgattctccaggtcatttatgtttattttgaggtccagccacaaattcatctgcttcatctgtcatcataccctttttatccagcttaaaggaattgccaaatgtatgtaacctttgcggctgatcaggatcaagttctcttagtggagaaggtaacttgcttgaggtattcctggtagttccccatttgtgctataggaacactgcacttgatcttcgtcctgtcctttaagaaatctgcgagtgtgcttcaaaa

SEQ ID NO: 194543 - DNA, 600 bp, Homo sapiens
gctagagacaatttaacccattacagggttgttattatgttatgtaggtcattttccatttttaatacatttcgtcctatatatactttgaygctttcttaattaaggtacattatgtttctcaaagatcttatctatatataatgtaattaattttgaactaattctcatatttcatactgaggttaactacctgatagaacatgtatatgcatgtccaacacacacaagataatctgaatcatcttatagaatcagaaagtagaaaagtgctaaaaacaaataagctaaacaaaaacacaggaataatgagaatttgtcaaagggacacagagaccaactgaaagggctcccgatggccaaagctaaaacaatttacataaaaataataaaaagtagtattgaattaaaacacaaaatataaaataaataaagtgaattcatacaaatatacataaatgattcaataaattgataaggcagaaaagactaaacatctttggagaaaaatggaagaaatctgaataaagtataaactttaacaaattgtcctgtatcaacatcagttcgttaattgtgacaaatatgccttactaatgt

SEQ ID NO: 194544 - DNA, 600 bp, Homo sapiens
gctagagacaatttaacccattacagggttgttattatgttatgtaggtcattttccatttttaatacatttcgtcctatatatactttgatgcwttcttaattaaggtacattatgtttctcaaagatcttatctatatataatgtaattaattttgaactaattctcatatttcatactgaggttaactacctgatagaacatgtatatgcatgtccaacacacacaagataatctgaatcatcttatagaatcagaaagtagaaaagtgctaaaaacaaataagctaaacaaaaacacaggaataatgagaatttgtcaaagggacacagagaccaactgaaagggctcccgatggccaaagctaaaacaatttacataaaaataataaaaagtagtattgaattaaaacacaaaatataaaataaataaagtgaattcatacaaatatacataaatgattcaataaattgataaggcagaaaagactaaacatctttggagaaaaatggaagaaatctgaataaagtataaactttaacaaattgtcctgtatcaacatcagttcgttaattgtgacaaatatgccttactaatgt

SEQ ID NO: 194545 - DNA, 610 bp, Homo sapiens
gaggcaggagaatcacttgaagcagggagacagaggtcaccctgagccgatatcacaccacttcacactagcagcctgggtgacagagtgagacttcatctcaaaaaaaawaaaaaaaaaaacttaaaaaaagaaaacataggaagcttttggtacttttagatatataagaatttattagaacaagaattcaaaaattataaaagtaaatattggtaaactggggttcatcactattataatcttccttaatcaagagataccataatgaaaacaaaagagaaagccatatattagaagatatatttgcaaatcatttatcattgatacagccattttatccagaactaaaaagagtcccttaacagatttctaacaagaaaatcagtaatccaataaaaagagcacaaatatttgaaaatgatttccagacgaagtgactaattaataagcacataaaaatatgtagctgtcatttgttattagaaaactacaagttaaatctactttggcatatcagtgcacactcaatagaatagctttatttgaaaagacaaacaaggatatggtttacaatgtagactcttaggcattgccaacagcaaagtaa

SEQ ID NO: 194546 - DNA, 610 bp, Homo sapiens
gaggcaggagaatcacttgaagcagggagacagaggtcaccctgagccgatatcacaccacttcacactagcagcctgggtgacagagtgagacttcatctcaaaaaaaatwaaaaaaaaaacttaaaaaaagaaaacataggaagcttttggtacttttagatatataagaatttattagaacaagaattcaaaaattataaaagtaaatattggtaaactggggttcatcactattataatcttccttaatcaagagataccataatgaaaacaaaagagaaagccatatattagaagatatatttgcaaatcatttatcattgatacagccattttatccagaactaaaaagagtcccttaacagatttctaacaagaaaatcagtaatccaataaaaagagcacaaatatttgaaaatgatttccagacgaagtgactaattaataagcacataaaaatatgtagctgtcatttgttattagaaaactacaagttaaatctactttggcatatcagtgcacactcaatagaatagctttatttgaaaagacaaacaaggatatggtttacaatgtagactcttaggcattgccaacagcaaagtaa

SEQ ID NO: 194547 - DNA, 373 bp, Homo sapiens
agctctgtttttcaagtcttgatatatagcagtgtttttatttttcccatgtttgcaaactgtgggcttcagttaccagcttcctggtctgacagcactgctccaaagcacaaatgagcagctaaaacactatattacccagcacctgatgttgggttcctcctagctcacacayatgagaagcagtaatgatttttcctcctatcctaattggccctcactctgttataggttctttgtagtttcagagtgatgattaagcacaattagaatggagagagaaggaaaaaatgtttactgtatggataattaggcactgtgtaggtcttcacatatgttattaatcatttcttttctgatgtaatgactcttt

SEQ ID NO: 194548 - DNA, 599 bp, Homo sapiens
tatcccagctacttgggaggctgaggcaggagaactgcttgaacccaggaggcagaggttgcagtgagccaagatggtgtcaccgcaatgaaacctgggtggcagagctagacgacaaaataattattaacaaaagagctcaaaaataatataattaacaaaagggctcaaaaacaattaaaataaaatttaaataaataaktaaagtatgtgtgtacagacaaaaaagtatctatgtatatatattttatatgtgtgtctctgtgtgtgtgtgtctgtgttttcttaccctatccactactgtcaggcagctgccgtagtaaggaatcccctcaatacattcaggaatggagatgacttgagactaagtgccagacttcataaagcttgttctgattgagtgtcagacttcataaggaaacctttgctttcagcctgattttagggtatatatcttgaggggtcccattgagcacctgtgaattttacaagggtccattctctacttgaccatttttttctaccacactacaagaatggcaaattctcctctcaggttttctgtcactttctgttgttctctcatcattaacagctta

SEQ ID NO: 194549 - DNA, 557 bp, Homo sapiens
gttttctgcgttcttggtatgttttctcaaaaacccattttgtgaataaaatcactcatttcttgaaagattactagttcagaattcaaaaaatttacccacaatgttaaaggaatttctcaccttttttttttttgctaaaactgttgctaatttggaatccaactttgatttcacaaattcaaattatctctatgatttaaaactattttctctgagaatagatgttttatttatgatgacatccaatgtgcttcagaatattttaaaatgaggatattttakacatggatagcctatttgatgaattcatagatgcaaacaacctgattcagaaacagctgtactgcaaaaaaaaaaaaaaagcctttatgtttaaatggatggacatttttggacagctagaaatgaattcatacaagtctgaaaacctgcagttgccagtaattaaaagtctaggtaatccatgttcaaacacttttgttcagagatttaactaatgccctcatattacactgacagtaaaagtcagtgtaatgtatgatttataagggcaa

SEQ ID NO: 194550 - DNA, 520 bp, Homo sapiens
aagaccataaattggacagaaggaaatgagagtttagaatctaatgggtaaacagagatttttcattctcacattgacaaagattaaaaagaggatgtgaaagatggtaaatttcattttacatgtgtatttatgtatgtccttaggcaagaggatattggtctaaacactatgagttttggatataattgcttttttcctttcaaatggagatgaataccttaacatggtaaaaagtggttttgtgtgagaggtctcattttaccttctccctgctaataattctgacttttattctattaaattgyataaagaatatcaggtttttggtcaaatttgagttaaaaactttagaaagttcctgggagtatcagagaatctagatgactcagagatcatctttagaattgtcatatgtcaacctaacaaatgttgttgataaatattagaaatagaataaatcgtttctcaaaaaaatactaatttctacatcagcaactccacctctcttttcttactt

SEQ ID NO: 194551 - DNA, 520 bp, Homo sapiens
aagaccataaattggacagaaggaaatgagagtttagaatctaatgggtaaacagagatttttcattctcacattgacaaagattaaaaagaggatgtgaaagatggtaaatttcattttacatgtgtatttatgtatgtccttaggcaagaggatattggtctaaacactatgagttttggatataattgcttttttcctttcaaatggagatgaataccttaacatggtaaaaagtggttttgtgtgagaggtctcattttaccttctccctgctaataattctgacttttattctattaaattgtataaagaatatcaggtttttggtcaaatttgagttaaaaactttagaaagttcctgggagtatcagagaatctagatgactcagagatcatctttagaattgtcatatgtcaacctaacaaatgttgttgataaatattagaaatagaataaatygtttctcaaaaaaatactaatttctacatcagcaactccacctctcttttcttactt

SEQ ID NO: 194552 - DNA, 601 bp, Homo sapiens
taatctcttcaccctctggcacaattcctgcaggttaaacaatgaaaatgtgggacccttctaagactgcaatctctgttgttttcacacttttattttagtccacacaggttctagctttaaaattactgcttaatattttctacaagtttatgattccaacagtttctgttctagggaagttgatctcatttgtgactctatattagcctgtgtctctagagatcagggtaacagtttgctgtgcaaattcaattctctagggtttaagaaaattcattgattttcactttgtctaaatccttattactgtaagcatgctgtgaacactttcaaaccctttacatggygaaactgaaacaggaggcttcattatatttattgtcagacaaataatagctatcactgctgagaataataatattgagaacataacaggcttgagctcttataaaatgttatgattttgacaggctcctccatctaaaattaaattaaaacttttaatctccttaacattctgtgaaattatttaaatgcacattcaatggagactaatgtaagcaattatgatgaaaagacaacaaaacatcaaggtttg

SEQ ID NO: 194553 - DNA, 590 bp, Homo sapiens
ctagtgattcctctggattccaggcatgttcctcccaatccaatctyctcataaaaattcagaagaatcacccctgtaactgtagtcctgttttttttccttcttgcatgagaaacaaaaaaatgaccagacagcagccacagtgttaaagtcaaagaaacttcactctgtctcctcatattcttcaatgacccatatcccaaatctttagtctagcagagcctaaatttgcaaaactagacgagcatatctcaaagctggttcttaggtgacatttttgacagtcagtgcacatctcaattccaaaggtctttgaaaaatggggtgttcaactttactcaatgcaaatttactcagtaactaaatagtagtcattttaagagagaactgcagtaatgattactgtctgtatttgccaaatggttgctgtctccttcttcaagtgaacataatttcccattcacaatatggtctctatgtctcagaaatgactttgatctacaaactggatgagggattatggtattcaagtgtggtggaagaaagcatgcttctcactcacttttgaacttttttctcgttgctgttgt

SEQ ID NO: 194554 - DNA, 598 bp, Homo sapiens
ggttgctgtctccttcttcaagtgaacataatttcccaktcacaatatggtctctatgtctcagaaatgactttgatctacaaactggatgagggattatggtattcaagtgtggtggaagaaagcatgcttctcactcacttttgaacttttttctcgttgctgttgtcattggacatgtcaagcaatattagtgactccatatttatctagcttctaggaactccatgttctatcagccataaccaatgatccctggttgcctttttagctttgttactctctatgtacacttacatatttggaatatataaattactttatatctcagtaattaaaacttccaaattttaaaagtggctaaagaattggaataaacatttctctaaagaatgtatagaaatggccagtaaacacaaacaaaggtgtttgacgtcatcagtctcagaggaatgcaaacaaaacccacaatgagatagcacttcactcctactaggatagctagaatcaaaagccaaattaaaaagattttaagcaaggatgtggcaaaattaaaaccctcatacactgctggtgagactgtaaaatagtacagctg

SEQ ID NO: 194555 - DNA, 598 bp, Homo sapiens
ggttgctgtctccttcttcaagtgaacataatttcccattcacaatatggtctctatgtctcagaaatgactttgatctacaaactggatgagggattatggtattcaagtgtggtggaagaaagcatgcttctcactcacttttgaacttttttctcgttgctgttgtcattggacatgtcaagcaatattastgactccatatttatctagcttctaggaactccatgttctatcagccataaccaatgatccctggttgcctttttagctttgttactctctatgtacacttacatatttggaatatataaattactttatatctcagtaattaaaacttccaaattttaaaagtggctaaagaattggaataaacatttctctaaagaatgtatagaaatggccagtaaacacaaacaaaggtgtttgacgtcatcagtctcagaggaatgcaaacaaaacccacaatgagatagcacttcactcctactaggatagctagaatcaaaagccaaattaaaaagattttaagcaaggatgtggcaaaattaaaaccctcatacactgctggtgagactgtaaaatagtacagctg

SEQ ID NO: 194556 - DNA, 441 bp, Homo sapiens
caactatttgttgctcttccactttccagtgctttccagcaggmtgaggtgaaagtattacttgaggctgggagttcaagaaagcctgagcaacacagcaagattctgtttctacaaaaaataaaaagttaaccaggcagggcggcatgtgcctgtagtcctgactacttaggaagctgaggcaggactattgcttgagccaaggagtttgagattacagtgagctatgatcacgtcactgaaagccagtacctgggcaacagcgcaagattctgtctgaaaaaaaaaaaaatactttccagcaatgcttacagctttcgtagcccagattagtttctagttaggcaagcaggtataacagaaacaagtgccttgtgtcagaaattcaagtggtccaggccggttaaaacaggcatacacaataatttgtaaatagcctgt

SEQ ID NO: 194557 - DNA, 441 bp, Homo sapiens
caactatttgttgctcttccactttccagtgctttccagcaggctgaggtgaaagtattacttgaggctgggagttcaagaaagcctgagcaacacagcaagattctgtttctacaaaaaataaaaagttaaccaggcagggcggcatgtgcctgtagtcctgactacttaggaagctgaggcaggactattgcttgagccaaggagtttgagattacagtgagctatgatcacgtcactgaaasccagtacctgggcaacagcgcaagattctgtctgaaaaaaaaaaaaatactttccagcaatgcttacagctttcgtagcccagattagtttctagttaggcaagcaggtataacagaaacaagtgccttgtgtcagaaattcaagtggtccaggccggttaaaacaggcatacacaataatttgtaaatagcctgt

SEQ ID NO: 194558 - DNA, 572 bp, Homo sapiens
tttgcctgttttacaaatcagaaagtaaaaataggatttgatgacaacaacataggcatacaatatattttcttctttcactagccgatgagaacttccttagtcattctttatacttttttcttaatgtaaatatgacaagcccaacacgcaaaaacacaaaatactatgtgtataccttgccacacaataaacttcattgatctgaaatgtaacttctatgtatttaaactctctaaacacttggatttctaggtcttgttgaagtgtttgtctgtattttaggaatggaaacatactgtctaaacttcaaacttgtgtatgttgygtgtgtgttttagaacatattagccttcaaagactattcttgtaaaccttctgctattgcacaatggcagcacatgttttcatgaaaaagcatgtttgatggaaagtggactgaactagaattgggttctcatttttatgcctaatactgacaccaactagctatgggaccctcactcaaactacctgagctacttggataataatacatgtaatgtgatttcattttattaaaaagaaagctt

SEQ ID NO: 194559 - DNA, 606 bp, Homo sapiens
gtctataaaaagagctctaattggcttaaagaaaaacaagcacttaaatcaaatatgttttcatttaagtgactttaatctttaagaaataaaaatagtcttaaggattatgggtaaaatgcaagtgccatcaaaatgcaaataggtggtctaaatcatacaattagayactagctttgctaaatgtgttaaggttgtatacggcctgctttacagataggtaaggcctgggacacatggagttagatgctggaaggagtcaggccttattggtacttctgtctgggtcctaggctccatagctggtacataattaaaatcacttactaaccaggtttttcaccaaacatacaagttgctatgagttaacagtgcaacatgtatttgagatcactaaatagtattacatgcaaggagcataataacagtaagctatgtctttttagtaaaagaatataagaaagcatgggaatgtaaattttgcccagggaacgagggattatgttaaatttgataagataaagctagaggtttaagcaagttacagaaagattgtaaaaattaatcttgcaaaaatgtgtaagcattaactaaattcaaaaggat

SEQ ID NO: 194560 - DNA, 338 bp, Homo sapiens
agttacatgttttcagaatcctgcccagaatataaaagggtcccagttgtttcatattkttgacaacttctggtatggccaatctgtttaatcttatactaataggtatgtaatagaatcacattatggttttcatttgcatttcttaatgtctaatgatgggacttttattggaattgctttgaatctatagatcaattcaggagatataaaattttaataataataatgaatcctctgaatcaagaacacagtatatttctcaacttctttcagaaacatgccctcacttttgttatacaagtcttttacttctttgtcaaatttttctctatttc

SEQ ID NO: 194561 - DNA, 549 bp, Homo sapiens
acagagtggctaagtaagctgcccaaagtaatacaacagcaggctgcagaagtagaacttgaatccaggtgtctgggtctctgagcctgctctctgtaaccattacactgtccctgttacctgtacattcactttagctatgaccggcagttttcgattttgcttgtatttattttcatttttaaaaatttccagacaattcaaatcccgatcctctgaaaagatttcckcagtcaaatgaatgcatgaagtacaaagtgtaattttataacaatgtttctgagatgtttttcttcctaaatttaatacttgatttcttttatttcctttcaaatgaaaacttagttatattgtaaactgacatggaagattctttaaattacattattcttaaatgcaggtagtataatacaactatgtcatgtaatatattgtgcagctatagcttttctgacacctgtccttctattttcaaaattcatcagaaaggatttggttttaaaaaatcataagttcccataagctttctggcaaaaataatgattaaga

SEQ ID NO: 194562 - DNA, 466 bp, Homo sapiens
gtgtacttcttatataagaaggctcatgatgctaaattgtcccattgttgaagatgttaacttaatgtcctttgggtttttttgtttatttttactaaaaaggatattctattctttttaattaataaatattttcaagggatgctttgaggatatccaaataccttatttctgatcatgttttcatgcacttcattttttaccattaatgatttttttttaattgagatggagtttcactcttgtcacccaggctggartgcagcggcacaatctcggctctctgcaacctccacttctcagcttcaggtgattctcctgcctcagcctcccaagtagaccattaatgattcttataagaaacaattactactgtagtgtttatcaaatgttcctttgctatttttctattgttattatgccttctacattcccctgtaagggaagctttccttcaccacattgg

SEQ ID NO: 194563 - DNA, 524 bp, Homo sapiens
gggagcggaacaatgtgaacacatagacacagggaggggaacaacacacactggggcctgttggtggatggcaagaggagtgatagcatcaagaaaaatagctaatacatgctgggcttaatacctaggtgataggtagatagatgcagtaaatcaccgtggcacacgtttacctatgtaacaaacctgcacatccttcacatgtaccctggaacttaaaataaaatttaaaaaaaagaaaaagagtttattccttctgaatcaatttatgcaaaatttgaacactagcaaaactaatctatgatggagagaggatgccttgggttgggggaaggctgtctgaaaaggaatacaaaaaaaccatgwtgggaatgtttcagagtttgattgtggtgatgtacaaagattatatatacatattatatcagttgccatttcattactttatcacttattacattaatattatatgtgtattttaaatatatgttttatacatgtatatttgtcaaaattaatggaat

SEQ ID NO: 194564 - DNA, 524 bp, Homo sapiens
gggagcggaacaatgtgaacacatagacacagggaggggaacaacacacactggggcctgttggtggatggcaagaggagtgatagcatcaagaaaaatagctaatacatgctgggcttaatacctaggtgataggtagatagatgcagtaaatcaccgtggcacacgtttacctatgtaacaaacctgcacatccttcacatgtaccctggaacttaaaataaaatttaaaaaaaagaaaaagagtttattccttctgaatcaatttatgcaaaatttgaacactagcaaaactaatctatgatggagagaggatgccttgggttgggggaaggctgtctgaaaaggaatacaaaaaaaccatgatgggaatgtttcagagtttgattgtggtgatgtacaaagattatatatayatattatatcagttgccatttcattactttatcacttattacattaatattatatgtgtattttaaatatatgttttatacatgtatatttgtcaaaattaatggaat

SEQ ID NO: 194565 - DNA, 524 bp, Homo sapiens
gggagcggaacaatgtgaacacatagacacagggaggggaacaacacacactggggcctgttggtggatggcaagaggagtgatagcatcaagaaaaatagctaatacatgctgggcttaatacctaggtgataggtagatagatgcagtaaatcaccgtggcacacgtttacctatgtaacaaacctgcacatccttcacatgtaccctggaacttaaaataaaatttaaaaaaaagaaaaagagtttattccttctgaatcaatttatgcaaaatttgaacactagcaaaactaatctatgatggagagaggatgccttgggttgggggaaggctgtctgaaaaggaatacaaaaaaaccatgatgggaatgtttcagagtttgattgtggtgatgtacaaagattatatatacatattatatcagttgccatwtcattactttatcacttattacattaatattatatgtgtattttaaatatatgttttatacatgtatatttgtcaaaattaatggaat

SEQ ID NO: 194566 - DNA, 536 bp, Homo sapiens
ctggagggcacttaatgatgtctaaaaatgtactgtttgtaataggtgaggatgttctttttgtccagcttcagcagtcatgacacatctgcattaccccatcccttttggctgtcacagttccagaatggcacagggtaaggagcctttcaggattagcccataagttttcatatactttggaagatagaaggaggattccccaaaactgatctaggagcatctcatttctcagggttgacaagattttaggtggattagcaaactatctaatggttgtacaaactttttatttactttgtagatataaaaaaatgtaaatggagaccatagttatattkatctgaggataccacacatcaagtcatcacagtaatatatcattttcatattcaagattgtagtctttcactttcaattatatttattattctcaagaataaatcttatctaatgtttaccctacaactttgacagtgaattatagaccaaagaaataatgttttctctgtgacttggtagaatgtcagaactgc

SEQ ID NO: 194567 - DNA, 444 bp, Homo sapiens
agatctttgtttcttcattcagctttaaayatgtcaacccactgccttctggtctctatgttttctggcgagaaatagctgttaatctttattgagaatcctttgtatgtgataaccacttctctttttccatgttcacaatttactctgtctttagcattcgacagtttgattataatatgttttggtgtggatctctttgaggttaccctctttggaggtacttgagattcttggatttttatatccttttcatcaaatttgggaaattttaaatattcttacctcttctttctctctatctccttcatctgagattctcataatacatatgttagcctgtttgatggcattccacaggtacgttatgttctggttatctttctccattctgtctttatttctgttccttagagcaagtaatctacattttcctatatacaa

SEQ ID NO: 194568 - DNA, 640 bp, Homo sapiens
atgcataggggaatttttgttttattggattattttggaaactatatcagtttaatattttaatatccctgcctatttttctttgaaaaggaaccatttctgcttgataaaattatttgcattttttaaatgtttatcctttcaatttaagtatgtcagatcctttcctgcttgctttaaatcattctgaaaatattcttattttatttgcatgttattaaatatgggttctggtgggatgtttgttttttaaaaaagaaattgcagaaatatataaaaaattacaccatttatataaagtttaaaaatattcaaaatattatatattatttatataatacatacatatatgattttaatataaagtactgcatggataaattaacacccagtacagataaatccatgaacagtgacataagtataattttgagattttcaatagacttatatttcagaatcagacatatttcctagatgaaagttataaaggatatggataaatagaagatgaccaacaggtttgttttaattgacatataaaggaaccttatatcctttaaatawggcagattaagaaagtgatattgggccgggcgcggtggctcatgcctgtaatcccagcattttgggaggacga

SEQ ID NO: 194569 - DNA, 616 bp, Homo sapiens
gctgctctgtgaagaaggactgtgtttgcttccccttccaccatgattgtaagttttctgaacgcctccccagccttgcagaactgtgagtcaattaaatctctttcctttataaattacctagtctcgggtatgtccttacagcagcgtgagaatggactaacatagtctgttaaaggcatgagcctggcccttccccaattgctagcatttgaataaagttgctttcctttcaccacaccttgtttctcctgttttcggcttctgagcggtgcgcagctggatttgagctggttacatgaagacatgaactgcacttgaagtgagcccccaggaacctgtctgstctgattccagagccttctcactcttactccacaacacaaaaatgtacccgagtctgaaggggccaactgtatgactattggttctcccaattaacttccatgtactgattgcatgtagattattgaaacccaacagtgactgcagcaattacctagaatttaggctaatcaaatactttgggggttggtaagaaatattttatcattgactgtagaatttcccattcatggtatcaataacaagcacaccaattttcagttggttttgg

SEQ ID NO: 194570 - DNA, 509 bp, Homo sapiens
cttacttttatattaaatcagagaaaaggagatatgctattatgagagggaaaaagatgcgaacccaaacatattaaaatgctacttatgaatgcatcaaagcttctggttaaataacataggttgaatgcaaatgtctatctgtacttcctcctgagtgttcacaaagcaatgacagtaaaggaacttagggggcgggggaagaaacctcaaaaagaagataccagacaaaagaagcaacattttgaaatctgggaaatagtttaaccactgggaactgttttagactagagaacrtagagatctaagtatgttgaggcagaatatcaaaaagctaatcctttcaacacaaagctacagaaatcctcagggattggagacaattgctgctttaaaggcaggtgtgcaaaaatgggaatgaaaactacagtatggattaaatatctttaaaataggagttagacttctcatattctttctccaaccctgatgcatcaagagaaaaccta

SEQ ID NO: 194571 - DNA, 597 bp, Homo sapiens
aatatgataccacagtagcaaacctacagtgagattcacaaattaataagccacactcttgctcccaaatggggtttttctgagtctcacttttatatatgacagctaaagacctgatatttgatgaaagcctctattatggaagatagagatagagagcaaaacaaaatagaatcaaataaagaaaaaagagtggcaaaaacaaagtggtggaaaaataagcacatgaaagaaacaccataattaaaatattgagagaaataaaagactatattgcattcataaaacaaaaccagtacactacatacagaagaacaaagaataaggagctcttggaaattaaattaagaaagatccaattaaaaaatcaacagataattggaaaatattattaagggcccattacccttttccttcttccagaaagtagacgaaaaactcaaagattggaagtggaattttatccactataccacctctyagtaaatactttccaacttccacttctgcacactatgacttcactgcaatgtcatcacccacacacatttacctgtgcagtgacaagttgttggaattaagagaaggttagaaacc

SEQ ID NO: 194572 - DNA, 544 bp, Homo sapiens
gaccatagcactcaccaaatatttctagctttctacttaccagcctgaaacatcaggctggctccaccctgctgcagttggaggttaagcattgccctcgatttgctttgcccagtgaaaggtgcaacacttctagagagaagttctcagagctggttaattatttggcgtgtgctcttctctgtaacagtaaagcctctgccagccagaatcactgagtaccaataaagaatgaaagctccctttctgcctagccaaggtggacataaaacttgagcaacaggtaaaccttgattggcccaagcactgagagctttttagtattgcaataaaagccagactctccaccatctacctccctccatcatccctttatgtgttctgagttgtgaagcraaaaaaggattgttacacgaaagaacaggataggtaaagcagacttgtatcccttaaggtctgagcttttaccttatgcatgagttcactggagtacagtggtttaagtcaaatccatacctgatttcagcaccacagagtctccgag

SEQ ID NO: 194573 - DNA, 419 bp, Homo sapiens
taaattgcctcccaatctctcttggacattgcaccagtgtttcacttaaatgtattctctttgctgaggtagaccaggaaacagtgtttcctgaggcacactagcatcatatgttcaatcctaatatatttttattatcattcttaagayacatcagacaaattttagcattttgtctaatgtgtgacatcctttggttaatttattttaataagtgacagtctggtgaatttattttaaatgaattatacaagaaaagtgatttaaaaataaataaatcagtaacaatgaaatattttatttttgaatattaagtaatgtgttgtagtaaaacatgcaaaagtaactttcattatctggtatggaaaatgttgcaatttgtattttttcatgatttcatgttttgtttctagattaga

SEQ ID NO: 194574 - DNA, 526 bp, Homo sapiens
caaatctcagtatgagaattactgtgagccctctagggcagcatgtttcaaactgtgtgttgtgacccattactgattatgaaatccatttaacaggtctggagcaacgttttaaaaaaawtgtgaaagaggatagaataggaaggaaaatatcagcttccatagcctgtagtgagggcaacatttattgaaacttgtttattttgttcaagatcttctaagtgtcttgtactggcttagaaattaaaatacatttcttacagagtcctcaggccataaatttcaaacactacttctctaagatatatgagcaaagtcatgcctgcctgatcaaataacttgtttcctttgaaggaacagctctttccctagtacttggatctggaagatggagactgggtctgacactagaagaccatattgctcttcatgatctgggtgttatctgacctcctaatcaataaagtagggcctgaccagcatcacttaatcatcacacgaaaatggcatatatggtattagacaa

SEQ ID NO: 194575 - DNA, 455 bp, Homo sapiens
atatcatatataagatatatttattatcccagtcctctacaattaatgatatgaaggaaaagtaaatgcttgcatgaagtctaaagaaacgtagaagttcaatcattatagaaatccgtagagagctaatatgctggtaggttaaagaaagagtgaggtcatatgcaaaaagtttattggcagatttaagatttgtactgtggtgaaagaagagagagctgaagcctgggaacaggatgaagaaagctgtttcctgtgatacagggttcagaggcacactaacatggtaggtggaagagtgagaaaggagtgcaggagattcataaggagttaagctggtayttgtgatttgtgcattagaaaaatgttagatattgaaaaaaatgagtaaaatggaaaatatcagtatagagaataaatgcaataatctagtttctgtgtgatacaattaaagt

SEQ ID NO: 194576 - DNA, 601 bp, Homo sapiens
ctcacttggagaagatatttgcaattcatatgattcacaggagattagtatccgcaatgcctgaataggataatgggcaatgtgtgtgcacaaaaaaaggcatagagcagaaaactggatggtccataaacaagtgaaagatgatccacctggctaactaaagcaggacaaaccaacttaaaacattgaaataccgtctcatacccattgggctcaaatactccgtaagtctgatagtgccaagcaatgtgggcaaagataaaagggctctcacattgttgatgggagaacaagaactgttccacatagagagcaatcagaccccatatagtaaagctgaagatagacatactttaggatttagcagtaacacctcttcaagatatattccctaggaaatttccaaatatgcccaaggagacatttatactgttgrttgacgtattatttaaaaaatagcaaaacattggaagcaacccacacctccatcagaagaccaagtggatagagtatattcgtgcaaaggatacagcaattaaaataactcagttcatgttaacataacattagagtaaatctcaaaacgaataatgctgtgtga

SEQ ID NO: 194577 - DNA, 643 bp, Homo sapiens
aggctgagtaaggagacagaggagctttaaggagacatggaggtgaactctaggggcagctacactctcaaactcaactttcctgaagaaggttttctggttctagtttcagtgtcaaatcatgatgcaacagcagagtgaactcagtgtttttggtatgaagatctccatgtgtttccatcatcagcatctcctgtgctcttaatcttaccctggacacctgacccaggtgcccattctgtgaattctttcattgtaggaaagagaaacaggtacaaaagatgcatggwcctcccatggctaaggttcctagccaatctaggtgggtgcccacttgctaaaatgaccctgacccctcatttggtcacttgaccactggtaactctacaagcaaagaagcccttagtgaccagaaacacaggatcctgggtttaaaaagctgatcacagagaaagtagaaaaatccataatatcatccttttcacagcagtacttataagctttgagtttgtatttttccactcactgcatgaaaataccaatagtgtaataatgcaacttcgaaaaaatcaaagagtagctgtgaaagccctcagcccacaggttgccgtgatttgcacttgagtatgctcaagggttcatt

SEQ ID NO: 194578 - DNA, 643 bp, Homo sapiens
aggctgagtaaggagacagaggagctttaaggagacatggaggtgaactctaggggcagctacactctcaaactcaactttcctgaagaaggttttctggttctagtttcagtgtcaaatcatgatgcaacagcagagtgaactcagtgtttttggtatgaagatctccatgtgtttccatcatcagcatctcctgtgctcttaatcttaccctggacacctgacccaggtgcccattctgtgaattctttcattgtaggaaagagaaacaggtacaaaagatgcatggacctcccatggctaaggttcctagccaatctaggtgggtgcccacttgctaaaatgaccctgacccctcatttggtcacttgaccactggtaactctacaagcaaagaagcccttagtgaccagaaacacaggatcctgggtttaaaaagctgatcacagagaaagtagaaaaatccataatatcatccttttcacagcagtacttataagctttgagtttgtatttttccactcactgcatgaaaataccaatagtgtaataatgcaacttcraaaaaatcaaagagtagctgtgaaagccctcagcccacaggttgccgtgatttgcacttgagtatgctcaagggttcatt

SEQ ID NO: 194579 - DNA, 471 bp, Homo sapiens
catttggtcatgctgttctgaagcagtaaaatagaatcaagacactttatcttacaaaatactaacattgcaatgatcattgttaattttaggaaagtgtggttacattttgacaattatccatgatatgtgtacatctagttagtacacaactagtacatgtgtttttaacagwtgttttacattattttattgtgtaagcacaacacaatttatttactcacttgccagtgaaatattttgggctttctttttttgcctgctaaaaacaataatgcaataaacaatcttgtaatatggtatgtgtgtttccttatgcataggtgtcacagtccctcaggtaatattgaagtggaattgctggataatagggcagcctatttgcacattcaatattacaagatattgccaagttatattccaagttggtcgaggctatttgcactatcatcaacagtgtacacgcattct

SEQ ID NO: 194580 - DNA, 541 bp, Homo sapiens
attttccatgcagttctactagctatttgggaatacttattcctagaaaccttatactatttgctgcaattatttaaaattatctttttaaaacaaagttttctattgattattagttgagaaataagtaattttgttagaattgtatttttagcaaactractgattcttattacttctaatactattctatttttcttcaattttcaatgtacctaatcatgtcatttgtgcaattgatttcttcatgtctaatatttatttcaccttgttttagtgcagaagctgacaacggtaaaattattatttgtaaacagtaaaatattctgtattcagtcagatttagcaggtttttttttaagaaatattgcaattcatttaagttttcaaatgtatggaatagaggatgtcagcaggatggtgggtttttctagaccaattccctttgagagaactggttgacaaactcatacacaccatgcaactcagaaaatatccacactgaaatgggtaggaaagctgagatacacctatactacaa

SEQ ID NO: 194581 - DNA, 432 bp, Homo sapiens
caactttcccagttaccacccatgggtcaggcttttaactagcttgcatctaagagctgaccaagaaggtaatcccactaccaggggattttcagcagaaacctgtgatgtcagaagggaaagagatgatatattcaaggtgctgaaagagaaatgcttgccaacaagagtagtatacccagcaaacccgtcctgcaaaaatgaaagggagataaagacattctcagacaaacaaaagctgaagaaatttatcaccactagacctgctttaccccttggtgacctcaaagaaaatacctatggaagttacacaaaagaaaaayagaaataaaaaaaaactattgacacaaaaaagaaatgcaaaagaagacagcaaagggaaaaatgaaggacaaaaggactagaagataaacaaagacaatagttaatcct

SEQ ID NO: 194582 - DNA, 259 bp, Homo sapiens
tttgatcatgattgtctttttaaagactaaaatgaaaacctktaacggcacactcaccttctcatcaaggattcaagttagaattaaagttattctaataggtaagaaaaaaaactgtgggtccattcctactttcatctaaccgatggcctatattctgattgctgaaatggctgtttatcataaaagattctgatttaatcaacgtgatcccagtttgcctgtgataacataaacgactgtttttctcctggaaatt

SEQ ID NO: 194583 - DNA, 600 bp, Homo sapiens
ttccaactctgatattctttcttccacttggttgatttggctattcatacttgggtatgcttgtgtatgtttcatgaagttcttatgctgtgtttttcagctccatcaggtcatttatgttactctctaaactggtttctctagttagcagctcctctaaccttttatcaaggttcttagcttctttgcatttggttggaacatgttttttagttcagtggagttttttttaattacccatcttctgaagcctacttctgtcaattcatccatctaattttccctacacttctgcgccattgctggagaggcattcgatcatttggaggagaagaggcattctggcattttgggttttcagtgtcttttcattgattctttctcatctttatgagtttgtctagtttggatctttgaggccgcttaccctttgatggacattttgtggggacttcttttttattgttgatgctattgttrttactgtttgtttggttttctttcaatgatcaggtccctcttctgtagggctgttgtagtttgctaggggttcacttcaggcactattcttctgattcactcccatgcctggagatgtca

SEQ ID NO: 194584 - DNA, 555 bp, Homo sapiens
ctcaagttttaagactagaaaggtcaatttccatgtttattcaaataaactgtaaacatcagttttatggaacaattgaaccagattcagtaggaggattgcttgagtccaggaattcaagtctgcaatacgctatgatcatgtctgtaaatagccactgcactccagcctgggcaacatagagacctcatctcttaaaataaataaagtaacactgctgctgatttgaatcaatcccttagtggaatgataatgttgagcttctcagagatcaaagctaaaggckttttgtgttcattaacctgtgatgttttcacaatcaataactggacaaacttctctccatctaatgtcacattagtgagtttgacctcaaatggtaaggatctaattaaagctgtatctccctttctataaattgcttagtctttttgaaggcacaatagactatattcaaaaatagctaaagaacagagtttaaaggagtaaattaagcttatttctaaagtgctgtattttttagatgatcattatctgcccccatacttattcact

SEQ ID NO: 194585 - DNA, 604 bp, Homo sapiens
ttaatccacactgatatgaccatgtttcttactttcttgagtagaaatctcagatcttaatgaatgtctcatctttaatcagtggaaaagtcccataccaagtattttgtccattaacctcaagcrtggcttcacttttttcccccaaatttattttttctttcactttatatattaaatgtttataatctctttgtgttgtgtctatttttgtaaggcaactgaaatcctttttgaagcagactggggtataaataaatgatacagataaaaaataggtagttgaatagatggatcataagtaggtaatttagaatctagtctatattaaacagcacaactaaaaagaactgtggtgcagttctttgaaaggccattcccatctctcttctgtacataacagcagaactgatgcttgattcccattcccctcttaattggtctcgaaattttggaaaagtcattatatttctcttggcttcagtgttcttatttgtcaatgcgggagtgattgaatgatatttgaaatccattccaactttaataacatttggggatgaaaaatttcaccagtcaaaacttgtagagagtttctatgcagaag

SEQ ID NO: 194586 - DNA, 604 bp, Homo sapiens
ttaatccacactgatatgaccatgtttcttactttcttgagtagaaatctcagatcttaatgaatgtctcatctttaatcagtggaaaagtcccataccaagtattttgtccattaacctcaagcgtggcttcacttttttcccccaaatttattttttctttcactttatatattaaatgtttataatctctttgtgttgtgtctatttttgtaaggcaactgaaatcctttttgaagcagactggggtataaataaatgatacagataaaaaataggtagttgaatagatggatcataagtaggtaatttagaatctagtctatattaaacagcacaactaaaaagaactgtggtgcagttctttgaaaggccattcccatctctcttctgtacataacagcagaactgatgcttgattcccattcccctcttaattggtctcgaaattttggaaaagtcattayatttctcttggcttcagtgttcttatttgtcaatgcgggagtgattgaatgatatttgaaatccattccaactttaataacatttggggatgaaaaatttcaccagtcaaaacttgtagagagtttctatgcagaag

SEQ ID NO: 194587 - DNA, 557 bp, Homo sapiens
cttcatgctgaacttttttcaaaccttaaaggtttgaaaactttccacattcacacctctgttcactgctggctagcacgctgttcaagaaaatgtttttatatttactctttatcgatctaaggataccctggccacatgactgagttaataaagtcattgtcatagcccgttctcacactgctataaagaactacctgagactgggtaatttatgaagaaaagaggtttcattgactcaagagttccacaggctgtacaggaagagttagttccacagctggggaggcctcaggaaacttccagtcatagtggaaagtgaaggagaagcaagcatgactccccatgttggagcaggagagagaaaatgaagggaaaaatgctgcacttttaaacaaccagatctcgtgaaaactctatcatgataacagcaaggaggaagtccagggattcartcccctcccaccaggattctccttcaacacgtggggattatagtttgacatgagatttgggtggggacacagagccaaaccatataagtcatatttagggga

SEQ ID NO: 194588 - DNA, 557 bp, Homo sapiens
tgcatattgggaagaaaaaaaggcccagatccttttcacctttggggtcaactttattttctaattcattataagtgcttaacatagcttgtgcctgctctgagtcaggtgttgacaattaacaagaccmtagtgtttggaggacacatcatgtgctcccaagtagggttctcaaatgtttaaatgctttcaccttccttatttcctttgacacctaaaaccctgaagtaacagcagaaattattatacaacttaaaaaagcttttacccaaaagttaaagaggtaaagaggcttacacagtgttcacaaagtcacttagctaatacctggttgacctaagattggaatttggattttctgaatattatagcaggataccaaggtggaagaaagaggtgttcctgaaatccttattcggcattagaattcattcattatttcttttgaaacagttaattattttaaatacttttgaaattatcatatttataaaataattcaaatggttgtcataatcttaacatggaatagcttctattttacaagtaagaggttt

SEQ ID NO: 194589 - DNA, 557 bp, Homo sapiens
tgcatattgggaagaaaaaaaggcccagatccttttcacctttggggtcaactttattttctaattcattataagtgcttaacatagcttgtgcctgctctgagtcaggtgttgacaattaacaagaccctagtgtttggaggacacatcatgtgctcccaagtagggttctcaaatgtttaaatgctttcaccttccttatttcctttgacacctaaaaccstgaagtaacagcagaaattattatacaacttaaaaaagcttttacccaaaagttaaagaggtaaagaggcttacacagtgttcacaaagtcacttagctaatacctggttgacctaagattggaatttggattttctgaatattatagcaggataccaaggtggaagaaagaggtgttcctgaaatccttattcggcattagaattcattcattatttcttttgaaacagttaattattttaaatacttttgaaattatcatatttataaaataattcaaatggttgtcataatcttaacatggaatagcttctattttacaagtaagaggttt

SEQ ID NO: 194590 - DNA, 557 bp, Homo sapiens
tgcatattgggaagaaaaaaaggcccagatccttttcacctttggggtcaactttattttctaattcattataagtgcttaacatagcttgtgcctgctctgagtcaggtgttgacaattaacaagaccctagtgtttggaggacacatcatgtgctcccaagtagggttctcaaatgtttaaatgctttcaccttccttatttcctttgacacctaaaaccctgaagtaacagcagaaattattatacaacttaaaaaagcttttacccaaaagttaaagaggtaaagaggcttacacagtgttcacaaagtcacttagctaatacctggttgacctaagattggaatttggattttctgaatattatagcaggataccaaggtggaagaaagakgtgttcctgaaatccttattcggcattagaattcattcattatttcttttgaaacagttaattattttaaatacttttgaaattatcatatttataaaataattcaaatggttgtcataatcttaacatggaatagcttctattttacaagtaagaggttt

SEQ ID NO: 194591 - DNA, 557 bp, Homo sapiens
tgcatattgggaagaaaaaaaggcccagatccttttcacctttggggtcaactttattttctaattcattataagtgcttaacatagcttgtgcctgctctgagtcaggtgttgacaattaacaagaccctagtgtttggaggacacatcatgtgctcccaagtagggttctcaaatgtttaaatgctttcaccttccttatttcctttgacacctaaaaccctgaagtaacagcagaaattattatacaacttaaaaaagcttttacccaaaagttaaagaggtaaagaggcttacacagtgttcacaaagtcacttagctaatacctggttgacctaagattggaatttggattttctgaatattatagcaggataccaaggtggaagaaagaggtgttcctgaaatccttattcggcattagaattcattcattatttcttttgaaacagytaattattttaaatacttttgaaattatcatatttataaaataattcaaatggttgtcataatcttaacatggaatagcttctattttacaagtaagaggttt

SEQ ID NO: 194592 - DNA, 647 bp, Homo sapiens
gagccctggttgacccaaatccaaagtgaatgatcagcctagtacactacttagcctctcacattcctggtatccaatactgagacttgctcccaagtgttatcccctgctcagcaccttgcacagtgtccgacatctacgtaggtgcttagtaaatgttgaatggatgaatgaagcatgcataaataaataaaatgttaggcttggtagggtacagaacatgacccacaaatgaaatgtaccctcacagtttcttaaagccaacatacaaaatccatgaaagtctatgtcattggcataaatgtaattaaaataacattcatagcagtatatttctatttgaacaattgatataagttactcacctttttgagtaccagaaaatgtggtcatatatgtatatgtgtctatatatayataataatctgagaaattaggcttattgatgtcttctactgtttttccttcaattcgagctttattatgattaatggaacattcccttttcctgtgtcagaattaaaacagtgtatttcatatacattccttttttagagatgccaacgtttaaacctgacatttgagttttgaatcaaattttgtagacaaaacatctttagagaacagaatgcaatattcattatttc

SEQ ID NO: 194593 - DNA, 599 bp, Homo sapiens
aggtgctcaattaatatttgttgaatgaatgaaagatcttcagggcatgttacaatgatattcgcctccaagctggatctctatgactctagtgctccctatccaatacaccatatctgatagtagtaaagaacaatcagtccctaagaaaaagggaagaagtctaatatacacataaatatataaatcacatatatatctgatcatatcagtaccctccttatctattgccctttggcacctccccaccacctacaagaataaagtctcagcaatttagaaaatcatgatcagtagagcaagtcacatagatcctcaacctattacatcatatgataagttacttaacatcccagtgttcamattttctccatagggccatagtgtatattaaaggttatgcttttattgtttttgaaaatgtcagttaagacagtcaataacatctactacctgcttagtaaagcatgtaagcagagagctctgtaactgagttttcctccttcttttcctgtatattttcttctatcttgcattgactttgctgtccctccctcaaaccatcactcccaccacacaatgcttagactttaagataa

SEQ ID NO: 194594 - DNA, 459 bp, Homo sapiens
ctaagaaaaagggaagaagtctaatatacacataaatatataaatcacatatatatctgatcatatcagtaccctccttatctattgccctttggcacctccccaccacctacaagaataaagtctcagcaatttagaaaatcatgatcagtagagcaagtcacatagatcctcaacctattacatcatatgataagttacttaacatcccagtgttcaaattttctccatagggccatagtgtatattaaaggttatgcttttattgtttttgaaaatgtcagttaagacagtcaataacatctactacctgcttagtaaagcatgtaagcagagagctctgtaactgagttttcctccttcttttcctstatattttcttctatcttgcattgactttgctgtccctccctcaaaccatcactcccaccacacaatgcttagactttaagataaata

SEQ ID NO: 194595 - DNA, 574 bp, Homo sapiens
tttgtttttataagtttcatatacatctatgtatatatgcatgtaggtatacatatatttccaatttttaatacaaactgtcttattactttttctaaaataattcccatgctcaaaatcttcctttatcctccttcatttgcaaaataaaatctgaaatgtgttctggacctcatggaccatatttccacttgtcatgcttacctgccatagttttctagagcaaagcatctcaaacttgaatgcgcatgtgaaccaaagcgggttctagttccagtgcrgattctgattccacaggtctagggtgaggcccaagattctgcatgtctcacaactgatactggcaatgctgatccctgaaccacgctatagagtagggagactctagattccacagccttgctcctgtagcaaacagctgtttgttctgcttactaccacttttagaaattctttccctttcctgcccatttgctttgcttctgctgtttcatgtctgtctctcttttctgagattggtattatctacagaaatgtccaatgaattagacaacttttcataggcacagcacac

SEQ ID NO: 194596 - DNA, 559 bp, Homo sapiens
tttgaatcacatgaaggcatagttattctccttttaactctgttaaatcatgtaaattaatttttaaaatttcctaatatgtttttaaaacttatctaacacctgttaatctttttagtagaaaaaaagaacatttttttctagagccttcaatgtccagaaatattttttctccttgtagccccaacacacaacacagagtrcagcacataaaaggagctcaatatatgtttctcaaatgaagatggagatgaataattcagatagatagatagatagatagatagatagatagatagatagatagatagatagatcttggcctcaatgtacctttagtatgacccagctaactgccatctcctgaactaagtactgtagctataattgtacagtaaaacaaacattatggcagatcttagaaaagccaaatatgtttgctttctaagagatgcctcttgactttccaaaagccttcaatacccaaaagaaggaagctctgctggtagaaagattagaaattggctcatatttgaaatcatgaagacttggcctataa

SEQ ID NO: 194597 - DNA, 559 bp, Homo sapiens
tttgaatcacatgaaggcatagttattctccttttaactctgttaaatcatgtaaattaatttttaaaatttcctaatatgtttttaaaacttatctaacacctgttaatctttttagtagaaaaaaagaacatttttttctagagccttcaatgtccagaaatattttttctccttgtagccccaacacacaacacagagtgcagcacataaaaggagctcaatatatgtttctcaaatgaagatggagatgaataattcagatagatagatagatagatagatagatagatagatagatagatagatagatagatcttggmctcaatgtacctttagtatgacccagctaactgccatctcctgaactaagtactgtagctataattgtacagtaaaacaaacattatggcagatcttagaaaagccaaatatgtttgctttctaagagatgcctcttgactttccaaaagccttcaatacccaaaagaaggaagctctgctggtagaaagattagaaattggctcatatttgaaatcatgaagacttggcctataa

SEQ ID NO: 194598 - DNA, 620 bp, Homo sapiens
agcttttgactttagtaagactggaccctcctaaagccatggaagaggctgggccttgttttcaagatcccttttggatcataagttctccttcctgattgagatgataacatggaaacattaatgaatagtgtccctcctccctaccttctcaaaacagctcttaaatgtctgcaattatattaggtcttcgtcggtgaattaggagtgtaagtgatacatgaatctgtcacctacaatttattttgtcatagactaacaatttgagaaactgaaattagaacttgatcttaggacagaraacatgcaaagcaaagtaaaaactgtacattctttctattagggagaaatacataatatgtttcttacctatcttgtatagttcccttttttaaaccattgactttttaaaatagaaaaatgcaattatagctatcaaaaaacataaagatatacagatatagaaactagtctgtcacatgaggaagactggagtcccttgaaaatatttagctattgaagtaaacagaaaagtgctagtaattttactaaaacattgaaaaagcaacacaaatacaagctacagtgacacaaatgccagttactatgactttagtgtt

SEQ ID NO: 194599 - DNA, 620 bp, Homo sapiens
agcttttgactttagtaagactggaccctcctaaagccatggaagaggctgggccttgttttcaagatcccttttggatcataagttctccttcctgattgagatgataacatggaaacattaatgaatagtgtccctcctccctaccttctcaaaacagctcttaaatgtctgcaattatattaggtcttcgtcggtgaattaggagtgtaagtgatacatgaatctgtcacctacaatttattttgtcatagactaacaatttgagaaactgaaattagaacttgatcttaggacagagaacatgcaaagcaaagtaaaaactgtacattctttctattagggagaaatacataatatgtttcttacctatcttgtatagttcccttttttaaaccattgactttttaaaatagaaaaatgcaawtatagctatcaaaaaacataaagatatacagatatagaaactagtctgtcacatgaggaagactggagtcccttgaaaatatttagctattgaagtaaacagaaaagtgctagtaattttactaaaacattgaaaaagcaacacaaatacaagctacagtgacacaaatgccagttactatgactttagtgtt

SEQ ID NO: 194600 - DNA, 403 bp, Homo sapiens
gatatttatttcataggaactggaaaatactgcaaatcagggctgaccttctccccatcccacagaactgattgttaaccatttaccagcataccactggctgtaaggatttaggatctcagtraatcatcctaccacattcaaccacactgtgaccagtttcagaaattagcacttggatgctgatacaatgtaaatccaatgtaaatccaatctaaatcactcatagtcactgggaaacccagtgactgcagttgctgtatcaatgacacacagacaactaatatgggaattgttaatttgcatcacactcaggttattggtataaatgaaagaaaaatcacaaatactttagaacttagtagcattaaatgatgcactttattgtacataacagcactga

SEQ ID NO: 194601 - DNA, 408 bp, Homo sapiens
gagtgtggtgggttttttttgcacttcagtcacctcctttctcattgtcctatgtcccctgatakatgctcccctcaagataatgacttctctcctgctctactctggctcataggaattgcccatttcccagctcctctcaggtgggccaaccctgagagtgagagcatccctcctttgccacatacctggccatctgctgctctgtttcattgtggacctgttctttgtcaagaagctggggatttgataggtggtaatcagaggcatgtctgggttttgtctcaagttgtggaagtttacacaacttgagaggctctcatttagaaaaagaatacaaaattgggtacaaaggaaaacatttattgaaaatgaaaaaaatcttaaatgacaaattttcaagttaac

SEQ ID NO: 194602 - DNA, 417 bp, Homo sapiens
tggtgggttttttttgcacttcagtcacctcctttctcattgtcctatgtcccctgatagatgctcccctcaagataatgacttctctcctgctctactctggctcataggaattgcccatttcccagctcctctcaggtgggccaaccctgagagtgagagcatccctcctttgccacawacctggccatctgctgctctgtttcattgtggacctgttctttgtcaagaagctggggatttgataggtggtaatcagaggcatgtctgggttttgtctcaagttgtggaagtttacacaacttgagaggctctcatttagaaaaagaatacaaaattgggtacaaaggaaaacatttattgaaaatgaaaaaaatcttaaatgacaaattttcaagttaacaaatatggcaaaca

SEQ ID NO: 194603 - DNA, 574 bp, Homo sapiens
ggttccttcctcctaagtagctgtgttcccacctcttgatccgaactttttggccacagcaaattgggccagaataaaccttgttattcaacctattgctggcttaagaagtggcctggagcctagtgtggtggagtgtgcctgtagtcccaggtacttgggagtctgaggctggaggattgcttgagcccaggagtttgagaccaagctggtcaacatagtgagaccccatcagaaaaaaacaaaaacaaaaacaaaaataaaacactgcctggtataaaagtgctgctttataaggataatggtgatatatggtgagtctattaggctctctctttcaggaatttcaactgaagatatggcaaaggtcagtcagttgcaagaacattggccaggaacttagctggaatgacctcagagggaaggagatatgtacagtcatgaagcaatgcacgtcgtgaatatgcagaaataagaatgagtgaatgcataaagtcagagagactctagaagaagcagagaggtgcttggtwggtagcagcagatggagagacgaggctcgctcatggcagag

SEQ ID NO: 194604 - DNA, 425 bp, Homo sapiens
aggggggcaggttctgatgaaaaagtttgccagtgcctgctttagatcacagtgggcagcttcggatagtttcactrgttgtgatcctattataggagcaaagttgaccttgatatggattcagtcatcatttgttctccagccccagcgaggttatatacactaggcatgtatttggctgcaagtaacataaaacctgaataatgttggattaaacagaaaggaaatattttcatcacatacatgaatgcccagaagtacgtggcccagggctggtacagatgttcagtgttgccttcaaaattagtctgcttctttctgcccagccatgcccagaatgttggctttcatcttcatgcttactggaagatgaatgcaacacctgaaggcgtttaatgtctgcatttcctgaaggaagtggggaa

SEQ ID NO: 194605 - DNA, 563 bp, Homo sapiens
tgtatgtgctctagtgggcttctcatagttaactggtccactccagtgtgttcttacagtctcactcttccctcccatctttctcctctacctttccctctcacattcctgaaattaatttctctccttttcccctccttttcatgtttttggctaggtgagaaacctggaaatgagcctgaagaggtgaagctgcagaatgccagcaaacagattgtgcagaatgcaatcctgcaagctgtgcagcaagtctcccaggagagtcagcgcagagaagagagaatcagtgacaaccgggaccamatccaactgggcgttggggagttaaccaagaagcacgaaaagaagtaacatggtggatttggctcttgacatgtgcttggtttctagccttcctcttagtataggacgcatctccaaaatgttgccagtaaagcaaaccgaagtgtcaccggcacctagctgtagaatgaattcacactagcccctggctgagaagcactgttttgaaaaagtgcattagacgattctgttcatatttatgcagtgcctctgagacatag

SEQ ID NO: 194606 - DNA, 563 bp, Homo sapiens
tgtatgtgctctagtgggcttctcatagttaactggtccactccagtgtgttcttacagtctcactcttccctcccatctttctcctctacctttccctctcacattcctgaaattaatttctctccttttcccctccttttcatgtttttggctaggtgagaaacctggaaatgagcctgaagaggtgaagctgcagaatgccagcaaacagattgtgcagaatgcaatcctgcaagctgtgcagcaagtctcccaggagagtcagcgcagagaagagagaatcagtgacaaccgggaccacatccaactgggcgttggggagttaaccaagaagcacgaaaagaagtaacatggtggatttggctcttgacatgtgcttggtttctagccttcctcttagtataggacgcatctccaaaatgttgccagtaaagcaaaccgaagtgtcaccggcacctagctgtagaatgaattcacactagcccctggctgagaagcactgttttgaaaaagtgcattaracgattctgttcatatttatgcagtgcctctgagacatag

SEQ ID NO: 194607 - DNA, 527 bp, Homo sapiens
actgtcagacctaatctctgcatggtggtcttgcacatcagatggggcttgcccaacctgagcactcagtggtctactggactctcctgggtccccagcctggccacacctgcttacagggaagttttgggtccctggggcccagatcatagcttctgcaccagaggaccatgcctgaccagtggagagttccagctaggcagctactacatccctgcaacagcccacatgctccccrctcatactgcagcttcctttagacccacagcaactccccacatcagttttctggtgcatgtctacacaggtggattttgctttacttgccccaccagcatataggaattcagtctgcctctctctccctgccaaccaccattgcagatggaccctcgtgggcacagggccagcaagccccactaccaccagcaccctgcctttgcactaacacaacacaaagaacagcagatcttcccacatcctaagtgatcattcctgcttgcagggcacagagaagacacccagac

SEQ ID NO: 194608 - DNA, 612 bp, Homo sapiens
atgaaaaggaatcaacaaacctccgagaaacatgggattatataaagagaccaaatctacaactagttcatttccctgaaagagatgggaagaatggaaccaagtggaaaacgtatttcaggatatcatccaggagaacttccccaacctagstagaaaggccaacatgcaaattcatgaaatgtagagaaccccagtgagatacttcacaagaagatcatcccaaagacataatcatcagattctccaaggtcaaaatgaaaggaaaactcttaaaagcagctctagagagaaaggtcaggtcacctacaaatagaatcctattagactaacagtggaactctcagctgaaaccctttaagccagaagagattgggagccagtattcaaaattcttttttaaaaaagaaattccaaaccaaaattttatatacagccaaactaagattcgtaagtgaaggagaaagaagatcctttccacacaagcacatgctgagggaatttgttactatcagatgtgccttacaagagctcctgaaggaagcactaaatatggaaaggaaagaccattaccagccactacaaaaacactaaagtacacagaccagtgac

SEQ ID NO: 194609 - DNA, 557 bp, Homo sapiens
tgctacatgggagctcatgatccagatactgcacactaagagaaaattaaaattaagatagcatatgatgagggatcacacttctctgtagagtcagataaatggtcctgagaaaaagacacttaagttgagatttgaaggatgtgaaggcactagccaggtggaagggagaagacgggtgatttccacaaaggcaataggcaaagcctcttttggtcagaagaagcatggtcacttgaaaaactttgccctttttgttccctctgctcaggtgtccattctgatttcttctccaccatttttaggtctttttttcaaattttgccttctcaatgaagccttatctgaatcttacttaaagtctcagacttccttccaacacactctattcccttcctccactttttctccataccattcatcayggtgaaaaatatatttttatgtatttatgtttttgttgatctctccccaacttgactgtaaactctatgtgggcaggagatttttatgttatgtttactttgtatcaccagcccttagaacagtacttgacc

SEQ ID NO: 194610 - DNA, 401 bp, Homo sapiens
ttataccacaaaatgtacttgaatgtttttctatatcagtttgaattattttggatgcaagttatggaatccagactgaaagtgacctaaacaatggtgacatttatcttacatacaaagaaattcagtagtgggaatttccaccgttggytagctcagcagctcgtgatgtcagggttctgagtatgcttctctgaaattctctttactttctcctcatggtcacaaaataaatcctgtagcttcaagcatcacatcctcacagaaggaggtctaaaggcaaggaggaaaaaggatttctcctcatctgcttgactttttttttttcttttgagaaaaggtcttgctatgtttcacagtcaggtcttaaactcctaggctcaagcaattctcccacctca

SEQ ID NO: 194611 - DNA, 533 bp, Homo sapiens
aaatgtcatttgaggctgtttccttcaaactctcttattttatattgccaggcctgtagaytacactctggtgtgcctttagggaagttttatcttaagaatttcatgagtatcatggatatggaccaactactgcttatataaaagatagttcccgtttttaaaccaggtggtgacattcagtattatatcagttttcctctttgtcggtgggtacaggcagtaatgtttgaattaatcagaaattaatccaaatacatgagttaattttcagagaaattctagaaatactccaggattaaatttaaattatgggcatatcatgagcaaaatttcctaaagttttcctagatttaatgttttaaatctaaagctccaaaagccaatatataagtattacatattggattaaattacataccactaatgttgttgtatagagctggccataagcaaaaattaaagtaatattccatttattttactttaagaaggagaagaattgaaaagtcaaaataatggttaaagggaaa

SEQ ID NO: 194612 - DNA, 399 bp, Homo sapiens
caaagcaatatgcctgttttcccattttcttcagaaccttgccattcttcatcaagaaacagagtgtctttaacctccccttgaactgtgtgggcacttgtgactgcctcaatcaacagaatatggtagaagaaaaatgacaaggatctgtcataaaaaggaatacctggctttttctcccttgggaggcttaccttagaagccagacaacagatgyaaggagacctaggccacatggggatgccacatgcaagtgttccaatcaacagaacccagctaagatcttggctggttgaacagcatcaaccaccggtcatgggagtgaacaagcctctagatgactccagaccccagcattcaagtcatcccagctgatgccaagtgaagcagaaccaaact

SEQ ID NO: 194613 - DNA, 465 bp, Homo sapiens
tgagtggttattttttcttagtacattaagcatttatctgtttcttagtttttgacagggatggattacactggaaaacccctgcagataacctcgacagaatgtttcctatcagtgccatctctagcagcagaggtagaatgaattcttctctccactcagaatgggctcaggctaagcccagtgtgcagataaaatcttagctttctcagcaatcactgtgatctcatttcttacctaatttagataaagatggttaaattaagcactttgagtacccaggcttttgaaacagaagtgtatgtccagggatatagtggtcaaagagaaaactgtgcatactcttccctttttgtcagagccctgcatcctcgggagagttttctctccagaaaagctcaaagctctggcygggcccttgatgcagggaacaatgtgtacactgcaaggagctggcagaccagt

SEQ ID NO: 194614 - DNA, 461 bp, Homo sapiens
aggttggcaatacttagcgaatttgagcatkcttattattctctacaatgcagacaactactcctatttctagattctggaagttcctgcacatgtgtaggcaaggccaagaatggtagaatcattcataatagctaaaaaactggaatcaagccaaattctattactgatggaatggaaacattgtggtctattcattaaatggggcactatatagaagtaaaaatgatcaaaccaaagatacagacaacaatataaatttgtgacaaaatattaaagaaaagcatggaaatgattgtgagaaaattctggagatgatttatctttcgcaggattaaggggacacgattggagagcagtactcaggtggcgtctaggatctggccaatgcctagttcttaaattgagtggtggctaaacagacaaaccaactaacagattatgttagaagagtttgtggc

SEQ ID NO: 194615 - DNA, 619 bp, Homo sapiens
tcatggcaaatggttgaccaacaggaacaaaattatctgggaacatcactggacccaactgaaaagagcttattttcacacttctttgttctgtagtgtttgaaaccaaatggagggagtggagaactgacccctttagaagtttgcaggcatgcaaagggaagaggaggagggagaaaacaagaagctaggagatggcagagatgaactgggtgtaacattttgaaactgctaattggcctagccatatgtggcctggaaattggagcagcctttctaatattcacgttctagtgtgttttctgcaccgtctctcatgcagaggggctgagctggcaccaaaggagtgtctcctcagctgcttcctcttgtgccttaactctcactgcagcgaatcagcaaaacatagcaaaggaggccaagagcagaaaattaatgggagcagagaaattgggggaagaaagaacagactggaaaacagtgactttcacagccactcattgaaccatacttacagattgtgcactgggcacacgggacaatgttgagtgacaacaaagggrgtcatccccttgagagcagatgctctaggggacacaggctgcaacaaccttgtgag

SEQ ID NO: 194616 - DNA, 588 bp, Homo sapiens
aatgatattgtggatcctcattatttgtgaatatcatatttgcaaatttgcctactccctaaaatttatttgtaaccctcaaatcagtgcagcacttttgctgtcattgtggggcatgtgcagagtggcaaaaaaattgagccacctaacacattcctagctaaggttgaacactctctctttgttccagctctgatactataaacaaatgttcttttcgtgttctattagtgccatgtgtttcatattttkgtgttttttgttagtgatttcactgtttaaaatgactcttgaatgtagtgctgaagtgtttccaagcacaagaagcctgtgatgtgccttatggagaaaatacatgtgttaggtcagcttgttcagccgtgagttacagtactattggttgtgaaatcaatgttaatgagtcaacagcatatgttaagtaaggtatctttaaacagaaacatatattaaacaaggttgtgtatttattgctcaattgtaaaaaatattgtgatagaggctcatgggaaactaatcctgatttttcctaagagcaatggtttcatatgatctaattaagtgtttgca

SEQ ID NO: 194617 - DNA, 588 bp, Homo sapiens
aatgatattgtggatcctcattatttgtgaatatcatatttgcaaatttgcctactccctaaaatttatttgtaaccctcaaatcagtgcagcacttttgctgtcattgtggggcatgtgcagagtggcaaaaaaattgagccacctaacacattcctagctaaggttgaacactctctctttgttccagctctgatactataaacaaatgttcttttcgtgttctattagtgccatgtgtttcatattttggtgttttttgttagtgatttcactgtttaaaatgactcttgaatgtagtgctgaagtgtttccaagcacaagaagcctgtgatgtgccttatggagaaaatacatgtgttaggtcagcttgttcagccgtgagttacagtactattggttgtgaaatcaatgttaatgartcaacagcatatgttaagtaaggtatctttaaacagaaacatatattaaacaaggttgtgtatttattgctcaattgtaaaaaatattgtgatagaggctcatgggaaactaatcctgatttttcctaagagcaatggtttcatatgatctaattaagtgtttgca

SEQ ID NO: 194618 - DNA, 521 bp, Homo sapiens
tttttaaagctttaaagtcttgcctttttattttaagtcttggaattaacattttgtgagatcagatccaattattttgtctttcttcttatttatttatttttggacacaaggtctcactctgttccctaggctggagggcaatggtgtgaccatggcttactgcagccttgacctctcaggctcaaacgatcctcccacctcagactcccaagtagctgggaatacaagcatgtgctaccacatccagataattttttcatttgcagagacaggggtctcactmtgtttccatggctggtcttgaattcctgggctcaagtattcctcccacctttgtcttccaaagtgttgggattacaagcataagccactatgccccacccaattagtttttccttgtgactgaacatttgttccaagaatacttattaagtagtctcttctttactcacgggtttgctatgccatctttctcatatatcaagtttctatgtatgtgtgattctgaggtttctatt

SEQ ID NO: 194619 - DNA, 610 bp, Homo sapiens
cagtctgtctgttctcagagcttgaatgctgttctgagagaaccactgctctcttcagagctgtcagacagggacatttaagtctgcagaagcagtctgctgccttttgttcttctataccctgcccccagatgtgaaatctatggaggtagtaggtcttgctgagctgtggtggactccacccagttcatgcttcctagctgctttgtttacactgtaagctactcaagtctagcaatggcaggtgcccctccctcacgtcaagctgcagtgttgcaggttgatctcagactgctgtgctagcagtgagcaaggctccatgggcatgatacctgctaagccaggcacaggaggatatctcttggtctgccmgttgctaagactgtgggaatagcacagtatttggtcaggggtgtactgtttctccaggtacagtctgtcatggcttcccttggctaggcaagggaaatcccccaaccccttgcgcttcctgggtgagacaatgccctaccctgcttcagcttgccctctgtgggctgcactcactctccaaccagtcccaatgagatgaaccaagtacctcagtttgaaatgcagaaatcacctgctt

SEQ ID NO: 194620 - DNA, 579 bp, Homo sapiens
ctttttttctgtcatattgttaactgatttcaaattattttataaattccttgttcctttatctctttttgtcattgtttgaaggtctttcgtgttaccatttgatttctatctctttctcctttgtgtgattgatttataagacctattagttttatatttacatgctagtgaatattgactrtttatttctgtttaagacccctttgaacataacctgtaggtctggtctagtgttgacaaattccctctgtattctcttgtcttggaaatactttatttctcctccatttataaagactattcttgcaggatacaaaatttttggctaatgcttttttttcagagctttaaaaatgcattccattttcttctagattataatgtttctgctgaaaattccaccattagtctaatagggttttctttatagtaaataggtgcttatctcttgctaattttgaaattcttttttaaactttgacttgtgatgaagtcctttttgcagtgtattttgctgaggattgctgggactgctgtatttggacatctagttctcatgatagacttgggaagctt

SEQ ID NO: 194621 - DNA, 559 bp, Homo sapiens
aagactattcttgcaggatacaaaatttttggctaatgcttttttttcagagctttaaaaatgcattccattttcttctagattataatgtttctgctgaaaattccaccattagtctaatagggttttctttatagtaaataggtgcttatctcttgctaattttgaaattcttttttaaactttgacttgtgatgaagtcctttttgcagtgtattttgctgaggattgctgggactgctgtatttggacatctagttctcatgatagacttgggaagctttcattgataatttccttaaatagtttctctaaactttctggtctctcttctcccttgagaataccacaaatttrtagtttggttgctttatatagttgcagatatttcaaagactttgttcattcttttctattattttttccttatttttatctgactggagtgtttcagaagccctctcttcaattcctgagattctttcttctgtttggtctagtttattattgaagttttcaaatatatgttgtatgtcttttaataaaatttttagttcca

SEQ ID NO: 194622 - DNA, 566 bp, Homo sapiens
aagcagtggcctgagatgtatatggggcccttttacttgtggttggagctggaacagctatgacaaagggcaccatgtcctaaaggctgcacagagcagcaggtccctgggcttggaccacgaaaccattttttcctcctatgctcccagggctgtgacgggaagggctactacaaaggtctctgaaatgcctaggaggcattttccccattgtcttgactactaacattaggctcctctttacttatgcaaacgtctgcagcaggctggaattcctccccagaaaatgagtttttatttcctaccacatggccaggctgtgaattttatgaatttctatgcactgctttccttttaaatataagttccagtttcagataactcttttttcatgcctatgagtataggcagttagaaacagccaggccacctcttgaatactttgctgcttagaaacytcttctgccaggtaccctaaattatctttctcaagttcaaagttctatagatctctagcccatgggcacaatgccaccagtctgtttgctaaagcatagcaatagtga

SEQ ID NO: 194623 - DNA, 617 bp, Homo sapiens
agtgttttctcattcaagttgatgattttcctgattcgcggtataaaattctgtcttttgttagaagattacaagtcytcctgaagtctttattttagcaggtaaccacctagtctaagtttagcaagcagagcctggcctacttttatggactgtggttccaatgacaacttcatctttagagtctttatggtgttattttgattgcttgttgggtgccttatgataccactgggctctcactggtctttactggtactgcctggtggccagaagatgctttcccaggcctggactcatagtgcctcgatctagaaaagggagtctccagcctttagaaagagtctttccctggcagtgccactcattgtgacagatttttctctcgtgggcgcagcccagtgtctggtgttttgggttggggaggggagtctcaggcacacaagaacaagcattagttgtggcagaattttccttgctgcttctgctcagttgaccaatgtctctcggtaaagaagggagtctctgacccacaaggatggatggcttcctgggccagcctggttatgatggcaagatccccctgccagtgcttcgagaccccctaggtttccctt

SEQ ID NO: 194624 - DNA, 617 bp, Homo sapiens
agtgttttctcattcaagttgatgattttcctgattcgcggtataaaattctgtcttttgttagaagattacaagtcttcctgaagtctttattttagcaggtaaccacctagtctaagtttagcaagcagagcctggcctacttttatggactgtggttccaatgacaacttcatctttagagtctttatggtgttattttgattgcttgttgggtgccttatgataccactgggctctcactggtctttactggtactgcctggtggccagaagatgctttcccaggcctggactcatagtgcctcgatctagaaaagggagtctccagsctttagaaagagtctttccctggcagtgccactcattgtgacagatttttctctcgtgggcgcagcccagtgtctggtgttttgggttggggaggggagtctcaggcacacaagaacaagcattagttgtggcagaattttccttgctgcttctgctcagttgaccaatgtctctcggtaaagaagggagtctctgacccacaaggatggatggcttcctgggccagcctggttatgatggcaagatccccctgccagtgcttcgagaccccctaggtttccctt

SEQ ID NO: 194625 - DNA, 501 bp, Homo sapiens
aggcctgtctttttctgctcagggattattttcaggcctagtctccatttcattttacttaaactggaccaatgacacatgattacaaattagaaatgtataaatacaaagataacagtgtgtagtttatgagacagataggctcataaactgcatttcttctcacacccaacttatctccatgtggtgcacctacctacatcctaaagcaaaaccttaaacgcctttaaaataatccaatggaaggaaaaaggggaaaagaaaaaagagagaggcaagaaagaaggaagcacaagtgatggtagtgaaaaggagagacacatctcttcagttggaacttcctacaggaggctttgccaagccaccaagtgattaattcagattttggctgtggctttcaggaaagaacaccttggaactttactaytgaaacaggaaaagttcctttgtccccctcgcagggcgtgcaatgggggtggggctcacttatacagcacccca

SEQ ID NO: 194626 - DNA, 485 bp, Homo sapiens
gaactgtgttttatgatttcctcatgagaaattttatctcatgatttaaccacagtagatgccagctcagtagaggaataagaaacatgcctgtagaaagctataaacaatgctgattttctccacggcctttccatttctattataatgctcaccatgagccattaaccaaagattaatactttcgatagcacatagtggacagagactgatctgttttatgtgtgaaattaaatttcctcctctttttaaactcctttgcttatttttgttgcwatcagataatgcgttagcaaaatgctgcaatattgaaacgtcaatattcatttataaaattcattgagatgctttaaatgaatccaagtagcacaaaataatttgtatgaaaaaagctccttgcctaatcagactcataaattcgagtgaacatttaatcatttaggtttatttgatttactagcagtttataagattctttgatgata

SEQ ID NO: 194627 - DNA, 376 bp, Homo sapiens
taattctcaaagaaagccagcagagaatattcattctcagtagtctccactgaggctagtgtgaacagaacaactgtggaattaacactaatacaaatggaatcagtctatttatagagactgataaaaacttcagcctaattaaatttaaaggagtttaattgagtaatgarcgattcacaaatcaggcagacccagaatcgcagcagtttacagagactccagcacagccatgtggtggaagatctatagacaaaagcggaaaatgacatacagaaatcagaagtgaagttcagaaacagctggattggttacacctggcgtttgccttatttgagcagtttggacactcagcagtgtatgagcggttgaagta

SEQ ID NO: 194628 - DNA, 563 bp, Homo sapiens
ctgcagcctcaatctcctgggctcaagcaatcctcccactcagcctcctgagtagctgggaccacaagcacatgccaccttgccaggtgatgcggtttggtggtgtccccacccaaatctcctcttgaattgtaactcccacaattcccacatgtcgtgggagggacccagtgggaggtaactgaatatgggggtgggtctttctcgttctcttctcrtgatagtaagcctcatgagatctgatgattttataaagaggagttcccctacacaagttctctcttccctgctgccatgtgagatgtgacttgctcctccttgccttccaccacgattaaaaggcctccccaaccacgtggaactgtgagtccactgaaccgctttttcttgtaagttacccagtcttgggtatgtctttattagaagtgtgaaaatggactaatacagtaaattgataccagtagagtggggcactgctgaaaagatacccgaaaatgtggaagcgactttggaactgggtaacaggcagaggctggaacagtttagaggactcagaagaagac

SEQ ID NO: 194629 - DNA, 533 bp, Homo sapiens
gatgaaacattaattccctggggccaaccttgaccagtgagtgacaagagatggaggacaaaggacaaacacttgccacttgtatcttccttctcagaggcttctctgtgggtctccagggtccccagcaggaggcagcgaatcccagctgcccacagcctagtaatccagtgtgggttcccttcttccctgttttcctcctcccagcccggacctgttcctggaatcacttcccagaactcaccactaggccacaagctcttgttatttgaggaaggtagctaaggcagccacagggagctcacagtgtagggagatggagccaggcacccaggaaccatctcaacccacgtggtgagggccacgaggcatttcccagagcctgtggcacrgaagaaagccagcccggtcccctggggcaggtcaggggaaggctgaactgggtcttgaagaggaagtgggggagggagggacactctagagcgcaggagcagtgagttcaaaggccaggaaatgtgaggaggccgggctcc

SEQ ID NO: 194630 - DNA, 592 bp, Homo sapiens
gtctgcagctcaactttttaaagccgctttttgttggaaaagaaataattctggggctgctttttgttaaaagggtaattccaccaaggacccttttgccctcgctgtttgcctaaataatttctttctgtctcctgtatcaatatcttttaggttaactgtttttgcttatctctgcacataggccaatctaactatgggagaaatttagcttatagtttaactttcaagcaaggatgagaatagcccttccccgaaactaacaccccaggagaaaasaagggggtacacagaagtaacaatgttatattaaaattttataagattattgtgacgggaccaaggaaaaagaagttgaccctcactgccactcagatgtctgtggtcatctgtcactttttggcctcagccccctgcatcttctccatttccctaaaataaagggagccctaaattcatattagcttaacatgtttctttaggacactagtctgccatctcagtttgctggccctccaaaataaaatctctttccttgccccaacatcttgtctttcgaccaatagctgtcatgcagtgagcagtacaagct

SEQ ID NO: 194631 - DNA, 592 bp, Homo sapiens
gtctgcagctcaactttttaaagccgctttttgttggaaaagaaataattctggggctgctttttgttaaaagggtaattccaccaaggacccttttgccctcgctgtttgcctaaataatttctttctgtctcctgtatcaatatcttttaggttaactgtttttgcttatctctgcacataggccaatctaactatgggagaaatttagcttatagtttaactttcaagcaaggatgagaatagcccttccccgaaactaacaccccaggagaaaagaagggggtacacagaagtaacaatgttatattaaaattttataagattattgtgacgggaccaaggaaaaagaagttgaccctcactgccactcagatgtctgtggtcatctgtcactttttggcctcagccccctgcatcttctccatttccctaaaataaagggagccctaaattcatattagcttaacatgtttctttaggacactagtctgccatctcagtttgctggccctccaaaataaaatctcttyccttgccccaacatcttgtctttcgaccaatagctgtcatgcagtgagcagtacaagct

SEQ ID NO: 194632 - DNA, 315 bp, Homo sapiens
atcacttatttctgttgagttacaaactcagctggctatttctcctatgttagttatttggagaaaaaaaaacgtgatggtaattttggggtaacaaatacaatatttgatgaaagcaaatttattgagggttagacaaactacaagatactttaggctacaaagtcaacacgagagttctggcccaaattgtgcagagtttgcgtccagctgcamagttcaaaggaagaggccatgtaagaagattctcacttctgacaccaactgccagttcaggggtttcccctgaacaccctcagtttcaagaatttacta

SEQ ID NO: 194633 - DNA, 579 bp, Homo sapiens
gatgggtgcataggaggttaacagctagggaaggtggggtttctttttgaagtgatgaaaatgctctaaaattcattgtgatggtggctccacttatctgtgcatatactaaaagccactgacttgtagacattaatgtgtgcactctacactatgtaaattatatctcaataaatcctttcaaaaatacacagaagagtaaggggttttggaatgttgcarctgggatgcagtttgaaatactgaataggcctcatcgagaatgtgaagtttcagtaaagacctgaggaagttgaatgagctgatcaatggatatatggtgggctatctttccaagccaaaaaattaactagagtcttgatcgtaaggcagcagcatgttggtatgtccagaggacagtgaggtggccaggaccactggtaagatcaagggtgaagatataaaataattttggcggttaacatgcggcagatgatgatgggcttgcagaccattgtaagaaatgttgtttttaatgtacatgaaatggggagacaactcattatcccattatcaatattttaataaattggatccatg

SEQ ID NO: 194634 - DNA, 414 bp, Homo sapiens
cagcatgcaaaattagctaccaattaatctttaggaagtgagctgcatttctagccagactgagcttacgttttagcaggaagcatttttgggaaatgtttatgttagastttgcccttcttgacaaggtgagacataaacgtctactttatagacatgaattgagatgggaagatatttgggggaatcatttactcaaacgctaaataataaaggtacacaaagggcaaattatactagatttctttcccacttgttttctatgtctcatgcaattcaccttgattcccttcagtttctgtttaatgtagaaagtggcattttcattattttaagcttctagcacaatgaaagaatttctctttttcatgaacaggatcatacatgaaaaggaggaagagtgtcctatatcat

SEQ ID NO: 194635 - DNA, 414 bp, Homo sapiens
cagcatgcaaaattagctaccaattaatctttaggaagtgagctgcatttctagccagactgagcttacgttttagcaggaagcatttttgggaaatgtttatgttagactttgcccttcttgacaaggtgagacataaacgtctactttatagacatgaattragatgggaagatatttgggggaatcatttactcaaacgctaaataataaaggtacacaaagggcaaattatactagatttctttcccacttgttttctatgtctcatgcaattcaccttgattcccttcagtttctgtttaatgtagaaagtggcattttcattattttaagcttctagcacaatgaaagaatttctctttttcatgaacaggatcatacatgaaaaggaggaagagtgtcctatatcat

SEQ ID NO: 194636 - DNA, 591 bp, Homo sapiens
tgtgcttagtgtaatactataaatcttgaataacaccatgagaccaatacaaagtgccacaagtgatgctgggagtgctcccaagaagcagagaaaagttgtgacattatgagaaaaagttagattgcttcctatagattgagttcttcagctgcctgccatttcaaaataaatgaatccagtgtaaggtcccttaaaaaaaaaaagagaaattcataaggcctcatttcatgccaacaggcatgaaaaccttgtcctttcttatctcatattcaaaatgcagcttttatgtggggtacagaattgctataagaaagacatacctatagactcttatttgattcaagaaatagcgaagtcattatttgacaacttaaagtaaaagcaaggtgaaagatctaaagctggagaatttaatgrcagcaaaggatgatttgataattttagaaagtggtttggttttaaaaatgtcaggataatgggagtagcaacttctgccaaccaagaaccagcaagtgaattctcaaatgccgttaagaaaaacattgaggagaaaggatatctgcctgaataggtattaatgcagctgaa

SEQ ID NO: 194637 - DNA, 564 bp, Homo sapiens
aaagtggtttggttttaaaaatgtcaggataatgggagtagcaacttctgccaaccaagaaccagcaagtgaattctcaaatgccgttaagaaaaacattgaggagaaaggatatctgcctgaataggtattaatgcagctgaaagtgccctattccaggcrgaaaaataaaagccacaaaggtcatttattagtaaggaagagaagcaagcaccaagatttaaggcaggaagggataggctaactctactgctttgtgcaaatgtagtcgggtttatgatcagggctgcccttaactataaagctgctaacccctgagtcttgaaagggaaaagagaaacactagttgccagtcttttggttgtacaacaagaaggcctggactatgagaatgctttttctggattagttccatcagtgctttgtccctgaagtcagaagtaccttgccagtaagggactgctttttaaagttttttgttgttgttgtttaattggaaaatgccccctggccacccagaaccccatgagttcaacaccaaaggcactgaagtgtctccttttc

SEQ ID NO: 194638 - DNA, 610 bp, Homo sapiens
ctttttctgcatctgttgatataatcatttgagtttttttttaattctgtttatttggtatatcacatttattgacttgcatatgttaaaccattcctgtatcactggtatgaaacccacttgatcatggtggattatctttttgatatgttgttggattcagttagatagtattttgttaaggattttggcatctgtgatcatcaaggatattggtctgtagttttcttttttggttatgtcctttcatggttttggtattagggtgatgctggcttcatagaatgaatcagggaggctttcttctttctctgtcttgtggaatagtgtgaaaggattggtatcatttcttctttgaatgaaagaagacattctttgaatgtctggtagaattctgctgtgaatctgtctggtcctcggtttttttggttggtaattttaaaattaccatttcgatcttkctgcttgctttattggtctgcttgaggtatctacttcttcctgattaagctaggagggttgtatttttccaggaatttatccaactctcctaggttttctagtttatgtgccaaaaggtgttcatagtacccttgaataatctttaata

SEQ ID NO: 194639 - DNA, 506 bp, Homo sapiens
gagctcagaaagctgcacttgcagagtcatttatgtaagactgtgagtgtgctgccggtccacatcagaggatggggactaccatggtctgaatgtctgtgtctctccaaatttcatatgtggaaacttaatcaaggtgatagttttaagaggtggggcatttaggagctgattaaggcatttggacagagcccttctgaatgggattaatgaccttataaaagaaatgaagatgaacaaatgaccccttccaccacatgaggacatagcaagaaggyaccatcttaaagcagagagcaagccctcaccaagacactgaatctgcagatgccttgatcttagacttcccagcctctgacactgcaaaaaataaataaataaataaacttctattgtttataaattacccaatctaaggtattttgttttagcggctcaaaggaactaagacaaaggtcatggagaccatagggtgagtctcaagacttcccccagctctacttggc

SEQ ID NO: 194640 - DNA, 472 bp, Homo sapiens
ccagagacactaagcaagtagctcaagrtcacacacgttatctgtgattaagcctcagttagaactggagtcttggatttccacatttatacccttttcatgaagctacctaactttgatcctcaagttttcccatctatagcatgggactgctggactagaaatctctaagtcccctttacctcttgaattctgtgtctctaaggatgagaataacaaaactcctttgcctctagcactttccaactcaaagccctatcactctcattacatctaatcactgcagccagaagcattaaataaaatggaaggactgacattgggagtgggcgaggcagagaagttgggggcgtggagaaacagctctttttacataatgattgctactatgatttggttataaataaccagtgaagacaatcaggcttttctggcagtccctaattgtagtgaatgttggaatacagtgacc

SEQ ID NO: 194641 - DNA, 457 bp, Homo sapiens
gcaagtagctcaagatcacacacgttatctgtgattaagcctcagttagaactggagtcttggatttccacatttatrcccttttcatgaagctacctaactttgatcctcaagttttcccatctatagcatgggactgctggactagaaatctctaagtcccctttacctcttgaattctgtgtctctaaggatgagaataacaaaactcctttgcctctagcactttccaactcaaagccctatcactctcattacatctaatcactgcagccagaagcattaaataaaatggaaggactgacattgggagtgggcgaggcagagaagttgggggcgtggagaaacagctctttttacataatgattgctactatgatttggttataaataaccagtgaagacaatcaggcttttctggcagtccctaattgtagtgaatgttggaatacagtga

SEQ ID NO: 194642 - DNA, 457 bp, Homo sapiens
gcaagtagctcaagatcacacacgttatctgtgattaagcctcagttagaactggagtcttggatttccacatttatacccttttcatgaagctacctaactttgatcctcaagttttcccatctatagcatgkgactgctggactagaaatctctaagtcccctttacctcttgaattctgtgtctctaaggatgagaataacaaaactcctttgcctctagcactttccaactcaaagccctatcactctcattacatctaatcactgcagccagaagcattaaataaaatggaaggactgacattgggagtgggcgaggcagagaagttgggggcgtggagaaacagctctttttacataatgattgctactatgatttggttataaataaccagtgaagacaatcaggcttttctggcagtccctaattgtagtgaatgttggaatacagtga

SEQ ID NO: 194643 - DNA, 457 bp, Homo sapiens
gcaagtagctcaagatcacacacgttatctgtgattaagcctcagttagaactggagtcttggatttccacatttatacccttttcatgaagctacctaactttgatcctcaagttttcccatctatagcatgggactgctggactagaaatctctaagtcccctttacctcttgaattctgtgtctctaaggatgagaataacaaaactcctttgcctctagcactttccamctcaaagccctatcactctcattacatctaatcactgcagccagaagcattaaataaaatggaaggactgacattgggagtgggcgaggcagagaagttgggggcgtggagaaacagctctttttacataatgattgctactatgatttggttataaataaccagtgaagacaatcaggcttttctggcagtccctaattgtagtgaatgttggaatacagtga

SEQ ID NO: 194644 - DNA, 446 bp, Homo sapiens
ctaagcaagtagctcaagatcacacacgttatctgtgattaagcctcagttagaactggagtcttggatttccacatttatacccttttcatgaagctacctaactttgatcctcaagttttcccatctatagcatgggactgctggactagaaatctctaagtcccctttacctcttgaattctgtgtctctaaggatgagaataacaaaactcctttgcctctagcactttccaactcaaagccctatcactctcattacatctaatcactgcagccagaagcattaaataaaatggaaggactgacattgggagtgggcgaggcagagaagttggggrcgtggagaaacagctctttttacataatgattgctactatgatttggttataaataaccagtgaagacaatcaggcttttctggcagtccctaattgtagtgaat

SEQ ID NO: 194645 - DNA, 492 bp, Homo sapiens
ggagaaagtgtcttaagtgtttggtgctgtggacaggcaacacaggcagaaactggtggctagggaatcagagaagttttcaggagggagcatttgacttgggcttgaactgagcatcatagggcaatatagaaacaagtttatggataattcactgaattggtggcagtttataacttgaatcttccttcagatgawtgaagttagtagcccagctatgaaagtctaggttacagatgtctcagccacagcttgcatatatatggatgaggttcatacatatgcagacttgggctcctgccaagatatgagagttttggtcagtctctgtctcaattctaatgtctctgcctacatacctgagtccagagttgtcatgcaaagaacagaaccctggaacaatcacacaaggatttggtactaggcttagccattttctagccatggggacaaaagaaaattactgaacctctctgagtcccagtttatttg

SEQ ID NO: 194646 - DNA, 534 bp, Homo sapiens
tgtcatgcaaagaacagaaccctggaacaatcacacaaggatttggtactaggcttagccattttctagccatggggacaaaagaaaattactgaacctctctgagtcccagtttatttgtctataaaatarggatagtgatactggggttacaaggaaattgtgagaattaaaatagttcaggagaggttaagttgtcctggggccacctttgtcattgcagtgaccacactctgtagtgagggcacccttgagagcagacagcagagctgctatgtgattcatctctagaatccatgattcttggaacacttcctgagagctattaggcattcaagaaatgttaatggtagatcatagtataatggtagatcatagtattgtgatagatcatagtattgtattattgttcagcaaacatctgttttccctcctttcaatggaagtggtgtacctccccaccccactgacattgggcttagccatgtgacttgcttcagctaatggaatgtgggtgactcagtgaatgccaca

SEQ ID NO: 194647 - DNA, 473 bp, Homo sapiens
ctatgaagatgggaatgaattggcaaacagctttgggatgacaatgttaaggccaggcaaatgctctcagtaacctcaaatgagtgttgatgttcatgaagcctgctcaaaaaagacacagaaattgacgtcttttatctgaggacccttccttagcctcaggacttaaggctatgggagcatgagccacataaccatgagaggcagggggttcagtgagaagaataagctcaagagtytcacctgtgggtcagaatctcagctgtgccacacatactgtgtgatcttgagcaaatcaccaaacctctctattcctcatttttgtcacctgtaaagtgggactattacttgtacctacatcctggatttgttgggacagtaaatgagttagtgttcccaaggtgcttaacacagagcctttgcatgcagcaagcacccagtcaatgcccatgaccatggccccctgctcatgc

SEQ ID NO: 194648 - DNA, 442 bp, Homo sapiens
acccttccttagcctcaggacttaaggctatgggagcatgagccacataaccatgagaggcagggggttcagtgagaagaataagctcaagagtctcacctgtgggtcagaatctcagctgtgccacacatactgtgtgatcttgagcaaatcaccaaacctctctattcctcatttttgtcacctgtaaagtgggaytattacttgtacctacatcctggatttgttgggacagtaaatgagttagtgttcccaaggtgcttaacacagagcctttgcatgcagcaagcacccagtcaatgcccatgaccatggccccctgctcatgctgctcttttgttccccctgaggtcttttggggacagagagtgtgaaaatgccctctacctacacaaggaaacaggactcagggacagaggacctgtgccctgaccaaggcaat

SEQ ID NO: 194649 - DNA, 601 bp, Homo sapiens
ccctaaaaatctcctcccccttcagcatcaactaaagttcagaatctcatcaaatcaggtattggggtggggacttcttgagaatgactagtcacatgcagctcctagagtacagttcctctctctctgagagcctgtgaaactagagagacacagtatctgcttccatacgcctagcattaaatggtataacaggcatgggttagctctatatctgtctcctttttctctagatgtttgatgagacaagtattttaattttgtattccactaatttattcattcaacaaatacttattaggtactgactatagactctatttattttgcattcccattttgccaacaaggaatctgagaatcagaggcaaaatattacagcttggcccactgaattattttttcttctctgaaaggacctctaggrttctccatcaatgaggactttctagtcacagctgcagtgaggtttgagtttagctgattagaccatcaaccacaaagactacacattcaaatacttttatgtggcagaatatctaagaataattcaagctaataaaagatctagagaataattagatatattcattgttaataa

SEQ ID NO: 194650 - DNA, 601 bp, Homo sapiens
ccctaaaaatctcctcccccttcagcatcaactaaagttcagaatctcatcaaatcaggtattggggtggggacttcttgagaatgactagtcacatgcagctcctagagtacagttcctctctctctgagagcctgtgaaactagagagacacagtatctgcttccatacgcctagcattaaatggtataacaggcatgggttagctctatatctgtctcctttttctctagatgtttgatgagacaagtattttaattttgtattccactaatttattcattcaacaaatacttattaggtactgactatagactctatttattttgcattcccattttgccaacaaggaatctgagaatcagaggcaaaatattacagcttggcccactgaattattttttcttctctgaaaggacctctaggattctccatcaatgaggactttctagtcacagctgcagtgaggtttgagtttagctgattagaccatcaaccacaaagactayacattcaaatacttttatgtggcagaatatctaagaataattcaagctaataaaagatctagagaataattagatatattcattgttaataa

SEQ ID NO: 194651 - DNA, 544 bp, Homo sapiens
ataattagatatattcattgttaataagagcccatttaatattgtagcaaaggcaagatcagggcaggrtcaaggcagataattttcaaacatgcctaatgatagtgtagaccaatggtgtttttcaattgtggctatatacattctaacacattcaattttttttaaaaagtgaagcttaggtcctattccttagaaattcagatttaactaatttggagtgggccccagacatcaatattttaactttcaagtggttctaggaaagacaggtttaggggctgtggagagacacagaatggcaagtacttagaacattcacacatcccccacctcccaagctcctaacagaaatcatttattagccagtcccctcaatgtcattggttggaatgcaattgtgtagtctttctcatcccaggactccaggcagcccctacccatgaagccaagttgacatatgaatgaaggcatatgtgttagccctgacaagccacactgggcatgctttcccaaacctacaaattatcaagggtgtagaaaa

SEQ ID NO: 194652 - DNA, 502 bp, Homo sapiens
taagagcccatttaatattgtagcaaaggcaagatcagggcagggtcaaggcagakaattttcaaacatgcctaatgatagtgtagaccaatggtgtttttcaattgtggctatatacattctaacacattcaattttttttaaaaagtgaagcttaggtcctattccttagaaattcagatttaactaatttggagtgggccccagacatcaatattttaactttcaagtggttctaggaaagacaggtttaggggctgtggagagacacagaatggcaagtacttagaacattcacacatcccccacctcccaagctcctaacagaaatcatttattagccagtcccctcaatgtcattggttggaatgcaattgtgtagtctttctcatcccaggactccaggcagcccctacccatgaagccaagttgacatatgaatgaaggcatatgtgttagccctgacaagccacactgggcatgctttcccaaacctacaaat

SEQ ID NO: 194653 - DNA, 540 bp, Homo sapiens
tatattcattgttaataagagcccatttaatattgtagcaaaggcaagatcagggcagggtcaaggcagataattttcaaacatgcctaatgatagtgtagaccaatggtgtttttcaattgtggctatatacattctaacacattcaattttttttwaaaagtgaagcttaggtcctattccttagaaattcagatttaactaatttggagtgggccccagacatcaatattttaactttcaagtggttctaggaaagacaggtttaggggctgtggagagacacagaatggcaagtacttagaacattcacacatcccccacctcccaagctcctaacagaaatcatttattagccagtcccctcaatgtcattggttggaatgcaattgtgtagtctttctcatcccaggactccaggcagcccctacccatgaagccaagttgacatatgaatgaaggcatatgtgttagccctgacaagccacactgggcatgctttcccaaacctacaaattatcaagggtgtagaaaaataga

SEQ ID NO: 194654 - DNA, 516 bp, Homo sapiens
cattgttaataagagcccatttaatattgtagcaaaggcaagatcagggcagggtcaaggcagataattttcaaacatgcctaatgatagtgtagaccaatggtgtttttcaattgtggctatatacattctaacacattcaattttttttaaaaagtgaagcttaggtcctattccttagaaattcagatttaactaatttggagtgggccccagacatcaatattttaactttcaagtgrttctaggaaagacaggtttaggggctgtggagagacacagaatggcaagtacttagaacattcacacatcccccacctcccaagctcctaacagaaatcatttattagccagtcccctcaatgtcattggttggaatgcaattgtgtagtctttctcatcccaggactccaggcagcccctacccatgaagccaagttgacatatgaatgaaggcatatgtgttagccctgacaagccacactgggcatgctttcccaaacctacaaattatca

SEQ ID NO: 194655 - DNA, 502 bp, Homo sapiens
taagagcccatttaatattgtagcaaaggcaagatcagggcagggtcaaggcagataattttcaaacatgcctaatgatagtgtagaccaatggtgtttttcaattgtggctatatacattctaacacattcaattttttttaaaaagtgaagcttaggtcctattccttagaaattcagatttaactaatttggagtgggccccagacatcaatattttaactttcaagtggttctaggamagacaggtttaggggctgtggagagacacagaatggcaagtacttagaacattcacacatcccccacctcccaagctcctaacagaaatcatttattagccagtcccctcaatgtcattggttggaatgcaattgtgtagtctttctcatcccaggactccaggcagcccctacccatgaagccaagttgacatatgaatgaaggcatatgtgttagccctgacaagccacactgggcatgctttcccaaacctacaaat

SEQ ID NO: 194656 - DNA, 544 bp, Homo sapiens
ataattagatatattcattgttaataagagcccatttaatattgtagcaaaggcaagatcagggcagggtcaaggcagataattttcaaacatgcctaatgatagtgtagaccaatggtgtttttcaattgtggctatatacattctaacacattcaattttttttaaaaagtgaagcttaggtcctattccttagaaattcagatttaactaatttggagtgggccccagacatcaatattttaactttcaagtggttctaggaaagacaggtttaggggctgtggagagacacagaatggcaagtacttagaacattcacacatcccccacctcccaagctcctaayagaaatcatttattagccagtcccctcaatgtcattggttggaatgcaattgtgtagtctttctcatcccaggactccaggcagcccctacccatgaagccaagttgacatatgaatgaaggcatatgtgttagccctgacaagccacactgggcatgctttcccaaacctacaaattatcaagggtgtagaaaa

SEQ ID NO: 194657 - DNA, 350 bp, Homo sapiens
aaaaataaagatgagaatataaatcaataaaacagaaaggggaaagaaaatagagaaaagtccatgaaaacaaaggctgactcaagaagatcaataagattgataaatctctagccagactgatcaggaaaaaaataagacaagatacaaattattagtatcaagaatgaggaaggtgaaatcactacagattctacaggtattaaaataataagaaacattatgatcaactccattcctttaatttgtcaagatagacaaaatgaacaaatttcttgaaagrtgcaaatttatgcaaggagagacagataacctaaataggtacctattaaagaaataaaatttgttgt

SEQ ID NO: 194658 - DNA, 546 bp, Homo sapiens
tttttaaataaaagagcaactatattacatactgactttttagagagggttggcatagaaagataaggagtcaaagaggaaggtaagaaaagagaaaggatgagaaagtaaatatacaagaaaacgtaaccagaggctcaaaaaaaaaaaaaaaaagcaaagtaggacagtaaaataaacattttgacctatttatatgatttttaagttcaaaataacttgctatgagattttcatcattaactgacatttagattagagaaaatatacatgaagcaagcctcaccccaggcaatacaacagctccgattccacttttcagctttgacctgcctcggccacctcgccccgacagtcctgcacctcgaggtctccgctttcytggaaatccagacccatggccctatgtaacagattaggaaaagtcaacattctgtgacagcccaaaataatttttaaatccaaatgccactgagataaaacattttattaaatgttatacaaacacttctttagataagtattaagagacctggcttattattt

SEQ ID NO: 194659 - DNA, 546 bp, Homo sapiens
tttttaaataaaagagcaactatattacatactgactttttagagagggttggcatagaaagataaggagtcaaagaggaaggtaagaaaagagaaaggatgagaaagtaaatatacaagaaaacgtaaccagaggctcaaaaaaaaaaaaaaaaagcaaagtaggacagtaaaataaacattttgacctatttatatgatttttaagttcaaaataacttgctatgagattttcatcattaactgacatttagattagagaaaatatacatgaagcaagcctcaccccaggcaatacaacagctccgattccacttttcagctttgacctgcctcggccacctcgccccgacagtcctgcacctcgaggtctccgctttcctggaaatccagacccatggccctatgtaacagattaggaaaagtcaacattctgtgacagcccaaaataatttttaaatccaaatgccactgagataaaacattttattaaatgttatacaaacacttctttagataagtattaaragacctggcttattattt

SEQ ID NO: 194660 - DNA, 310 bp, Homo sapiens
gaaacacatgaacaaaaggaatgggaggaatggcttttttccctttggatgtaataaatacagccagctcccagtttcaaactgccactcctgtcttctcttaccctgctctccttgagatcccttttgagaagtgcatcagcttctttgcacaacagatagatggggtcaggttagttttttgggttttttgtttgtttgtttgtttttgagatggagtctcrcttctttgcccaggctggagtgcaatgatgtgatcttggctcactgcaacctccatctcctgggttcaagcaattctcctgcctca

SEQ ID NO: 194661 - DNA, 310 bp, Homo sapiens
gaaacacatgaacaaaaggaatgggaggaatggcttttttccctttggatgtaataaatacagccagctcccagtttcaaactgccactcctgtcttctcttaccctgctctccttgagatcccttttgagaagtgcatcagcttctttgcacaacagatagatggggtcaggttagttttttgggttttttgtttgtttgtttgtttttgagatggagtctcgcttctttgcccwggctggagtgcaatgatgtgatcttggctcactgcaacctccatctcctgggttcaagcaattctcctgcctca

SEQ ID NO: 194662 - DNA, 310 bp, Homo sapiens
gaaacacatgaacaaaaggaatgggaggaatggcttttttccctttggatgtaataaatacagccagctcccagtttcaaactgccactcctgtcttctcttaccctgctctccttgagatcccttttgagaagtgcatcagcttctttgcacaacagatagatggggtcaggttagttttttgggttttttgtttgtttgtttgtttttgagatggagtctcgcttctttgcccaggctggagtgcaatgrtgtgatcttggctcactgcaacctccatctcctgggttcaagcaattctcctgcctca

SEQ ID NO: 194663 - DNA, 310 bp, Homo sapiens
gaaacacatgaacaaaaggaatgggaggaatggcttttttccctttggatgtaataaatacagccagctcccagtttcaaactgccactcctgtcttctcttaccctgctctccttgagatcccttttgagaagtgcatcagcttctttgcacaacagatagatggggtcaggttagttttttgggttttttgtttgtttgtttgtttttgagatggagtctcgcttctttgcccaggctggagtgcaatgakgtgatcttggctcactgcaacctccatctcctgggttcaagcaattctcctgcctca

SEQ ID NO: 194664 - DNA, 404 bp, Homo sapiens
atgcatcacactacttaactcacttcaaggactggcacagccatcaamcaatgtcatgggggaaaaagccttgtcattttaaggtattaaacagacaatgaaatctgccacaattttggtatttcttctccataagaacataataaattaatggagttttttcttttgcttttttctaagcaacaaagttttatgatatcatgaatgaaaaggtccttaattaccttttggtctacatgtcaaggacttctccctcataaaaccggtagtaatcacaacaaaaggaattaaccataaaaagaggtattaaaaatgtatattgatttttaaatgcaagcatattatttctttacattaaaatttttagatttaaaaagtgtttctggaagctcaatctagaaaag

SEQ ID NO: 194665 - DNA, 404 bp, Homo sapiens
atgcatcacactacttaactcacttcaaggactggcacagccatcaaccaatgtcatgggggaaaaagccttgtcattttaaggtattaaacagacaatgaaatctsccacaattttggtatttcttctccataagaacataataaattaatggagttttttcttttgcttttttctaagcaacaaagttttatgatatcatgaatgaaaaggtccttaattaccttttggtctacatgtcaaggacttctccctcataaaaccggtagtaatcacaacaaaaggaattaaccataaaaagaggtattaaaaatgtatattgatttttaaatgcaagcatattatttctttacattaaaatttttagatttaaaaagtgtttctggaagctcaatctagaaaag

SEQ ID NO: 194666 - DNA, 404 bp, Homo sapiens
atgcatcacactacttaactcacttcaaggactggcacagccatcaaccaatgtcatgggggaaaaagccttgtcattttaaggtattaaacagacaatgaaatctgccacaattttggtatttcttctccatragaacataataaattaatggagttttttcttttgcttttttctaagcaacaaagttttatgatatcatgaatgaaaaggtccttaattaccttttggtctacatgtcaaggacttctccctcataaaaccggtagtaatcacaacaaaaggaattaaccataaaaagaggtattaaaaatgtatattgatttttaaatgcaagcatattatttctttacattaaaatttttagatttaaaaagtgtttctggaagctcaatctagaaaag

SEQ ID NO: 194667 - DNA, 404 bp, Homo sapiens
atgcatcacactacttaactcacttcaaggactggcacagccatcaaccaatgtcatgggggaaaaagccttgtcattttaaggtattaaacagacaatgaaatctgccacaattttggtatttcttctccataagaacataataaattaatggagttttttcttttgcttttttctaagcaacaaagttttatgatatcatgaatgaaaaggtccttaattaccttttggtctacatgtcaaggacttctccctcataaaaccrgtagtaatcacaacaaaaggaattaaccataaaaagaggtattaaaaatgtatattgatttttaaatgcaagcatattatttctttacattaaaatttttagatttaaaaagtgtttctggaagctcaatctagaaaag

SEQ ID NO: 194668 - DNA, 359 bp, Homo sapiens
ggggtaagagataggtaacggaataacrgtattttggaaaagccacacaagcaatagactggtttcatttttaagtcacaaactcaacccacacacattgaagtccagcaatccaactcattctctccagcaaacactttatttttttccccctccaggattaccctcaggtgttctttcttacccatcaaatctctaacctagctcaggtaatcactatgctgatttcactgagcagcaaccactgcaggtcaattacctcactttcataatttcaaatcaacttgaatctgtacctatgtcttcttccctactattagtagggaagtgttgtcaaaagccatttctcttttctcatt

SEQ ID NO: 194669 - DNA, 599 bp, Homo sapiens
ttccaatttctaatgtctacttctttccattttgtattttcttgtattgaggcaatttaaagaggatatgccaggtcttcaaaaagccaagaactgaacataagcactctggaacctatctgaacttaattttgtccaagatttttttaatggttgaaaattggctcaactggggatactaagaggaaatatcaggggcaaaggggatttgggttaaacagatcgaacaggattcttactgaaggcaggccagactgatcagaaatcatctggagggtggtgggagataacaaatttgatcagatatcaaaggtgatcagtactgagagtgggggattctttgcaagtttcttcctaaacctgagagatgtgggycagactaggatgaacactgaaagctgaggctgagaggtggcttagaggatcccaactagagtttgggcaaggggagaggctttgtcaatgcaaacatgcattcagcaatattaccaagtacagatgcatgcacataaaaatactgaaaggaaatataagaaaatgtttaaaaatttttagtggcttatttattttatgtaatttaaatatatatatatataaaa

SEQ ID NO: 194670 - DNA, 448 bp, Homo sapiens
tattttcccatttggcacttctttctgggttttttaagcagcccaaaaactctaggtgattttacttttgtaattgtattctcttgggaatgctcattcctgattcctcrtttcaccaaataggtgtggaacctgcttgtttctgcctataataattctggagtctttaaacaaaacgactgtgacttttcatgatgagtagaagatagattttactcatgctacaatcaatattaattccttgcagttcaaagacactgaggccttgtctaataatatagaagttgaacttggacttgggagatgactcctgcctctcgtcctctctgtggctctgctttctattattttactcataagcttgttttgtctccttgctgagaattgtcaaacatgaaatgtaatttcaggctatagtgaagaaagatgacgtaggcagaagaaattg

SEQ ID NO: 194671 - DNA, 448 bp, Homo sapiens
tattttcccatttggcacttctttctgggttttttaagcagcccaaaaactctaggtgattttacttttgtaattgtattctcttgggaatgctcattcctgattcctcgtttcaccaaataggtgtggaacctgcttgtttctgcctataataattctggagtctttaaacaaaacgactgtgacttttcatgatgagtagaagatagattttactcatgctacaatcaatattaattccttgcagttcaaagacactgaggccttgwctaataatatagaagttgaacttggacttgggagatgactcctgcctctcgtcctctctgtggctctgctttctattattttactcataagcttgttttgtctccttgctgagaattgtcaaacatgaaatgtaatttcaggctatagtgaagaaagatgacgtaggcagaagaaattg

SEQ ID NO: 194672 - DNA, 268 bp, Homo sapiens
tactgtaacatctttctgattttaggagaggtagcagttccctttttagcctaaacgctatttctttttaaagctcagccaagagactccattataattttcaaatgtgtgtaacttaaattctcatatgaaataccactatgcttaaattagtcaaaacattttccccatctacaactctatcttgtcattgyaatcattttcacaaaagtgactgcagctctcagaccctaaaaagagaaaatccagggtagtttatctgatctag

SEQ ID NO: 194673 - DNA, 268 bp, Homo sapiens
tactgtaacatctttctgattttaggagaggtagcagttccctttttagcctaaacgctatttctttttaaagctcagccaagagactccattataattttcaaatgtgtgtaacttaaattctcatatgaaataccactatgcttaaattagtcaaaacattttccccatctacaactctatcttgtcattgtaatcattttcacaaaagtgactgcagctcwcagaccctaaaaagagaaaatccagggtagtttatctgatctag

SEQ ID NO: 194674 - DNA, 268 bp, Homo sapiens
tactgtaacatctttctgattttaggagaggtagcagttccctttttagcctaaacgctatttctttttaaagctcagccaagagactccattataattttcaaatgtgtgtaacttaaattctcatatgaaataccactatgcttaaattagtcaaaacattttccccatctacaactctatcttgtcattgtaatcattttcacaaaagtgactgcagctctcagaccctaaaargagaaaatccagggtagtttatctgatctag

SEQ ID NO: 194675 - DNA, 517 bp, Homo sapiens
ttggcagatcaaatgcttcttcttaaaaaaattaagtttttaaaatgtatttcataggatttttgttctctctctccctctttttgtgcatatgtgtgtgtgtctgattagtctttaytatcttaaaatggttagtcctgatagacctgtttcttcaaaatttctctcagttctttggcagtttgctcttagcttataattaaagatcaatttctgacttgtcttgttctagaaaacctcaatggaaattacagcaagctgaataggatattaattaaaaacataaacctggtgaaacccgaacatagaggctccagttcaaagatgcttccaatagttgacatggcccttcattccttaaaaccagctatttttcttttgaattacattacctttaattctgtaaattggatgttatatagtaccatgaaaactgctgtgagtaattataatactcattgctgagtgatgtgacttctttctcaaggctatttctgagggaaattgtacaattaga

SEQ ID NO: 194676 - DNA, 432 bp, Homo sapiens
gcttcttcttaaaaaaattaagtttttaaaatgtatttcataggatttttgttctctctctccctctttttgtgcatatgtgtgtgtgtctgattagtctttactatcttaaaatggttagtcctgatagacctgtttcttcaaaatttctctcagttctttggcagtttgctcttagcttataattaaagatcaatttctgacttgtcttgttctagaaaacctcaatggaaattacagcaagctgaataggatattaattaaaaacataaacctggtgaaacccgaacatagaggctccagttcaaagatgcttccaatagttgacatggcccttcattccttaaaaccagctatttttctttygaattacattacctttaattctgtaaattggatgttatatagtaccatgaaaactgctgtgagtaa

SEQ ID NO: 194677 - DNA, 557 bp, Homo sapiens
tccctcatcactactgtcatgatatgttcatttatgcaatacatatcaatgggttcaccccagtcaggctgactccaagaggctaagatgacttcaccttgggtggtttgcagctgggaaagaaaggcaagtcggcacygatcgaacagatcattcacttcagtgggctgtcgagctgtgctagaggcaggtgcagtgtgctgcagaaatacagatggtgactactaccctggagtcttggggagatcctggtgtgcattggtgtggggttggaaaggtgagttggcactcacccccttcaagaagaagtgggaaggacatttcagacaggggcaagtgcaaacgcacagggcctgaaagaactaggctgggagaagaggatggcattggaatgggtgggagaggggtctgctggggaaagctggggaggcaagagacgaggctggacaagcagattgtgaagggccacactgaggagctggggattagtacattaatttttattaattggattaatgattaataatgtgggtggcagggaatcatagggagtgtga

SEQ ID NO: 194678 - DNA, 557 bp, Homo sapiens
tccctcatcactactgtcatgatatgttcatttatgcaatacatatcaatgggttcaccccagtcaggctgactccaagaggctaagatgacttcaccttgggtggtttgcagctgggaaagaaaggcaagtcggcaccgatcgaacagatcattcacttcagtgggctgtcgagctgtgctagaggcaggtgcagtgtgctgcagaaatacagatggtgactactaccctggagtcttggggagatcctggtgtgcattggtgtggggttggaaaggtgagttggcactcacccccttcaagaagaagtgggaaggacatttcagrcaggggcaagtgcaaacgcacagggcctgaaagaactaggctgggagaagaggatggcattggaatgggtgggagaggggtctgctggggaaagctggggaggcaagagacgaggctggacaagcagattgtgaagggccacactgaggagctggggattagtacattaatttttattaattggattaatgattaataatgtgggtggcagggaatcatagggagtgtga

SEQ ID NO: 194679 - DNA, 557 bp, Homo sapiens
tccctcatcactactgtcatgatatgttcatttatgcaatacatatcaatgggttcaccccagtcaggctgactccaagaggctaagatgacttcaccttgggtggtttgcagctgggaaagaaaggcaagtcggcaccgatcgaacagatcattcacttcagtgggctgtcgagctgtgctagaggcaggtgcagtgtgctgcagaaatacagatggtgactactaccctggagtcttggggagatcctggtgtgcattggtgtggggttggaaaggtgagttggcactcacccccttcaagaagaagtgggaaggacatttcagacaggggcaagtgcaaasgcacagggcctgaaagaactaggctgggagaagaggatggcattggaatgggtgggagaggggtctgctggggaaagctggggaggcaagagacgaggctggacaagcagattgtgaagggccacactgaggagctggggattagtacattaatttttattaattggattaatgattaataatgtgggtggcagggaatcatagggagtgtga

SEQ ID NO: 194680 - DNA, 557 bp, Homo sapiens
tccctcatcactactgtcatgatatgttcatttatgcaatacatatcaatgggttcaccccagtcaggctgactccaagaggctaagatgacttcaccttgggtggtttgcagctgggaaagaaaggcaagtcggcaccgatcgaacagatcattcacttcagtgggctgtcgagctgtgctagaggcaggtgcagtgtgctgcagaaatacagatggtgactactaccctggagtcttggggagatcctggtgtgcattggtgtggggttggaaaggtgagttggcactcacccccttcaagaagaagtgggaaggacatttcagacaggggcaagtgcaaacgcacagggcctgaaagaactaggctgggagaagaggatggcattggaatggrtgggagaggggtctgctggggaaagctggggaggcaagagacgaggctggacaagcagattgtgaagggccacactgaggagctggggattagtacattaatttttattaattggattaatgattaataatgtgggtggcagggaatcatagggagtgtga

SEQ ID NO: 194681 - DNA, 217 bp, Homo sapiens
gaattccactttgccctccagcccaagcatcatattttccagacagycatttgccatgctgcccaccaaacaggctgtcccttgttctcatgccactgctgaacattgtttattccttgtgctaggcagggctctgtcagttgtaacaactgaaactccacttagacatgtttcagctgaagggtgacttattgatttttataactgcaaagaccat

SEQ ID NO: 194682 - DNA, 217 bp, Homo sapiens
gaattccactttgccctccagcccaagcatcatattttccagacagtcatttgccatgctgcccaccaaacaggctgtcccttgttctcatgccactgctgaacattgtttattccttgtgctaggcagggctytgtcagttgtaacaactgaaactccacttagacatgtttcagctgaagggtgacttattgatttttataactgcaaagaccat

SEQ ID NO: 194683 - DNA, 217 bp, Homo sapiens
gaattccactttgccctccagcccaagcatcatattttccagacagtcatttgccatgctgcccaccaaacaggctgtcccttgttctcatgccactgctgaacattgtttattccttgtgctaggcagggctctgtcagttgtaacaactgaaactccacttagacatgtttcagctraagggtgacttattgatttttataactgcaaagaccat

SEQ ID NO: 194684 - DNA, 579 bp, Homo sapiens
ttttccagacagtcatttgccatgctgcccaccaaacaggctgtcccttgttctcatgccactgctgaacattgtttattccttgtgctaggcagggctctgtcagttgtaacaactgaaactccacttagacatgtttcagctgaagggtgacttattgatttttataactgcaaagaccatggtatgcctgaatttggaggttcaagtaagttattttctctctctctctctctctcctcttcctctcctccttctcattttccttctctttttctttcctctcctccttccctccgttcttcttttccttctttttctctttctccctctctccttacttttttctctttctctccttttaatttgctctattctctatatgggyctcgttccttctactgcaaataaggaaaatgaccacctggaaacccaaaaggcccaccacatcccagcagagccaccccagctgaaagaaacccagcttctctctccagcttctacacatcaatccaggccagaactccatctgacccttgtgagacatgcttccacacctcggtggaccactgaggctcg

SEQ ID NO: 194685 - DNA, 579 bp, Homo sapiens
ttttccagacagtcatttgccatgctgcccaccaaacaggctgtcccttgttctcatgccactgctgaacattgtttattccttgtgctaggcagggctctgtcagttgtaacaactgaaactccacttagacatgtttcagctgaagggtgacttattgatttttataactgcaaagaccatggtatgcctgaatttggaggttcaagtaagttattttctctctctctctctctctcctcttcctctcctccttctcattttccttctctttttctttcctctcctccttccctccgttcttcttttccttctttttctctttctccctctctccttacttttttctctttctctccttttaatttgctctattctctatatgggcctcgttccttctactgcaaataaggaaaatgaccacctggaaacccaaaaggcccaccacatcccagcagagccaccccagctgaaagaaacccagcttctctctccagcttctacacatcaatccaggccagaactccatctgacccttgtgagacatgcttccacacctcrgtggaccactgaggctcg

SEQ ID NO: 194686 - DNA, 482 bp, Homo sapiens
caaaaaaccgaagttgaaggacaattataccaagtaactggccaggtaatcttcacaaaggtctgtgtcaagaaagacaaagcagcagaaactttcaaattacaggggacagctaaatgcaacacatggtcttggattgttttgttataaaggacattattgtgaagtctgaataaagtctgtagatgagaygagagaattccctgtttttaggaaatatgcaacaaaatattcaagagtaaatgggcatcacaccttagatgactcagaagaaaaagggaagaacagagataagtgatacagtgaaaccctgatgtttgggggatctgggtaaacaatatttagaaattctttgtaccgtgttgcaaggtttctgtaagtctgaaactatgtgagaacaagtgtttaaaaataaagcataaaatgtaaaacatctcttctgcaaattctttggcactcctcccatgaagaggtaaagtcta

SEQ ID NO: 194687 - DNA, 482 bp, Homo sapiens
caaaaaaccgaagttgaaggacaattataccaagtaactggccaggtaatcttcacaaaggtctgtgtcaagaaagacaaagcagcagaaactttcaaattacaggggacagctaaatgcaacacatggtcttggattgttttgttataaaggacattattgtgaagtctgaataaagtctgtagatgagacgagagaattccctgtttttaggaaatatgcaacaaaatattcaagagtaaatgggcatcacaccttagatgactcagaagaaaaagggaagaacagagataagtgatacagtgaaaccctgatgtttgggggatctgggtaaacaatrtttagaaattctttgtaccgtgttgcaaggtttctgtaagtctgaaactatgtgagaacaagtgtttaaaaataaagcataaaatgtaaaacatctcttctgcaaattctttggcactcctcccatgaagaggtaaagtcta

SEQ ID NO: 194688 - DNA, 482 bp, Homo sapiens
caaaaaaccgaagttgaaggacaattataccaagtaactggccaggtaatcttcacaaaggtctgtgtcaagaaagacaaagcagcagaaactttcaaattacaggggacagctaaatgcaacacatggtcttggattgttttgttataaaggacattattgtgaagtctgaataaagtctgtagatgagacgagagaattccctgtttttaggaaatatgcaacaaaatattcaagagtaaatgggcatcacaccttagatgactcagaagaaaaagggaagaacagagataagtgatacagtgaaaccctgatgtttgggggatctgggtaaacaatatttagaaattctttgtaccgtgttgcaaggtttctgtragtctgaaactatgtgagaacaagtgtttaaaaataaagcataaaatgtaaaacatctcttctgcaaattctttggcactcctcccatgaagaggtaaagtcta

SEQ ID NO: 194689 - DNA, 482 bp, Homo sapiens
caaaaaaccgaagttgaaggacaattataccaagtaactggccaggtaatcttcacaaaggtctgtgtcaagaaagacaaagcagcagaaactttcaaattacaggggacagctaaatgcaacacatggtcttggattgttttgttataaaggacattattgtgaagtctgaataaagtctgtagatgagacgagagaattccctgtttttaggaaatatgcaacaaaatattcaagagtaaatgggcatcacaccttagatgactcagaagaaaaagggaagaacagagataagtgatacagtgaaaccctgatgtttgggggatctgggtaaacaatatttagaaattctttgtaccgtgttgcaaggtttctgtaagtctgaaactatgtgagaacaagtgtttwaaaataaagcataaaatgtaaaacatctcttctgcaaattctttggcactcctcccatgaagaggtaaagtcta

SEQ ID NO: 194690 - DNA, 400 bp, Homo sapiens
tctgtgggggtgcagggtgcaaagttccctcatttaagaaccactgacctagggtgaaccgtggttccactacttacttttcacatgaccttggacaaacaaccttgtcctcaaggtcctctgtgcccccatgtcctcacctgtaaaatggaaaaataataacatgtgaggttaatgtgaggaataaataagaatccaggaaagcaattggcccatcatgtaagagctactttgcccataaccctagggtgccttccctccaaacacaaagctgtgcacagaggaggtacacagtgaagatctgctgttgtatagctgtggggatgaatcaattaaccatttcagtaayaaatgaacaaaaaactgaatgtcctgatctgtgcactagtgcatttgctga

SEQ ID NO: 194691 - DNA, 552 bp, Homo sapiens
ttgcacttgccactccctctgcctggattgctctccttcccagacattagcagccctccaatccttacttcatcaaggtctctcttcatgtggctctttggaaagtcctcccctgaccaccataaataaaacagcagcttcaccaccctactcaccctgggctttttgcaacatagcaattacccctgcctggcattatctatcctggtcagtacagcacagtgcaatgcagtgcagtatagtacagatctctttattggcttatctctcccmcagctcacataaatgttccaagagagcagagaatttgattgacaactatattcccagcatctagaacaatgcctagagcatagtacgtaattataatgaatggtgagtgatattttacagaaggaaattccaaagtcctcacataacccattttccataacacagaacttatttaaactggagcctagaacagtgtttttcacaaaagattttgcttatagcaacccatgctttagaacagaatattgtaaagacttccagatcagttagatttgagtt

SEQ ID NO: 194692 - DNA, 552 bp, Homo sapiens
ttgcacttgccactccctctgcctggattgctctccttcccagacattagcagccctccaatccttacttcatcaaggtctctcttcatgtggctctttggaaagtcctcccctgaccaccataaataaaacagcagcttcaccaccctactcaccctgggctttttgcaacatagcaattacccctgcctggcattatctatcctggtcagtacagcacagtgcaatgcagtgcagtatagtacagatctctttattggcttatctctcccacagctcacataaatgttccaagagagcagagaatttgattgacaactatattcccagcatctagaacaatgcctagagcatagtacgtaattataatgaatggtgagtgatattttacagaaggaaattccaaagtcctcacataacccattttccataacacagaacttatttaaactggagcctagaacagtgtttttcacaaaagattttgcttatagcaacccatgctttagaacrgaatattgtaaagacttccagatcagttagatttgagtt

SEQ ID NO: 194693 - DNA, 592 bp, Homo sapiens
tgtaccgaataggatttgctttcaatctcactattccagaatagtcattcattcaacaaatatttattaagtacgatgtgccaggagctgcacattttgcagttggctgcacagaagactgacaataaaattagccttagagagatcaaaattgattgaactgtccttgataaaactgcttcaaakcagggacttgcaagaaattgcatattcacatttcatttgcttccattaatagtgctcatatttagatctgatggtaatactatgctctcaactggtgtgggtctggaataaaacactccccttgactgtgcacactgcagagaggaaaaacaaaatgattggagtcagctgggcttttctattgagcacctcgacctacagattttccaatttcaagttcattcacatttcatctctggcttctacattttagttaaaaagcatttctctatttgctattgtccactaaggaaaatgcctatttaaaaatagatttcttttttaaagcatcttgattcacacatttcaaagcccttcagaaaacaggatttctcaaaagccatgtgattctaaaacatgctacaga

SEQ ID NO: 194694 - DNA, 592 bp, Homo sapiens
tgtaccgaataggatttgctttcaatctcactattccagaatagtcattcattcaacaaatatttattaagtacgatgtgccaggagctgcacattttgcagttggctgcacagaagactgacaataaaattagccttagagagatcaaaattgattgaactgtccttgataaaactgcttcaaagcagggacttgcaagaaattgcatattcacatttcatttgcttccattaatagtgctcatatttagatctgatggtaatamtatgctctcaactggtgtgggtctggaataaaacactccccttgactgtgcacactgcagagaggaaaaacaaaatgattggagtcagctgggcttttctattgagcacctcgacctacagattttccaatttcaagttcattcacatttcatctctggcttctacattttagttaaaaagcatttctctatttgctattgtccactaaggaaaatgcctatttaaaaatagatttcttttttaaagcatcttgattcacacatttcaaagcccttcagaaaacaggatttctcaaaagccatgtgattctaaaacatgctacaga

SEQ ID NO: 194695 - DNA, 592 bp, Homo sapiens
tgtaccgaataggatttgctttcaatctcactattccagaatagtcattcattcaacaaatatttattaagtacgatgtgccaggagctgcacattttgcagttggctgcacagaagactgacaataaaattagccttagagagatcaaaattgattgaactgtccttgataaaactgcttcaaagcagggacttgcaagaaattgcatattcacatttcatttgcttccattaatagtgctcatatttagatctgatggtaatactatgctctcaactggtgtgggtctggaataaaacactccccttgactgtgcacactgcagagaggaaaaacaaaatgattggagtcagytgggcttttctattgagcacctcgacctacagattttccaatttcaagttcattcacatttcatctctggcttctacattttagttaaaaagcatttctctatttgctattgtccactaaggaaaatgcctatttaaaaatagatttcttttttaaagcatcttgattcacacatttcaaagcccttcagaaaacaggatttctcaaaagccatgtgattctaaaacatgctacaga

SEQ ID NO: 194696 - DNA, 460 bp, Homo sapiens
tctcaactggtgtgggtctggaataaaacactccccttgactgtgcacactgcagagaggaaaaacaaaatgattggagtcagctgggcttttctattgagcacctsgacctacagattttccaatttcaagttcattcacatttcatctctggcttctacattttagttaaaaagcatttctctatttgctattgtccactaaggaaaatgcctatttaaaaatagatttcttttttaaagcatcttgattcacacatttcaaagcccttcagaaaacaggatttctcaaaagccatgtgattctaaaacatgctacagatttcagatggagaaagattcaagatattattctacatgaacttttcaatgaactgatcgcatctgtctaggaataaggagagttgtctcatgttacttcaaaaaagattccaaatgaaaaaaaaaatctgggcttgaga

SEQ ID NO: 194697 - DNA, 453 bp, Homo sapiens
tctcaactggtgtgggtctggaataaaacactccccttgactgtgcacactgcagagaggaaaaacaaaatgattggagtcagctgggcttttctattgagcacctcgacctacagattttccartttcaagttcattcacatttcatctctggcttctacattttagttaaaaagcatttctctatttgctattgtccactaaggaaaatgcctatttaaaaatagatttcttttttaaagcatcttgattcacacatttcaaagcccttcagaaaacaggatttctcaaaagccatgtgattctaaaacatgctacagatttcagatggagaaagattcaagatattattctacatgaacttttcaatgaactgatcgcatctgtctaggaataaggagagttgtctcatgttacttcaaaaaagattccaaatgaaaaaaaaaatctggg

SEQ ID NO: 194698 - DNA, 460 bp, Homo sapiens
tctcaactggtgtgggtctggaataaaacactccccttgactgtgcacactgcagagaggaaaaacaaaatgattggagtcagctgggcttttctattgagcacctcgacctacagattttccaatttcaagttcattcacatttcatctctggcttctacattttagttaaaaagcatttctctatttgctattgtccactaaggaaaatgcctatttaaaaatrgatttcttttttaaagcatcttgattcacacatttcaaagcccttcagaaaacaggatttctcaaaagccatgtgattctaaaacatgctacagatttcagatggagaaagattcaagatattattctacatgaacttttcaatgaactgatcgcatctgtctaggaataaggagagttgtctcatgttacttcaaaaaagattccaaatgaaaaaaaaaatctgggcttgaga

SEQ ID NO: 194699 - DNA, 394 bp, Homo sapiens
gggtctggaataaaacactccccttgactgtgcacactgcagagaggaaaaacaaaatgattggagtcagctgggcttttctattgagcacctcgacctacagattttccaatttcaagttcattcacatttcatctctggcttctacattttagttaaaaagcatttctctatttgctattgtccactaaggaaaatgcctatttaaaaatagrtttcttttttaaagcatcttgattcacacatttcaaagcccttcagaaaacaggatttctcaaaagccatgtgattctaaaacatgctacagatttcagatggagaaagattcaagatattattctacatgaacttttcaatgaactgatcgcatctgtctaggaataaggagagttgt

SEQ ID NO: 194700 - DNA, 394 bp, Homo sapiens
gggtctggaataaaacactccccttgactgtgcacactgcagagaggaaaaacaaaatgattggagtcagctgggcttttctattgagcacctcgacctacagattttccaatttcaagttcattcacatttcatctctggcttctacattttagttaaaaagcatttctctatttgctattgtccactaaggaaaatgcctatttaaaaatagatttcttttttaaagcatcttgattcacacatttcaaagcccttcagaaaacaggatttctcaaaagccakgtgattctaaaacatgctacagatttcagatggagaaagattcaagatattattctacatgaacttttcaatgaactgatcgcatctgtctaggaataaggagagttgt

SEQ ID NO: 194701 - DNA, 542 bp, Homo sapiens
aaatgtcttctttgcattttaaggatgcactcatcgtttcttcagaagcaatcctgaaacccagtgtagcaaagcaaagatagtcaccacataatacaaataatctgtgtttattagataccagaataaatcagggagacttcttaagctatggtaaagagacccccaccagcacagagagaagaaatgacacaagcacaaagccacgggaatccagacccaggaaagstgtgctcccaccacatcactgcatacacacaaaacctgctgtttaaaaatcaattcaaacacaaacaagtgactgaaaaagccatttgtttaaaaagggaggggagagcatattttttaaggaccaagtatctttttttttttttttttttttaaggagccagcaccatactctcttctctcacaggatcattgttccatctctggtaggctgggtacatttgactgagtttattgcaactgcttctgccaattctttgaactatcaatcaatggggtgaggtttctaagcacaccagctactacacagaaac

SEQ ID NO: 194702 - DNA, 542 bp, Homo sapiens
aaatgtcttctttgcattttaaggatgcactcatcgtttcttcagaagcaatcctgaaacccagtgtagcaaagcaaagatagtcaccacataatacaaataatctgtgtttattagataccagaataaatcagggagacttcttaagctatggtaaagagacccccaccagcacagagagaagaaatgacacaagcacaaagccacgggaatccagacccaggaaagctgtgctcccaccacatcactgcayacacacaaaacctgctgtttaaaaatcaattcaaacacaaacaagtgactgaaaaagccatttgtttaaaaagggaggggagagcatattttttaaggaccaagtatctttttttttttttttttttttaaggagccagcaccatactctcttctctcacaggatcattgttccatctctggtaggctgggtacatttgactgagtttattgcaactgcttctgccaattctttgaactatcaatcaatggggtgaggtttctaagcacaccagctactacacagaaac

SEQ ID NO: 194703 - DNA, 504 bp, Homo sapiens
ttgaccgatatatctaaaatattaccatttcaacatgtaatatgyaattatgtgctgtattttatgtttgcaggacatctcagttcagactaactacattgcagatcccaagtgtgtgtcattaaaatagtgatagatttgtggtgtacatacctataatattatcatttatagtttcttgattagaattctgcataatcaagtcttactaagacaggtttattatattttctcattacttcttggtccaaaggaattctacctctaaagagagaatgagttgaataataaaatgtcatgactccattttgctgtagtatcttagcattaatatttggaattgttattctagaccttagcaaaaatatatgttttgattatgaattttctgaagctttccagttaagtgtaaaacaagtgaaaaatataacttcgtattttgtgtattttgctttttataggtgtctactgcagatatttcatcaaataaggatgatgaagaaa

SEQ ID NO: 194704 - DNA, 518 bp, Homo sapiens
gtgctgtattttatgtttgcaggacatctcagttcagactaactacattgcagatcccaagtgtgtgtcattaaaatagtgatagatttgtggtgtacatacctataatattatcatttatagtttcttgattagaattctgcataatcaagtcttactaagacaggtttattatattttctcattacttcttggtccaaaggaattctacctctaaagagagaatgagttgaataataaaatgtcatgactccattttgctgtagtatcttagcattaatatttggaatygttattctagaccttagcaaaaatatatgttttgattatgaattttctgaagctttccagttaagtgtaaaacaagtgaaaaatataacttcgtattttgtgtattttgctttttataggtgtctactgcagatatttcatcaaataaggatgatgaagaaaactctgtgctcgatatggttgtgttgttttctagcagtgacaaattcactttgaatcaggtttga

SEQ ID NO: 194705 - DNA, 504 bp, Homo sapiens
ttgaccgatatatctaaaatattaccatttcaacatgtaatatgtaattatgtgctgtattttatgtttgcaggacatctcagttcagactaactacattgcagatcccaagtgtgtgtcattaaaatagtgatagatttgtggtgtacatacctataatattatcatttatagtttcttgattagaattctgcataatcaagtcttactaagacaggtttattatattttctcattacttcttggtccaaaggaattctacctctaaagagagaatgagttgaataataaaatgtcatgactccattttgctgtagtatcttagcattaatatttggaattgttattctagaccttagcaaaaatatatgttttgattatgaattttctgaagctttccagttaagtgtaaaacaagtgaaaaatataayttcgtattttgtgtattttgctttttataggtgtctactgcagatatttcatcaaataaggatgatgaagaaa

SEQ ID NO: 194706 - DNA, 517 bp, Homo sapiens
ttattctagaccttagcaaaaatatatgttttgattatgaattttctgaagctttccagttaagtgtaaaacaagtgaaaaatataacttcgtattttgtgtattttgctttttataggtgtctactgcagatatttcatcaaataaggatgatgaagaaaactctrtgctcgatatggttgtgttgttttctagcagtgacaaattcactttgaatcaggtttgaacttgacaatttactgtcttcctcattgaattcctccttgcacatttctgctttatctcatatacacagaagtgatccaatatttagctatagagctatattagttaagaaggtatttttaaagtaaaatttgtaggtttttagcttagtctccatttaaaatatgttctgttttcttaacttcaggatacatgtgtagtttgtggcagttttggccaaggagcagaaggaagattacttgcctgttctcagtgtggtcagtgttaccatccatactgtgtcagtattaag

SEQ ID NO: 194707 - DNA, 517 bp, Homo sapiens
ttattctagaccttagcaaaaatatatgttttgattatgaattttctgaagctttccagttaagtgtaaaacaagtgaaaaatataacttcgtattttgtgtattttgctttttataggtgtctactgcagatatttcatcaaataaggatgatgaagaaaactctgtgctcgatatggttgtgttgttttctagcagtgacaaattcactttgaatcaggtttgaacttgacaatttactgtcttcctcattgaattcctccttgcacatttctgctttatctcatatacacagaagtgatccaatatttagctatagagctatattagttaagaaggtatttttaaagtaaaatttgtaggtttttagcttagtctccatttaaaatatgttctgttttcttaacttcaggatacrtgtgtagtttgtggcagttttggccaaggagcagaaggaagattacttgcctgttctcagtgtggtcagtgttaccatccatactgtgtcagtattaag

SEQ ID NO: 194708 - DNA, 398 bp, Homo sapiens
aatatgttctgttttcttaacttcaggatacatgtgtagtttgtggcagttttggccaaggagcagaaggaagattacttgcctgttctcagtgtggtcagtgttaccatccatactgtgtcagtattaaggtaaacatccttaaactgagttaacaaatatgtattgaatttttatttggttttagtagtaacatgagctcccagttctcacaattaagtattatgattattaaacatatgtgacagtatttaagyactttaaatactgcttttaagggtttcctatctcaagaaatttgctcctctataaatcttatattgtactaatatcctgcttttgtcttgaaaaagtaaaacataaaaatatatgcatttaatttaaaagacaatttatac

SEQ ID NO: 194709 - DNA, 551 bp, Homo sapiens
gtgtggttccttttacatgacactgttttggacagtatagaatactgcagtctcattgagaaatacagcartatctagaaatatactagggatatatgaattggctcagcttgcatttttattgcaggaggcaattgtttgtggataagtttgatacctttgaagcttctttttaagcttgctggggcaagtctagaaagccttcactctaaggtggatattttcaaactttatggttttagaaccttaacactctttaaaattactggggacgccatagtttttgttcatgaggattttaactatggactattcagcattttagaaattaaaactaggaacattttgtaacacaagactacagaagcacaacctgtacaatgtcaatgtaatattatgatacaacatgtagcttctataaacaccactgtataattgtgaataaattaaagtgaaaaaaggcaaattaaatcttagtattatttaaacttgttttaactttacagacccactggggttccctagtccacattttggtagctgcagtccta

SEQ ID NO: 194710 - DNA, 509 bp, Homo sapiens
aaactttatggttttagaaccttaacactctttaaaattactggggacgccatagtttttgttcatgaggattttaactatsgactattcagcattttagaaattaaaactaggaacattttgtaacacaagactacagaagcacaacctgtacaatgtcaatgtaatattatgatacaacatgtagcttctataaacaccactgtataattgtgaataaattaaagtgaaaaaaggcaaattaaatcttagtattatttaaacttgttttaactttacagacccactggggttccctagtccacattttggtagctgcagtcctagcattagtttaaccctatacttaagacttggcctttctgggatcactactgaattctaccccctgttcaccagtgtctttgtactctgactggttgtgcttcacttgtctttgagccttttgcaagctctggtaattgtgcagcttacacattcccagtagatgtactttcccctggttgtgg

SEQ ID NO: 194711 - DNA, 509 bp, Homo sapiens
aaactttatggttttagaaccttaacactctttaaaattactggggacgccatagtttttgttcatgaggattttaactatggactattcagcattttagaaattaaaactaggaacattttgtaacacargactacagaagcacaacctgtacaatgtcaatgtaatattatgatacaacatgtagcttctataaacaccactgtataattgtgaataaattaaagtgaaaaaaggcaaattaaatcttagtattatttaaacttgttttaactttacagacccactggggttccctagtccacattttggtagctgcagtcctagcattagtttaaccctatacttaagacttggcctttctgggatcactactgaattctaccccctgttcaccagtgtctttgtactctgactggttgtgcttcacttgtctttgagccttttgcaagctctggtaattgtgcagcttacacattcccagtagatgtactttcccctggttgtgg

SEQ ID NO: 194712 - DNA, 517 bp, Homo sapiens
ggtggatattttcaaactttatggttttagaaccttaacactctttaaaattactggggacgccatagtttttgttcatgaggattttaactatggactattcagcattttagaaattaaaactaggaacattttgtaacacaagactacagaagcacaacctgtacaatgtcaatgtaatattatgatacaacatgtagcttctataaacaccactgtatmattgtgaataaattaaagtgaaaaaaggcaaattaaatcttagtattatttaaacttgttttaactttacagacccactggggttccctagtccacattttggtagctgcagtcctagcattagtttaaccctatacttaagacttggcctttctgggatcactactgaattctaccccctgttcaccagtgtctttgtactctgactggttgtgcttcacttgtctttgagccttttgcaagctctggtaattgtgcagcttacacattcccagtagatgtactttcccctggt

SEQ ID NO: 194713 - DNA, 363 bp, Homo sapiens
tggatattttcaaactttatggttttagaaccttaacactctttaaaattactggggacgccatagtttttgttcatgaggattttaactatggactattcagcattttagaaattaaaactaggaacattttgtaacacaagactacagaagcacaacctgtacaatgtcaatgtaatattatgatacaacatgtagcttctataaacaccactgtataattgtgaataaattaaagtgaaaaaaggcaaattaaatcttagtattatttaaayttgttttaactttacagacccactggggttccctagtccacattttggtagctgcagtcctagcattagtttaaccctatacttaaga

SEQ ID NO: 194714 - DNA, 613 bp, Homo sapiens
attaaaactaggaacattttgtaacacaagactacagaagcacaacctgtacaatgtcaatgtaatattatgatacaacatgtagcttctataaacaccactgtataattgtgaataaattaaagtgaaaaaaggcaaattaaatcttagtattatttaaacttgttttaactttacagacccactggggttccctagtccacattttggtagctgcagtcctagcattagtttaaccctatacttaagacttggcctttctgggatcactactgaattctaccccctgttcaccagtgtctttgtactctgactggttgtgcttcacttgtctttgagccttttgcaagctctggtaattgtgcagyttacacattcccagtagatgtactttcccctggttgtgggtctttgggcttctagaagtacggcttggtgttccaccaaagacttcaggggatcctttgtagatttctggagctcttagtccttattgcttcttcattttgagtactgtgtcctgcaaattccactgcctcgcctcccctaacctcagcgaggccattgattgtactctgctgaggttctccctccctgggcagcattctggaaa

SEQ ID NO: 194715 - DNA, 509 bp, Homo sapiens
aaactttatggttttagaaccttaacactctttaaaattactggggacgccatagtttttgttcatgaggattttaactatggactattcagcattttagaaattaaaactaggaacattttgtaacacaagactacagaagcacaacctgtacaatgtcaatgtaatattatgatacaacatgtagcttctataaacaccactgtataattgtgaataaattaaagtgaaaaaaggcaaattaaatcttagtattatttaaacttgttttaactttacagacccactggggttccctagtccacattttggtagctgcagtcctagcattagtttaaccctatacttaagacttggcctttctgggatcactactgaattctaccccctgttcaccagtgtctttgtactctgactggttgtgcttcacttgtctttgagccttttgcaagctctggtaattgtgcagcttacamattcccagtagatgtactttcccctggttgtgg

SEQ ID NO: 194716 - DNA, 585 bp, Homo sapiens
aataagaaggtcttgacaagcctggcttaagcagttatgagtggatgtgggtgtagagaccagactgtagtgttttgaagagtgaatataagcggagaaacttgagagtttggttgtaaaagggaccacaggtatctgtgaagaaaacttagtaggaatgaagataaatattttaaaaattctgccactaaacacctcagatctgtctgccactttgtcttcaggtcattgtttaagccagggtcaggcagactggcccatagactaaatctggcccatttcctgtgtttgcaaataaacttttattgaaatatggccaagttcttttgtttacatatatttgtagcggtttttgcattacactggcagagtttttrtaaagttgcaacagatcatatggccctcaaaactttctgtttactctctggccctttattggaaatgtttgctggctactgctctaagccaccctgatcttaccccaggccatttccttcatttgggcaaataatatactaacttggtaatctaagacaaattcttaaaaatcaataagctaatcaaaataataaatatacatgttta

SEQ ID NO: 194717 - DNA, 581 bp, Homo sapiens
tagttcaattaataaggtgttggttatgactcagtaaatgttcactgcagatctaaacagtatactatgagtttcttttgtctttcatggagtttttaataacaagaaagtaatagtgactctccattcgtactttgtttttgcctactatagaactatcatataagattattttttaaagtactgtttttttctgggagaagtcctaccctctttctagacattcccttctcctgctctgatatgtgccagtggcttctgggtgtgttgttctcatccttaaacttccctggcctgatgtcctttgtcggatctgttgatttatagatcccaagtcttccttttctttgtaatacatcctcattctgttctgcatatctctaagtaactttattagaaggagaatgaaggagctgaattttgagtcttcctgtgtctacaacgtattctgtcttcacacatagttgcttgtgtagctaggttgagaattgtactttgaaaagtattttcctgtagaattggaarattatactcttctagcatctggagttgggaagttttgtgccattctgatgggtgtt

SEQ ID NO: 194718 - DNA, 538 bp, Homo sapiens
atggtgtggcttccttcaggagtttgttagggatttggaaattcccaaatattctgctaacttatacccttgagagaggggagaataaacagaggrgtgaatgtgaacttcagaattcctagcttcatagtctaaatagaaatcttctaagatcataaaatgtccctaagaactcatgctttacattattttttttggtattttttctattgattctaagcatggaaatgtagatggagattttgttgatgtattttcaaattatgtatcaataatagtgaagcttacttgatttctttaaaatctggtcactatatctataaatacagtggacattaaatgtacagcataaggtaattatgtggactttaaaaaggcattaaaatatgtgccattttctattattctgctcagtagcctcctaaaagcgtgtatgaacatgcccaacccagtattgggcctccgtaggcgctcaataaatgttagttgattgcccctttctgcttctaggtacataagcaccatattaatttatata

SEQ ID NO: 194719 - DNA, 538 bp, Homo sapiens
atggtgtggcttccttcaggagtttgttagggatttggaaattcccaaatattctgctaacttatacccttgagagaggggagaataaacagaggagtgaatgtgaacttcagaattcctagcttcatagtctaaatagaaatcttctaagatcataaaatgtccctaagaactcatgctttacattawtttttttggtattttttctattgattctaagcatggaaatgtagatggagattttgttgatgtattttcaaattatgtatcaataatagtgaagcttacttgatttctttaaaatctggtcactatatctataaatacagtggacattaaatgtacagcataaggtaattatgtggactttaaaaaggcattaaaatatgtgccattttctattattctgctcagtagcctcctaaaagcgtgtatgaacatgcccaacccagtattgggcctccgtaggcgctcaataaatgttagttgattgcccctttctgcttctaggtacataagcaccatattaatttatata

SEQ ID NO: 194720 - DNA, 527 bp, Homo sapiens
attgattctaagcatggaaatgtagatggagattttgttgatgtattttcaaattatgtatcaataatagtgaagcttacttgatttctttaaaatctggtcactatatctataaatayagtggacattaaatgtacagcataaggtaattatgtggactttaaaaaggcattaaaatatgtgccattttctattattctgctcagtagcctcctaaaagcgtgtatgaacatgcccaacccagtattgggcctccgtaggcgctcaataaatgttagttgattgcccctttctgcttctaggtacataagcaccatattaatttatatagtatatttgattatgttaggttaatgcataaatcacatggattggttgtttcttttacagatcactaaagtggttcttagcaaaggttggaggtgtcttgagtgcactgtgtgtgaggcctgtgggaaggcaactgacccaggaagattcctgctgtgtgatgattgtgacataagttatcacacctactgcctaga

SEQ ID NO: 194721 - DNA, 527 bp, Homo sapiens
attgattctaagcatggaaatgtagatggagattttgttgatgtattttcaaattatgtatcaataatagtgaagcttacttgatttctttaaaatctggtcactatatctataaatacagtggacattaaatgtacagcataaggtaattatgtggactttaaaaaggcattaaaatatgtgccattttctattattctgctcagtagcctcctaaaagcgtgtatgaacatgcccaacccagtattgggcctccgtaggcgctcaataaatgttagttgattgcccctttctgcttctaggtacataagcaccatattaatttatatagtatatttgattatgttaggttaatgcataaatcacatggattggttgtttcttttacagatcactaaagtggttcttagcaaaggttggaggtgtcttgagtgcactgtgtgtgaggcctgtgggaaggcaamtgacccaggaagattcctgctgtgtgatgattgtgacataagttatcacacctactgcctaga

SEQ ID NO: 194722 - DNA, 657 bp, Homo sapiens
gcttttaagtttgatgactcagtgttacaggttttaaaaggtagcagttctcagtatattccattttttttaaaaaaatgtacaaatatggtctttttagatggatgcatgcagttcgtcagaacttaaatactgaggaagaagtggaaaatgtagcagacattggttttgattgyaacatgtgcagaccctatatgcctgcgtctaatggtaagagaataatttaaactgtgagtctgcactcttgtaccactcacttgcaccttactgtccataaccaatgaattagcttagctctactctattttgtctttgtgaaacttactttgacaagtattttatgaaaaatattattgttggttatacatgacttatcacaacttgttataaaacaatttacatgaaacaataaaaagcatatactttagatgtaaactataattttgcttccaaggaacatgatcttgtagttattgacaatatgttaaaatccaatgtgttgattctttcttagccaggttttcctccatgacttgagtatttccttcatcacttcttgttttgttgttgctttaaaaagtgcttttaactttagtgttcaaacatttattttaataaaatgagtatagaaacagaaattttaatcatatgtaagta

SEQ ID NO: 194723 - DNA, 657 bp, Homo sapiens
gcttttaagtttgatgactcagtgttacaggttttaaaaggtagcagttctcagtatattccattttttttaaaaaaatgtacaaatatggtctttttagatggatgcatgcagttcgtcagaacttaaatactgaggaagaagtggaaaatgtagcagacattggttttgattgtaacatgtgcagaccctatatgcctgcgtctaatggtaaragaataatttaaactgtgagtctgcactcttgtaccactcacttgcaccttactgtccataaccaatgaattagcttagctctactctattttgtctttgtgaaacttactttgacaagtattttatgaaaaatattattgttggttatacatgacttatcacaacttgttataaaacaatttacatgaaacaataaaaagcatatactttagatgtaaactataattttgcttccaaggaacatgatcttgtagttattgacaatatgttaaaatccaatgtgttgattctttcttagccaggttttcctccatgacttgagtatttccttcatcacttcttgttttgttgttgctttaaaaagtgcttttaactttagtgttcaaacatttattttaataaaatgagtatagaaacagaaattttaatcatatgtaagta

SEQ ID NO: 194724 - DNA, 657 bp, Homo sapiens
gcttttaagtttgatgactcagtgttacaggttttaaaaggtagcagttctcagtatattccattttttttaaaaaaatgtacaaatatggtctttttagatggatgcatgcagttcgtcagaacttaaatactgaggaagaagtggaaaatgtagcagacattggttttgattgtaacatgtgcagaccctatatgcctgcgtctaatggtaagagaataatttaaactgtgagtctgcactcttgtaccactcacttgcaccttactgtccataaccaatgaattagcttagctctactctattttgtctttgtgaaacttactttgacaagtattttatgaaaaatattattgttgrttatacatgacttatcacaacttgttataaaacaatttacatgaaacaataaaaagcatatactttagatgtaaactataattttgcttccaaggaacatgatcttgtagttattgacaatatgttaaaatccaatgtgttgattctttcttagccaggttttcctccatgacttgagtatttccttcatcacttcttgttttgttgttgctttaaaaagtgcttttaactttagtgttcaaacatttattttaataaaatgagtatagaaacagaaattttaatcatatgtaagta

SEQ ID NO: 194725 - DNA, 645 bp, Homo sapiens
acattcccttgacatgggtattttggaacagtaatcagtcaaatttaaaatgaaagtttaaatttgtattcttgggattttgtaattttagacccacccaagacttatacccaggatggtgtgtgtttgactgaatcagggaagactcagttacagagcctcacagttacagttccaagaagaaaactgtcaaaaccaaaactgaaattgaagattataaatcagaatagcgtggccrtccttcagacccctccagacatccaatcagaacattcaagggatggtgatatggatgatagtcgaggtaatactaatttattttccgtgaaatatgtgtgcaagaattacagcatataaagtaacttttgaaatatgtgtatggtttaccaaagggtaaatcacactgacttagataaccccgatgtgacccttgccatctccaaatgagtgatcttcttagaccttgccttttcgggttctcttcctttcacacattttagaacagacctaccttacagaaatctcaaggagcaccatatctttgaagatcacaggtggggaaatacagaggtcttgactttagtttgctagataacgacacaaaccttctcagatactgtgagcttggataataccatgtttaag

SEQ ID NO: 194726 - DNA, 326 bp, Homo sapiens
tgttatccaaaacaaatatttttctttgttyttaaacatctacttccatctacttatctacttatttttacttttatttgtaacttaattccatcaaggagagagagtgcattttctgttatgctaaatttttgaagaatgtattgatattttatgacctgatatatggatgatatgtagatattacatgtttgtattatcaaatttcagggtgataataaaataaatacttataatatttatattgtcactgtatattagttattttctttcttcactacaggagtttttcaacctataggctatgtttcaattctaggttatcc

SEQ ID NO: 194727 - DNA, 558 bp, Homo sapiens
tgttatgtgtattttaccacaataaaaaaaataaaataccttaggaacattttcatgaaaaagcccacataaaattcattttaatgcacgtgtttatgcatagctttctatttttctcttttctctttatattccaaattctaatcagagaagggaatcccctctgtacctccaggatattcagtaaagaccactggaggtycatgccctagtgacagtgctcatttagctccaaattacagatggctctagactaactcaacaaagtttaaagagaagatttaaaacaacagacaaatactcatcctgaagttactgaactgcctgtcacaacattattcaaaggtagccaataaaatctagatattcaatagcataacatcaaaatacccaaaaaaaactctgaaatgcaaagaagctgtaagacatatataattaaaatatatattaacaggataaaaataagtcatttataaatgacagaaaagaaggaaatttcaagatccttaaagtaaatatattttataaatacatatagataaatacatatatatgtca

SEQ ID NO: 194728 - DNA, 406 bp, Homo sapiens
catttttgaacctcgatgcttgaagtgtagcttgggtaacagatgggctttaagmcaattttggcatgcaaggggttgagtttattaggcatcagcaccgctgaaaatcgtggggatgcaggcttaatttcaacactattctaaatacttgaaagatattatataagtctttaataaactcctgtgtctacaaatggttcacattaactcaatatccatgatgaaacatctataaaatcaaggcactgttatttagtggagacttgctggctattctatgagaggaggtattgttattgtaatctcatcatctcataaaattgtatcatattactcataaccagcccttcatattctattcctattttggtattttaaaataagatatctttgaaattcttgaatt

SEQ ID NO: 194729 - DNA, 409 bp, Homo sapiens
aattcctcaaactcttgcatattcaaaatcacatttttgaacctcgatgcttgaagtgtagcttgggtaacagatgggctttaagccaattttggcatgcaaggggytgagtttattaggcatcagcaccgctgaaaatcgtggggatgcaggcttaatttcaacactattctaaatacttgaaagatattatataagtctttaataaactcctgtgtctacaaatggttcacattaactcaatatccatgatgaaacatctataaaatcaaggcactgttatttagtggagacttgctggctattctatgagaggaggtattgttattgtaatctcatcatctcataaaattgtatcatattactcataaccagcccttcatattctattcctattttggtattttaa

SEQ ID NO: 194730 - DNA, 383 bp, Homo sapiens
aattcctcaaactcttgcatattcaaaatcacatttttgaacctcgatgcttgaagtgtagcttgggtaacagatgggctttaagccaattttggcatgcaaggggttgagtttattaggcatcagcaccgctgaaaatcgtggggatgcaggcttaattkcaacactattctaaatacttgaaagatattatataagtctttaataaactcctgtgtctacaaatggttcacattaactcaatatccatgatgaaacatctataaaatcaaggcactgttatttagtggagacttgctggctattctatgagaggaggtattgttattgtaatctcatcatctcataaaattgtatcatattactcataaccagcccttcat

SEQ ID NO: 194731 - DNA, 411 bp, Homo sapiens
tgaattcctcaaactcttgcatattcaaaatcacatttttgaacctcgatgcttgaagtgtagcttgggtaacagatgggctttaagccaattttggcatgcaaggggttgagtttattaggcatcagcaccgctgaaaatcgtggggatgcaggcttaatttcaacactattctaaatacttgaaagatattatataagtctttaataaactcctgtgtctacaaatggttcacattaactcaatatccatgatkaaacatctataaaatcaaggcactgttatttagtggagacttgctggctattctatgagaggaggtattgttattgtaatctcatcatctcataaaattgtatcatattactcataaccagcccttcatattctattcctattttggtattttaa

SEQ ID NO: 194732 - DNA, 410 bp, Homo sapiens
gaattcctcaaactcttgcatattcaaaatcacatttttgaacctcgatgcttgaagtgtagcttgggtaacagatgggctttaagccaattttggcatgcaaggggttgagtttattaggcatcagcaccgctgaaaatcgtggggatgcaggcttaatttcaacactattctaaatacttgaaagatattatataagtctttaataaactcctgtgtctacaaatggttcacattaactcaatatccatgatgaaacatctataaaatcaaggcactgttatttagtggagacttgctggctattctatgagaggaggtattgttattgtamtctcatcatctcataaaattgtatcatattactcataaccagcccttcatattctattcctattttggtattttaa

SEQ ID NO: 194733 - DNA, 409 bp, Homo sapiens
aattcctcaaactcttgcatattcaaaatcacatttttgaacctcgatgcttgaagtgtagcttgggtaacagatgggctttaagccaattttggcatgcaaggggttgagtttattaggcatcagcaccgctgaaaatcgtggggatgcaggcttaatttcaacactattctaaatacttgaaagatattatataagtctttaataaactcctgtgtctacaaatggttcacattaactcaatatccatgatgaaacatctataaaatcaaggcactgttatttagtggagacttgctggctattctatgagaggaggtattgttattgtaatctcrtcatctcataaaattgtatcatattactcataaccagcccttcatattctattcctattttggtattttaa

SEQ ID NO: 194734 - DNA, 411 bp, Homo sapiens
tgaattcctcaaactcttgcatattcaaaatcacatttttgaacctcgatgcttgaagtgtagcttgggtaacagatgggctttaagccaattttggcatgcaaggggttgagtttattaggcatcagcaccgctgaaaatcgtggggatgcaggcttaatttcaacactattctaaatacttgaaagatattatataagtctttaataaactcctgtgtctacaaatggttcacattaactcaatatccatgatgaaacatctataaaatcaaggcactgttatttagtggagacttgctggctattctatgagaggaggtattgttattgtaatctcatcmtctcataaaattgtatcatattactcataaccagcccttcatattctattcctattttggtattttaa

SEQ ID NO: 194735 - DNA, 411 bp, Homo sapiens
tgaattcctcaaactcttgcatattcaaaatcacatttttgaacctcgatgcttgaagtgtagcttgggtaacagatgggctttaagccaattttggcatgcaaggggttgagtttattaggcatcagcaccgctgaaaatcgtggggatgcaggcttaatttcaacactattctaaatacttgaaagatattatataagtctttaataaactcctgtgtctacaaatggttcacattaactcaatatccatgatgaaacatctataaaatcaaggcactgttatttagtggagacttgctggctattctatgagaggaggtattgttattgtaatctcatcatctcataaaaktgtatcatattactcataaccagcccttcatattctattcctattttggtattttaa

SEQ ID NO: 194736 - DNA, 383 bp, Homo sapiens
aattcctcaaactcttgcatattcaaaatcacatttttgaacctcgatgcttgaagtgtagcttgggtaacagatgggctttaagccaattttggcatgcaaggggttgagtttattaggcatcagcaccgctgaaaatcgtggggatgcaggcttaatttcaacactattctaaatacttgaaagatattatataagtctttaataaactcctgtgtctacaaatggttcacattaactcaatatccatgatgaaacatctataaaatcaaggcactgttatttagtggagacttgctggctattctatgagaggaggtattgttattgtaatctcatcatctcataaaattgtatcayattactcataaccagcccttcat

SEQ ID NO: 194737 - DNA, 410 bp, Homo sapiens
gaattcctcaaactcttgcatattcaaaatcacatttttgaacctcgatgcttgaagtgtagcttgggtaacagatgggctttaagccaattttggcatgcaaggggttgagtttattaggcatcagcaccgctgaaaatcgtggggatgcaggcttaatttcaacactattctaaatacttgaaagatattatataagtctttaataaactcctgtgtctacaaatggttcacattaactcaatatccatgatgaaacatctataaaatcaaggcactgttatttagtggagacttgctggctattctatgagaggaggtattgttattgtaatctcatcatctcataaaattgtatcatattactcataamcagcccttcatattctattcctattttggtattttaa

SEQ ID NO: 194738 - DNA, 409 bp, Homo sapiens
aattcctcaaactcttgcatattcaaaatcacatttttgaacctcgatgcttgaagtgtagcttgggtaacagatgggctttaagccaattttggcatgcaaggggttgagtttattaggcatcagcaccgctgaaaatcgtggggatgcaggcttaatttcaacactattctaaatacttgaaagatattatataagtctttaataaactcctgtgtctacaaatggttcacattaactcaatatccatgatgaaacatctataaaatcaaggcactgttatttagtggagacttgctggctattctatgagaggaggtattgttattgtaatctcatcatctcataaaattgtatcatattactcataaccagcccttcatatyctattcctattttggtattttaa

SEQ ID NO: 194739 - DNA, 621 bp, Homo sapiens
cagatgggctttaagccaattttggcatgcaaggggttgagtttattaggcatcagcaccgctgaaaatcgtggggatgcaggcttaatttcaacactattctaaatacttgaaagatattatataagtctttaataaactcctgtgtctacaaatggttcacattaactcaatatccatgatgaaacatctataaaatcaaggcactgttatttagtggagacttgctggctattctatgagaggaggtattgttattgtaatctcatcatctcataaaattgtatcatattactcataaccagcccttcatattctattcctattttggtattttaaaataagatatctttgaaattcttgaattcaaagagggaatctgaatamtttttaaaatgtcaatgaaatgccatttcttcatgcttcaacaactaaaaattgactaaagtgcttctcttcaatctttctgggacattttttatctaaattctaagaacaatcacaataggttttaaccacaaatgtgagaatattctaaatgttagggtggaaaaaatttttaaatattttatagtaatttttttcatcatagtgacagtgtgctaaatttttttaagccaa

SEQ ID NO: 194740 - DNA, 547 bp, Homo sapiens
ccaaaacttaactactaatagcctactgtaagcctgacaaataacacagtcaattaacacatatttaatatgttatatgtcttatatactgtattcttaacaaacatgccagagaaawgaaaaaagaaaatcataaggaaaatagatttactagttattaaatggaagtagatgatcaaacaggtcttcatcctcatctttctcatgggcaggatgtggataaggatgtagaattgttggttttgctaagtggacgtgcacagttcaaacccctgtggtgcaaaggccaactgtatagccattgaatagcaatttatatttagaaattaacctcactaaaatactcttagaaagatgcccagaaaaaaagtgaataagaatttttggttcatctattacatcatttcatttcattatttcatttcttttcatcatttcatttcatttcctcatttcatcctttcatttcatcatttcatcatttcatctcatttcctcatttcatcctttcatttcatcatttcatcatttcatctcatttcctcat

SEQ ID NO: 194741 - DNA, 547 bp, Homo sapiens
ccaaaacttaactactaatagcctactgtaagcctgacaaataacacagtcaattaacacatatttaatatgttatatgtcttatatactgtattcttaacaaacatgccagagaaaagaaaaaagaaaatcataaggaaaatagatttactagttattaaatggaagtagatgatcaaacaggtcttcatcctcatctttctcatgggcaggatgtggataaggatgtagaattgttggttttgctaagtggacgtgcacagttcaaacccctgtggtgcaaaggccaactstatagccattgaatagcaatttatatttagaaattaacctcactaaaatactcttagaaagatgcccagaaaaaaagtgaataagaatttttggttcatctattacatcatttcatttcattatttcatttcttttcatcatttcatttcatttcctcatttcatcctttcatttcatcatttcatcatttcatctcatttcctcatttcatcctttcatttcatcatttcatcatttcatctcatttcctcat

SEQ ID NO: 194742 - DNA, 547 bp, Homo sapiens
ccaaaacttaactactaatagcctactgtaagcctgacaaataacacagtcaattaacacatatttaatatgttatatgtcttatatactgtattcttaacaaacatgccagagaaaagaaaaaagaaaatcataaggaaaatagatttactagttattaaatggaagtagatgatcaaacaggtcttcatcctcatctttctcatgggcaggatgtggataaggatgtagaattgttggttttgctaagtggacgtgcacagttcaaacccctgtggtgcaaaggccaactgtatagccattgaatagcaatttatatttagaaattaacctcactaaaatactcttagaaagatgcccagaawaaaagtgaataagaatttttggttcatctattacatcatttcatttcattatttcatttcttttcatcatttcatttcatttcctcatttcatcctttcatttcatcatttcatcatttcatctcatttcctcatttcatcctttcatttcatcatttcatcatttcatctcatttcctcat

SEQ ID NO: 194743 - DNA, 547 bp, Homo sapiens
ccaaaacttaactactaatagcctactgtaagcctgacaaataacacagtcaattaacacatatttaatatgttatatgtcttatatactgtattcttaacaaacatgccagagaaaagaaaaaagaaaatcataaggaaaatagatttactagttattaaatggaagtagatgatcaaacaggtcttcatcctcatctttctcatgggcaggatgtggataaggatgtagaattgttggttttgctaagtggacgtgcacagttcaaacccctgtggtgcaaaggccaactgtatagccattgaatagcaatttatatttagaaattaacctcactaaaatactcttagaaagatgcccagaaaaaaagtgaataagaatttytggttcatctattacatcatttcatttcattatttcatttcttttcatcatttcatttcatttcctcatttcatcctttcatttcatcatttcatcatttcatctcatttcctcatttcatcctttcatttcatcatttcatcatttcatctcatttcctcat

SEQ ID NO: 194744 - DNA, 554 bp, Homo sapiens
gcagtggctcacccctgtaatcccagcattttgggaggctgaggcaggtggatcacaaggtcaggagttcgagaccagcctggccaagatggtgaaaccctgtctctactaaaaatacaaaaattagccaggtgcggtggcgggtgcctgtaatcccagctrcttgggaggctgaggcaggcgaatcacttgaacccaggaggtggaggttgcagttagccaagattgtgacactgcactctagcctgggtgacagagcaagactctgtctcaaaaaaaaaaaaaaaaaagatatttcatgcaaatggacaccaaaaatgagcaggagtatctattcttacatcagacaaactttagagcaagagaagttaaaaaagacaaagaaggacattatataatgatgaaagggctattccattaggaaaatattctaattctaaacatatatgcacctaacactggagctcccaagtttataaaacaattacaactagacctaagaaatgagttagacagcaacacaataatagtgggtgactttaatactccactga

SEQ ID NO: 194745 - DNA, 554 bp, Homo sapiens
gcagtggctcacccctgtaatcccagcattttgggaggctgaggcaggtggatcacaaggtcaggagttcgagaccagcctggccaagatggtgaaaccctgtctctactaaaaatacaaaaattagccaggtgcggtggcgggtgcctgtaatcccagctgcttgggaggctgaggcaggcgaatcacttgaacccaggaggtggaggttgcagttagccaagattgtgacactgcactctagcctgggtgacagagcaagactctgtctcaaaaaaaaaaaaaaaaaagatatttcatgcaaatggacaccaaaaatgagcaggagtatctattcttacatcagacaaactttagagcaagagmagttaaaaaagacaaagaaggacattatataatgatgaaagggctattccattaggaaaatattctaattctaaacatatatgcacctaacactggagctcccaagtttataaaacaattacaactagacctaagaaatgagttagacagcaacacaataatagtgggtgactttaatactccactga

SEQ ID NO: 194746 - DNA, 585 bp, Homo sapiens
ggagccacactttctgaaggatgctattgttgctcaactggcaaactcaaatttggtttgaagagcataagttttaattttctaggttaaaacttatttttcttctcaagttccatttatcaaagaaatcgttttgttttgtttgtttaatcgaataacatcgcaagtgcagaagacttagctgggatggaggttgggggagtgtccttgcctgtttcagggaaccaataaaggacatctcaaaaaccaaacacagtacttatgatgtgccaggcactcttctgagggctttacacgatgtaactcatttaatcttgagaaaacccctaagaggtagatattgacatcatcccattttatagatgagaatctgaggaacaaatacgttaggtaactggcccaaagtcattgtagctaataagtcacaaagctgggagtatgaacccggcagtttgtgtttttaccactgtgctccacctaacataygtaatttgagaaaaaaaaaattaaaacaaccttttagcctccattttctaagcatctcaagttaaagtagttggggtctgagaaaagtattcagataac

SEQ ID NO: 194747 - DNA, 636 bp, Homo sapiens
gctcctctgtcttcatccttyttgatttctcaacagtgtctgaacagttgtttcccacatttggaaatcttgtactctgttaacttcaagtccttatgtcatcctgttttccttgtaccttcctgccactccttcttaagagtctcttaagtacttaagtttcaatcttaggcacacttctcttttattattatcctttctaagtgatgccctcaatttccaatcttgaaatgatctctatatgcttgttataagactccagcttgacctctctcttgaacttattccttacatttctcaaggttttagataccaaactattctgaaaagcaacgaggacttattgcaaagtgaaagtgcaaattttaagctttgtttatttttttttttgcagtggccttttaagtgaattcttatgcctcaattaactttgatatttcctacaggaaatatctatgcaattctaagtttttattaggaagttatatccacttatcattgtttttcaacctcctttctgggctatgaattagctgtaaacatgctgaaaagaatcatctgttgatatgcttctgccaaaaatatttgttttggctgttacaggaactctgtcaatagagtctatggaaatattgg

SEQ ID NO: 194748 - DNA, 592 bp, Homo sapiens
tttctgaggagtggttcaaatgcaaacactgaaacttcaatagatacatatttgtcttaatgtgttagaaaaatacacatttcatgtatcattttattaatattgttgcttaggatgaagctaactttatgtaaagaagtatatagatttaaaaaatatataaagtgagtaatagtagagatatatgaatatgacagaattataagctggaaggtgaatgtctgaaggttggaaaacgctgacttagcctataaatataaattcaatacagtgtgcttaaatgggtgcagtcatttggatacatatattcagactggtcttcaggaaacttggggaagaggagtgcttagttagctctctggttctgccttaaaataattttgtgagctaggaagggaagcctgttctagacctcagtttccttgtctataaataaggagagttggattsgagcatatgttgaattcagctcaacaactttgatgtaagtggaaggctacagtggtgatatgatctgctcatccaccgcaggctgtcacattgatgacagctgtggcagaacccttcatttcatggcctaccattcattatt

SEQ ID NO: 194749 - DNA, 592 bp, Homo sapiens
tttctgaggagtggttcaaatgcaaacactgaaacttcaatagatacatatttgtcttaatgtgttagaaaaatacacatttcatgtatcattttattaatattgttgcttaggatgaagctaactttatgtaaagaagtatatagatttaaaaaatatataaagtgagtaatagtagagatatatgaatatgacagaattataagctggaaggtgaatgtctgaaggttggaaaacgctgacttagcctataaatataaattcaatacagtgtgcttaaatgggtgcagtcatttggatacatatattcagactggtcttcaggaaacttggggaagaggagtgcttagttagctctctggttctgccttaaaataattttgtgagctaggaagggaagcctgttctagacctcagtttccttgtctataaataaggagagttggattggagcatatgttgaattcagctcaacaactttgatgtaagtggaaggctacagtggtgatatgatctgctcatccacygcaggctgtcacattgatgacagctgtggcagaacccttcatttcatggcctaccattcattatt

SEQ ID NO: 194750 - DNA, 557 bp, Homo sapiens
caggttattttctcccaaggagatacagatgcaaacccaatcatttttacacattaattatcctcaattcaggctatcaggttttctgtagattaatataattcaaataaatttwaaaattaatgaaaacaaaaagagagacggccatcatgaatgaaagtccatagaaacagcaaaataactttataatgttaaataccttagttattagaattaatagagaatataaaattaatctgaatgcaaaatatgaaatagaaagcacatgtgatcaaaataatcagcaaattataatatattatttttagaggcatattaaaactgtttaaagtggaaaatatgtataattgtctaaataaaaaacaaaataaatgaatctgtgccaaataagaataataactctcttgatagggttatcactggccatatttgggctcatttgaatcatagaataatgatagtggggaagagtacggctaacagctggttttaaacttattctttctcaccagggattttcaggcaaatgaatgtccttaaccagaattccctgtaaa

SEQ ID NO: 194751 - DNA, 563 bp, Homo sapiens
gatatgacagttgagatactataatttccaaagtgaaattttatcagaatgatttctttataaaattaaaatgcctttgatatttcaggatcgtcttagacctggtatttttatttatggtacactcaacaggttattttctttcccatgtatctcatcaacttgtgctgatagttttcagttcaaaagtatatcagagtttggattgaagtcagtctccatttcatgtttgcatttgaatttaggtctgtcacaagtgataaagagtgacaaatgtgacattgtcatgttgaaagatcattaaatgtcactctctgtcctggcagcaaaatggctggcacaaagtcaatgatgcaaaccmaatgtggagtgtgcagagcagagattgatcttgggcagcactgagtcctgcaagctgtgaacaatcaatcatttcattcaaaggaagagtgaaatgagacttgatagtaatgctgtgcgcatacatacagcgttggacatctagcttgtaagtgttttgatttacacttataactatctagtgaccagtagatagaataaca

SEQ ID NO: 194752 - DNA, 580 bp, Homo sapiens
ttctttgattttctgtggggctatattgcaactgcacttctccttgagtccgctcccacctcctttctctccctttcacagatgtggctcccaaaggcaatgaaatcatctcagagctggcttctgaaaggacccaacttgctacacagttaatatttgataaggcaagcctccatttttcctccttcaccttccaatgctatttgattaatttattgcaggtttgttttaatttaattttataacatggatataagaaagcaaaagggagagatgaatgcaggaacaaaaggcagaagaatgaaatgtgatccgtgatcttagttttcatggacaatgaggaggttcccaggatcatgccttttagtgctaaaatcttaaagtactgagcaaaccaagagacaagctatggaatgcattggcsgccatttaatactgattcttttagtcacagagaatataatttccatacgtattcaactatttattcacacagtttaatagtgtataatggtttttattcataatgattcaatgtaattattacatttattcctgagaactttatattgttaattac

SEQ ID NO: 194753 - DNA, 587 bp, Homo sapiens
gtgtaatatcgtatttcatggtggctttaatttgcatttctctgatgattagtacatgtaattttttataaataggtaggtaggtagatactccacttggaacacttggaacgtagcatcgatgtttacatattttagataaatataaaatataaaaataaacctacatatgtactgtaaaatatgatattgatgccaacgattttatgttactgaatttaagaaaagtaacacagaacattctcacatgagagttgatatttgacaaaaagaaaactgttccagaatgaataaattataaattacatttgaaattggtgcttaattacatttcaatactttattgcaaagtggatacactattcatttgttgctrtaaaaagcatatttaatagaaccatgaaactgtgcatggtgcttctatgggaataaaggaaaagaccatttcaggctgcttatgaaaattgttgccacatgatagtgtttcatctgtattgtgctaaaaattcaaacaattttgttcttctatttctgacaatgttaacaaaccaacaatctcaaaatttgatacatcaagaaagcacctc

SEQ ID NO: 194754 - DNA, 484 bp, Homo sapiens
tttttggcatttggatttgggatacttttattaacatttttcttacctcctgatgtccattatgatgttccagaaacatgagggtctatgattttactctactttccagtctcaaagttagtctgtaacaatgttaatgatattattagaagacagaagacatgagattcttagatcagagwcaaatgacttcatcatgaatgtcacagcagacagcatcggcatcagcatagtcaattcctcctgtcttcaagtctctgtggggcaatggtaatggtcccagatggaagcctccaaggcggtaggttacattactgaatatgattccttgagcttctagtgaacccatcagccaaatggttaaaacatagtaccaaataggtagtttttcaaccctcactccccttccaatctcccctcttttggaattgctagtctgttatttccatctttatttacatgtgtgctcactgtttagctccca

SEQ ID NO: 194755 - DNA, 486 bp, Homo sapiens
tttatagcaatacctcactcctgctaggaattttctgtattagcttgttctcacattgctgcagttaaatacctgagactgggtaatttattaaaaaaagaggtgtaattggctcatggttcttcggactgtacaggaagtatgatgctcgcatctgcttgtctttgcagaagcctcagaaaacttacaatcatggcagaaggcaaagggggagcagacaaatcatagccagaacagccgagagagagagcgggggaagatggtacacacttctaaacaaccggatcttgtgagacctcgctgtagcgagggcagtaccagaggtgtggtactaagccattcaggggaaacctgccctcatgatccagtcacctaccaccagtccccacyttctaaatctgggattacattttgacatgacgtttgagtgggggcacacatcctaactacatttctggtcaagcaaacgtgtgacaaaagaaagct

SEQ ID NO: 194756 - DNA, 287 bp, Homo sapiens
aaatgtcaagaacctgggcacccttcaccagtaacaagctgactgaatggacctccttttggccaagtggaccccagagaaacytgaaaaactgaattcctggacacgacaggaagagtggtcagatgtatgtagttataccgccttccttttaaagtttaggcacaactgaccagcattaacattaaaatggagtacgtaagaccaacaaaagagactttgcagcaataaggtagaaaattccaaagtggtataacatcacatgacaatgaacaaaccctgaagga

SEQ ID NO: 194757 - DNA, 524 bp, Homo sapiens
caggtcattgttgctgtacatgagaattttgagttataagtagacattgtttgccaagagatacctaagggatcactgaaatgccaaatatattccttcctgccctcaaaacatagcagccattctacttcttcaggataatcagtgtagcattttttaaatagtaaactatcatttaaagatatttataatcaagamaattttgttgtatgtttatccatgttaccatcttgatgctcttcaaaacatatttcatctattacctttttttctcttcttgaagaactttcttttacatttcttgtactgtgggtctgctgctgatgaattcttttaaacatgcttattttactttcatggttgaaagatattttcgataggcatagcgacataaagagtcacaaaatccatattacttagctactgctttgttgatttgcagtagccccctcttatctggcatgatttatccagtttttcagggcatagacttatgaattaagtgcatcctttaaatatttgga

SEQ ID NO: 194758 - DNA, 568 bp, Homo sapiens
aatgaaattagaacctcaatatatcaaacacatttcataaaaatgcaagataaaataatcaacattcaaatatcattagtgtttcaatagactcaaaatgtaataacttgttgcttttaactacgaagaactaccagtcttttctaatttgcttgtcaccaaatttctccattagataatttttggccttgaacttctcattttgtatcaaataaagacagatcttttgaggatatcttcagagttttctgttcttatgactgactgcctctttccctgttgaaaatccctgagccagtaatctgagtgctgagaaagggtggtaagctttgtaattcttggcttcatttttcccacatggaaccactacactatgggccagctgtggccaagaaaattgtggcctgcctgcctggtgcagagcctatgcccttttactgtttccagggtgatgcacgagatttttgacttatttggctacattcatcaggaatttggcatctgcaactcagagttggaggraatgagaagtactgatgtttagactctcatgataagataccgtctt

SEQ ID NO: 194759 - DNA, 478 bp, Homo sapiens
agagcagagactcagacaagcccagacttcatcacccatatggcaatcaatctgaatacctgaaagcatcagaataaatgatgttataaatcatcagtttggggggtagtttgttgcaaagcaaaaatgtggcattagctgattgctatggcttctcttactgatttttaaaatctaattttatgtttttaagatatatccaggctggggtttttgtgtgtttttatttaaattcatttcttttcattactatatatttaatggtatctaygtgacaaagtttttctaacacatttcctctttggtggacttttttgtttcctttttaatttctttttaaattgaggacacaggtgcttgcatttagggcctactcagatactgcagcaaagatttctcctcttgatctctgtatcttaattacatctgttaacatcttggttaatattcactcctttgtgaagatttttgcaccaac

SEQ ID NO: 194760 - DNA, 527 bp, Homo sapiens
tattcaaaactattatgttgctactaatttttatttttcttctaaacgtgtagrcagattattctttaagaagtaattaattaggcaatagaattgaccctaattttaaactacatctttcttttttcttcattctttctcccttccttatttttacctgtttgtttttcacttatgaatcaccaggaaagtttgttgaatgaatattttattgccatgtgcttgtgccaatttctaaatagtatgtagagatgaatatacaaaacctaactccagccatcaagtgacttatagtccagtaaaaaacaaaagacgtgtaaatgaataaatgaagcagaaatacagtagatagatacatgagatcaagtggtgaaagatgattaggcatccatctgttaaacaaggcatggaaaaatatttcagacacaaagagaaaaataatccaaagcaaaatgatattttggaaccataaaatatcatattgtgtaaagaaaggaagcattaatggtaggtagcatgtgggtcag

SEQ ID NO: 194761 - DNA, 555 bp, Homo sapiens
ggtaaaattatgtgtttgctaggtttaagtagcataattttattctggttataaattaaatttatgagtcaagttaaaaatttagctttatgcgawagaataaaaatcacacatagtactatcaccgttcatatattactatacccaagacttctgttaagttcattctttgagattcaaataaaatttctgcacactccatctctgtctcttttgtggtttctcctcttcagttccaagaccaaaaacatcatctatacaatgcatcctcgtgtacagcaagcttaattgacttctgctataacagtgagagcttactttatggctccatgaagaaaacagccaaaatttaatatgagacccaatgaattcaatgaatgcatattttaaagcattaattttcctgttaaaaatggccagttttgcatactttgttctttcgcaataacaaataattgtcgtgacattgaaattttagtcttttcctattttcatagcctttagcatgaagcgtacaaggaggcagattagttacttatgtcacaaattcactat

SEQ ID NO: 194762 - DNA, 520 bp, Homo sapiens
ctatttcactcccaagtatggtcttcagaatgctacccattgttcatatcacagtttgaacagaagtttctacatgaagttattctgagcatcctcaaacagatatacttttccttggaccccacataatawtttgcttctctatcatgttatttatacacaataaaaattataaaagaaattagatgccttgaaaacaaagctagattttccttacttttaaaaattataaaatttataaaaattataaatttataaaatattgcaaaacagatattcaataaatatacaatgattagattgttgaatttaacaataaacaaaagaaactattaataattattgaaataattatatatgtcattattagtttgaaaggaaaataaaccttgggatcccaaaatcactaatctaaaggaaaaagtcaagctgggaactgtttagggcaaacctgcttcccattctgctcagtcatccttccgctcactgagataagtgcatatctgattgccttctttcg

SEQ ID NO: 194763 - DNA, 574 bp, Homo sapiens
aatttctttttaccagtagggcattcagtaattgtataagttgtgtgattgtttgttttgcttaactgtttttgttgttgttgtttgtttctgtttttgttattgttttggtctttttcttactgggtttgaccaactctatccaacttgatcaaatctgaaggaaagttccaaattgtggggaacaaggcctctgaagtggctaaattccaaataataaataaataaattaattaattaaaaaataaaggtgatgtgttggggggagcagaaggaccagcaaaaggaaaaaaaataaaaaataaagatyttttattttgactacttaaggggcttcacttacataacaaggccaatttttgctaggccgatttttggctgaaagagcaatggctatcaccccacaatgcagttccatagctagggttctatcgtctttttttccacacaacagcctgggtttggttcctaaatcaatccctttctggtttgctatttggtacttctgaagtagcagcaaattgtcctagctgatatatagtaatgagattttaaaagatttttttttcttttt

SEQ ID NO: 194764 - DNA, 574 bp, Homo sapiens
aatttctttttaccagtagggcattcagtaattgtataagttgtgtgattgtttgttttgcttaactgtttttgttgttgttgtttgtttctgtttttgttattgttttggtctttttcttactgggtttgaccaactctatccaacttgatcaaatctgaaggaaagttccaaattgtggggaacaaggcctctgaagtggctaaattccaaataataaataaataaattaattaattaaaaaataaaggtgatgtgttggggggagcagaaggaccagcaaaaggaaaaaaaataaaaaataaagattttttattttgactacttaaggggcttcacttacataacaaggccaatttttgctaggccgatttttggctgaaagagcaatggctatcaccccacaatgcagttccatagctagggttctatcgtctttttttccmcacaacagcctgggtttggttcctaaatcaatccctttctggtttgctatttggtacttctgaagtagcagcaaattgtcctagctgatatatagtaatgagattttaaaagatttttttttcttttt

SEQ ID NO: 194765 - DNA, 596 bp, Homo sapiens
tggaagaggtgagtgcctgagattataagggctgattttgagagataacgtaagtttattttctctataaattagccattaatgtaaaaggcacactgatgcaagaaaagcatatagacacctgtccaagtaccagggtttcatgaaacactagctggctccttaataaaagttgtaaaggttataaaagacaggaaaattatatgttatggtcaagatgaccaaaatgttatagattgttgataaaattttgaaaaataaatttaattagcttcatgttgtttttattagggcttattgtttggaatattaagtctsttctctcaaagaatgaaggttttcacctgtttttgaaatccttgagttatcactacggttaaatgaatgacttattttgcaatgatctttgatcctattttgtgatatcaaatgttataaacccttgatatttgacaaactttccaaagtcaaatataaattatgtctttttctgacctgattaatcttttaagatattagattccctaaagtccaaaaatgacatttttttgttataaaaatcatacagggagtattgtcaaatatgaaatggtgtt

SEQ ID NO: 194766 - DNA, 525 bp, Homo sapiens
caattaaaaaaagtgtcaacaaacatttaaaaaataaaaacaacactagagttggcaaggacgtagaacaactttaacactaatatattgctggtgggatctgaaaacattaaaattactttggaaaatagcttgatatatttttataaaatttattttcccttgccgtatttcctagcaaatctagttttctatttatcctagagaaataaaaacttaagtctctaatttatttgtgcaaaaatatttaccccatgtattttataaatgtttaaagctagaaatgactccaaatatctatcaatgggtgaaaagatacacaaaatccagagtatttatacactagatgaatcacaaattgttttgctaaataaaatargccaaaaaaaggagtatgtacaatatcattccattgatattgttttagagtagacaaaactaatctacagtgagaaaatcagataaatggttgtctgaacaagtaagtgtgaacacctacagctggttgcaaataatttatagtaa

SEQ ID NO: 194767 - DNA, 525 bp, Homo sapiens
caattaaaaaaagtgtcaacaaacatttaaaaaataaaaacaacactagagttggcaaggacgtagaacaactttaacactaatatattgctggtgggatctgaaaacattaaaattactttggaaaatagcttgatatatttttataaaatttattttcccttgccgtatttcctagcaaatctagttttctatttatcctagagaaataaaaacttaagtctctaatttatttgtgcaaaaatatttaccccatgtattttataaatgtttaaagctagaaatgactccaaatatctatcaatgggtgaaaagatacacaaaatccagagtatttatacactagatgaatcacaaattgttttgctaaataaaataggccaaaaaaaggagtatgtacaatatcattccattgatattgttttagagtagacaaaactaatctacagtgagaaaatcagataaatggttgtctgaayaagtaagtgtgaacacctacagctggttgcaaataatttatagtaa

SEQ ID NO: 194768 - DNA, 576 bp, Homo sapiens
gcatggagatctctttggcaacgcacttcaggaacttgctagaaatccaccctctctgatgctagtgaaatttggtcatgggatcaggtctcctcaraggttctcagctgcaaaaccccacagcagagatatcacctatcagcaggtgataggagatgggtccttctggtcactaagcactgcaaaactctaatgcaaggggagctgcatatgctgcaaaagcatggttctggaaataccatctgtgttatagaacctgggcattagagaaactgcacatgctagggtcttggtgctagaaactcactatttttgccgcaggactctagcgtgagagaatctgtacattctatatagcttggtactggaaatgtcatccatactaaggtaccctggcacaagagaagttgtacatgctctagaacgttggttttggaaatggaaaccttgctactactggaatttagtgcagtagaaactgcatatgttatagaaacttttccacaataaaagatgtaattcaggatcttggtgcaagagttactgtgtatgttgcagaaacctggtgctggagaa

SEQ ID NO: 194769 - DNA, 619 bp, Homo sapiens
atgcctaatgtagttgaggtttttttttttttcaaaagctttttcacatgtactctgaatgatggataaccttatataaaacatacttaatctttaaagttatttaatctgccacaagctttgtaaaatgttgtrtatataaaagcacatgaaatcagagagaataattgaatgaatgattaactacgtgagctttataggcatatttccactattgcatacctgattagatactactcacaatttttctcttaaataaaaagaaatgtgaactccctttcactctgaaatttgaaaatacaaagatttctatctgtatttatagacatctgttaaaaaaatcttaccctctatgaaaatggtaaaaaataaatactttaaaaaattatgtgatgttttagtaagtaaatttaaattacatttacagcaaaataaatatcattaaattttagttatgtaaaaacatacatttattttataataaattttgacctggttattctaaacatccatgataatcattcctacaaatgtagttttcttcatagatatttgaactataatctgtcatctgaatctgatttttttaaatttaaaaagtatccggaaatctacttaa

SEQ ID NO: 194770 - DNA, 619 bp, Homo sapiens
atgcctaatgtagttgaggtttttttttttttcaaaagctttttcacatgtactctgaatgatggataaccttatataaaacatacttaatctttaaagttatttaatctgccacaagctttgtaaaatgttgtatatataaragcacatgaaatcagagagaataattgaatgaatgattaactacgtgagctttataggcatatttccactattgcatacctgattagatactactcacaatttttctcttaaataaaaagaaatgtgaactccctttcactctgaaatttgaaaatacaaagatttctatctgtatttatagacatctgttaaaaaaatcttaccctctatgaaaatggtaaaaaataaatactttaaaaaattatgtgatgttttagtaagtaaatttaaattacatttacagcaaaataaatatcattaaattttagttatgtaaaaacatacatttattttataataaattttgacctggttattctaaacatccatgataatcattcctacaaatgtagttttcttcatagatatttgaactataatctgtcatctgaatctgatttttttaaatttaaaaagtatccggaaatctacttaa

SEQ ID NO: 194771 - DNA, 564 bp, Homo sapiens
tcaggaacttgctagaaatccaccctctctgatgctagtgaaatttggtcatgggatcaggtctcctcaaaggttctcagctgcaaaaccccacagcagagatatcacctatcagcaggtgataggagatgggtccttctggtcacyaagcactgcaaaactctaatgcaaggggagctgcatatgctgcaaaagcatggttctggaaataccatctgtgttatagaacctgggcattagagaaactgcacatgctagggtcttggtgctagaaactcactatttttgccgcaggactctagcgtgagagaatctgtacattctatatagcttggtactggaaatgtcatccatactaaggtaccctggcacaagagaagttgtacatgctctagaacgttggttttggaaatggaaaccttgctactactggaatttagtgcagtagaaactgcatatgttatagaaacttttccacaataaaagatgtaattcaggatcttggtgcaagagttactgtgtatgttgcagaaacctggtgctggagaaattgcctatgtgcag

SEQ ID NO: 194772 - DNA, 564 bp, Homo sapiens
tcaggaacttgctagaaatccaccctctctgatgctagtgaaatttggtcatgggatcaggtctcctcaaaggttctcagctgcaaaaccccacagcagagatatcacctatcagcaggtgataggagatgggtccttctggtcactaagcactgcaaaactctaatgcaaggggagctgcatatgctgcaaaagcatggttctggaaataccatctgtgttatagaacctgggcattagagaaactgcacatgctagggtcttggtgctagaaactcactatttttgccgcaggactctagcgtgagagaatctgtacattctatatagcttggtactggaaatgtcatccatactaaggtaccctggcacaagagaagwtgtacatgctctagaacgttggttttggaaatggaaaccttgctactactggaatttagtgcagtagaaactgcatatgttatagaaacttttccacaataaaagatgtaattcaggatcttggtgcaagagttactgtgtatgttgcagaaacctggtgctggagaaattgcctatgtgcag

SEQ ID NO: 194773 - DNA, 406 bp, Homo sapiens
ctgctagtatttctttatattagtttttgtcctcttactctgtctgtcttctctgggaattcctaattcatatktttgtacacttggtattgtcccataggttcctcatactttcatcatgctttttcagtctttttcttgttgttcctctaggtgggtaatttcaaattacctgtcatcatgttcatcaattctttttctgtatgattgagtctgctgttgaagccctgtattgaatttttcacttctgtcttcatacttttcagctatagggtatctgtttggtcctttttttatggaatataatatttaaactaaactaattttttaatgaattattttcctaattatattttgtggtttatttgtgttttctacatctcattggacttattgaaaatcatta

SEQ ID NO: 194774 - DNA, 620 bp, Homo sapiens
cacaactcctcagaaattttatccacaagtaactaaagttttcacatgtttcactcataggatcttcactcttagctaacttcaatattggaaaattacagacgattattttatgtctattcttaatgaccattatggcacatatttcatacattttagtctaagtatagaacaacattatcagtaagaatatgtgtgtgtgtgtgtgtgtrtatatatatatatatatatatatatgaagagtgagagagagagtggggtagatgatatgggggttgaggtagttgggaatgaagaaaccagcaatggtaataacaagataatagaaatgaaaacaactaacattttctcaaacacctatcaagagctcggcaccttattaggtcttttatgttaatcatctcacctggtcctcacaacaaccatgaggtaaaaaaaagttgaaccctgaaattttgatattccttttctttaacaatagattgtatcaagtgaattaaaagaatgtaaagtgaataaccattttattagagttgaagcttaaaagttattggactgctataatacatgaactacatttttttcaattagcgttttcaccaactttataaaaaaagtta

SEQ ID NO: 194775 - DNA, 576 bp, Homo sapiens
taattatacgtcagttgttctcaatttcctgtgcaattgagaatcacttaggaggcttgttaaatgtgtattatatatattttatatatatatatatgagatatatatatacgtgaaacatatatatgtcatatatatgtgtgtgtgtgtgtgtatatatatatattactgaagccaaagtgcaccaaacctcatacatcaggatctgcaggagctgsctagggaccacgatgcacacctggttaggggaccctgggatgcacacagtgctctgagaattcagaggagatggagtcaatggaacatcctggactacttggaaacagcagctactctagacatcagtgctgctcccacagggagaagactgactcccaaatccagcaaggaaatgctggatcatgggcctggcacactaggtgttacattttaagataatgctaaaattacttaactcctgttttccaaggctggccttgagactttcagaagatgatgttcacgcaatttgcccatggctcaaagtaacaaggtgtcagatcactaacaagtgatctgaaagctccctatcagctc

SEQ ID NO: 194776 - DNA, 576 bp, Homo sapiens
taattatacgtcagttgttctcaatttcctgtgcaattgagaatcacttaggaggcttgttaaatgtgtattatatatattttatatatatatatatgagatatatatatacgtgaaacatatatatgtcatatatatgtgtgtgtgtgtgtgtatatatatatattactgaagccaaagtgcaccaaacctcatacatcaggatctgcaggagctgcctagggaccrcgatgcacacctggttaggggaccctgggatgcacacagtgctctgagaattcagaggagatggagtcaatggaacatcctggactacttggaaacagcagctactctagacatcagtgctgctcccacagggagaagactgactcccaaatccagcaaggaaatgctggatcatgggcctggcacactaggtgttacattttaagataatgctaaaattacttaactcctgttttccaaggctggccttgagactttcagaagatgatgttcacgcaatttgcccatggctcaaagtaacaaggtgtcagatcactaacaagtgatctgaaagctccctatcagctc

SEQ ID NO: 194777 - DNA, 576 bp, Homo sapiens
taattatacgtcagttgttctcaatttcctgtgcaattgagaatcacttaggaggcttgttaaatgtgtattatatatattttatatatatatatatgagatatatatatacgtgaaacatatatatgtcatatatatgtgtgtgtgtgtgtgtatatatatatattactgaagccaaagtgcaccaaacctcatacatcaggatctgcaggagctgcctagggaccacgatgcacacctggttaggggaccctgggatgcacacagtgctctgagaattcagaggagatggartcaatggaacatcctggactacttggaaacagcagctactctagacatcagtgctgctcccacagggagaagactgactcccaaatccagcaaggaaatgctggatcatgggcctggcacactaggtgttacattttaagataatgctaaaattacttaactcctgttttccaaggctggccttgagactttcagaagatgatgttcacgcaatttgcccatggctcaaagtaacaaggtgtcagatcactaacaagtgatctgaaagctccctatcagctc

SEQ ID NO: 194778 - DNA, 615 bp, Homo sapiens
atacgactgcttgggcttcctcactgtatgactgctaggttctaagaccaagcatcccaagagaaccatgtggacaccatattgccttttatagcctaaccttgaaattacatagtcttctgctgttgtcatgaatccacccacatttaagggggagggaacatacacccagttctgcataggagaagtgtcaaggacctactgtaaaaaaatcatgaggaacaggagctaattttggccatttggggaaaatacagttcgccacagcataccgaaacaaaatgacatatcaaggccaaaaaataaagcaatgagcraagacatcacagaaaactataattaaaaaaatagtaaaagagatgatatggttgaaatagaatacatgaaaaaatttataattggacaaggaaagtccatttatatcaatgaaaggcaaaccttgcaataaaattgttggtttttgctgtataaccaaccatgccaaaatttagtagcttaaacaatagccatttatttagctcagtattctatgggttggcaatttgagttgagctcaactgggcagtcgtcatcacctcagctgggctcgttcttcatgtgtgatcagctgccatg

SEQ ID NO: 194779 - DNA, 559 bp, Homo sapiens
caagagccaaatcacaaatgaaactgcattcacaattgccacaaaaaataaaatacctaggaatacacctaaccaggcaggtgaaaggcctctacaacaagaattacaaaacactgctcaaagaaatcagcaaaaacacaagcaaatggaaaaacattacatacttatggacaggaagaatcaatatcactaaaatggccattstgcccaagacaatttacagattcaatgctatttctatcaaatgactgatgacattcttcacagaactagaaaaactattaatattttaaaattcatatagaacaaaaaaagcccaaatagcaaaggcaatcctaagcaaaaataagaaaactggaggcatcatgttacccaacttcaaagtatactacagggtactggtaaccaaacagcatggtacttgtacaaaaatagacacatagaccaaaggaagtgaacagagaacccagaaataatgctgcacacctatgaccatctgatcttcgacaaaccttacaaaaataagcaatagagaaagcatttcccatttaataaatgg

SEQ ID NO: 194780 - DNA, 628 bp, Homo sapiens
ctccatttccagtctacatctcccaggaagaactctgattggccagtttaggttcaatggagggcgaccaaacatcccactttgcctgagactgaggaggttcctgagacatgggactttcaattttggaactggaaaagtccacgcaaatcagaacaagtttaaccctagttaaaagccaccttctaaccaattaccgtggctagccgttgccagggagttggaatttacagggcccattcagacctcacagtgggatgaggaaaaagaacgacttccatcataaaggaatgggttagacatgatcactaaaatgtgattactctcagtcaggcagctgctccaatttgtttctatcatatatatctaaaaatttggcaagtgattcctgaaaccattccaatcaaataaacttgtcatggaattttaatttcttaaactcaccgcaatgaatcatttccattactgcttcaatgtaataaacactaccctaatgaaccaaaagagttaatacacagcttaaatcacctccatatctaagaagcccaactcatttcttagaaactatmccactaagtactacattaatcatttgtcatgtcttcaaaactactatactctgtcaaaa

SEQ ID NO: 194781 - DNA, 539 bp, Homo sapiens
tggaaacttcgctgggctcccaagacaggttttctgcttccttattaaacaaagctttttggcaatgaggtgggcagaattcattctaagacttgctttctttgtcaacacttggtaataaggtgatggaggatgagaaggaaagccctcacctacctctgctcttgggaggcaatctatatctcccaaaatcactggacaagtgtgaaggccaaactgacccatctgcagctggaagcctgcccagttcctgacctccrgtcaccaccgtcaccaaagtcacttctattagccacccagggtacaactgattcaagaactgtaactcaagtcatgaacctctgcaatcatgaaaacctctcttcttcgcacaaatatatgaataaaatgacattggcacaagttcagcttgtagaaattcatttaatgttgcctcaggtaattagtttatttggtctgtcaaagtgacccaaagcttatccatttggagtctctgttatgaacagacatatagtagttgctaagcaacatcatgcatt

SEQ ID NO: 194782 - DNA, 373 bp, Homo sapiens
attcaatccaaaggcacagatgtacatccaaaaggagcaagagaaaaagagaaccatgacttccccaaaaggacaaagcaaggtacaagtgactgaccctaacaagacaatgaaacataagctttctgaccaaaaattcaaaatagcacttttaaagaaatttggtgatctctaagataacacagaaaggcarttcagaagtctatcagagaaatttaacaatgagattaaaataattttttaaaaatcaaacaaatcttggaactgagagacacattggctgaaatgaacaatttattaaagtctctcaacagcaggattcgtcaaggaaaagaaagaatcaatgaacttaaagacaggctatttgaaaata

SEQ ID NO: 194783 - DNA, 373 bp, Homo sapiens
attcaatccaaaggcacagatgtacatccaaaaggagcaagagaaaaagagaaccatgacttccccaaaaggacaaagcaaggtacaagtgactgaccctaacaagacaatgaaacataagctttctgaccaaaaattcaaaatagcacttttaaagaaatttggtgatctctaagataacacagaaaggcagttcagaagtctatcagagaaatttaacaatgagattaaaataattttttaaaaatcaaacaaatcttggaactgagagacacattggctgaaatgaacaatttattaaagtctctcaacagcaggattcgtcaargaaaagaaagaatcaatgaacttaaagacaggctatttgaaaata

SEQ ID NO: 194784 - DNA, 373 bp, Homo sapiens
attcaatccaaaggcacagatgtacatccaaaaggagcaagagaaaaagagaaccatgacttccccaaaaggacaaagcaaggtacaagtgactgaccctaacaagacaatgaaacataagctttctgaccaaaaattcaaaatagcacttttaaagaaatttggtgatctctaagataacacagaaaggcagttcagaagtctatcagagaaatttaacaatgagattaaaataattttttaaaaatcaaacaaatcttggaactgagagacacattggctgaaatgaacaatttattaaagtctctcaacagcaggattcgtcaaggaaaagaaagaatcartgaacttaaagacaggctatttgaaaata

SEQ ID NO: 194785 - DNA, 590 bp, Homo sapiens
ctttttgcctttcactattctaaaaattattttaaattttatacaagtgacagtctgtggtagattagaaagcaaaacctggtctttgcccacagggagtttgagaagctttggygtgtacaggaccctctctgtccttgcaagaaggtgttgcttacccacagggagccatgaaaaaccagggcgcctggcaggacccagccccttggacagcccaggaggtgagaaggatgttctctgcaatgcttctggcctgggggcttgaggtggcctggtttggactggacatcgaggcgctgtacaagaagcctggctgaggctggtcgtgcacaccaacggggtgtgttgttgacctgaatccaccatgcaaagcagggcagatgtttggctgttgaccagcccagggctccttgaacctgaagggtggggcctggtggtgtatttgggaggcttgggtctccttgcctggctgctgttggcccccttccaggccttccctgcacacatgggaggaggctgtgggaggctctgtggaatccgtgctgccctgtgcttcagctgtttgttctagtctccttcacagacagtgg

SEQ ID NO: 194786 - DNA, 375 bp, Homo sapiens
cgagtaaacacagaataaaagccaaagctactgggtcccaggagaaggagaagggcaggrtgcttttcttcccgaggacctggacggactcttaagctgcagtggcgaaagcagtgggacactggcgagggtgaggaagtgattgactgtgcatgagcagatttggtgacagaggtggctctcaagtcagtgggaaaaagtgggctggtggccacgggaatgcaccttgcagagcttcagctacacagggtaatgagcaaggccccactctgggaagtccattgcaccagctcctgcctgcgagcaggggagctaggaccggctcttcctgggagacgcaggcctcttctgatgggtgcctttgactaggggctc

SEQ ID NO: 194787 - DNA, 375 bp, Homo sapiens
cgagtaaacacagaataaaagccaaagctactgggtcccaggagaaggagaagggcagggtgcttttcttcccgaggacctggacggactcttaagmtgcagtggcgaaagcagtgggacactggcgagggtgaggaagtgattgactgtgcatgagcagatttggtgacagaggtggctctcaagtcagtgggaaaaagtgggctggtggccacgggaatgcaccttgcagagcttcagctacacagggtaatgagcaaggccccactctgggaagtccattgcaccagctcctgcctgcgagcaggggagctaggaccggctcttcctgggagacgcaggcctcttctgatgggtgcctttgactaggggctc

SEQ ID NO: 194788 - DNA, 375 bp, Homo sapiens
cgagtaaacacagaataaaagccaaagctactgggtcccaggagaaggagaagggcagggtgcttttcttcccgaggacctggacggactcttaagctgcagtggcgaaagcagtgggacactggcgagggtgaggaagtgattgactgtgcatgagcagatttggtgacagaggtggctctcaagtcagtgggaaaaagtgggctggtggccacgggaatgcaccttgcagagcttcagctacacagggtaatgagcaaggccccrctctgggaagtccattgcaccagctcctgcctgcgagcaggggagctaggaccggctcttcctgggagacgcaggcctcttctgatgggtgcctttgactaggggctc

SEQ ID NO: 194789 - DNA, 631 bp, Homo sapiens
tttttagttactttttttaagaaaacagaatagggacttcactgagctcacaggcttgataataagtgttcattacatgtccagatggagggaagagtttggtcagccacgtgctttgcctataacctggttgtgccactgtcttccacctaaaagaacctgagagtttctgataatcaaacaggaaagctcaccacaaaaggttagaatagcaatgcctttatgttacattaaataataatctgcatatgttcagtatttatagwgtttagggataattttgtctataaaaaccaacagattagctttatgattccattaaaatgtacttattttctatttgagattttaagctgaaagatttaagggtcttgtctaggtttgtacacagcattggatgcttaagataacttgagatttactatattcataagattaatttattacattacctacagaggggaaatcaaatatattatatttataaatgcaataaaaatgtttaaaggaatttaattaaccaagttgtaaatggggctgattatttaaggtagttttctctgttcagctggaacactaagaaaagcgtccttgaacaggattgctgaaattcactggatttataaaaaga

SEQ ID NO: 194790 - DNA, 631 bp, Homo sapiens
tttttagttactttttttaagaaaacagaatagggacttcactgagctcacaggcttgataataagtgttcattacatgtccagatggagggaagagtttggtcagccacgtgctttgcctataacctggttgtgccactgtcttccacctaaaagaacctgagagtttctgataatcaaacaggaaagctcaccacaaaaggttagaatagcaatgcctttatgttacattaaataataatctgcatatgttcagtatttatagagtttagggataattttgtctataaaaaccaacagattagctttatgattccattaaaatgtacttattttctayttgagattttaagctgaaagatttaagggtcttgtctaggtttgtacacagcattggatgcttaagataacttgagatttactatattcataagattaatttattacattacctacagaggggaaatcaaatatattatatttataaatgcaataaaaatgtttaaaggaatttaattaaccaagttgtaaatggggctgattatttaaggtagttttctctgttcagctggaacactaagaaaagcgtccttgaacaggattgctgaaattcactggatttataaaaaga

SEQ ID NO: 194791 - DNA, 463 bp, Homo sapiens
ttctatctaactgtatttttgtgttcatgaaccaatgcctctttcttgctccacttctcgtggctccagaaatccttggtgtgcttggtttgtagatgcacccctccaatttctgcctctgttttcatgtgaccgtctcctttgtatgtctcaaattttcctctgtcttcctcttcraagggcatcagtcattagattagggcccaccccaactttaggataatcttatcttgagatcctaaacttaattacatctgtaaagacgcttatttcaagtaagtttacattctgagtttccgtgtggacatgtcttttggaggtacacattccaccagtacgtcatctgaacagaatagagaacaccaatgaggaaagaggttgggagagagtgatgagtttatttcaagcatgtagttctgaagtgtctgtggaatatctgggtggagaggtgcagaaggtatat

SEQ ID NO: 194792 - DNA, 631 bp, Homo sapiens
tttttagttactttttttaagaaaacagaatagggacttcactgagctcacaggcttgataataagtgttcattacatgtccagatggagggaagagtttggtcagccacgtgctttgcctataacctggttgtgccactgtcttccacctaaaagaacctgagagtttctgataatcaaacaggaaagctcaccacaaaaggttagaatagcaatgcctttatgttacattaaataataatctgcatatgttcagtatttatagagtttagggataattttgtctataaaaaccaacagattagctttatgattccattaaaatgtacttattttctatttgagattttaagctgaaagatttaagggtcttgtctaggtttgtacacagcattggatgcttaagataacttgagatttactatattcataagattaatttattacattacctacagaggggaaatcaaatatattatatttataaatgcaataaaaatgtttaaaggaatttaattaaccaagttgtaaatggggctgattatttaaggtagttttctctgttcagctggaacactaagaaaagcgyccttgaacaggattgctgaaattcactggatttataaaaaga

SEQ ID NO: 194793 - DNA, 533 bp, Homo sapiens
cataatagctccttgcagtggtgagtagtcatggtccctaagcctgaggacctttcagacattgtagcctcaaaatgcaagaaatgagactcacaatccttccaggtttgacttattcttgggccatgatggccatttgcagagggaagctagtgggtggttccaggattctggttcttaacaccacaaatcagaaagcttgaataaggagactgagtctcctattagtaccactttctggacacatgtcacagcatcagagactagtggcctgaccaccaaaatattcctcatccttgatggcttctttttgccctatcaggcarcatccaaataatgccatagtgttgtatccttctcttctgtgagggtgcggagaggatgcatggaacagaggcacagatatggctgtggctctttgcaggtggggtcagggctgaggtgagagaaggaaccgagtcttggtgcttgccatcttggtctagaaggcgactggaggcaaatgtgaggcaaagggttttggctggttcccc

SEQ ID NO: 194794 - DNA, 533 bp, Homo sapiens
cataatagctccttgcagtggtgagtagtcatggtccctaagcctgaggacctttcagacattgtagcctcaaaatgcaagaaatgagactcacaatccttccaggtttgacttattcttgggccatgatggccatttgcagagggaagctagtgggtggttccaggattctggttcttaacaccacaaatcagaaagcttgaataaggagactgagtctcctattagtaccactttctggacacatgtcacagcatcagagactagtggcctgaccaccaaaatattcctcatccttgatggcttctttttgccctatcaggcaacatccaaataatgccatagtgttgtatccttctcttctgtgagggtgcggagaggatgcatggaacagaggcacagatatggctgtggctctttgcaggtggggtcagggctgaggtgagagaaggaaccgagtcttggtgcytgccatcttggtctagaaggcgactggaggcaaatgtgaggcaaagggttttggctggttcccc

SEQ ID NO: 194795 - DNA, 623 bp, Homo sapiens
aagcttaggtaacttgcccaagaccacaaagctaataattaacgccactagaaagtgaacacttgtcatttgtttacaaatcacctgttatatggcatatttacatatggcagrtttcacactacatcagagctgagtaggtgagatagagagcatatgcctttcagtactacagatacttactacttgaccatttgcaaaaaagaaaaacaaagttggccatccctggtgtggactaaggaaacatctccacctaattttccaaccacctttatgaacagcctcctcactgtgattgcttcaatgtttgaaatccatactttagtttatgtatttctccaagtatggaaaactcttcccaattatttacctaacccactttgctccctcttcatgtctctttatgcatctccctctaccagccttctctggtcttccaagatgaactgagggctcccatcaatacctgctactgtcctaacactcaccacattaaattaaaagtgtcaatttacatcccaaatcttctacttgaaatgttgagatccttttggtagggatggtgacataatcatattaggaacataatgggcacccaacagaaattttgtggcctgtgctga

SEQ ID NO: 194796 - DNA, 432 bp, Homo sapiens
ggagaattgcttgagcctgggagatcaaggctgcagtgagccatgtttgtgcccctgcactccagcctgggatacagagtgagaccctgtctccaaacaaacaaacagataaataaatattgtctagcatttttattagtgtcatgagggaggaattttgtctaggacagcgctggagaagttgatatcttcagtctaggaaaaaggaacagggataggaaatgacatctcccagaatcaggtgtgtaaaakagcacaacgtgtttagggagacaaaaggggttctgtgtgtctggatttcagttaggtagagtggggaccaatgaaggggtacagctaggataaatgtgggactagagagtaaggtgggggctgggtcacaaaaattataagccccctttataatgaggcagccttggtctcacctccctc

SEQ ID NO: 194797 - DNA, 616 bp, Homo sapiens
tcagagaaactaggtctgttgtccaaggcaaacatccaggaaatgatctgtaggactctgaagtttgcaaaccaacattttatgtggcaaaagcagatctgagtcttgagtatggttaagacaataccttttgtaaatatctgaaacttacttatccataattcagtagccgtttttctaccctcccttcttcctttccttctgattcttctgcactgatctaattaattggcattgcccgagtctgccccttagggatttacctcaccttgaatggcctgtatggaaagcacctctcagcaggaaaagatcaacttaaaaacgtttctgtggcaaccattgactcccaaagactgctcctcctttgaccatatatctgaaagccagaaaatagattactttttaaagtttcattttacagcaaagtctacttaccartgatgaacagctaatattttaaaaaatatagtcagttatgtaacctctgctgattgttgccagtggaaatcaaggagcttagagctatcctcttccctcaatccttagctcctctgccaatagaattttttttcaaacgccaatagaattggagtttggggaagcttaggtgaattga

SEQ ID NO: 194798 - DNA, 483 bp, Homo sapiens
gaattcttttagtttgtttggtaccttcctgcagtggttcttggagcaaaagatcacagtgtgagtttccacacactattctgtctatccaagtgggagctgcacattagctctacctcctatccaccatcttgtccccttaatcacgctttctttatctagttcactgttaatggatatctaggttgattccgtatatttgctattttaaacagtgctgtgatgaacatacgwgttaatgtgtcttcatggtttcttgtatagtttcctttgctgtgcagaagatttagtttaattagtttccacttgtcactttttgtttttgttgtgtttgattttggagtcttcattatggcagataatacagggttttctaggtatagtatcatgttgtctgctaaaagagataatttgactttctctcttcttatttggatgccttttatttctttatcttgcctgattccttgggctaggacactc

SEQ ID NO: 194799 - DNA, 614 bp, Homo sapiens
gttgatatgttcggggtttcaagttcttttcaattcagtctttgcaggttgtgtgtttccaggaatttgtccatttcctctagattttctaatttgtgtggacagaggtgttcataatagtttctgaggatcctttatatttctgtgagatcagtcgttatttctgattctgcatgtttgggttttctctcattttttctgtgttaatctagctaatggttaattgatcttgtttatttattctttcagagaacccacttttgctttatttgatcctttgtatgaatttttgcctttcaattttgttcagtcttgctccaattatagttatttgttttcttctgctagctttggggttactttgttcttgtttttcaaattgctctagatctagtattagattgttaaattgaggtctttctaacttcttgatgtaggtgtgtttgctactttttagatgtctattaggtccaattgygcaagtgtttaatttaggtccagagtttccttgtcagttttctgccgcaatgatctgtccaattctgtcagtggaatgttgaaattccacactattattatgtggctgtgtaaatacttttgaaggtctaaaagta

SEQ ID NO: 194800 - DNA, 545 bp, Homo sapiens
gcttttggtttcttgatcatgaagtctttgcctaagccagtgtctaaaagggtttttccaatgttatcttctagaatttttatggtttcaggtctcagatttaagtttttgatccatctttcgttgatttttgttgcataaggtgagagatgaagatcaagattccttctttgtgtggcttgccaattatctcagcaccatttgttgaatagggtatcattttcccactttatgtttctgtttgttttgycaaagatcagttggctgtaagtatttggctttatttcttgttttctcctctattctgttccattggtcaatgtgcctatttttataccagtaccatgctgttttggtaactatagcctggtactatagtttgaagttgagcaatgggaggtctccttttttttttctttttgcttagtcttgctttgactatgtgggctcttttttggttccatatgaattttaggatttttttctagctctgtgaagaatgatggtggtattttgatgggaattgcattgaatttgtagattgc

SEQ ID NO: 194801 - DNA, 583 bp, Homo sapiens
gggagacatgataatgacctctatctttatcaagccagaatggcaccgctaagtcaggcttataattgctggttctcatctttttagtggagaaacattgagctacatagattttgctgtccctgatatctgagcttatttcttcatctttagaaaattgtgaacttgcattatttccttggttcacatgaagattagaccatcgtgattaaatttcctatgtgcctgtattgttacagcatctctctgttatttgatattctgtcaattggaactctttttctgatggaaatgagatattatttatttatacagtttattagggtctagttgatatacaaaaatggtgcacattyaatgtatacaagttgatgagtttggacatatacatacacctttaaaactatcattacaatcagggtaatcaacatacacaacgcctcccaaagttttcttgtgcccttttgttttaagaactatttactaactggcatttctcctctaatgtggagcagactgactgatttacagagtatttattatacctagttttttctgtcttggtgtcacatcacctcttatc

SEQ ID NO: 194802 - DNA, 583 bp, Homo sapiens
gggagacatgataatgacctctatctttatcaagccagaatggcaccgctaagtcaggcttataattgctggttctcatctttttagtggagaaacattgagctacatagattttgctgtccctgatatctgagcttatttcttcatctttagaaaattgtgaacttgcattatttccttggttcacatgaagattagaccatcgtgattaaatttcctatgtgcctgtattgttacagcatctctctgttatttgatattctgtcaattggaactctttttctgatggaaatgagatattatttatttatacagtttattagggtctagttgatatacaaaaatggtgcacattcaatgtatacaagttgatgagtttggacatatacatacacctttaaaactatcattacartcagggtaatcaacatacacaacgcctcccaaagttttcttgtgcccttttgttttaagaactatttactaactggcatttctcctctaatgtggagcagactgactgatttacagagtatttattatacctagttttttctgtcttggtgtcacatcacctcttatc

SEQ ID NO: 194803 - DNA, 489 bp, Homo sapiens
aatgaagccagtattaccctaataccaaaaccaggaaaggacataacaaacagaaaactacagaccaatattcctgatgaacatatatgcaaaaatctttaacaaaatactggctaaccaaatccaacagtatatcaaaaagataatccaccacaatcaagtgagttttttttttttaaccagggttgcagggatggtttaccacacacaagtcaataaatgtgatacatcatataaacagaattaaaaacaaaaatcgtatgactatctaaatagatgccgaaaaagcattggacaatatccagcatccctttatgattaaaaccctcagcaaaactggcatagaagggacatacctcaaggtaatagaagccatmtatgacaaacccacagccagcataacatcgaatggggaaaagtttaaagtattctccctgagaacaggaataagacaaggatccccagttttacaacttctattcaacatag

SEQ ID NO: 194804 - DNA, 524 bp, Homo sapiens
acccattggaggcagtgatcccagaagggccattgagtgctagtgtagccattccacctccaacctgcccagtgcttgcctaattgaaaagctgaagtatggctatccacacagcaacaccctaaaacatggttttcctaatatgggacagcgatgattcataatattttgttcaaaaggtctacctaattacccctctttgtatacaaacctagactttgtattagatggggcttctgcttgtccaaaaacttttcaatttatccttaagtttaygctcttagtctgtatttttaagtttaatacaggctagtactttttagggtcagttggcttttattcttactgtgattttcctgttctgtccacaaatgagcacacgccgtggttagttgttagagagatgttacacaagatgttatttgcataatgagttaactcaccttcattaatttcctgttagtcctctttctttttctaatccttgctcactagggcagttgtgatgtttgcctggctaactc

SEQ ID NO: 194805 - DNA, 570 bp, Homo sapiens
gatttttcatatgctttttctacatctattggtttaataatgtggcttttattctaaatattttattctaacacttgttgataagatggattacattaatttctatttgaatgttggacaaggctttcattcgtgggataaatttcacttagttgtatgtataatattttataattgttagatttgttttgctaacattttgttgaaaatttttacatctatatttatgagagatattagtctgtggttttcttttcttgtaatgtctttgtttggtagtagtattagagtaatactggccccatacaatatgaaactattccctctgtttctatcttctgaaagagagagtcgagaattggtataattttttccttaaatctttggtagaacctaccattgagcactttcatttctgatactcataatttgtgtcccttttcatagttagcctggctgtaagacatakaaaaaaagagtgtttttcatactctcatgcaccattcagtagaacacttctgacaccaaatgtgtgcatttttttcccaggcacacatcaagtaattctcc

SEQ ID NO: 194806 - DNA, 433 bp, Homo sapiens
aggttttccagttatctttctgttcttgatttctagtttatttctgttgtggtctgaaagtagacrctgtatgatttgtattcttttaaatttgtttaggtgtattttatggcccagaatgtggtctgtcatggtgaatattgcatgtgagcttaaaataaatgggtattttgctgttgttggataaagtagtctgtagatgtcaattacatccaggtgattaatggtgttggtgagttcagctatgttcttactgattttctgcttgctgaatcatctctacatttctgatagaggggtgttgaagtctccaactataatagtctcttcatctatttctccttgcatttctgtcagtttttgccacatgtattttgaaacgtttttattagacacatatacattaatgattatcatatctccttggagaatt

SEQ ID NO: 194807 - DNA, 595 bp, Homo sapiens
cagaatcagagttagataaggcagcggtgagggctgggtatgagtcaaagaaggcttctgatgggaaaacttgagccaagtttgaaaagatgtgtgggaaaagacaaggaaaaaaaggatgaggagcatgggatgactgtttgagtagagactagctatgcaaagacccagaggcctggagaaacagtctagcaaatttggggcatgtgacctgaatgccagcaattagggtggcaagttaatattcagtgctggatgggcagctgcggagtcatataggaaggggcttgtatgtcatgctaagctatatacatggtatgaggaatctttaaagtgtttcaaacgggaacagtgggaacagcatcatcaaatttgccttcataaaatatcactataaaaacattgtggaagagaaggatyagaagaaaataagattagaggcaagaagatcaactagagtttcttataggaatttgtattggaaagggacatagcctgaactcagacaggaacagtgggtataaagaagaatcaagacgtgacatggaatgacttagaaggagacacccatatttctggcttatcatggtgccat

SEQ ID NO: 194808 - DNA, 476 bp, Homo sapiens
aaaaaaaggatgaggagcatgggatgactgtttgagtagagactagctatgcaaagacccagaggcctggagaaacagtctagcaaatttggggcatgtgacctgaatgccagcaattagggtggcaagttaatattcagtgctggatgggcagctgcggagtcatataggaaggggcttgtatgtcatgctaagctatatacatggtatgaggaatctttaaagtgtttcaaacgggaacagtgggaacagcatcatcaaatttgccttcataaaatatcactataaaaacattgtggaagagaaggattagaagaaaataagattagargcaagaagatcaactagagtttcttataggaatttgtattggaaagggacatagcctgaactcagacaggaacagtgggtataaagaagaatcaagacgtgacatggaatgacttagaaggagacacccatatttctggcttatc

SEQ ID NO: 194809 - DNA, 445 bp, Homo sapiens
cctattcgcattcttgagattttgtggatacgaatccaatgtatcctgacctagaatgaccttctaaaatgacaaaaatawctcagataattgtgggtgtaacagaggtaaaagaggctgaattattgaaatggtagcctcaattttacctgacatgctgaggagaactggtcttcatttacagtgttttgccagtctcagtgttaatcatgctgactgctcctttcaatacccctctgaggtaagttagctcctccattaaccctaatagaagaagtctgactcagcaggaatactaaatgagaaacagagaaaatccaattcagaccttgcagccacccaacccaagttactctctgagggcctcatcattcttttctgcagataaagatataccaagattgactcagcacagaatgcatggataagcgttggacaattagaa

SEQ ID NO: 194810 - DNA, 587 bp, Homo sapiens
ttttgggttcttgatcatgaagtctttgcctaagccagtgtctagaaggytttttctaatgttatcctctagaatatttatggtttcaggtcttaggtttaagtccttgatccaccttgagtagatttttgtgtaaggtgagagatcaggatccaatttcattcttctacatgtggcttgccaaacatcacaagcaccatttgttgaaaaggatgtcttttccccacttcatgtttttgtttgctttgtcgaagatcaattggctgtaagtgtctggttttatttctgggttctctattctgttccattggtctctgtgcctatttttatatcaaaacagcatggtgctggtataaaaataccagtgactatagtatagtttgaagtaaggtaatgtgatgcctccagatttgttctttttgcttagttttgctttggctatgtgggctcatttttggtttcatatgaattttaggattgtttttcctagttctgtgaagaatgatggtggtattttgatgagaattgtgagtttgtaggcatacaatcatatcatcagcaaacagtgacactttgacttcctcttt

SEQ ID NO: 194811 - DNA, 587 bp, Homo sapiens
aaaatctatttttcgcagaacacactgagaaatgctgagtttgctgaagctttttttaaacatttaaaccttgtctcagtttaactagaaagaattaagggaagggtcactgctgttckctgtgtcaaaatcaaagtttcactgcttctataaacatcatgttgatagggactactgttgaaagggacagaaaccccttcatacccccacacccaggaagttgtatcttatgattgttgaattaatatcattagggtcacaaaatctggcccccacacaatcttggaatttggggatttgttttaaagaaagaggcattacttcacaattccaaattcctatctccagcccaaacttcctttctttagaccttcaaatattgcagcatctttttacttttccactaaagttggtattttcctatgcttcttccttaggtatatcagcaaaaggactaactgcaatactccactaccagaacagaattcactacattcttgtcaagccagtttctccttctgattttattacacctgttaaaagaaccatcaccctactcgtcctctcaacctgaaactttagtctgt

SEQ ID NO: 194812 - DNA, 581 bp, Homo sapiens
atcatagtaacatcttagattataaagggctctatttataggttttcaaagcatctccatgctcattacctcctttcaaatatcttcttcacaatggtaaagcagaacaaaattaggaggcacattttagagacaaataatctaaagtttcacttgctaacattcttcagtgctttggtaataatacaacataacacaatgtgttaaaaattaaagayagaaaagaatagtgactgatggcatatggtcatgaaatgtttacagttcctcccatcaagaggtagaatctatttcccaccatttaatctgggctggccttgtgactttctgagactaatagaatgtggtgaagtggcactatgacttctagaggctagaagtcctaagagatctcgcagcttccatttcacttttttggaatacttccctgagaccaccaggtaagaaagccagttgggcccactggagtatgagagaatttaaattgtcggttttaaatcactaagtgttggggtggtttgttatgttgtgataattaactagagcagaactacggctcaaaaatatcaaatgacatgttt

SEQ ID NO: 194813 - DNA, 569 bp, Homo sapiens
cttccattttcaaaaagagaaccaataaaatcagtctgaaatgaaatcttttgaggttcagaggttaaaataatacattgggaaaacttatgctcagaatcyagaatttatttataattcatttctaaaacttttcagcctagttgcaagacaatgaagtgaataaattttaaacaataataacagccattcaaaatacattacatctcctgaaaagtaatattacatgagcaagaaatagtcccttaaaaagttactatatgtataactgtagaacttgtggtaagtcagtatctgtaaggaaactaggaaacctatcattttttaaagtaaataattattaaataatatagatataacttcaaggtcttgattccttcctcaaagaccaaaaattaaagtgtcattgaaaattctttctggttacctctgcttaaaaaatgattaagccatctttgtttaatattttaattgcttgttaataatttttgctgcttaaaggagcagcaaaaaataacacaggaaaacaatgagtttagtataatggataagaactttaaatttctata

SEQ ID NO: 194814 - DNA, 639 bp, Homo sapiens
cttttgtttattacagcaccctgcaatttaaaggcagctatcattactgccatcagatctttgtaaaatgattaattaaacaatgatgatatttctctgtgaatttctaactcctggtattatcagtgtacagagtacctaaaagaaaagtgagaataaacttcaggagaaatcaactgtggttctcagggaaccacaataaatttcttccttcaaaatggctcaaatcagtatctgaaatacaaaacaaccatakagctttatatgattacttcattttgtatatacccagtcttaataacttccataaaatttcatgcaccacaacaggaactatttccttccattatttcatctcccaggtaacacctattaaagaaaacttgcgtcatataaacaaaaatagacaatctcaattctaacatagtggcacaactaacatttcattcttattatctgtgaaaagttcctatcacccaaggaggtctatgagctccttgggtaaaggtactctgtctacgacatagtgtcagctcaaaaaaaatttatcttaaatgaagaaaaacctggaaattctaccaactgtcttaatcatttataataataaagggaagcaaagaaacaattaaaatgacacag

SEQ ID NO: 194815 - DNA, 337 bp, Homo sapiens
atgattaattaaacaatgatgatatttctctgtgaatttctaactcctggtattatcagtgtacagagtacctaaaagaaaagtgagaataaacttcaggagaaatcaactgtggttctcagggaaccacaataaatttcttccttcaaaatggctcaaatcagtatctgaaatacaaaacaaccatagagctttatatgattacttcattttgtatatacccagtcttaataacttccataaaatttcatgcaccacaacaggaactatttccttccattatttcatctcmcaggtaacacctattaaagaaaacttgcgtcatataaacaaaaat

SEQ ID NO: 194816 - DNA, 572 bp, Homo sapiens
acttcttctgaaaactccagtctgtcaatattgtgctcccattcctacatgacaacagatagaactaaattgcagcggtcctttttaaayagggcatttgctttccacatagcaggtcccaagtgtccgtggccacgtattacggcatttgtgttgtttccttatagtaaagagggaaaataaatgtaccatatacgctttgtctattgaatgccaaagtgcaaaatgaccaagaaagcaagcaattcttgggcccaaccagtttcatttatttacttaacctgctgtttctgttttacattttataaactagaaaattaaaatgcccatgaaagtgacataatctacataagttcacctttatatcattgcctacttcttaaagtgacatagctatcaggtatagcagccattcctccacattagttatactacccatacctctacatctctcaaaagctgctttttcacaaaacaatttctgatctcagagtgagacccccttcccctccaccctcagatctccttagcaatttaaatttataaatttcacagagaaaaagagagaggta

SEQ ID NO: 194817 - DNA, 572 bp, Homo sapiens
acttcttctgaaaactccagtctgtcaatattgtgctcccattcctacatgacaacagatagaactaaattgcagcggtcctttttaaatagggcatttgctttccacatagcaggtcccaagtgtccgtggccacgtattayggcatttgtgttgtttccttatagtaaagagggaaaataaatgtaccatatacgctttgtctattgaatgccaaagtgcaaaatgaccaagaaagcaagcaattcttgggcccaaccagtttcatttatttacttaacctgctgtttctgttttacattttataaactagaaaattaaaatgcccatgaaagtgacataatctacataagttcacctttatatcattgcctacttcttaaagtgacatagctatcaggtatagcagccattcctccacattagttatactacccatacctctacatctctcaaaagctgctttttcacaaaacaatttctgatctcagagtgagacccccttcccctccaccctcagatctccttagcaatttaaatttataaatttcacagagaaaaagagagaggta

SEQ ID NO: 194818 - DNA, 558 bp, Homo sapiens
ataaggcacaaagagaaacgtacatttgtttggacaaagtaaagaatactagtggagatgggcctacttcaaaataaatgtgtgtggagggagtaatagaaaagaaatggaatatggggacacccaggcagattccccaaatccacatatacaacctttcttcctctgtcacaatttttacatcacagtatgtgcattgtgtggggtgaggggcatcgtgtatgaaggtagccaytttgtacatgttaccttgttaaaaacaaaagagcagcaacatgtttagagtggtgtctatagatagaacactgctgttatgtttaaggaaaattggggcagggggcagaaaagatcaatatgactagttagaagactattaaggagaactttgtacatgaattatggatgtaagaattagaaaaaaaaagagatcatgttcagaattttagcttttttacaattgtagtggaaaaagaaaactcctagagtaatgaatcaatggtatcctacaaaaagagaggtgccaaaaataccatgaaatattatattaaaaaattcaca

SEQ ID NO: 194819 - DNA, 558 bp, Homo sapiens
ataaggcacaaagagaaacgtacatttgtttggacaaagtaaagaatactagtggagatgggcctacttcaaaataaatgtgtgtggagggagtaatagaaaagaaatggaatatggggacacccaggcagattccccaaatccacatatacaacctttcttcctctgtcacaatttttacatcacagtatgtgcattgtgtggggtgaggggcatcgtgtatgaaggtagccattttgtacatgttaccttgttaaaaacaaaagrgcagcaacatgtttagagtggtgtctatagatagaacactgctgttatgtttaaggaaaattggggcagggggcagaaaagatcaatatgactagttagaagactattaaggagaactttgtacatgaattatggatgtaagaattagaaaaaaaaagagatcatgttcagaattttagcttttttacaattgtagtggaaaaagaaaactcctagagtaatgaatcaatggtatcctacaaaaagagaggtgccaaaaataccatgaaatattatattaaaaaattcaca

SEQ ID NO: 194820 - DNA, 550 bp, Homo sapiens
atactagcttttgttaagactagtcaagtgcaagtagtgagaaggctaatacgtgttttaattttagttatgcctgtgcttgtataacatggcttatttattcacttttatttgcttctgtttttaagtcttaattgtagtttaaggtacaaatttccttatcatcaataaattctgtatgtatattcactgtttagcaatcgaagtcttaaatttaatgtgatgtggttgtaagtcatattttctgacatcaaagtctttcaagagccctttctcttctgtaagtaatagttttcttctgagatggggagaataaaacactttctaagaagcacacgggaaaaaaacatactctgatgccctaagaacatcgtatttgggtatcctgtaatggaactgctgattatatacagtttctgagtgtagttgtcatcaggcaaggataaatctttgggtgctctgtgaccagaaccacacttagccacctgcttctccaggatagcacagcstgtggccatatgtgtgaaaacgccattctgaaaagctgaaa

SEQ ID NO: 194821 - DNA, 550 bp, Homo sapiens
ctgctctcctccagtgccctccctgaattgccaagtgtctgtcctagtgttagtctatacttcttcttttccatagaagacctggaaggactctatttagtagttccacctccttggaagctaaagtgaggatcatgggccaggcaagaggccttttttatttatttctcccagttcttagtagttacaccatcagcatcagcaagaagtacttcttctccctccttgagatccttttgttcctctcacctatgtctttctcctctaaatttatttattcctttattcatccaacagatatttggggggtcactgactactatatgctggaccccatgctagttactggggctttggcatgaactagataatctttttccttacagagcttacaatctaaagctagtgatggtcatagaaccagaaatacagtaacaccctctgtaggagataaggtattacagaagcataaaacaggggcaccaaacctagtctgaaagaacaagaaaagtctctgagagaaagtgrcttgtaaactgagaagatctga

SEQ ID NO: 194822 - DNA, 501 bp, Homo sapiens
tcttttgttgatctaatttttgaattggtttctaatatagaaaagctgttgttagatggcgttgtcccagacttggggcacaaactgtgtggagagccaaggaagggcatgggttaaaaatacagaatgtgaggcagtggatactgtcttgcctctgagtccttttccagtgcygggtgttcttcattcccatcttcacccttttaactgttattacagggggattccatgaggagagggtaaacccttaaatttccgagtctggtactgttggtgttgggactctggaaacagagtctcaggaatgattatatggtcctcacatctttcacttagcaatgagtaagtctgtaacatgactttgaggtattgccaaaaagcagctacttctgttattcaaagtcagtgataccagtgaaagatttaaaaatcactttagagagaaggaaaggactcttttacaattaaatgcgttgtatttttaaatatattattccaaga

SEQ ID NO: 194823 - DNA, 534 bp, Homo sapiens
ttcatgcttctcaggtatgcagttctaatgaattttgacaatcacacacagttaacaaccactacaatcacaatgactaaatgtagtacatttctgtcatctaaaacattgtatcaggcccctttatagaaggttcctctcacccccacctagcccatggcaatcactgacttgatttctgcccttccagttttggtttgccaaaatgtcatataaatggaatcatataatatatagtgttttgagtctggcttccttcacttaacatttgagatttattcgtgttgcatamgtaagtataatatttcactcatttttattgctgagaagtactgcatttcatggctatccacttatagatatttaaattatttccagatttgaacaattatgaataaagccattataaatatttacatatggtttttctccatagaaaaatgttttctgctttttgcggtaaatggctaggaggaggcttgctacattatagggtaagtttatgtttatctttataagaaattgcccaattgt

SEQ ID NO: 194824 - DNA, 600 bp, Homo sapiens
tcccactcctcctttagatggtactactttttctagcaaattgtctgtgattgttcacctgggttatgttaggtatttcagctagcattttcttcyagattagactctattgaatctatccctctcatggttatattccaggggcctagtacaatgcctggcatataatcaatgctcaccaaatatttgtggtctgatttaataaatgaacaaatagtaggtattattataagttcgtacccttaaacaggtctgaggtacaactgagggtgcttgtgtggacaatggctggtctattaggatctaagctgtcctagaaacttatatagatgataggtagaaataactaatgaaggggcaggttatcttgctcccagatcttcatactttctcagcttgggaatctccatagagtctccaaaccactgtggtcccagaggagatctgcccacccagaatacttgcttaaagaggtcagccctaatatacagtgaaactccaatattcatctgtattcaaagatttatcttagatactccatagcttgatgaagcttacattctaatggaatagatgatcaacaaacaaacaaataaataa

SEQ ID NO: 194825 - DNA, 600 bp, Homo sapiens
tcccactcctcctttagatggtactactttttctagcaaattgtctgtgattgttcacctgggttatgttaggtatttcagctagcattttcttctagattagactctattgaatctatccctctcatggttatattccaggggcctagtacaatgcctggcatataatcaatgctcamcaaatatttgtggtctgatttaataaatgaacaaatagtaggtattattataagttcgtacccttaaacaggtctgaggtacaactgagggtgcttgtgtggacaatggctggtctattaggatctaagctgtcctagaaacttatatagatgataggtagaaataactaatgaaggggcaggttatcttgctcccagatcttcatactttctcagcttgggaatctccatagagtctccaaaccactgtggtcccagaggagatctgcccacccagaatacttgcttaaagaggtcagccctaatatacagtgaaactccaatattcatctgtattcaaagatttatcttagatactccatagcttgatgaagcttacattctaatggaatagatgatcaacaaacaaacaaataaataa

SEQ ID NO: 194826 - DNA, 525 bp, Homo sapiens
ccttaaacacttcaatttcaactactacctgtcctacrtaaaattactgtcatatatttaacctctacatttgttataaaactcacaatacattagtgttaccactttaaacaaccaagtgatcaagttttatttagtatcagcagcatgtttaccattttccagtgcttctcatcccttcttgcattaccatacttccatctgaaataatttttattttgccaaaagaacttaatttggtatttcttttagtttagatttgctgactatgaattctcttaggttttgtttgcctgaaattatttttattttaccttctttctagaagattatttgcaccagtaaaaaaaaatccatgttggcagtcatttttctttcagctttgacttttattatttttgtttaaaactcagctttcagtctttttgatagcttctctaaaaataatatcttcttttctctggcctcctttaaaatttctctttgtctttggttgcccacatatagttctgtttgtatttaccc

SEQ ID NO: 194827 - DNA, 525 bp, Homo sapiens
ccttaaacacttcaatttcaactactacctgtcctacataaaattactgtcatatatttaacctctacatttgttataaaactcacaatacattagtgttaccactttaaacaaccaagtgatcaagttttatttagtatcagcagcatgtttaccattttccagtgcttctcatcccttcttgcattaccatacttccatctgaaataatttttattttgccaaaagaacttaatttggtatttcttttagtttagatttgctgactatgaattctcttaggttttgtttgcctgaaatyatttttattttaccttctttctagaagattatttgcaccagtaaaaaaaaatccatgttggcagtcatttttctttcagctttgacttttattatttttgtttaaaactcagctttcagtctttttgatagcttctctaaaaataatatcttcttttctctggcctcctttaaaatttctctttgtctttggttgcccacatatagttctgtttgtatttaccc

SEQ ID NO: 194828 - DNA, 402 bp, Homo sapiens
gaattctcagcatagctcttcagaatccacataaataagtagcagttgacacatgagattaaatctacttaccacccctggtttaaaatactgttttcagaaagtgccaattaaacaacaaatttgagtgccagatatgagtaaggcacttcaaagaacttacacccaagttcagaaaaaaataaaaatattcataatgtattttgttttgtttttattcaaattagcactcactgaggttcttgaagaaaaatatatattccctatcatttagatcactaacktaattgacagaaaaaaaagtgggaaaagttgcattgtgcttctgaaagcatatttgagaagagcaatggaaagacagttttcttatttcttatcatttaccaccatagggcacttcag

SEQ ID NO: 194829 - DNA, 577 bp, Homo sapiens
tgacaagcatgcttacacattaactggatatgccctggagcacttatatgacagcgaaaccattagaaactattccttgggctgtaatggctcacactttgatgtaacttcccatctgaggatgcaaccagacccagcacaaggacacaagggaacatctgttataataaccaacggaagctgatgttttgctgaaatattttgttctttaaggatctctgaaacatatttatagtttaataccccattaccagcatttactatgccacagattgttagagagtataacttaagttactgggtatttgatacgtgttcctataaaatcaaagaaaacatagcactagcattcagggttatacacagaaaagggagctaaattgaatacacaaatttcccctctaattatatgggaaccagaatagataaattttgacttgaaaaatattcatgtagatcaagtgtgcatatatactacatgagaggactgatgaatgacaacattgcattgtgactatccagtgatcctcawacacacaaactattacttacaaactgcggtatacattttacatat

SEQ ID NO: 194830 - DNA, 630 bp, Homo sapiens
tttaggcaggttacagttaactttctagatttagccaaaatgtagttggtagaaatttatgacagagaagaaaaatagcaagatttatttaatgctctattctctagtaattaaagcaaaatgatataagtgattagagagatttcatagataatatttcctaggagtcccgtgcccaaaactcttgccatatttaaggaagggaatgtactggcagaacttgacttacaattttggaaacagaacatgaaattgaatactcagggattagtagtatattttcatcatttaacacagttatttcacagtccataggtaggtgacaatctgaacgataatatgaaagatgagtactgggttgtttgtatatgaaaggagaggctacataaaattaaataatgttaacatttgtgctgtaaatgcaaaaaagtgcaagtaagtgagaaagttagtggttatatatattttcaaaaaattcaaagtgcagttgacccttgaataayatgggtttgaactgtgcagattcacttatgtgtggttttttttccaatcaaatgcagataaaaaacccagtatttggagaaatgtgaaacctgagtatacagagggcgatgttttgtataagtgagc

SEQ ID NO: 194831 - DNA, 457 bp, Homo sapiens
gcactattcttaattcactctataccgtgttgtcacatgctgcctctgggcagagaatcccacttaaaataagctttaggggatcttctagaaaagggtagtgtgctccaatttttatttctccttcttatgggggatgaggatcaattatagtacaagaccatttggaaaatatgcatatatattttaaaatgaaatacaagatttccgccctcaagatctaaaccaagtaagtttgatggatggcagcacagataaagaaatcttctgaatacacatttgatttttatagctctctctttcaagrgtaggatattactaagatattcagtgcaatctatcagtcctagtagtatttagaagtgacagagtgaatgctgatatttggaaaattgagcatttgaccattttggggtcactcacctggcctagtggaatagcttacactttaatacaa

SEQ ID NO: 194832 - DNA, 631 bp, Homo sapiens
agcacaaaagatgtattatcggtgtgaaggtttggtctaactgctccaacaaatgcaatgcacacacatcaggactcaaacaagaaagaaatttgttttgttgtgttgtactttgtttttcagaaatcagtccagtgtaagcattagaactgctttgctagtttctcctcacctgtggctctgttgtccacaacacacttccctcacatgatccagtattgtcactagatctcctatacaaattggaaacaagagttgtgacaagatctttcaagaacacacacttttaatagtgccaaaatactggtcattctgcagaggcattaccctagagggccgttatcctatgtctctcccctgcattgatatttctatccatttttgaggattcaaagatagacatcggataatcaagatcattgggttaaaaaacaataacagtaaagtttagaagagaatgaatggttagtccacaaaacatggaatgttggatcaggattggaaactgaggcttcagaatccctctgcagtcaggggagtcctctgaaagcccccaaagctgcttggactctcycatcagcatcattgtggagacaccttaccacccatgatatgagtttcgagaagcacc

SEQ ID NO: 194833 - DNA, 668 bp, Homo sapiens
cattcttgtaacttagctcccacttacaagtgagaacatatgatatttggttttccattcctgagttactccacttagaaaaatggcatccagctccatccaagttgctacaaagacattgtttcattcctttttatggctgagtagtataccatgttatagatgtaatacatttctttaatccattcattggttgatgggtacttagattggttccatatatttgcaactgtgaactgtgctgctataaacaagtgtgtgcatgtgtttttttcatataatgayttcttttcctttgggtagatacccagtagtggaattgctggagcaaatggtagctctacttttagttccttaaggaacctccatactgttttccaaatgtactaatttacattcccaccagcagtgtagaagtgttcccttctcaccacatccacactaacgtctcttggtttttgactttttaattatggccattcttgcaggagtgaggtggtatctcattgtgattttaatttgtatttccctgatggttagtgatattgagcattttttcgtttgttggctgtgtgtatatcttgagaaatgtcttgtatccattgcccactttttgatgggtttatttttttttcttgctgaaaggaacaattttttaaaaaaagact

SEQ ID NO: 194834 - DNA, 668 bp, Homo sapiens
cattcttgtaacttagctcccacttacaagtgagaacatatgatatttggttttccattcctgagttactccacttagaaaaatggcatccagctccatccaagttgctacaaagacattgtttcattcctttttatggctgagtagtataccatgttatagatgtaatacatttctttaatccattcattggttgatgggtacttagattggttccatatatttgcaactgtgaactgtgctgctataaacaagtgtgtgcatgtgtttttttcatataatgatttcttttcctttgggtagatacccagtagtggaattgctggagcaaatggtagctctacttttagttccttaaggaacctccatactgttttccawatgtactaatttacattcccaccagcagtgtagaagtgttcccttctcaccacatccacactaacgtctcttggtttttgactttttaattatggccattcttgcaggagtgaggtggtatctcattgtgattttaatttgtatttccctgatggttagtgatattgagcattttttcgtttgttggctgtgtgtatatcttgagaaatgtcttgtatccattgcccactttttgatgggtttatttttttttcttgctgaaaggaacaattttttaaaaaaagact

SEQ ID NO: 194835 - DNA, 668 bp, Homo sapiens
cattcttgtaacttagctcccacttacaagtgagaacatatgatatttggttttccattcctgagttactccacttagaaaaatggcatccagctccatccaagttgctacaaagacattgtttcattcctttttatggctgagtagtataccatgttatagatgtaatacatttctttaatccattcattggttgatgggtacttagattggttccatatatttgcaactgtgaactgtgctgctataaacaagtgtgtgcatgtgtttttttcatataatgatttcttttcctttgggtagatacccagtagtggaattgctggagcaaatggtagctctacttttagttccttaaggaacctccatactgttttccaaatgtactaatytacattcccaccagcagtgtagaagtgttcccttctcaccacatccacactaacgtctcttggtttttgactttttaattatggccattcttgcaggagtgaggtggtatctcattgtgattttaatttgtatttccctgatggttagtgatattgagcattttttcgtttgttggctgtgtgtatatcttgagaaatgtcttgtatccattgcccactttttgatgggtttatttttttttcttgctgaaaggaacaattttttaaaaaaagact

SEQ ID NO: 194836 - DNA, 668 bp, Homo sapiens
cattcttgtaacttagctcccacttacaagtgagaacatatgatatttggttttccattcctgagttactccacttagaaaaatggcatccagctccatccaagttgctacaaagacattgtttcattcctttttatggctgagtagtataccatgttatagatgtaatacatttctttaatccattcattggttgatgggtacttagattggttccatatatttgcaactgtgaactgtgctgctataaacaagtgtgtgcatgtgtttttttcatataatgatttcttttcctttgggtagatacccagtagtggaattgctggagcaaatggtagctctacttttagttccttaaggaacctccatactgttttccaaatgtactaatttacattcccaccagcagtgtagaagtgttcccttctcaccacatccacactaacgtctcktggtttttgactttttaattatggccattcttgcaggagtgaggtggtatctcattgtgattttaatttgtatttccctgatggttagtgatattgagcattttttcgtttgttggctgtgtgtatatcttgagaaatgtcttgtatccattgcccactttttgatgggtttatttttttttcttgctgaaaggaacaattttttaaaaaaagact

SEQ ID NO: 194837 - DNA, 369 bp, Homo sapiens
ctggacaacatgcttttccagtgtgccccagaggaaactctcagcctatgacaattcactgtaaatgcctgctcacttgtctgtctataccacccaggatagcatgttccatttctgatctctaggttatcaacaacccatgcagtaggaactcatcaatgattgatttagcaccatgattatctaaacacaattaaagaataactttaactaggtgcataaatgttaagtaaacttaatttacgactgtgcaatttcaaatgagacktatggttgaaattctaaggactagtttatataagcattaaccacaataacaaatacacaaacttcaagataaatcttatgtggacatatgtgtgtgcatgt

SEQ ID NO: 194838 - DNA, 656 bp, Homo sapiens
agccaggagttcaagaccagcctgggcaacaaagtgagactcccatgtctacaaaaattaaaaaaaaattttaaaaattaatggggcacattgttgtgtgcctgtagtgccagctacttagaaagctgatactacagggaagtattgcttgagcctaggagtttgaggctgcagtgagctaggatcttgccactgcactccagcctgggcagcagactgagaccctgtctccaaaaataaataaataaataaataaataaataaaataaaaaattaaaaaagaaaattttctactttctactcatctgtgttccttttctttaaatcatagaacgtgtataactttccagttaactcctttctgcccaccctcaccacatrgaaggggtagtctaatggtagttataacatttagcatcctgttagagtgaactaatagaaatgttagatgttaagagctgagtaggaaagaaaacaaagactagacagtgaggatttgggggtccaatagggagactttatttttgtggcttaatttctatataacaatagacaaactccttctacttagtacctcctaatttaaattcttctttcatctatgtgtccaacacatctatatattaaaggagagaactacccatagccataatcca

SEQ ID NO: 194839 - DNA, 577 bp, Homo sapiens
atgaaaaatctccagagaaatagatattataaatagaaaacaatcacaacttctggaaatgaaagacacacttagagaaaggcaaaatatactggaaagtttcaagaatacaagccaacaaatagaagaaagaatttcagagctcaaagacatggcttttaaattaatccaatctgacaaagccaaaaaaagaggaattttttttaaaaatgagcaaagcctctaagaagtgtggaattaygttaaacaactaaatctaagaataattggtgttcctgaggaagaaaagaaatctaaaagtttgggaaatgtctttgagggaataattaaggaaaccttccctggccttgttacaggtctagacatccaaatacaagaagttcaaagaacacctgggtaattcatcacaaaaagattatcacctaggcatagtcatcaggctatctaaggtaaacataaaagaaagagccttaacagctgtgaggcaaaagcatcaggtaacctataaaggggaacctatcagattaacagcagatttctcggcagaaaccctacaagctagaacggattggcgttc

SEQ ID NO: 194840 - DNA, 401 bp, Homo sapiens
tggaaacaaaaacgagcctgcatagccaaagcaagactaagcaaaaagaacaaatctggaggcatcacattacctgacatcaaactatactgcaaggctatagtcaccaaaagagcatggtgctggtataaaaatagataggcacacagacaaatggaacagaatagagaacccagaaataaagccaaatattatagccaactaatcatcaacaaagcaagcagaaatatgaagtggggaaaggacaccctattcaacaaatgtgctgggatatttggcaagccacatgtagaagaaggaaactgatactcatctctcatcttacacaaaaattaacacgagatggatcaaagacttaaatctawgacctgaaaccataaaaattctacaagataacattg

SEQ ID NO: 194841 - DNA, 568 bp, Homo sapiens
cactagtttattaaaagttcaaccctttgctttaccctaagctctgaaaggaatattattattcaatgatatggatttatcaaaaactacctatgtgccaagctcagtgttaggcaaaacayttagaatgcattttctttcctccaaatgttcatagtgtagtaagaaagacagatatataaatgaaatgttaatatgggttaaggtatttaatggaactgtatacaagatgctgtaggatatatagagaaaggcaacttactttttctgtagttggctaccaatgcttcctagataaagggaaattgaaaagacaagcatacattcatcaaatgcatgaaaaggaacaattatttgaaacataaggaagggcaaacatgcaaaggtaggaatggatgaacttctttagagaagccttctctaatgcaaaaagtatagagttgggaaatggtgcagtcaagtaaggagattgagagtccattgttaaaatgacaaatgcttgaggtgataaatacctcaagtaccctgatttgatcattacacattgtatgcctgtgtgaaaacatca

SEQ ID NO: 194842 - DNA, 497 bp, Homo sapiens
gtaatttcagtacatcttaacacaaccctaggagacaggtaacatttattaccaactagagattaggaaagtaatgttcacagagtatgaagtgggtccatgggcatacaacttatgaatggctaattaaggaccagaatccagagctaaagtcaaaaccagtgctcttcctcctagaccaccttcccaacaaaagaaaactgaatcagaatatcaccatctaccactgtgagatttgaaaagtttgccattgctccctaccaagagccaaagacaccagacatttactgtaatgtatttgggcagccatctgtggaaaattatctgcaaaratgaccacccataatttctgtagccgcatgccatatctcctatccagaagtgaagtctttttcctttcccttaaatctgggctggcactgtgactggctttcaccaatggaacacagcaaaaatgacactgtgccagtttcaggcctaggccttaagaaacctgg

SEQ ID NO: 194843 - DNA, 578 bp, Homo sapiens
cctttctctctagctgcctttaacattctttctttcattttgaccttggaaaatctgatgattatgtgtcttggggttgatcttcttctataaatcttgtaagacttctctgtattttctgaatttgactcttggctcctccagcaatgttggggaaattttatgagctatatcttgaaatacattttccaagttgtttgctttctccctttccccttcctggatgccagtgattcctagatttgacctctttatataatcccatagttctcagaggttttgttcattctttttttttaatttattttttgtctgactgtcttatttcagagaaccagttttcaagttctgatgttctttcttcagcttggtttattctgctgttaatacttgatggcrttgtgaagttcttgtattatgttattcagctctgtcagacccattaggttcttttttgtaccaattatttcatgcttcagttcctgtatcactttattgtggttcttatttttcttggattgggttttgcagtcctcctgaatctcagtgatcttcatctctatccatattctgaattc

SEQ ID NO: 194844 - DNA, 402 bp, Homo sapiens
ccttttcttggaactctacatattgaaagaaaatgtgcttattatatgaatactgtattggatattctaggctgaataaaaataatgcacattgttgtaaatgtaataattgatatcctgtttgtccaccactctctttgactctactttgatatttaccttcctttacattctggtttttgtgtcacgtaccaagaagcattgaacatgaattaacctgatgcaaaaaactagtgtgcaattgccatatatccagtacacatttttrgagctgaccattctgttcctctcaaaaagtttgttgtaccttttgcgtccagaattggtgggttcttggtttcactgacttaaagaaggaagccgcggaccctcctggtgactgttacagttctgaaaggctgc

SEQ ID NO: 194845 - DNA, 402 bp, Homo sapiens
ccttttcttggaactctacatattgaaagaaaatgtgcttattatatgaatactgtattggatattctaggctgaataaaaataatgcacattgttgtaaatgtaataattgatatcctgtttgtccaccactctctttgactctactttgatatttaccttcctttacattctggtttttgtgtcacgtaccaagaagcattgaacatgaattaacctgatgcaaaaaactagtgtgcaattgccatatatccagtacacatttttagagctgaccattctgttcctctcaaaaagtytgttgtaccttttgcgtccagaattggtgggttcttggtttcactgacttaaagaaggaagccgcggaccctcctggtgactgttacagttctgaaaggctgc

SEQ ID NO: 194846 - DNA, 595 bp, Homo sapiens
atgtatatatttagaaatatatatactatatataaatagaatatataaatatatacataaatatataatatgaatttatatataaatatatagtatgtttataaatatatagtatacatataattatataatacatataatacatwgtatatataatacatataaatatatagtatatataaatatatagtatatatagctatacacaaatgtatgtatatatttagaaatatagactatataaatagaatatataaatatatatagtaaaattaccataatgaaacaaattaacatattcatatcttaaatgattacctatctcccttattcccttctgtggcaaaataagctataatttatttagcaaaaattctgaataaaatacactatgataaaccacagctctcatattcgatgttagatctttggccttgttcatcctacgtatttgatactttgtatcctttgaagacagctaacatgttgattggaattgcattgaatctgtgtagaaatttgccattttaacaatattgattattctaatctataacatatatatttctccacttatttctttttgctttctttt

SEQ ID NO: 194847 - DNA, 595 bp, Homo sapiens
atgtatatatttagaaatatatatactatatataaatagaatatataaatatatacataaatatataatatgaatttatatataaatatatagtatgtttataaatatatagtatacatataattatataatacatataatacatagtatatataatacatataaatatatagtatatataaatatatagtatatatagctatacacaaatgtatgtatatatttagaaatatagactatataaatagaatatataaatatatatagtaaaattaccataatgaaacwaattaacatattcatatcttaaatgattacctatctcccttattcccttctgtggcaaaataagctataatttatttagcaaaaattctgaataaaatacactatgataaaccacagctctcatattcgatgttagatctttggccttgttcatcctacgtatttgatactttgtatcctttgaagacagctaacatgttgattggaattgcattgaatctgtgtagaaatttgccattttaacaatattgattattctaatctataacatatatatttctccacttatttctttttgctttctttt

SEQ ID NO: 194848 - DNA, 595 bp, Homo sapiens
atgtatatatttagaaatatatatactatatataaatagaatatataaatatatacataaatatataatatgaatttatatataaatatatagtatgtttataaatatatagtatacatataattatataatacatataatacatagtatatataatacatataaatatatagtatatataaatatatagtatatatagctatacacaaatgtatgtatatatttagaaatatagactatataaatagaatatataaatatatatagtaaaattaccataatgaaacaaattaacatattcatatcttaaatgattacctatctcccttattcccttctgtggcaaaataagctataatttatttagcaaaaattctgaataaaatacactatgataaaccacagctctcatattcgatgttagatctttggccttgttcatcctacgtatttgatactttgtatccttwgaagacagctaacatgttgattggaattgcattgaatctgtgtagaaatttgccattttaacaatattgattattctaatctataacatatatatttctccacttatttctttttgctttctttt

SEQ ID NO: 194849 - DNA, 576 bp, Homo sapiens
atatctgtttatctttctcttctcctttaactcctatgacttaaaagttttcttttttgatactgcctcataaatcctgtaagctatcttcatctattttctttcatttttctttttctctgacattacattttttaatagtctgcattcaagtttacaaattttttctctgcttgatcagttctgttgttgattttctccattgcatgtttcatttagtttactgaatttttcagccctatgatttctattattattattattawtattattattattgtttccatctctatattacatttttatcttggttatttattgctttcctcatttcattgaattacttgtattctgttgaagtttgctgagctttttaataataattatttaaaattccttgcaaagagttaatacatctcgatttccttgggtcaatcactggcaccttactttttttatttaatgatgtcatttttccctgattattctttgtctttttggttatgcatcagtgtctgtgcatttgaagaaataggttcttattctagtctttgcagactggctttgcctggaaaa

SEQ ID NO: 194850 - DNA, 555 bp, Homo sapiens
ctcatttcattgaattacttgtattctgttgaagtttgctgagctttttaataataattatttaaaattccttgcaaagagttaatacatctcgatttccttgggtcaatcactggcaccttactttttttatttaatgatgtcatttttccctgattattctttrtctttttggttatgcatcagtgtctgtgcatttgaagaaataggttcttattctagtctttgcagactggctttgcctggaaaaactctgcagcagatgcggcagtagggcatatcagaatcctgaggcagctgcaggtggtatagcactgccagacgtctagggttcactacagcaagtgctgtgctgtgacaggccagaagctttgggctggtgtagacagtgctgttatggggcatccctaaaactcaggcagcagtggcttctatggtcctgccagaagcctggggcagatatggccaccccaggactggggcacatccggatccagagaccactaaggcctgcctgctgctgagggctatctggaggctgggggcactgatgtc

SEQ ID NO: 194851 - DNA, 555 bp, Homo sapiens
ctcatttcattgaattacttgtattctgttgaagtttgctgagctttttaataataattatttaaaattccttgcaaagagttaatacatctcgatttccttgggtcaatcactggcaccttactttttttatttaatgatgtcatttttccctgattattctttgtctttttggttatgcatcagtgtctgtgcatttgaagaaataggttcttattctagtctttgcagactggctttgyctggaaaaactctgcagcagatgcggcagtagggcatatcagaatcctgaggcagctgcaggtggtatagcactgccagacgtctagggttcactacagcaagtgctgtgctgtgacaggccagaagctttgggctggtgtagacagtgctgttatggggcatccctaaaactcaggcagcagtggcttctatggtcctgccagaagcctggggcagatatggccaccccaggactggggcacatccggatccagagaccactaaggcctgcctgctgctgagggctatctggaggctgggggcactgatgtc

SEQ ID NO: 194852 - DNA, 536 bp, Homo sapiens
gtgtctggaaactcagatttcccaaagccaagtcttatttctgtccaataaatatcatactcacgacatcatgagagaaaataaataaagtctcccttgaaagttggcttatgctttttctactttgaggaggtggtttgggaataagaatgctggaactttctattttagacttaaaataatttattcttttttgctttaagtttggattgtttttcttttggcttagyctaatcctgatgattcacaattatagcaaaatggatttttaaattttatgataattattatattctgaatcctaaagccaggtatgtcccacattttcagggaatgtgccaatttacattattcttccattttcatcatcagcaaaattagaaagacaaatactgcctgacttcacttatatgtagaatctaaaaaagttggacttatggcaacagagaataaattggtggttaccaaggacaggggagcagaggaagaggaaagatgttggccaaagggtacaaactttcagtcgcaagataagt

SEQ ID NO: 194853 - DNA, 536 bp, Homo sapiens
gtgtctggaaactcagatttcccaaagccaagtcttatttctgtccaataaatatcatactcacgacatcatgagagaaaataaataaagtctcccttgaaagttggcttatgctttttctactttgaggaggtggtttgggaataagaatgctggaactttctattttagacttaaaataatttattcttttttgctttaagtttggattgtttttcttttggcttagtctaatcctgatgattcacaattatagcaaaatggatttttaaattttatgataattattatattctgaatcctaaagccaggtatgtcccacattttcagggaatgtgccaatttacattattcttccattttcatcatcagcaaaattagaaagacaaatactgcctgacttcacttatatgtagaatctaaaraagttggacttatggcaacagagaataaattggtggttaccaaggacaggggagcagaggaagaggaaagatgttggccaaagggtacaaactttcagtcgcaagataagt

SEQ ID NO: 194854 - DNA, 492 bp, Homo sapiens
ggtgcacctaaggtgcaaactggggtgtagcagtaagctgaggagtggagcagtaagctaaggagtctgactccaagtgtctgtcattactactgccactgtgctaatcagaacctggagtgaggtcatgccaactccatcctcagcccattatctcccaatctcaacccaagctcaactcttgatgactggtgtaaaccttgttgctcacacaatttctctataccaaagtggtcaggggtsttgcttattcaagattggcagatatgtgaaccacgatctcattttccacctctccgctccatgtaccccatgctcccagcacacaatttttcattagtccttaaacaagcaatgctcttggcagctctttgctttgtacatgctgtgcagctgcccagagcatccttaccacatctccttacaacactctaacaactcctaaagacccagatggagttccaacccttctgtgaaattttttcccaaatc

SEQ ID NO: 194855 - DNA, 492 bp, Homo sapiens
ggtgcacctaaggtgcaaactggggtgtagcagtaagctgaggagtggagcagtaagctaaggagtctgactccaagtgtctgtcattactactgccactgtgctaatcagaacctggagtgaggtcatgccaactccatcctcagcccattatctcccaatctcaacccaagctcaactcttgatgactggtgtaaaccttgttgctcacacaatttctctataccaaagtggtcaggggtgttgcttattcaagattggcagatatgtgaaccacgatctcattttccacctctccgctccatgyaccccatgctcccagcacacaatttttcattagtccttaaacaagcaatgctcttggcagctctttgctttgtacatgctgtgcagctgcccagagcatccttaccacatctccttacaacactctaacaactcctaaagacccagatggagttccaacccttctgtgaaattttttcccaaatc

SEQ ID NO: 194856 - DNA, 559 bp, Homo sapiens
ggtcaggggtgttgcttattcaagattggcagatatgtgaaccacgatctcattttccacctctccgctccatgtaccccatgctcccagcacacaatttttcattagtccttaaacaagcaatgctcttggcagctctttgctttgtacatgctgtgcagctgcccagagcatccttaccacatctccttacaacactctaacaactcctaaagacccagatggagttccamcccttctgtgaaattttttcccaaatccctccgtttcatcatcttctatccctcatagcctctgtaaaagtctctatgagaccatggaccacttttaccgtggtttgcttgcacttctatctctgccagatcacctaccaactctacatgggcttggaaaagagacgtaagtgttccatatattacccaaatatggtctccccaggatcacccacagcatataatttttagaatttttttcttccaccacatcatatcataatatattaagtgtctccctatttgacattattgtggctccataattttgtcacagctctagttta

SEQ ID NO: 194857 - DNA, 523 bp, Homo sapiens
gcattgtctggagaatcgagggagaggcagagtctttatttcatggacacactctcatgatctcatgacgtgaaaaggtcacaggcactcagctctcagggccctgtgccacacccagaacccagatatccccttggaactggaagatcacgtggggtcagtctttctgctccsgtggagatggtgcctctgagttccagggtactttcaattagaataatatttaaggcattttcagagacccacagagtcctgcgtagtgcctgatagagaagagattcacatccttggtgggattccagagggtcagcttaggagagaagctaggaaattttactctggatttatctgaaattattcaaatgtcagtactgctgaagattagaaaataaattgatgacattacgggctgtgtatcaagattgatattctggcattataatctccaataccaacaggtggagtagttgctacacattggttgatttttaaagctgatagagtaaaaatattatgctgctat

SEQ ID NO: 194858 - DNA, 521 bp, Homo sapiens
aattatattttcaacttatctttcattgtttacagcaarctgccaaaatatgtaataatatagctccattgttgagttcaaatgatcttacaatatatttatattaatagtaataaaaaatcagggtgtgactcttttgggcattttcagttgtgtggaattgatctcatgcaagcttcaaaaggtaaaataatatttttggttgagaaagacagaaataaccattttcgaaaaaaaatactgcagaaatgctaaagaggctatttttaccaatttagaagtgagaaatgagggtaattaatgaatgaattacaaatattctgaatttggttaaacaaacatcaggttgaaagttttatgttgtcttagaagtatagcaactttctgggacaacaataaatgggtgattgagtggtgaaagttaaatttaatgcattttcagatggtatatgaataatctccttttgcgttgaatgtaagtaaatgcaggaaagtgctgagatattgtgaaatcattgagt

SEQ ID NO: 194859 - DNA, 554 bp, Homo sapiens
actattccaaaggcctacctagcttctttattattgtatgggcacaactgcacacaaagtctttctttcataatttttgggakttttttttctttaaatttacataagtcctggcaaaacaacctgcgttccaggtgtctctgcaatagcagtggaccatggctagccaacacgtttatcctggtacattgtaaatctgatcatttggcacttattctatgtttagtaagattgtagtgttcaattccatggggaattgtgttgttatcaattagaagttaggacctgggagggaatggaaggtgctaagagccctgtatttgccatctttggtctagcttatacatgctccaagtcctcattctgccttgtatctccagtgtctagcacagcatatgaaactatggctttgaacagcaaatgctggtgaaatgataacaaaatcaaaattaatttatggtaagagagacttttctaacaatatgaaagactatatgtgtattattctgctcgggctgccataacaaaatatcatacaaactgggtggcttaaa

SEQ ID NO: 194860 - DNA, 572 bp, Homo sapiens
aaagagtactattccaaaggcctacctagcttctttattattgtatgggcacaactgcacacaaagtctttctttcataatttttgggatttttttttctttaaatttacataagtcctggcaaaacaacctgcgttccaggtgtctctgcaatagcagtggaccatggctagccaacacgtttatcctggtacattgtaaatctgatcatttggcacttattctatgtttagtaagattgtagtgttcaattccatggggaattgtgttgttatcaattagaagttaggacctgggagggaatggaaggtgctaagagccctgtatttgccatctttggtctagcttatacatgctccaagtcctcattctgccttgtatctccagtgtctagcacagcatatgaaactatggctttgaacagcaaatgctggtgaaatgataacaaaatcaaaattaatttatggtaagagakacttttctaacaatatgaaagactatatgtgtattattctgctcgggctgccataacaaaatatcatacaaactgggtggcttaaataacagaagtt

SEQ ID NO: 194861 - DNA, 578 bp, Homo sapiens
tcttttataagccaacttttgtaatatatgtatgtcataccttagaagagaaaatctggattcaattgatctctatagtgaatataacttttaagatccactgttagttaaaatagaatcctaaatttattcataatttgcagctcaatagtgaaggatctcttatagtctgcctctgaagaattttatgcaaattacaagactttaaattgatttatattttaatgtaataaggaaattcactacatgaaaaagctaaagtccaaaacttttcttaaggtgaagaagtagccatcttttgactacctttgacatttgttgtcctataaggaccaagatcaaactaatcaaactttcctagagtttaatacaactgtgacttaattttagaatgtacaaaaaagcacttaaattcagcttcagtcattaggagaatataattaatacatccttgattgtcttgtgcaaatgaagttgtgcccatgtttaaactcattcatgtgcctcttggtaataayttataaaagaaggaaagagaattatctgatttcttgatcaagaagtcctgaaaacctgtc

SEQ ID NO: 194862 - DNA, 641 bp, Homo sapiens
aaacattgagtaaaagtcaggagacctgagttctggtatgagttttatcatttatgaacagtgactttatggaatcattgaaggtctctgagccttggtttcttcatctataaaaggaataaaatagttgttttcctttttaccctgtaggaatgttatatagagattgagtgtaaatccaaaattgcttagtaaattctatgacaatggtaatgatagattattactgattacataggacatttactaataaatttacaatctgcatgttaataccgtgtagagaagttagttttgttgtattctcagatcatgaagtatactttgttacaagccagtcaacttgaaactggacccacagaactcatgtttgtggtttcttttgaatgaacgtaraaattgacactcacagtcttaaaacttgagaaagttatagttgttttatctgacttcccttctcaggaatccaatcatcagacctcccagataataccaaggaattgaaactcagcatctggacaatgaggaaccaggctcctcacccatcatggttgcctaaccaaccacctgcttcctgttgaccaacttctcttctttatcatgcccccatcctgttttcctgtacgtagttatatttctgc

SEQ ID NO: 194863 - DNA, 565 bp, Homo sapiens
cccctctgacagatagaaaccaaacagaagaatgaatttaagakaagggtaagacaagactgttttctctctcctccttcaatgtctatttattttacatgcacacaaataaacacatatccatatttaaatatttcatataaaaattaaaaagcctaaatgaaaaatatatataagagccagttgctgattgtactatagcagactctggaaaacatttgggtcaactaatgacttgtttatgatgaacatttagatacctcataaatgtagcttataatttcaataaaggtggtataattatgttttcaatcttcctgaaaagctgggcacccacataatgaggcctgtggagagatagggatatcagatatctcagtaactaaacctctgccttacttccctctaaaaactgaagatattaaataccagggagttcactaggttcttaaggctcggcagtcagcctccttctttgctcttcatggggagggacccaggcatcttggggctctggtcttgccctgcccttcccacatacatcctcctgcttcagggggagctc

SEQ ID NO: 194864 - DNA, 541 bp, Homo sapiens
gtaaaatttggagtcctcttccctgaagacaccacacaagttgtagaattctcaggagataggatagagttgtatgtaccttaaagagacttgtaaatctagtttgtgacttttgactttttctgattgattgacagatggattataaaggattttaacaagtgttgatggcagggaacagcatcatgcttcccatgccctctccagccccttccagcacacgtgctgtacatcctactgcagaagcctggggacagcacaaatccacctcacaccctttctctgaatgccagcatcgaatgattccatattgcttctattctgggttcccaggaggaaaaagaggccctggccttgaatgaactrtagaataattttctttttccccagagctgaaagagatagatcttatttgcaatgctatgccactatccctcaagcagctggtttcagaatatataatgtgttcaattgtgtttttgttttcttagaaggaaaatgtgaaatgggtttttaaatagaggcatatgctttttaaaaa

SEQ ID NO: 194865 - DNA, 500 bp, Homo sapiens
tgctagaataagcaaaaaaaaaaaaaattaaaatttatctctgaggttagaagcaagacagggtcagtcattttagattcctcttttagattcctcttcttacttataattctacaaaggtggtttcagtctcttaagatttaatcatggatatagtatctcagagcatcatgtgcttcatataacatttaaagatagtagcgtgtttttttcctttgtgtccatttaaagatgtagaaatccctgaatatttcacagataatttaccccatatataactggccacaaaatgttatatgcttatgagtgaaacaataatacaagtaatatggaacactctgagtcttcttgaatattctcaattaaataaagctctctctctctctcrtaacgtctctggaatctatttctacataatgcatttccagcggggtgggtcattgttctttgtactgtcacataattcttgagaaatgatcacaatattgggcttacatatg

SEQ ID NO: 194866 - DNA, 545 bp, Homo sapiens
tattgctttaggctgaaggaccaattaaggtcaaggaacacaatgaataagtgattatttgatggctgggactggaaaaagttttaggataccaaattctgtaatatttctgctatatcacaaataataatgtatctactataataaaaatatctcaattaaaaaatacatattagataygtatatgaagatttccaaaataattactagattatgagatcaataaaattatattttataatttttccatgtttcttatgaatgtataaatagatggttagactaagttaattgatttagacatttatgaatctctaaggaatatatgtaattaatttgttcctggagaaaaatcaacggaaatttttaaatattataaaatttctactcatgcaaatatgtctacttatagaaccttgctttttcagatctttgttagttcataacatttctttttacatccttattatccaagccaatagtaaagattacatgtcacttgatatcccataaatcctacataaatttctactcataagaattta

SEQ ID NO: 194867 - DNA, 582 bp, Homo sapiens
aaacagtagtagaattaaaattagtayttttcaaatacaagtatcaatgttttattttattcaaaagaatttccatataaaaatttgatctataaaacaccatttactaatatatcttagaaattacaaaaaatattcatttcatccacacttaatatttagcaccttgtctagtccttaactatatgagaaacttacagtttcttgaaaattaaattaagttggaagtgtgaatttatattctgaaccacactcattgtgacagaggtgaggatagggcacagtatacacataaaggagaatcacttgttttaatccacagaattataaaagttctaagacgtggaattataaaggagaagcatttgttttaatccacaggcttatagaagttccaagaagtggaattatattgagttttgaaatgaacaaaatttttaaggttgagtgaatgttatgtaaaagatatgtcaaataacaaataggtgatgggtatttttaatatcttatcaaaatgttgcctgtgagagtcaaggcaatacactattggttgtcaggtgatcacaatagtgcctacataat

SEQ ID NO: 194868 - DNA, 646 bp, Homo sapiens
aaagacataagagaagtagagatggttctctattttatttccatttaattttacctctatgaatcctacaatatatacatgaatcacagtggatgatatcatactattatagtgctaccattgtaaactcaatccaagatattgtggtgaatattttttatcagatctaygcagactctggcacttcttatattgttcttgatacggtaaatgcattattccaaatcaataaagagaatcaaaagcagttcaatttcctgggatgcagagttttgcacactcactgtgatgccccagaactatgttaatgtttttgcttttcctcatgatatagttcttgatatattttgaattttcctttctaatacaccagtgaacatctattttatccaatattttaaaaacattggctatctctgtatttgtaaatttccatttcctgtttcccagaaaaggatttgtctttctaagtatattagggcctgatatcattttggtatatttacttagctgggacagtatgtaaatataccggttaactaattaaaaacccctagaatattagcatctcatttttccttagaatttaaaagccctatgacttacacagttctgacttttcatgcttatttagataatagtttgt

SEQ ID NO: 194869 - DNA, 646 bp, Homo sapiens
aaagacataagagaagtagagatggttctctattttatttccatttaattttacctctatgaatcctacaatatatacatgaatcacagtggatgatatcatactattatagtgctaccattgtaaactcaatccaagatattgtggtgaatattttttatcagatctacgcagactctggcacttcttatattgttcttgatacggtaaatgcattattccaaatcaataaagagaatcaaaagcagttcaatttcctgggatgcagagttttgcacaytcactgtgatgccccagaactatgttaatgtttttgcttttcctcatgatatagttcttgatatattttgaattttcctttctaatacaccagtgaacatctattttatccaatattttaaaaacattggctatctctgtatttgtaaatttccatttcctgtttcccagaaaaggatttgtctttctaagtatattagggcctgatatcattttggtatatttacttagctgggacagtatgtaaatataccggttaactaattaaaaacccctagaatattagcatctcatttttccttagaatttaaaagccctatgacttacacagttctgacttttcatgcttatttagataatagtttgt

SEQ ID NO: 194870 - DNA, 646 bp, Homo sapiens
aaagacataagagaagtagagatggttctctattttatttccatttaattttacctctatgaatcctacaatatatacatgaatcacagtggatgatatcatactattatagtgctaccattgtaaactcaatccaagatattgtggtgaatattttttatcagatctacgcagactctggcacttcttatattgttcttgatacggtaaatgcattattccaaatcaataaagagaatcaaaagcagttcaatttcctgggatgcagagttttgcacactcactgtgwtgccccagaactatgttaatgtttttgcttttcctcatgatatagttcttgatatattttgaattttcctttctaatacaccagtgaacatctattttatccaatattttaaaaacattggctatctctgtatttgtaaatttccatttcctgtttcccagaaaaggatttgtctttctaagtatattagggcctgatatcattttggtatatttacttagctgggacagtatgtaaatataccggttaactaattaaaaacccctagaatattagcatctcatttttccttagaatttaaaagccctatgacttacacagttctgacttttcatgcttatttagataatagtttgt

SEQ ID NO: 194871 - DNA, 589 bp, Homo sapiens
gtttgaaactccacattttatcttctacacaatttagaagaccaatgtatttatttatttatttatttgaggatttcaaaaatgatattgatttattaatagatatttaacaaatatgatcatgcatttgaaaaaaaactaasaaggctaagtactaggaaaactatccaaatttaaagcaaaacacctttaagcagagagtgacacatttaaaatagattttagtttatgtttttggacacacaatttataaagatgtaatttcatgacatcagctacaaaaaagagtgggaccagagctataaaatagtagtttttgtatgttactgaagttaaactggtataaatttaaattacagtgttataactttaggatgttaagcaaaagccctacggtaaataaacagaaaatagctacagaatatacataaaaagaaattggaaagggatttaaacattttgctacaaaaaattaactaaacaaaaatgaacacaataatgcacaaaataaggtgcacaaaagttatatggcatatataaaacaaacagtaaaatatcataagtcagtccctttttatcagaataactt

SEQ ID NO: 194872 - DNA, 486 bp, Homo sapiens
catttccaggatagaccacatgtaaggtcacagattagttttaacagattaagaaaatagagatcatgcaaagtatcttctctgactacaatgggataaaattaaaaatcaataacagaaataaaagtggaacattaaaaatttgtggaaattaacacactgttaatcaactcttgcaccaagagcatgcttttgggaaagaatatactgttcaataaatggggctggaaaaattggatatccatattcagaagaataatactagacccttatatcttaccatgtacaaaaattaaaatagattaaagacaaatgtaaaacctgaaactataaaactgtyagaagataccataggataaatgcttcaggacactggtgtaggcaaagattttatgagtaagagttaaaaagcacaggcaacagaaagagactacaacaaactaaaaatcttctgcacagcaaaagaagcaattaacagagtgaaaa

SEQ ID NO: 194873 - DNA, 583 bp, Homo sapiens
aataaaatactttattagtaatacactgctctccagatttgtatccttgaatcaatgaaggcttctcagaagatgtcatcaactttggtggagctcatcatcttaactggaatgactttcaccttattctttttctacttgaaccctgcctaatttcactttaataattatattstggtaagtaccgcctgtgttgaacttctcccatatttgggaccctattatgtttattgttatatgatcaatatgagcacttgctattcattgataattaactgtttcattatctacattattcatctctgatgaacttcagtgccttaaagttcaggaatagaaaatacaaatattttgcaagtgcctatcacaccatttttctaacagtaaaagcttacgaaattctttctggaaaaaaaataagtaaaatactgccttttttcatatcctttgaggcatatttggtggcagattaagaaaagtttctgttaaaactcagaaatataaaaaactacatccacatcagccaatcgcaagaaataataataatgggaaaaatacctgtggtgaactgttcactagttaa

SEQ ID NO: 194874 - DNA, 583 bp, Homo sapiens
aataaaatactttattagtaatacactgctctccagatttgtatccttgaatcaatgaaggcttctcagaagatgtcatcaactttggtggagctcatcatcttaactggaatgactttcaccttattctttttctacttgaaccctgcctaatttcactttaataattatattctggtaagtaccgcctgtgttgaacttctcccatatttgggaccctattatgtttattgttatatgatcaatatgagcacttgctattcattgataattaactgtttcattatctacattattcatctctgatgaacttcagtgccttaaagttcaggaatagaaaatacaaatattttgcaagtgcctatcacaccatttttctaacagtaaaagcttaygaaattctttctggaaaaaaaataagtaaaatactgccttttttcatatcctttgaggcatatttggtggcagattaagaaaagtttctgttaaaactcagaaatataaaaaactacatccacatcagccaatcgcaagaaataataataatgggaaaaatacctgtggtgaactgttcactagttaa

SEQ ID NO: 194875 - DNA, 573 bp, Homo sapiens
ttgaaccatccttgcattctaggaataaatcccagttggtcatgatgaatgatctttctaatgtattgttgaattccgtttgctagtattttgttaaggatttctgcatgaaagctcttcagagatgttggcctatagttttctttttttttartgtgtctttgtctgcttttggtatcagggtaatactggccttgtagaatgagtttggaagtattttccccttctgtatattttggaatggattgagtaggcttgatattagttcttctttaaatgtctggtaaaattcagcagtgaagccatcagattccaggcttttctttaccagagactttttattatgtctttgatcttgttacttttaattggcctgtttaggttttcgatttctttgtgattcaatcttggtatgttttatgtatctaggaatttatcaatttcttctagactttaaatttattggcatatagtttcttagagtaggcattaatgatttttttgaatttctgtagtaacacttgtctatttttccatttctagctttatttatttggatcttctctcttttct

SEQ ID NO: 194876 - DNA, 573 bp, Homo sapiens
ttgaaccatccttgcattctaggaataaatcccagttggtcatgatgaatgatctttctaatgtattgttgaattccgtttgctagtattttgttaaggatttctgcatgaaagctcttcagagatgttggcctatagttttctttttttttagtgtgtctttgtctgcttttggtatcagggtaatactggccttgtagaatgagtttggaagtattttccccttctgtatattttggaatggattgagtaggcttgatattagttcttctttaaatgtctggtaaaattcagcagtgaagccatcagattccaggcttttctttaccagagactttttattatgtctttgatcttrttacttttaattggcctgtttaggttttcgatttctttgtgattcaatcttggtatgttttatgtatctaggaatttatcaatttcttctagactttaaatttattggcatatagtttcttagagtaggcattaatgatttttttgaatttctgtagtaacacttgtctatttttccatttctagctttatttatttggatcttctctcttttct

SEQ ID NO: 194877 - DNA, 443 bp, Homo sapiens
tgaagaggtattggtacagtgcagaaatttacattatggaacacatactatgtgccagacaatttgcttctgactttatatattcattttaaaattcatcttctctaccatcttgaaaaatgagaaaaataaaatagtgagagttagacattcttgattaaaagtctgtctaatgtaaaaaaagtcagtgcatttttttgttttgattttttataataagtatcttattttagagaaattttagatttacagaaactttgtgaaggcagtgcaaggactttcccaataccccacacccaatttcccctattcacatgtgaagtatatgtggtagtttcatcacaattagtgaattattcctgttctaktattatgaattaaagtccattccttatttagatttattagtttttacataatgccacttttttttttctgttcca

SEQ ID NO: 194878 - DNA, 647 bp, Homo sapiens
gaggagaagtggagaattgcttggtatggagaaaaaaaaaagctacatatttgctatcagaagtgaagtaatgagagtagtaataaagtagaaaaaaactacaaattttctttcaactggaatgttttaattttgtgataatcttgtaaatatcctattccacaattctgtacgattccagaaatttcaaattaagtaaatttacattctttaaaaaactctttcgaaatgagtatatccttttccagttcgagtagttacttaacataatatatcttatttttttataagtatggagcacagataagaccatagtccaatacagagctgccgtaaatgagttgtgtaaaaattgcctcttattctttaagagaagtggtgttcctgaaaagagtgccttaatctggtagtcttagtctggtagtctgctcttaactgcaactgataggtagsatcagtctttctgcctcctcatgaggccacatacattattctttatactatatgaggcttgcctctatttaatttgggattttgtcatttacgtatggctctttgtgacatgggcataaatcttgactcctcccaaatattataaaggcaccacaccacatattgcttttgcttccatattaagggatacccaa

SEQ ID NO: 194879 - DNA, 606 bp, Homo sapiens
attctgactgcaatgaattattttaggccaaaagaatcaaataaatgttttgggatatatgtagttattctttgaacaaaaaatttcagtatttcacaaagtaggggttaaaatcactgggggagcrtctcaaaagatcagaaacaaagagattcccaaacctcacccaaaatgaactgaatcacaatcaaactggcggatggagcccagaaatatatgttttaaatatgtacttcaaattttatttatacatagtaaagtactagtactctgagactagaagcctggagtccagcccagagttaagaaaaattaggccctaaggaggacagggaggatggagggaaggagtaatattctgaggagacttggaggcaatgttttcttgttcagggaccagactgctggtggggctgtttcggtgctatgctggtgaacagcgaggaggaatgttttgaaggaagaagttgagaattgtttgaatatttgaggtttgagtgaaagacatttaaggccatttatcaatatgtgactgaattagtcctgtctcatgctggtaataaagacataccccaaactgggcaatttataaaggaaagaggttta

SEQ ID NO: 194880 - DNA, 606 bp, Homo sapiens
attctgactgcaatgaattattttaggccaaaagaatcaaataaatgttttgggatatatgtagttattctttgaacaaaaaatttcagtatttcacaaagtaggggttaaaatcactgggggagcatctcaaaagatcagaaacaaagagattcccaaacctcacccaaaatgaactgaatcacaatcaaactggcggatggagcccagaaatatatgttttaaatatgtacttcaaatkttatttatacatagtaaagtactagtactctgagactagaagcctggagtccagcccagagttaagaaaaattaggccctaaggaggacagggaggatggagggaaggagtaatattctgaggagacttggaggcaatgttttcttgttcagggaccagactgctggtggggctgtttcggtgctatgctggtgaacagcgaggaggaatgttttgaaggaagaagttgagaattgtttgaatatttgaggtttgagtgaaagacatttaaggccatttatcaatatgtgactgaattagtcctgtctcatgctggtaataaagacataccccaaactgggcaatttataaaggaaagaggttta

SEQ ID NO: 194881 - DNA, 476 bp, Homo sapiens
gctgtcaacctttcttctacctaaaggaaaagccctttgtcttttacgcttttgcaatttctatattgctcctgatgtctaatgtatrtttttgggatcttatgtacaaagttcctatttcaattctctactttctagcagtgtgataataaacaagttactctggaatctcagttgtctcattttttttttttttttttttgagacagagtcttgctctgtcacccaggctagaatgcagtggcacgatctcagctcactgcaacccctgcctcccgggttcaagtgattctcttgccccagactcctgagtagctgggattacaggcaggtgccactgcacccggctaatttttgtacttttagtagagacggcgtttcaccatgttggccaggctggtctcgaactcctgacctcgtgatccacccacctcggcctcccaaagtgctagaattagagacgtgagccactgcgc

SEQ ID NO: 194882 - DNA, 476 bp, Homo sapiens
gctgtcaacctttcttctacctaaaggaaaagccctttgtcttttacgcttttgcaatttctatattgctcctgatgtctaatgtatatttttgggatcttatgtacaaagttcctatttcaattctctactttctagcagtgtgataataaacaagttactctggaatctcagttgtctcattttttttttttttttttttgagacagagtcttgctctgtcacccaggctagaatgcagtggcacgatctcagctcactgcaacccctgcctcccgggttcaagtgattctcttgccccagactcctgagtagctgggattacaggcaggygccactgcacccggctaatttttgtacttttagtagagacggcgtttcaccatgttggccaggctggtctcgaactcctgacctcgtgatccacccacctcggcctcccaaagtgctagaattagagacgtgagccactgcgc

SEQ ID NO: 194883 - DNA, 476 bp, Homo sapiens
gctgtcaacctttcttctacctaaaggaaaagccctttgtcttttacgcttttgcaatttctatattgctcctgatgtctaatgtatatttttgggatcttatgtacaaagttcctatttcaattctctactttctagcagtgtgataataaacaagttactctggaatctcagttgtctcattttttttttttttttttttgagacagagtcttgctctgtcacccaggctagaatgcagtggcacgatctcagctcactgcaacccctgcctcccgggttcaagtgattctcttgccccagactcctgagtagctgggattacaggcaggtgccactgcacccrgctaatttttgtacttttagtagagacggcgtttcaccatgttggccaggctggtctcgaactcctgacctcgtgatccacccacctcggcctcccaaagtgctagaattagagacgtgagccactgcgc

SEQ ID NO: 194884 - DNA, 476 bp, Homo sapiens
gctgtcaacctttcttctacctaaaggaaaagccctttgtcttttacgcttttgcaatttctatattgctcctgatgtctaatgtatatttttgggatcttatgtacaaagttcctatttcaattctctactttctagcagtgtgataataaacaagttactctggaatctcagttgtctcattttttttttttttttttttgagacagagtcttgctctgtcacccaggctagaatgcagtggcacgatctcagctcactgcaacccctgcctcccgggttcaagtgattctcttgccccagactcctgagtagctgggattacaggcaggtgccactgcacccggctaatttttgtrcttttagtagagacggcgtttcaccatgttggccaggctggtctcgaactcctgacctcgtgatccacccacctcggcctcccaaagtgctagaattagagacgtgagccactgcgc

SEQ ID NO: 194885 - DNA, 457 bp, Homo sapiens
taataaaaagtacatgaaagcactttgaagagtaactggcatatgttatacatctagtaagtgtgtgctattgtaaatgtagtcatcacatmgtttttaaaaacttttaatggcaggagatgctcattgattggccagtaccactaacactgctgctgttgtcattgttactggagtggacctgagacctagagtctgacatgaatgagatccaaagaagaaactctcactttcctgcacctccagctggttgctcctcacaccattccccagaactttagtcacgtctgctgtgtggcatattggatttggttggaatgagccttctaggacctttgcccatccttggatcctgatttccaccagtgttgctaccccctacttccccagaaacccctctgcaatggtactaaagatatccagtgcaagccacataattctctgccaagtgtgcatt

SEQ ID NO: 194886 - DNA, 479 bp, Homo sapiens
agacagagtgaagaaggcacacctacttctttgaaaatccaggcttagaagtaacatacatcattctattttgttgggtgtgaactagtcatgtagctgcacctttatgcaaggggttgctgtggaatgtgctcactgcctggaaaggtggctccagcaataattacaatattaaagaacatagatatacatttttmattattttggaaaaaaattaacatctttgccacacttagtgaataaatgcaaactgctgatttgttaaacacactctcaaccttgaatttaatcaccctctaggcaataatgtgaaattttcaaaacaacataatgatttttaacttaaaaagtaaacatatgccattgacattttcgagatttggggatcttcgtaattatagatattttattaatgatattttcataagagaaaaaaatgtcccctggcagggggaaggaaattagttaggatagatttt

SEQ ID NO: 194887 - DNA, 445 bp, Homo sapiens
gaagtgtggtggaaaattttagatggttattaagaaataaaataaataaaacaaaggtctttacaacagtattcaatgttgtgtgtgtggaccaaagggaacccctgctgatcacccaacattaaargttcccacaccagtttggggtatttgccccagaaggggaaatttaagaaaaatccaaaggcaaaagttacaatgacaaagctgacatttcatggagcaatgttgagacaaattaagacaaagattgacaaaagggtctttgactcaactctctgctgggaacccaaatcttttttcaccagaaaaggtaaaattgtttgaagctagaaaagttcctgggaccagaccaaaaaatgtacactttgataaggttataaaatttgagatgtttaagcagactttatgtatggcagttgtgactcctttacctaaatgtctt

SEQ ID NO: 194888 - DNA, 586 bp, Homo sapiens
ttttattatacaaagggaggagtacttttggaattagggacgaggaaagaatgatggagcaaacattcctctcctactttgctttagcctgggaaattttgtttytaagaagtcaagtactgcgaatattttgacatttttacaacttggatgtatttacttgaaatatttaaatttaagcttgcggacttatagatttagcattatattttacaggtttttactttctcctagtgaactggtatctgaagaaattaatagggcaaatagaaaaatgttttataacgtcattcctggaatgtttgtcttatgttatttgaaataactcagaagttgtttaaaccctggtggctcctgggaactgtcattcgtttacctcaaagaggcacaagctcttttttgaatgtgttttacagcaccttctttcaaccacaactgaatatatccttcacttcttagaatggtacaaacacttcttagtttgaatctttttggatccaaagctgcttgatttgaatgtagtaaaccttttatttgtgattctagattcccaggggaagatggtgggtctatgcaattttaccta

SEQ ID NO: 194889 - DNA, 393 bp, Homo sapiens
ttttcactttagcaccaagataaaatttatataaacagtagagaagtagcagccatggactccacaaagactgaacagagaaaagtatgcaattaaaaacaaacaaaaagctcacaacttaatttgaagcagttagggatcctccctttactagtgaacaatgaggcaatctatttttagcacrcagtgaagtttggctcaaaatttaattcaaggcattagagggctctgttaattccctgcttatatttcaggagtactaacgtggcttacaagaaaccagagcaaactgattgatttcaggtttaaatttacttgccttgggcactgaacttaaattgtctggggttaggagaaaaacagtgagaaagatatactgacatggttgtaaat

SEQ ID NO: 194890 - DNA, 646 bp, Homo sapiens
actggaagtcattatcctcagaaaactaacacaggaacagaaaaccaaacaccatatgttctcacttataagtaggagctgagcaatgagaacacatggacatagggaggggaacaacacacaatgaggtctttttggaggtgggtgagtggggagggacagcatcaggataaacagctaatgcatgaggggcttaatacctaggtgatggrttaacaggtgcagcaaaccaccttgacacacgtttacatatgtaacaaacatgcacgtccgcatgtcctgtacatgcatcctagaacttaaaataaaataaaattaaaaaaagaatccttcattgtcccaaaataatttttattctcaagaagccaagcccaaaactagaagtttatagtcaagaaagttgcccatataatacctcatgttctggctcccttctatgcatcctcctctccaaatactcatgcctgcctcatcacctacctctcttcattccagccatatgtgagggtcgtagggaaagaaaaggaggtaggatgagacagaaggataataagacatttcaagacacactaaagtctccctggagaggttaaagcagtgcacatattcatataatacaagtgaaaacgcctaagagataaaagaa

SEQ ID NO: 194891 - DNA, 486 bp, Homo sapiens
cttcatacagtgaccatgtgctactcatctttgtaacctgaaagcatagtgttaagtagaaaggataaacagaataggtaaaccttaaatttaaataccaagtctctttgtcttttgcaccaaagccatcatgctgatttatatcttgttcaatatctgcatatttggaaagaatgtatcctaattattttcagaatggaagttataaaatatgtctgttagccggaattgaatgtacygagcattgaatgctcttctaaaactgtatttataagaaaattttaatataacagtaacttagtagaggggcaaaataattaaaagcaggctattctgagccaggctcctgggggttcaaatcctagctctgccactaactttgtggcttacattaaatgtacttaaaagtcctgccttagttgctcatcagacttataagtaataaccaacattaacagctgacattcttggtgtgctttctataag

SEQ ID NO: 194892 - DNA, 567 bp, Homo sapiens
attttatgtaatgtagaaaaaaagagaataccacctttaaagtactgaaagtaaaaaaaaaaaaacaccctaaatttctacaaacagaaaaatcatttttcaaaaatgtaaaaaaaatgaaaactttttgaaaaatcttatttktggccaggagagctgaattacaagaaatatcaaagagaattcttcaggaaaaaggaaaatgataacagatgttggatcaatagaaaggaataaaaacattcttcacaatggaactgtataagaaaatacatttttctacttattgtctttaaaaataattgtttaaaaaataataacaatgcactgtgaagtttatggcatctacagaagtaaaatatatgacaatgatttcccaaaggacagggaaacaaagtctatttttataagtttcttataccttaaatgaaacaagagacttccatgagttaaatatcaatattgtaaaacccagactcatctccaaaataaaaaaaaattatagctataaaccaatattggaagtaaaattggctcataaaaaatattgtatctaaatgacaacaa

SEQ ID NO: 194893 - DNA, 370 bp, Homo sapiens
ggaggccaagttgggtggatcacctgaggtcaggacttcaagaccagcctggccaacatggtgaaaccctgtctctattaaaaatactaaaattagctgggtgtggtggcatgcaactggctacttaggaggctgaggcaggagaattgcttgaacccaggagacagaggtttcagtgagctgagatcatgtcactgcactccaacctagatgacagagtgagactccatytcaaaaaaccatatgaacatctgaattgaaatgaaaaaagcttttgataaatccagcatcctttcatgataaaaagtcttaacagatgaggcatcaaggaaatgtcattgatgactgaaaatgttaagagccatctatg

SEQ ID NO: 194894 - DNA, 619 bp, Homo sapiens
tgggaatgcttacacactgttggtgggaatgtaaattagttcagccactgtggaaaagcagtttggagatttctcaaagaacttagaactaccatttgacctagtaatcctattactgtgtatatacccaacagaaaataaattgttctaccaaaaagactcatgcatgcatatgttaatcacagggttactcacaatagcaaagacatggaatcaacctaggtgcccatcaatggtggattagattaataaagtatggtacatttgcaccatggaatactatgcagctataaaaaaacaaaatcgtgttatttgcagcaatgtggatgcaactggaagccataatcattagcaaattaatgaaggaacagaaaaccaagtaccacatgttttmtttttgatgctgagtagtatcccattgtatggatacactccactttgatgatttttttccaggtttttgccattataaataaagctactatgaatatacaagtacaaatctttgtgtgtagagatgctcttatttctctcaggtaaaaagctagaaattaaattactgggttttatgggaaatggatgtttaactttttaagtaactgccaactgctttccaaat

SEQ ID NO: 194895 - DNA, 623 bp, Homo sapiens
tgtttgtctgcatttgtgttgttcattttatgatctttttccatatctatatgtagtaataaaatatttgatatttatgcttttactttatcagacataaaaataaatattcttttataaaaccttgttccatttatatgcatatgtatggagtgtctctgtgtgtatgtgtgtgtgtgtgtatgtgtactaggtgagcatagaatatgtatttcagagacagaatactgtaaaggctaagtcaagagcatgaaaattggaccacattgcctgatacgtgacgttagtaaacttacttaattattttcttttttttttgcctcagattccttatctgtaaaatgagatatctgtaaaatgagatagggaacgagtcacctacatttttaggaagattttacttggtaacctgtatcaggtctatatatgttattcctttcgtgtttttctccaatattatamaatttttcagccagaaatttttctgtaaggcattaggtctatgataataaatctttctcacatgaaatatacctgtgaatttgccttagtggtttgttgactcaaataaacacgcaaaaatataagaaagttacaaaataagactactattgaaagaagag

SEQ ID NO: 194896 - DNA, 566 bp, Homo sapiens
caatacaatttaaacttttttgtatggttgtttgtttgtttttgtcatcactcaatagacaaactcatgaaaaaattaggtaaattacaagcaaaatatggaaatttcgtttttcagcrcaactgaattttatgagcaatttggttgcccctactgtctaaagcatttcgcacattgtaaatattcaagtaatggtgactatgactattagctagaatttaacatcaatttgggactgggaaaaaagttggaaacgtgacaatacttgtttcttccaatagtaaagcctagaaaatcccacatgtgaattatgcaattaattattgttttcataattaggtgtctagtggagtgagaatgagaagaatagacagagctgggttaagggagaggacacttcaaaaacagatggattttgttggttttgaaagtatttcaaagaagcaaatggagaatacctgcaaagacagaaggagacagatggaaaaggcacttgtgtgtagccaaggagtatggacttgatcttgtaggctgtcactgtttaaacatagagagacttgaacaga

SEQ ID NO: 194897 - DNA, 494 bp, Homo sapiens
tgacttagtaagtggtattttttcccctgaaagcagacaacagataggaagtttgtatgcctaatttttagtttattattctgaaaacaagagactcatatttcttactaaagacgtaagtttatcaaactgaggaggataatactttctacatataattttttggattggctctatttaaagtaagtctttgtttcttatgtatttctttcagaaaacattatatttcaagctgcatagatatttgcaaaataaattttaagaatcatttaatccaatggtttctagactttggagttcatgaaaatttaaaatgccatttaatacaaaggaaaaaattttatttcccacttcttattttgccaaaaaagacctttaaaactaagaagcaaaaaagaacaagcaagaagcaaacaaaaacytattgcctataaccaccatcaacataatgtaaagaacttcttaataccaaaattccaaaagcattgtattga

SEQ ID NO: 194898 - DNA, 644 bp, Homo sapiens
gataaaagtaccattgtgggagttcagggttttagcagaaattttccagcagagtgttggagcaaaaatttaacarcagacacactaaacagagtaacaacagttttactttactcacatcaccattctcccaaggtggcacaactcagcaccaagagaaactcattcagctcccctagccatgtgggacattgcccaagaggccgacttttttttgcatgtcacccagaatatttaggtgattggcacagctacgtggttggaagaggctgaaagcaaggatgatgggtcatagaccctcctaactgtctatggaacccattagaaagctcactcataagctgcttgagatgtctcatctatggattcccaaaaactggaccagaagcatttcaagtgcactatgcacctcagcctttctccccaggctagctccctgagtgtactgctgtagacaacaaatacaagtatctcacacaagcagacaactcagctgtgagggattgggagaaagcacacaaacttgagcatttctgagaacttctctaaatagaacaactggttaaggctatcaccacacagcttggcttcaaataattgagaaaaggcatacaatttttagaatgccccccaggagaaaacaa

SEQ ID NO: 194899 - DNA, 508 bp, Homo sapiens
atataagctacattgcagctggaactgagacctcaaccagtcaaatgagaagctctgaaacgggggtggaccttaggagagatcctaatctgtggcaaaggcatcaggcctctgtaccgccacatcaaccagtcgagcccctgaggagtgagtaatacaagccatcaacaaccaacactcccagtaatgcagtaaatgagtgccacagtcctgaatggggacttgaatgggggccctctctggcaarccactgcatccactaaaggtgctacgtttcaagaagtctgtaaaggataaatgtgagctatccacagagtaaagaaggcagaagagatttacaaagatgaaatagttaaagcaaatgctttttgaagtgaagcagcctgaggtattcagaaaatttctaacagatccaattgttcatgggaaaggaagcagttaaatctaaaatatgttaagattggctattgaccttttatacatttcttgtttctccctacttaaatta

SEQ ID NO: 194900 - DNA, 348 bp, Homo sapiens
ttacaataccctagtcttttcaaatatctgggaagctttcccaagaaggattggtacaaataaacccagacagtgaaggctacactaaatatctaactcaaatgaatatcttttagcatcaacaccatccaggaaaacatgacctcaccaaatgaattaaataaggcaccagagaccaatcctggagaaacagagatatgtgatctttcagacagaaaatttaaaatatatgtgttgaggacactcaaaaaattcaagataacacagggaaggaattcagaattttatcagataaatttaacagacttaaataaraagaatcaagcagaaattctggagctgaaaaat

SEQ ID NO: 194901 - DNA, 524 bp, Homo sapiens
actctgtgatatccatttaaccatagcataatgagaggaaggagcaagcacacaattccccatttgaaacttttcaaacaatttgaaacggctccctgggatcaggtaaaccaaataggttattagtgcaaagaaacattaaagaacaaaaggagaggggaaatggtgcaatatatactgggacatgtggatgcctttgtgagtgtatctagaaagtaacagagatgacatattcataagggaamcataacttgcaactaataagttaagactgttcaggcaacagcatctcattgtatgcatatttaacatatatgattacaaatttagagagagagtgtaagatgcacaataagttgtaataatgtgagaatttcaccgtgtcaagcaaatgtgacttagaatgggttcccactaagcatactctgggacaaggaatggatgcatgtattagattggtacaaaagtaatcacggtttttgccgttaaaagcaacagtttgtttgagaggtgatcccaggaaa

SEQ ID NO: 194902 - DNA, 518 bp, Homo sapiens
gatgtgaagggtgagattcaattcacctgagggtgtgtattcactttgagtatcatcaaagtgagtatcatcatgaagtcacagtggaagctatttgtattygtatttgagtaatagaaaggacatggaatgaagccaagggacccaggttaaatgtcacctctgcctctaattagtatgctacaattagtcaactcccttaacttctctggctttagtttcttcatctatataataatactttagtttagattagggatcagaaatacaaatacctacatgcagggagcaggtgacgtaaatgtataaaatgtacatcactgcatatcacagcaccaccactcacttgtttcacattcacaaaatcaactgtgttaaaattccagtctcttttacagatcattaagcttttcatcaggcatcttttccacataccagtcatggttcttctcatggtttgttttcctaatggaggcttaagttgtattcttctctctacagatgcactttgttggtat

SEQ ID NO: 194903 - DNA, 518 bp, Homo sapiens
gatgtgaagggtgagattcaattcacctgagggtgtgtattcactttgagtatcatcaaagtgagtatcatcatgaagtcacagtggaagctatttgtatttgtatttgagtaatagaaaggacatggaatgaagccaagggacccaggttaaatgtcacctctgcctctaattagtatgctacaattagtcaactcccttaacttctctggctttagtttcttcatctatataataatactttagtttagattagggatcagaaatacaaatacctacatgcasggagcaggtgacgtaaatgtataaaatgtacatcactgcatatcacagcaccaccactcacttgtttcacattcacaaaatcaactgtgttaaaattccagtctcttttacagatcattaagcttttcatcaggcatcttttccacataccagtcatggttcttctcatggtttgttttcctaatggaggcttaagttgtattcttctctctacagatgcactttgttggtat

SEQ ID NO: 194904 - DNA, 462 bp, Homo sapiens
gtgtatctatttctgggctctccactctgttccattgaactatgagtctgccctttcaccaatactacactgtcttgatcactgtagctttacagtaagccttgaagtcatgtggtgtcagtccgtcaagtttgttcttcttcagtactatattagttgttyggaattttctccttttccatattttagaatcagtttgttcatgaccacaaaataaccttctgggattttgattaggattgcactgaatctatatataaaattgggaataactgacattttaaaaatattgagtcttctaatgaacatggactatctctccatttattttgatattttaaagatttcttgcatcaatacatgcttttatcaaaaggtcttcttttgctttttctttactgaacatctatttctccttctcccttctagccttgtctatctccctcaaggccatgttgataa

SEQ ID NO: 194905 - DNA, 437 bp, Homo sapiens
tgggtttgggatgccagctgtttataagagttgtctgagaaaaccagctgctctgattctggggaaaaattggctattgagatgataacagattctgcttctataggaagttgatcatgaatgtaacctcttccactgggagaatggggatcctgattccaggtggcccattgtccagataagccagggtagcccccagggttatctrgaaacagttcttctcattatacaatgcacaaacagcagtgttcatttttttcatacaccatagtgactattcagaggagaagctcattaggtaacctggattctataactctcaatctctaatccagaccaggcatatacatgcattctctactctttaaattttctatttaaaatattgtcccatttttcaaaagaagacaaacaaatggccaacaggtatatgaaat

SEQ ID NO: 194906 - DNA, 446 bp, Homo sapiens
cagcggagccttctcctcttgcagctctgtcatctccataagagcattctgtggtcactcctagtcccaggagggagaggaaattcatgtggtgcaaagccatcccagccaccacagtcagcaaaactgcctcagccaaccctagagccacaatgcaaagtagaactgtcaaatccagcccagcctagatcaaccaaacatcagctatcctgcagatgcagaagtaataataatcacttttgttttttcaagccattgagtttcaaggtgctttgttttgtagcaattactaaccaacatgctgctacaatagttttatgccagaaaacatactctattcaackgtatcttttgccaaagaaataatttttgtgttttaggtgactttagcaatacttcagttaaaaaatcaccctcctttcattttactttataatgtcgttgta

SEQ ID NO: 194907 - DNA, 471 bp, Homo sapiens
atcccatcttgaattgatttttatataaggtaagagataatgattcagtttgattcttctacgtgtggcttaccagttttccgagcaccacttattgaatagggtgtcctttccccaatttatgtttttgtatgctttgtcaaagatcatttggctataaatattcagctttatttctaggttctctattctgtcccattggtctacatgcctatttttataccagtaccgtgctgttttggtatctatacccttgtagtataatttgaagtcgggtaatgtgatgcctccagatttgttctttttgcttagtattgctttggctacatgggctcttttttgattccataygaattttaggattgttttttctagttctgtgaagaatgatgatggtattttaatgagaattgaattaaatctgtagattgctttgggaagtgtgggattttttttaaagcatttgtataa

SEQ ID NO: 194908 - DNA, 610 bp, Homo sapiens
ccttccctctccctattcacactgtgatagattgcgaaaagggttttgttctttaaccgccttccagcatycatgcccttttcaaggtgacattatcatctcttccatcaacagtgaggtctagagactgcctgtggcaattttaaagtacagtccccagattctttgacactcctttattgagagatgggtttatgtttcctctacttgaatctgggtacttactgcttgacaaaaggaatgtagtataagtggcgctgtaccagtgtctgggccaagccctaagaaacttaactgttatttcctgtctcttgtgatgcttgctcttaggacccggccattatccccctggagagtatcacaggagagaaatttgccagccagatgatggagccatcttggaggtagatctttcagccctagttcagcttcccagctgatatctactagagcagagatgaacttctgtaccaagctctgcaaagagcagatttgtgagcaaaacaaaggattgttgttttgaactactatgttttgaggtggtttgcatagaaattgatagctggaatactgcccttgaatatgagctatctgtgtgttttactctagc

SEQ ID NO: 194909 - DNA, 610 bp, Homo sapiens
ccttccctctccctattcacactgtgatagattgcgaaaagggttttgttctttaaccgccttccagcattcatgcccttttcaaggtgacattatcatctcttccatcaacagtgaggtctagagactgcctgtggcarttttaaagtacagtccccagattctttgacactcctttattgagagatgggtttatgtttcctctacttgaatctgggtacttactgcttgacaaaaggaatgtagtataagtggcgctgtaccagtgtctgggccaagccctaagaaacttaactgttatttcctgtctcttgtgatgcttgctcttaggacccggccattatccccctggagagtatcacaggagagaaatttgccagccagatgatggagccatcttggaggtagatctttcagccctagttcagcttcccagctgatatctactagagcagagatgaacttctgtaccaagctctgcaaagagcagatttgtgagcaaaacaaaggattgttgttttgaactactatgttttgaggtggtttgcatagaaattgatagctggaatactgcccttgaatatgagctatctgtgtgttttactctagc

SEQ ID NO: 194910 - DNA, 614 bp, Homo sapiens
taacagacaataattcttgacaactatggagtatatataaacatatcaatgaattagactttagctttcayttagttttatgaaagagaaaagggaatcatacattgctcagaattgggttgcataagattttcataaatgttacttagtatattcggaatatacttgtcctctaattccatggactcggtttctgctagtagggcattgtttacttctaccttaatcaatgcttttgggaactggagcacaatagggcaaaagtgcataattattctgacacatcctgagatttgcattacagaggctgccacaaggcttaaagcttgattaatgcttagtggtgaatttcttctgaaattatgattttcactctgccaaatagctctgcagattttcaagatctgtgattacaccaactgagggtctttcactctgggaaatgagtcctatccccacttgccttctcccacatctggtctgtgactatatgccagtgctctgaaaactgatcaacagtgttctttcttcctttacagttttgtttttgcggtggattagattatattactccctccctgttagaggtgtatacgtccatactttaacatgtg

SEQ ID NO: 194911 - DNA, 613 bp, Homo sapiens
tgcccttctattcctttccctctactccaagaacaaatggagataaaagcaaaatttctcatgtatatctttagaagcaatataatgtggcagaaagagcatcaatattggtatcactcagacctaggttcaaatcaaatctcttattagctatttacactagtgtatattatttgttccctcttggctttggttttctcatttgtaggggataataatatatatgtaagagaacttttgtggtattaaaataggttaacatacttaaggcatctagaatttacctggctaagttatcaaaatggtcaatattgtctatttctttctcactttctgtcactacctacacatttcgtgacttttgtttgtttcttgcttctgtgaataactttatgttttgctccaatttctttttgcttttraaacttatcctttatccaagttatttaatgtctaatccttgctcttttcagggcaggcatgtatatcaattcaacaggggcattagccaatctagaagttgcatctttcatcttccagtataatcccttaatccctccaagagagacaggggagggagggagggagggggagggggagagagagagagaga

SEQ ID NO: 194912 - DNA, 592 bp, Homo sapiens
ggccacggggcttctgtgagttattctaggaacactcagtctggaagctttcagccatcatgcaagatgtgtgccactggtggctgccctgtagaaaaactacatgaagaaagaaagagaatcctgagcaatccctgctgtacctactctccactgtttgagtctccccagctcaggggtcagacatmtaaatatagaagccttcaatgtaaccccaggcccagctatcatctgactgcaaccacatgacagaccctgaacaacttagctgagtgagcccagtcataccttcccccagatttgtgaacaaaattaatgattactatgggctgaaacttcagtgcaaaagcagtcctcaataattgactgggagacttccatcccttctttcaagtggataatgctctaaaacttgtctatgctctgcatccagtccttagcctgggatgagaaatccacagcttcccttataaagccctgtcagtgtcacaatgacaccctggaggtctgcaagctctccacacttagccaactttctcttcccactccagcatgggagacacagagtgctacttcccaacccttctccaga

SEQ ID NO: 194913 - DNA, 499 bp, Homo sapiens
attgctatgagcagcatgtttcaccatccttcctgtctcccaatagaggctttaaaatagtcaaagaaacggaatcagaaatttctgctctcccagcaaaaatccaaccaccacccccgactcttatcaccacccaaaagaaaaaaagagctgctacagtgcaaaaacattcacagaaagaaggtggaatttcatctgcagtgagactcctccactgaaacaaacatgtcagttgcccaacctgaaagagcacattaaggcaatatcattgctgtgtgtaggaaagttttccacttaagcaytctccttaagaattcctgccccaggcgcttgagctaacacagaaacatatgatgggtggaaccagcagaaggagaggtttgaaaagcttgcatcctgtccggtacctttttctttctctcagagccatcctatgttaccatgtatgtgtgcaaaaggccaaagaaaggaaagccggactggagcagaaagagaagat

SEQ ID NO: 194914 - DNA, 499 bp, Homo sapiens
attgctatgagcagcatgtttcaccatccttcctgtctcccaatagaggctttaaaatagtcaaagaaacggaatcagaaatttctgctctcccagcaaaaatccaaccaccacccccgactcttatcaccacccaaaagaaaaaaagagctgctacagtgcaaaaacattcacagaaagaaggtggaatttcatctgcagtgagactcctccactgaaacaaacatgtcagttgcccaacctgaaagagcacattaaggcaatatcattgctgtgtgtaggaaagttttccacttaagcactctccttaagaattcctgccccaggcgcttgagctaacacagaaacatatgatgggtggaaccagcagaaggagaggtttgaaaagcttgcatcctgtccggtacctttttctttctctcagwgccatcctatgttaccatgtatgtgtgcaaaaggccaaagaaaggaaagccggactggagcagaaagagaagat

SEQ ID NO: 194915 - DNA, 471 bp, Homo sapiens
ttttgtactagtttttgtataaaagtaagatttcacttatctttggtaaatacctagaagtggaatggcagaatcatgaactatgtttaaattttaagaaactgaaaactgcattttcattcccagaagccatgcgtgagaatcccagtgcctccacaacctcactaacactcggcatgataggtctttaatttcagtaattctggtagattgccagctgatttagaatatcgtttgaatttacatttccctcatgttaatgacattgagtattttttattagcttatttgcrtccatataaattctttagaaaagtgtttttttcttaatatattgcccttgttttcaatcattgtgtttgattcttatggaattttcaaagttctttatatactctggatataagttccttttcagatatatgctttgcaaatattttctcccaatttgtggcttgtttgtttgtttca

SEQ ID NO: 194916 - DNA, 701 bp, Homo sapiens
ctcaacttcccccatcatagtggtgcgtcttttacaattcatgaacctgcatcggcacatcattatctcccaaggtccatagttcatattarggctcactcttggtgttgtacattctacgcctttggacagatttatgacatgcattctccatcatagtatcatgcagagtagttttaccaaccttaaagtcctctgggctctgcttattcatcatttcctttccccaggaaatggactttttgactacactgcatcttcccttctatccattcacgtctccatttatttaggtcttctattatttcattaagcaatgctttgtacttttcagcttagatctgctgcacatcttaggaaaatgaaatatctctaagcattttcattatggtgactctattgttaatggtatcatctccttgaattttaatgtcttactgttcttcgctagcatataaaaaattggcttgtgaacatttgaacatttatattttattctgaaacagtgctaaaattatctattatttctggtagcttttttttttttgcagatttcttcagattttctgcacagaagttcaagtcatctgtaaataagacagttttactacttttcttccaatctgggtatctttcatttcttttattggtttcttgtactgggtagaagctacagtttgaatacaagtgacgagagtaaa

SEQ ID NO: 194917 - DNA, 701 bp, Homo sapiens
ctcaacttcccccatcatagtggtgcgtcttttacaattcatgaacctgcatcggcacatcattatctcccaaggtccatagttcatattagggctcactcttggtgttgtacattctacgcctttggacagatttatgacatgcattctccatcatagtatcatgcagagtagttttaccaaccttaaagtcctctgggctctgcttattcatcatttcctttccccaggaaatggactttttgactacactgcatcttcccttctatccattcacgtctccatttatttaggtcttctattatttcattaagcaatgctttgtacttttcagcttagatctgctgcacatcttaggaaaatgaaatatctctaagcattttcattatggtgactctattgttaatggtatcatctccttgaattttaatgtcttactgttcttcgctagcatataaaaaattggcttgtgaacatttgaacatttatattttattctgaaacagtgctaaaattatctattatttctggtagcttttttttttttgcagatttcttcagattttctgcayagaagttcaagtcatctgtaaataagacagttttactacttttcttccaatctgggtatctttcatttcttttattggtttcttgtactgggtagaagctacagtttgaatacaagtgacgagagtaaa

SEQ ID NO: 194918 - DNA, 641 bp, Homo sapiens
ggggcataggaatgaggaagagagaagtccatgcatgtaaagagctagcctctagcaggctggtttctaaatggccaagtacatgaaaataaattattattgaaactatgactccaataggatttacrtctacatatgcagaagaggtgtttcaagacagaaacaaagctcctgccacttgttaccaaaacgtgttgtaataataatgtggcatttggcattcagccaccatcagaatgctgtgtgctctaagatgtcttcttttctccaagggtgatatagaaatgttactgatttttttttctttgaactgttgcttgatgacctatacttgatggcttattggtatgatctggggccatgcagcaaaggaaaggtaactgaggtaccactgaagataaaacagatgagatcgttctgtgagcagggtcttctgtaaacatgggactcaagaagaccttgctttgttaacaagacttccctggaaaacactaaagaagatttccgggacattttgctcgaattgctgaacaacatcaggagatctaaaatttaagttttcagaaattcatgagtctgggacctgtgaacagagagagcatcatgtttcaccaataatggaattcagtgtccatcttata

SEQ ID NO: 194919 - DNA, 586 bp, Homo sapiens
tgttgccaccaatttaataaatcttgtaatacatcattgactttcaaaggctcaaactgacattttatttgggtctcattttttgtgaccactctaaaaaaattgccctagcgaatgtgccttccttgttaaaatgyagtcctctcttgctttcagaacacagtactgttatgactcatataaatctctgccacgtcttataaaatggataaggacacagttctttcatttttataagtgattgcataattcttatttttgtgtagtgtagtgtctcgccccaaagtcctgcagctatcttcaagatttatcatacaccctggtagtctttggatataggcttgctttcaaacatcaactaggaagaagtagagtgtctcttcatcctgctgcagtactaatgctcatcttaatctaatccttttactgccagtctcagcttcttgtaattcacctatactgttcatctattgttcctgaagtgcaaacactctgatggggtggctgagtctagatggattccatgagcgtctatattcttaggctaaatttggatttggatccacttatggatatgattcctttg

SEQ ID NO: 194920 - DNA, 647 bp, Homo sapiens
caaattacaaaataagttactgcatactaagtctaaattagttaaaggcctatagggacaatagaaaatttaccagctgtgcatcactaccagcaaggacactaatttcatatatgaagacaaacacaagtgttgtgataaagctacataatgattctgagattacatraataatggaactctaaaattaacctgagagtcactggttggcagaagctgcctcgtcctgtcagtcaatcttaaatcaattaatagattctgaataaactgcctccacagagagaattcattcattttaacacgtcaatctcattgaatatttttcactacacactaaaaatgactttatgcagacacacatttaatttggaccacttgaagattgtttctccttcttataccttaaagtactgaccgtaaaaaattttgaaataaaattaaattttattccttaaatatttgaagttttgagcaagtgagaaagtgacaggattgaaaagagagaatagaatttatgattaaaatggggaggggtacgattcaattggcacccagtctgtaatgtgaaagttgtatacagtatttactatcttattattactgtattagtccattttcacgctggcataatgacatacctgagactg

SEQ ID NO: 194921 - DNA, 568 bp, Homo sapiens
ataaaattagtcatttttcaaagaaaaaaataatgcctcagtatggagtgtcatgaatttaaaagtggtgcaatgtggttgctggaaccaagactcaaaaaatgctgctttgcgttaccagtgaaaacacattattttccctcaggaagtggtctagatgaatttggtatgttgaatgtagatctgaataggatccatgaagtgattataactcccacttagcatcagtaaataggtagatcataagtctgtgtttgaaaatatactaattgaaaggatattagtatacattgtcattctactttaaggatcaatatatgttgataataggtaaaactgtttattctgtctttttaatacaaaaatggaaaaatcctattagttgtaccataaatatatacttataatgatggaataacatatgataaaagcctattacattgcctattatamagaaagcatgccaactgaaaaaatatggtggttcctagtgctttatctttcattgagctcattgctgtcctcgttgccttcaaaacctcttagaaatcttgcctttgaaccctca

SEQ ID NO: 194922 - DNA, 578 bp, Homo sapiens
atttcttttatttagtaaataggtgttttattcagcaatttttttattcccactgttaatgaaattattaaaattatttttgcctgctggatcattagctgtgtatgtgcacattggaagcagtgcttattcacagaggggagcccactcmctcctgaaataagatggtttcttccttctctccaaaacattcattggtaaacataatgtagtccgtcttccagatagagattctcaaagcccctatatggatgttataaaggcaatgtatcttggcatatcataaaagggagcaaaaggaataggtcaagaataaaggaatttcctgagaatataatgccttgcacataactgaggatcatcaagtaatattaagtaaaggagaagaataatatgtggtagtgagaggtgaagccagctggacttcctgggtccagtagggacttggagaacttttctgtctagctaaagctttgtaaaggcaccaatcagcactctgtaaaatggaccaatcagcaggatgtaggcagggccaaataacagaataaaagctggccacccaagccagcagaagcaac

SEQ ID NO: 194923 - DNA, 563 bp, Homo sapiens
gaaaaagaaaaaaaaaagttcagagaatctcgttgaagctccaaactctcacctccctctactctggctgtgagtccacacaggatgcctgaccatttttactttatgtttcaggcactttgacatactggctgaaagcatatgctctgaaatctagttgcctaggtttacattttaatcccaccattccccagcttggctaattaattctctaatcttcagttttctcatctacaaaatgtaaacagtaatagctatctcatatatcacctgtaaggactcaataatgcatttgatggaagtagtgtgtttgacactgttaatggaactattcattatgattatcaattattttactaaatcagcggcagcaacatattttttttccactcycaccacctgttccttaagtagaagagtgacagtagcgtattttaggagggacagtgggtaaaggacggaagtgcctgtgaaaagcatctcttaacccacagaactagaaaattcacccaaaggggctttttctgtgtgggccagattctcttccaattaagattaaaaca

SEQ ID NO: 194924 - DNA, 580 bp, Homo sapiens
tgagcagtatgatccctggcctttcaaaagtaaatacactctcattgacggctcctcacccagcctccctgtgacagtggatctgaaacacctgcccccagaccagcttcacaatggcaattcattgcaaagatgaaagattgggtaagtgtattgaaaaacaggatttttttttttatagtatactagtagctaaaatgtactgagacttcttaggagtcacaaatttttctggagatttcatawggatttttataactactcacaacacagctgtggaatagatattactatcatactatattattatctaatttgataaaatgagggtcagaaaaaagttatgcaactgaccttgggccttacagtttacatggtagaacatggactataacccatgctcagagttaaaaggctagcctcctaatcacaacacaaggaaatgggacagaaccaagatgactattcatgaagatagctaccacagactatttgggaaaactactcttgaaactacatggtctaaatcgcattaaaaaaaaaaaaagtagttgacctaaagctattgaagttagggttt

SEQ ID NO: 194925 - DNA, 613 bp, Homo sapiens
gcaagaaattgactataccatgtttgaataaaacaaaacttttttgcataagcctagctttgcaaacaaagcataaagcttaattgatcaatttacttttctaattatcttaatactatagtaattatttatcttactagtaataaattggtcagtggtatagagatgcaagtataaatgtgggctagagaaaagggaaaattgaaggctattgaaattgcattctcataaaaccgtatcagtgaaaagctgaaaactaaaagaaaagcatatgaagatgttaattttaggtttaaaaacactatttattcacatatattagtgtttgaaaatattatatcgagaaaatatgtatctatgttctttatatgtattcatattacttaaaatacaaatggaattacacacacattttctgttatctgtaatttttaattcatagtaactttccaatatcaaactatcagttccatatcaatcctggctgatgctttgatgwgtttttgaaatatacatggtttgactggagctgtacttcaaagaaaaatcggccttttaatggaaaagaacttttcttcttgtttagagataagtatatgaaagtcacagacta

SEQ ID NO: 194926 - DNA, 609 bp, Homo sapiens
aaattgtaatatttgagttttttttattaacttgaacaaagtagtgaattccatgaaaacagcatgccttctaaaattcacgtgatagcctgargaaaagcatttaccagttgaagaaatttaaggctgccctgaagtcctatttatttcataaagacatagttgtttcccaaaaagcattcaatattttttaaccataccttagcagaattttggccagcagttaatattttaatgtgtacaaattctatgaatgtgcggaacatttaaaaatcaattgtgagtaaaggatattaacatataaaacaatgatgtctttaattttaagtgtgtttgcccttcaaagtagaatgtgaacattttcaaagttataacaattcaaattggcaccaggcagtgttttcccatcttaaagcaatactttggatgaggatgctttgccactattaacaaaacatctgttggagcctcagcaataaagacaaatagtttcctctctaattgtttgtatgtgaaatgaacactgggttattcagagaagcccaggccatgactgacacacagcagaaagaagaagaagaagctgtgcttggacaagtgcacagttct

SEQ ID NO: 194927 - DNA, 609 bp, Homo sapiens
aaattgtaatatttgagttttttttattaacttgaacaaagtagtgaattccatgaaaacagcatgccttctaaaattcacgtgatagcctgaagaaaagcatttaccagttgaagaaatttaaggctgccctgaagtcctatttatttcataaagacatagttgtttcccaaaaagcattcaatattttttaaccataccttagcagaattttggccagcagttaatattttaatgtgtacaaattctatgaatgtgcggaacatttaaaaatcaattgtgagtaaaggatattaacatataaaacaatgatgtctttaattttaagtgtgtttgcccttcaaagtagaatgtgaacattttcaaagttataacaattcaaattggcaccaggcagtgttttcccatcttaaagcaatactttggatgaggatgctttgccactattaacaaaacatctgttggagcctcagcaataaagacaaatagtttcctctctaattgttkgtatgtgaaatgaacactgggttattcagagaagcccaggccatgactgacacacagcagaaagaagaagaagaagctgtgcttggacaagtgcacagttct

SEQ ID NO: 194928 - DNA, 488 bp, Homo sapiens
caatagatatcaaaattcaaggatgcccaagtaccaaatataaaatggtgtatatatttgcatataacctatgtacatcctcaggtatactttaaaaatgctttagattatttatcatagctaatccaacgtaaatattaagtaaatagttgttataatgcatataacattatacattgtttggggagttgtaacaagataaaaatatccttacatgatcagtacagaagcaatttaaaaaatatattttccatccgcagttctttgaatccacacatgtggaacccactgttatagagaaaggactgtattgcggtgacagggttatcagaattaaatagaaagacagtcttttaggcagcttacattctatgcaatgagatgagacaataaacaagaacacaaataaataaaaatgaaygcaatatcagtgtattagtccatttttgcactgtataaagaactaccccaaacagagtaatttagaa

SEQ ID NO: 194929 - DNA, 595 bp, Homo sapiens
ccatatatacatagtcatttataacaagtgtgctacagtagtttcaaatagaatagtgggaaagattgtctttactgcggtttccaacaaattaaaatccataaaacatagaaaaaaaatgatgcttaaaagttacacaaaaatcaacttcaagtagatgctaaatctaatgtaaaaacaggaatgacagaggaaggaagaaaataaggaaggaaaaaagggaggaagaaaggaagcaaagtaggaagggaaggagtgagggagggagggagggacggaaggacaacaattataaataggactaatgtggtataagagaatgtaccaggaagaatgtgatataaaaaaaaggttagttaggaaggttagtaatgagtctkactacagttttattttcaggatttgtatctgatttggttctaagtgttgaggctggtgaaaggaagaatatctggaagagggaagaatggatactggagggctgctttgtacaagtggaagacattgttgttgatggcaagagtcattgattggctgtcacccaaggggcttcactggctcttggtgaatttgatagttttattagcacctcaaa

SEQ ID NO: 194930 - DNA, 645 bp, Homo sapiens
ttcaaacagcagcttaaaattttctttgttgattctgttacttctaccagaaatattagttaatatttctgactcacttgaattgtttttaattgaattatttagtgttggaaatcaattatccataggtttcttgagaatatctgcaagtcttataagcaagacattgacagctytttgttccagactgtcttttttaaggttgtgtttatagtgaacagccttagaatatagagagattataccgttctgtagcaaagggcagatattcttactttctaacataggaaaggtaatgtctcccttcagagctaagggtagccatgcttattctatttataagagattagaaatccctaacctcagagttcatcccctgtaacacaattcagtgcaggcatcctgggttccttgtctcattttcctgtagaagcataggctccagaaactggcctgaacatgttgatgctcttactactattatcacttggagtaataagcagtcttctctgacttgggtcttgtgtcttctattaccatacatgaaactagaatgcactaactgtgcacttgaaagtacaataaaattgtagaacttcccaagttcttgacaggttaggtgatgaacataggattatgacagag

SEQ ID NO: 194931 - DNA, 536 bp, Homo sapiens
aagcttgacattgctatcccatttgtggagacaggtaggatttatttgtctgttaatgtacacaggtcagccattgctcctagaagtgtcccaccagaggaataaacattctttgatttgcagtattatttgagatgtcagttggatcaacttttcacttcatgtakctagccttcttgaactcttaatatgcttttttttttctgttagagatagggcaatagatcatttactctagataaataattattgtttggtgattagtatcagtcaccttaaaaaaataatatttcctttataggaccaaagcaatcttgttcaattctgcactactggctatgaatataaaaagaaacatattttgagaacatatttgtagtctcaatccccagaagatactgtttgtgaattacgggactcaatacagcctttcactgtgtaggtaagttttattactagtctaggtttcaggcacatctgtagatatcgagcataaagcatctaaataagtatttcccaaaatattcctctattcc

SEQ ID NO: 194932 - DNA, 573 bp, Homo sapiens
ctaccatgtagggcttgaatgatgcaaggatgatgattcccaccacatcaccattcaactcttctatttggcctgcatgagagacagattaattttggaaaatgacagtgggttatcataaggttatccaggtggtgactccaattttagcagctgttctagatatggtttcattgcttgaacaaattaacacattccttggtacctggtgtgtagtatggacctggcaattttttttttcaatgtctgttagtaaagaccattgtaagcagttttgtttctgttagggcagcaatacatcttcactgtcttacctcaggggtatatcaaccctctataattacagcataatctrtttcaatgggatcttgatcaattttctcttccagaagacatcacactgatccatcacattgatgacattatgctgattggacctagtaaatgagaagtagcaaccactctagacttaatgacaagatatttgcatgtcagaaagtagaaaatgaatccaccaaaaatgtagggaccttctactttggttaaatttctaagggtccagtggtatgagta

SEQ ID NO: 194933 - DNA, 487 bp, Homo sapiens
cagcaactagaacagtgcaaggcacagagtagatgctcaattaacatttgttgagtgaatgaatgaacacataaattgagattataatattttccaaggacataaaacacatacataaattatcacaatgtagagcagaatgttacaaataagaggagaaaaaaacattatttatggggtgatcatcaggtatcaagactggtatttaaacacaattattacagcatttattsggcaatgataaaatacagcacaatacaggatatcagatggaagtaacactcaatttcagattaaaaccaaatataagaacacttatttggaaagcagaaagacacagaagttaaaagcacagggttaggaaaaagatttcctgggattcagatactggctctctctttgtttaactatggcacttctctatactcacatatatctctctgtaaaagaataataataatcatatgtactatatattttaattgag

SEQ ID NO: 194934 - DNA, 482 bp, Homo sapiens
ctgaattcttgccctggtttcttttcatccagagacactgacaattctaatttttgtaattattttcacaggtagaatttttttctttttctttctttgcctattttactacttttttcctttgcctttccctccttctacccaccakgttgtgtaggactttagagaatgttgggtaggaacttttggttttgtttctaattccctattcacttcttttatcatgtttcatattgagctgtgcagtttgatctacaagctggtagatggtgcttctgggttaaaaaaaaaaaaaaacagctatatccaaagtggctagatatatactagctccttgtttactggcggaagctctctgttgcctcaggaaatgggttgatccatggagtgcacagtggtctgagcttcctgctcagcctctttgggtgccaagatggtgaggatcagtttaggcaggcccatctacatgtttccccatagga

SEQ ID NO: 194935 - DNA, 571 bp, Homo sapiens
gccctgggagcactatttcttttaggttattctccttggacagcgctaacattctggtaggaggtattgtttaacatgaaacattttacactgctgttagtggtttctggggtaccagtggccccagttggtgcgtaggctatattcgtagtttaaatagttctcttgacttctggtgatttctgtcaaactggaaatcccagcaggaacaaaaatgacattgacagccatggggtggcctgaattgaatttcaccttctagaattttcactctttcaataaagtgtatcatcgagagggatgggaggactgtcaggtcacagatacaccacaaatgaaaaatgacattagttttgctttttatataacaaggtctgatgtggagcttagttaaagtcattcagagycttggataaaatttgagaaataaagcaaatttattgttatgtttcaaaaatctatttgccacacagttgaatttcaggagtaagagatgctacaccaacattttccaataaatctaataacatcttgtgatacagagccttgtcatccatagtggaacctatga

SEQ ID NO: 194936 - DNA, 618 bp, Homo sapiens
actttattttgtttcctttatagctattagcattgatatggtgattatatttgyagtataccacttatcataaaatcaagcatttagcatttatgggatacatacgtgtgtgtgtgtgtgtgtgtgtgtatggaaatcctggaaaagcctgttttatttattattagttaacaagtcttattatcacaagtcttttattatcagtcagattatcagaaactggaatatcaaagccaagtagatttgcctgaacccatcagtgaaattcgtgtttcccttgtgccacatatccttaattacttttgtatgaactatgcttaattcaatagaaaaaaaagtttcgggtatccagtaagatgaatcaggaatgaaaatgatgaagatatgcccaagagtccaagacataccacttaatggctctagtcataactgaatatattgtgatttgaagttcacattgaaggcagaatgtggtgatggtcagtggcaccacagtcacttccagaaaacctaggtactccttctgaccctgatgctagccatctgtgtgtttatggaaaaatcatttaactttattttcctcatctgcaagataataggagaactagttgatctcaa

SEQ ID NO: 194937 - DNA, 575 bp, Homo sapiens
caggtgtgagccaccatgcctggttaaaatatatattatctagcttttattgtataacataaacttcaaaatcttggtgtcttcttgcaagaaacatttatattttttcttcttgagtttggatgagttgtggttcagctggattttccactaggctaaaggttgggttcagaattacctcacttgtctcatatggtgacttaatgggcgtgcttctctcatggtgatggcagaagtccaagggagcaaacactgtcatatcagtttatataatgcctactggcattccaatgaccacagaaaagcatataaccaagctcaatatcattggggcaggtaaatatacaccatgtgctctagagggaggtactgccaagtcaaatgtcaaaggatgtggayatacaattatatcatagagaagagagtgataaattggaaaaaacaataaacttcaccatgaaatccaatacattcttcaagacctaactaaatacaaatttccttttgcaaatattttcagtcctccagtcagaaaatttcttctctctccaaagcactttgaactttaatgagtg

SEQ ID NO: 194938 - DNA, 573 bp, Homo sapiens
catatcacaaaaccgtttatcagayaggttccctctagtttttgtcctgtgatattcattttttttgccattggcctcaatgagctcccatatgtccattcacagaatggacaaaaaaactgctgaatcaaaagaaatgtttacctctgtgagatgaatgcacacttcactaagcactttctcagaatgtttctttctagtttttatctaaaggtattttctttttcaccattggcatccaagagctcccaaatatgccatcacagatccttcaaaaactgtgtttccaaatgctaaatgaaaagaaatgttaacatatcataaagcagtttttcagatagcttcattctagtttttatctttgtattttcacttttttgcaattcacctcaatgagatcccaaatatccattcacagaaagtacaaaaacagtgtttacaaacagctgaatcaaaagaaagttttacatctcatagatgaatgcacaaacaacaaagcagtttctcagaaagcttctttctagtttttatttggagatattttctttatccacataggcctcaaaagacacc

SEQ ID NO: 194939 - DNA, 255 bp, Homo sapiens
aagttgttgtcaatttaaaatagattattataactataagatgttttcatgtaattctacagtaaccacaaagaaaagacctacagaagatacacaaataaaaatgagaaaggaaccaaagcacgtccctaccaaaaaaagaaatcrgtgaaacataaagggaggcagaaagagaggaaaagtggaaaaaaatacctgcaagacatgtataaaacagtgaacaaaatgacaatagtaagcccctccctatcagta

SEQ ID NO: 194940 - DNA, 255 bp, Homo sapiens
aagttgttgtcaatttaaaatagattattataactataagatgttttcatgtaattctacagtaaccacaaagaaaagacctacagaagatacacaaataaaaatgagaaaggaaccaaagcacgtccctaccaaaaaaagaaatcggtgaaacataaagggaggcagaaagagaggaaaagtggaaaaawatacctgcaagacatgtataaaacagtgaacaaaatgacaatagtaagcccctccctatcagta

SEQ ID NO: 194941 - DNA, 545 bp, Homo sapiens
tcttccaaatgaattttataatcagcttgtcaagctcagtaacaatccctgcaaagattttgattggtgtatctctgattaattcatttgggggagagattacatctttatattattgaggctttggctgggcrtggtggctcacacctataatcccagcactttgggaggccaaggcaggcatatcacctgaggtcaggagttcaagaccagcctggccaaaatggcgaaacactgtatctactaaaaacacaaaaactagccaggcgtggtgttgggcaatggtaaaattggggctttttagttcacacttgtgaaatgtctctctaagtattcaggtattatcttaattattatattattatattcacaatttttataaaagtatagactgtcttcacagttttgttcttagatactttatgtttttaattgatgttgtggattaaattctctttgatcacttattcctggggaagccagctgccatgtcctgaggcagccctgtggagaaaaccccattggaaaaaactgaagcctgcaat

SEQ ID NO: 194942 - DNA, 545 bp, Homo sapiens
tcttccaaatgaattttataatcagcttgtcaagctcagtaacaatccctgcaaagattttgattggtgtatctctgattaattcatttgggggagagattacatctttatattattgaggctttggctgggcatggtggctsacacctataatcccagcactttgggaggccaaggcaggcatatcacctgaggtcaggagttcaagaccagcctggccaaaatggcgaaacactgtatctactaaaaacacaaaaactagccaggcgtggtgttgggcaatggtaaaattggggctttttagttcacacttgtgaaatgtctctctaagtattcaggtattatcttaattattatattattatattcacaatttttataaaagtatagactgtcttcacagttttgttcttagatactttatgtttttaattgatgttgtggattaaattctctttgatcacttattcctggggaagccagctgccatgtcctgaggcagccctgtggagaaaaccccattggaaaaaactgaagcctgcaat

SEQ ID NO: 194943 - DNA, 545 bp, Homo sapiens
tcttccaaatgaattttataatcagcttgtcaagctcagtaacaatccctgcaaagattttgattggtgtatctctgattaattcatttgggggagagattacatctttatattattgaggctttggctgggcatggtggctcacacctataatcccagcactttgggaggccaaggcaggcatatcacytgaggtcaggagttcaagaccagcctggccaaaatggcgaaacactgtatctactaaaaacacaaaaactagccaggcgtggtgttgggcaatggtaaaattggggctttttagttcacacttgtgaaatgtctctctaagtattcaggtattatcttaattattatattattatattcacaatttttataaaagtatagactgtcttcacagttttgttcttagatactttatgtttttaattgatgttgtggattaaattctctttgatcacttattcctggggaagccagctgccatgtcctgaggcagccctgtggagaaaaccccattggaaaaaactgaagcctgcaat

SEQ ID NO: 194944 - DNA, 159 bp, Homo sapiens
agttttgttcttagatactttrtgtttttaattgatgttgtggattaaattctctttgatcacttattcctggggaagccagctgccatgtcctgaggcagccctgtggagaaaaccccattggaaaaaactgaagcctgcaatggctacatgagtaaa

SEQ ID NO: 194945 - DNA, 159 bp, Homo sapiens
agttttgttcttagatactttatgtttktaattgatgttgtggattaaattctctttgatcacttattcctggggaagccagctgccatgtcctgaggcagccctgtggagaaaaccccattggaaaaaactgaagcctgcaatggctacatgagtaaa

SEQ ID NO: 194946 - DNA, 547 bp, Homo sapiens
acaccatcacaaagtgaagtcctacaacaggccgtctgcaagttgaggagcaaggaatctagtattggcttagtccgagtcccaacacctcaaaagtagggaaaccgacaggccagctttgagtctctggatgaaggcctgrgagcccctggaaaacaactggagtaagtccaagagtccaaaagccaaagaacctggagtctgatatttgagtgcaggaagcatccagcatgggagaaagatgagggccagaaggctcagcaagtcagcttctcctaaccttcttctgcctgctttattcgagccatgctggcagctgattttatggtgcccacccacattgagggtggatctgcctttcccagtccactaaataaatgttaatctcctttggcaacaccctcacagacacaaccgggaacaataatttggatccttcaatccaatcaagttgacacttacttaatattaaacttcacaatgtaatattcatcccatttgtaatttttctttaatatacaagctcgttgagaacatgcaccatttg

SEQ ID NO: 194947 - DNA, 547 bp, Homo sapiens
acaccatcacaaagtgaagtcctacaacaggccgtctgcaagttgaggagcaaggaatctagtattggcttagtccgagtcccaacacctcaaaagtagggaaaccgacaggccagctttgagtctctggatgaaggcctgagagcccctggaaaacaactggagtaagyccaagagtccaaaagccaaagaacctggagtctgatatttgagtgcaggaagcatccagcatgggagaaagatgagggccagaaggctcagcaagtcagcttctcctaaccttcttctgcctgctttattcgagccatgctggcagctgattttatggtgcccacccacattgagggtggatctgcctttcccagtccactaaataaatgttaatctcctttggcaacaccctcacagacacaaccgggaacaataatttggatccttcaatccaatcaagttgacacttacttaatattaaacttcacaatgtaatattcatcccatttgtaatttttctttaatatacaagctcgttgagaacatgcaccatttg

SEQ ID NO: 194948 - DNA, 547 bp, Homo sapiens
acaccatcacaaagtgaagtcctacaacaggccgtctgcaagttgaggagcaaggaatctagtattggcttagtccgagtcccaacacctcaaaagtagggaaaccgacaggccagctttgagtctctggatgaaggcctgagagcccctggaaaacaactggagtaagtccaagagtccaaaagccaaagaacctggagtctgatatttgagtgcaggaagcatccagcatgggagaaagatgagggccagaaggctcagcaagtcagcttctcctaaccttcttctgcctgctttattcgagccatgctggcagctgattttatggtgcccacccacattgagggtggatctgcctttcccagtccactaaataaatgttaatctcctttggcaacaccctcacagacacaaccgggaacaataatttggatccttcaatccaatcaagttgacacttacttaatattaamcttcacaatgtaatattcatcccatttgtaatttttctttaatatacaagctcgttgagaacatgcaccatttg

SEQ ID NO: 194949 - DNA, 547 bp, Homo sapiens
acaccatcacaaagtgaagtcctacaacaggccgtctgcaagttgaggagcaaggaatctagtattggcttagtccgagtcccaacacctcaaaagtagggaaaccgacaggccagctttgagtctctggatgaaggcctgagagcccctggaaaacaactggagtaagtccaagagtccaaaagccaaagaacctggagtctgatatttgagtgcaggaagcatccagcatgggagaaagatgagggccagaaggctcagcaagtcagcttctcctaaccttcttctgcctgctttattcgagccatgctggcagctgattttatggtgcccacccacattgagggtggatctgcctttcccagtccactaaataaatgttaatctcctttggcaacaccctcacagacacaaccgggaacaataatttggatccttcaatccaatcaagttgacacttacttaatattaaactwcacaatgtaatattcatcccatttgtaatttttctttaatatacaagctcgttgagaacatgcaccatttg

SEQ ID NO: 194950 - DNA, 557 bp, Homo sapiens
tcaataaaagctaatgttgttgtctactgttcattctcagtgtttggcatagtagccagcaaaaggaagaggatttttttttttttatttttttcagacagtctccctctgtcacccaggctggagtgccatggtgtgatcttggctcactgyaacctctgcctcttgggttcaagtgattcttgtgcctcagccccctgagtagctgggattacaggcctgtgctaccatacccagctaactttttgtatttttagtggagatggagctttgctatgttggccaggctggtcttgaactcatgtcctcaagtgatccacccgctttggcctcccaaagtgttgggattataggcgtgagccattgggcccagcctggaaatatttttttgaaacatgactgataacaatattttttgaaagaatgacagataccaatcatgaaggaaaagattttgacaaatgacaataaaaaactttaacttctgaatggtaaaaagagtgagaaaattaaaagccaaattacaaattgaaaaaactaaagtatataaaacaaag

SEQ ID NO: 194951 - DNA, 545 bp, Homo sapiens
tcttccaaatgaattttataatcagcttgtcaagctcagtaacaatccctgcaaagattttgattggtgtatctctgattaattcatttgggggagagattacatctttatattattgaggctttggctgggcatggtggctcacacctataatcccagcactttgggaggccaaggcaggcatatcacctgaggtcaggagttcaagaccagcctggccaaaatggcgaaacactgtatctactaaaaacacaaaaactagccaggcgtggtgttgggcaatggtaaaattggggctttttagttcacacttgtgaaatgtctctctaagtattcaggtattatcttaattattatattattatattcacaatttttataaaagtatagactgtcttcacagttttgttcttagatactttatgtttttaattgatgttgtggattaaattctctttgatcacttattcctggggaagccagctgccatgtcctgaggcagccctgtggagaaaaccccaytggaaaaaactgaagcctgcaat

SEQ ID NO: 194952 - DNA, 316 bp, Homo sapiens
caaacatgccttacaagaggtccttaagggagtgctaagcgtggaagtgaaagactgctaatggccaccacaaaaatacatttaagtacatagaccattgacgttgtaaagtaactacacaatcaagtctccataataaccagctaacaacataatggcaggaccaaagctataaataccaatattaactgtgaatgtaaacagtataaatgcccygcttaaaactcacagaatggcaagttggataaagaagcaaagcccaactgtatctgttgtcaagagacccagctcatatgcaacaatacccattggcttg

SEQ ID NO: 194953 - DNA, 198 bp, Homo sapiens
taaaaagtctctgagccaaaaaaaaaaaaaaaaaaaaaaaaaaaagcaagcccaggacccaacagattcacagacaaattctaccaraagtgtaaagaagagctggtaccaatgctactgaaattattctgaaaaaatgaggaggaaggatccctccctaactcattttatgaggtcagcatcattcagatatgaaaa

SEQ ID NO: 194954 - DNA, 319 bp, Homo sapiens
  misc_feature (1)...(319): n = A,T,C or G
gacttatcacatacaggggagcartaatattatcaatactggcatttttatctgaaaaaaatggaggccttatgaagcgacatttcaaaagtggagggaaaaataactgtcaattaaaaattcntgtatccatttaaatgatccttcaaaaatggaggtgaaataaagacatttccagataaataaaaataaagagaacttatccttgctaaagaaacactaaagaaaatgcttttaagataaaaggatatgacaccagatggcaacttgaacctataaggaataaatggcacgggaaatggtaaataaatttgtaagt

SEQ ID NO: 194955 - DNA, 319 bp, Homo sapiens
  misc_feature (1)...(319): n = A,T,C or G
gacttatcacatacaggggagcaataatattatcaatactggcatttttatctgaaaaaaatggaggycttatgaagcgacatttcaaaagtggagggaaaaataactgtcaattaaaaattcntgtatccatttaaatgatccttcaaaaatggaggtgaaataaagacatttccagataaataaaaataaagagaacttatccttgctaaagaaacactaaagaaaatgcttttaagataaaaggatatgacaccagatggcaacttgaacctataaggaataaatggcacgggaaatggtaaataaatttgtaagt

SEQ ID NO: 194956 - DNA, 319 bp, Homo sapiens
  misc_feature (1)...(319): n = A,T,C or G
gacttatcacatacaggggagcaataatattatcaatactggcatttttatctgaaaaaaatggaggccttatgaagcgacatttcaaaagtggagggaaaaataactgtcaattaaaaattcntgtatccatttaaatgatccttcaaaaatggaggtgaaataaagacatttccagataaataaaaataaaragaacttatccttgctaaagaaacactaaagaaaatgcttttaagataaaaggatatgacaccagatggcaacttgaacctataaggaataaatggcacgggaaatggtaaataaatttgtaagt

SEQ ID NO: 194957 - DNA, 356 bp, Homo sapiens
gaattctatcaaactactaagggaggaaataataccaatgttacaaaaactttattcagcaaatagaggatgaaggaaacttcccaactaacyttatttcatttgatatcaatattaccctgatatcaaaacaagacaaagacattacaagcaaacacagctatataccaatatcccttgtgaacctagacataaaaattcttaaccaaatattagcaaatgtaattgagcaacatatgaaaaggattttataccataatcaaatgaagtttatctcaggaatgtgaggttgacttaacatccgaaaatcaatgtaataaactatattaacagaataaaggacaaaaccatatgat

SEQ ID NO: 194958 - DNA, 356 bp, Homo sapiens
gaattctatcaaactactaagggaggaaataataccaatgttacaaaaactttattcagcaaatagaggatgaaggaaacttcccaactaaccttatttcatttgatatcaatattaccctgatatcaaaacaagacaaagacattacaagmaaacacagctatataccaatatcccttgtgaacctagacataaaaattcttaaccaaatattagcaaatgtaattgagcaacatatgaaaaggattttataccataatcaaatgaagtttatctcaggaatgtgaggttgacttaacatccgaaaatcaatgtaataaactatattaacagaataaaggacaaaaccatatgat

SEQ ID NO: 194959 - DNA, 603 bp, Homo sapiens
gaattcaaattaagttcttgccccaaggatgtgacttctactacacagtttcttttggcctgagggcaattcctagggcatgaacttagtcatatgccctcaacagacagcactctaaggaagctggggaatgagggtctccattctgcagggaggcctggactacrcaccacagaagacactactctgtccatccctcatgtcatttggatccatgacttcatataacttctctccatctaggaatagctcctccaggattttggttggtttcttttgctggggaaacgtgaaagtaacattcatggagggaaaaatagctccttggctcttcaactggtctttcaccctaaactgatcatctgcctttcctactatacaggtactatcaggtttacattcttaccctcagctagcacctccactggtctaggtcacttacctggtgataggagaaggggggtgtagtagtcatggctactagacttgtccttttaaattgagcaatcaaaatttagtaagggactacttaaacatcccttggctgccaaacacattcctgtctacttccgttgtgtaacagcattgaattgcagagataag

SEQ ID NO: 194960 - DNA, 575 bp, Homo sapiens
gacttctactacacagtttcttttggcctgagggcaattcctagggcatgaacttagtcatatgccctcaacagacagcactctaaggaagctggggaatgagggtctccattctgcagggaggcctggactacgcaccacagaagacactactctgtccatccctcatgtcatttggatccatgacttcatataacttctctccatctaggaatagctcctccaggattttggttggtttcttttgctggggaaacgtgaaagtaacattcatggagggaaaaatagctccttggctcttcaactggtctttcaccctaaactgatcatctgcctttcctactatacaggtactatcaggtttacattcttaccctcagctagcacctccactggtctaggtcacttacctggtgataggagaaggggggtgtagtagycatggctactagacttgtccttttaaattgagcaatcaaaatttagtaagggactacttaaacatcccttggctgccaaacacattcctgtctacttccgttgtgtaacagcattgaattgcagagataagaagc

SEQ ID NO: 194961 - DNA, 604 bp, Homo sapiens
gaattcaaattaagttcttgccccaaggatgtgacttctactacacagtttcttttggcctgagggcaattcctagggcatgaacttagtcatatgccctcaacagacagcactctaaggaagctggggaatgagggtctccattctgcagggaggcctggactacgcaccacagaagacactactctgtccatccctcatgtcatttggatccatgacttcatataacttctctccatctaggaatagctcctccaggattttggttggtttcttttgctggggaaacgtgaaagtaacattcatggagggaaaaatagctccttggctcttcaactggtctttcaccctaaactgatcatctgcctttcctactatacaggtactatcaggtttacattcttaccctcagctagcacctccactggtctaggtcacttacctggtgataggagaaggggggtgtagtagtcatggctactagacttgtcyttttaaattgagcaatcaaaatttagtaagggactacttaaacatcccttggctgccaaacacattcctgtctacttccgttgtgtaacagcattgaattgcagagataaga

SEQ ID NO: 194962 - DNA, 594 bp, Homo sapiens
cagcttgccaccatgtggctacttrgtgtccttgagggatgatgctatcttgaggcctcagtgttgctctgtcttgatgacaactttgacattcagaagcagcagtagctagataagacttagtcagtggagacttctgctgtttgggcctctgcatagcctccatccttgtcactatatttattcaccaattgtgccagtactgagctggccaatggaagaggttggctaacatcatctggctgagtcacttttctccttggttgttgatagatacctcttgtaggtgttaacatgtgaaacaaagatcttcatactttttgtacatccccataagtccacccatatgtccttttctcagatgtctttttctccagtcttccaaattttctccttccatccccctgacctgtagccaagccatttgaccaagagtcagtacattcttactttgagtctcttctctttccatgcaaagtgaatgacaaggtgcgtagtgcaaagttctgcctactgatttttttttaatttttttattttttgagacagagtcttgcactgtcaccaggctggagtacagtggcgtgatctcag

SEQ ID NO: 194963 - DNA, 594 bp, Homo sapiens
cagcttgccaccatgtggctacttagtgtccttgagggatgatgctatcttgaggcctcagtgttgctctgtcttgatgacaactttgacattcagaagcagcagtagctagataagacttagtcagtggagacttctgctgtttgggcctctgcatarcctccatccttgtcactatatttattcaccaattgtgccagtactgagctggccaatggaagaggttggctaacatcatctggctgagtcacttttctccttggttgttgatagatacctcttgtaggtgttaacatgtgaaacaaagatcttcatactttttgtacatccccataagtccacccatatgtccttttctcagatgtctttttctccagtcttccaaattttctccttccatccccctgacctgtagccaagccatttgaccaagagtcagtacattcttactttgagtctcttctctttccatgcaaagtgaatgacaaggtgcgtagtgcaaagttctgcctactgatttttttttaatttttttattttttgagacagagtcttgcactgtcaccaggctggagtacagtggcgtgatctcag

SEQ ID NO: 194964 - DNA, 594 bp, Homo sapiens
cagcttgccaccatgtggctacttagtgtccttgagggatgatgctatcttgaggcctcagtgttgctctgtcttgatgacaactttgacattcagaagcagcagtagctagataagacttagtcagtggagacttctgctgtttgggcctctgcatagcctccatccttgtcactatatttattcaccaattgtgccagtactgagctggccaatggaagaggttggctaacatcatctggctgagtcacttttctccttggttgttgatagatacctcttgtaggtgttaacatgtgaaacaaagatcttcatactttttgtacatccccataagtccaccyatatgtccttttctcagatgtctttttctccagtcttccaaattttctccttccatccccctgacctgtagccaagccatttgaccaagagtcagtacattcttactttgagtctcttctctttccatgcaaagtgaatgacaaggtgcgtagtgcaaagttctgcctactgatttttttttaatttttttattttttgagacagagtcttgcactgtcaccaggctggagtacagtggcgtgatctcag

SEQ ID NO: 194965 - DNA, 594 bp, Homo sapiens
cagcttgccaccatgtggctacttagtgtccttgagggatgatgctatcttgaggcctcagtgttgctctgtcttgatgacaactttgacattcagaagcagcagtagctagataagacttagtcagtggagacttctgctgtttgggcctctgcatagcctccatccttgtcactatatttattcaccaattgtgccagtactgagctggccaatggaagaggttggctaacatcatctggctgagtcacttttctccttggttgttgatagatacctcttgtaggtgttaacatgtgaaacaaagatcttcatactttttgtacatccccataagtccacccatatgtccttttctcagatgtctttttctccagtcttccaaattttctccttccatccccctgacctgtagccaagccatttgaccawgagtcagtacattcttactttgagtctcttctctttccatgcaaagtgaatgacaaggtgcgtagtgcaaagttctgcctactgatttttttttaatttttttattttttgagacagagtcttgcactgtcaccaggctggagtacagtggcgtgatctcag

SEQ ID NO: 194966 - DNA, 507 bp, Homo sapiens
ttggcctcccaaagtgctgagattacaggtgtgagccactgtgcctggccaagaatttatttttgagttgaatttttaaatattaaaaaattttaaatatacaaacaaaaattgtatatatttgtagtgtacaacctgatgttttgaaatatggatacactgtgaaatggctaactcaagctaattaatacatgtgttacctcacatacttatcatttcttttgtggtgaaarcacttaaaatctactgtcctagcaattttcaagtatgcaatacattgttattaactgtagtcaccatgttgtacaataggtctcttgaacttgttcttcctgcttatcttaatttttgtatcctttgaccaacatctccccagttctaccctccttcccctcccctaataaccattattctcttttctgcttctatgtgtttgacttttttagattccacatataagcgagattacatggcatttatctctctgtgcctggcttatttcactta

SEQ ID NO: 194967 - DNA, 507 bp, Homo sapiens
ttggcctcccaaagtgctgagattacaggtgtgagccactgtgcctggccaagaatttatttttgagttgaatttttaaatattaaaaaattttaaatatacaaacaaaaattgtatatatttgtagtgtacaacctgatgttttgaaatatggatacactgtgaaatggctaactcaagctaattaatacatgtgttacctcacatacttatcatttcttttgtggtgaaaacacttaaaatctactgtcctascaattttcaagtatgcaatacattgttattaactgtagtcaccatgttgtacaataggtctcttgaacttgttcttcctgcttatcttaatttttgtatcctttgaccaacatctccccagttctaccctccttcccctcccctaataaccattattctcttttctgcttctatgtgtttgacttttttagattccacatataagcgagattacatggcatttatctctctgtgcctggcttatttcactta

SEQ ID NO: 194968 - DNA, 507 bp, Homo sapiens
ttggcctcccaaagtgctgagattacaggtgtgagccactgtgcctggccaagaatttatttttgagttgaatttttaaatattaaaaaattttaaatatacaaacaaaaattgtatatatttgtagtgtacaacctgatgttttgaaatatggatacactgtgaaatggctaactcaagctaattaatacatgtgttacctcacatacttatcatttcttttgtggtgaaaacacttaaaatctactgtcctagcaattttcaagtatgcaatacattgttattaactgtagtcaccatgttgtacaataggtctcttgaacttgttcttcctgcttatcttaatttttgtatcctttgaccaacatctccccagttctaccytccttcccctcccctaataaccattattctcttttctgcttctatgtgtttgacttttttagattccacatataagcgagattacatggcatttatctctctgtgcctggcttatttcactta

SEQ ID NO: 194969 - DNA, 165 bp, Homo sapiens
tctaccactttccttaagtttatgtaagtygttatgtgttaggtgagtctcctgaaggcagcagatagttagttggtgagttcttatccattctgtggttctgtatcttgtaagcggagcatttaagccatttacaaccaacattactattaaaaagtggggtac

SEQ ID NO: 194970 - DNA, 165 bp, Homo sapiens
tctaccactttccttaagtttatgtaagttgttatgtgttaggtgagtctcctgaaggcagcagatagttagttggtgagttcttatccattctgtggttctgtatcttgtaagyggagcatttaagccatttacaaccaacattactattaaaaagtggggtac

SEQ ID NO: 194971 - DNA, 630 bp, Homo sapiens
gaagttgtaatacctttattgatgaatagtacctgcgcatgaccagaattgtrtttttagtagatacggggtttcaccctgttagccaggatagcctcgatctcctgacctcgtgatccgcctgcctcagcctcccaaagtgctgggattacaggcgtgagccaccgtgcctggccaatcacatcattcttgtattcacctagtggtcgctgtgtacctcccacgtcaggcactgtactaccagacactgaggatccggtggggagcgagagggactttaaggactgagtcagtaggacatgggctggtgggatagggaaggatgagggagacagagggtcagatgatccccatgtttctgcctggggcacctgaagggaagtcagaaaggaagccaggttgaagagtgatgacaatgagttttgtgtttggtctgcaggacagagatgccgggctgcagggaggacaggtaggaggtgtgtgtcacaggtaaaggcaattgctctgtgggcctggggtttgatgggaagagacgctaaatcatggttcatgattctttctcaaaattgtaatgcaaagagccctcattgaatctgcattttatagcatgtactgtgcaagtttcggggg

SEQ ID NO: 194972 - DNA, 630 bp, Homo sapiens
gaagttgtaatacctttattgatgaatagtacctgcgcatgaccagaattgtgtttttagtagatacggggtttcaccctgttagccaggatagcctcgatctcctgacctcgtgatccgcctgcctcagcctcccaaagtgctgggattacaggcgtgagccaccgtgcctggccaatcacatcattcttgtattcacctagtggtcgctgtgtacctcccacgtcaggcactgtactaccagacactgaggatccggtggggagcgagagggactttaaggactgagtcagtaggacatgggctggtgggatagggaaggatgagggagacagagggtcagatgatccccatgkttctgcctggggcacctgaagggaagtcagaaaggaagccaggttgaagagtgatgacaatgagttttgtgtttggtctgcaggacagagatgccgggctgcagggaggacaggtaggaggtgtgtgtcacaggtaaaggcaattgctctgtgggcctggggtttgatgggaagagacgctaaatcatggttcatgattctttctcaaaattgtaatgcaaagagccctcattgaatctgcattttatagcatgtactgtgcaagtttcggggg

SEQ ID NO: 194973 - DNA, 630 bp, Homo sapiens
gaagttgtaatacctttattgatgaatagtacctgcgcatgaccagaattgtgtttttagtagatacggggtttcaccctgttagccaggatagcctcgatctcctgacctcgtgatccgcctgcctcagcctcccaaagtgctgggattacaggcgtgagccaccgtgcctggccaatcacatcattcttgtattcacctagtggtcgctgtgtacctcccacgtcaggcactgtactaccagacactgaggatccggtggggagcgagagggactttaaggactgagtcagtaggacatgggctggtgggatagggaaggatgagggagacagagggtcagatgatccccatgtttctgcctggggcacctgaagggaagtcagaaaggaagccaggttgaagagtgatgrcaatgagttttgtgtttggtctgcaggacagagatgccgggctgcagggaggacaggtaggaggtgtgtgtcacaggtaaaggcaattgctctgtgggcctggggtttgatgggaagagacgctaaatcatggttcatgattctttctcaaaattgtaatgcaaagagccctcattgaatctgcattttatagcatgtactgtgcaagtttcggggg

SEQ ID NO: 194974 - DNA, 630 bp, Homo sapiens
gaagttgtaatacctttattgatgaatagtacctgcgcatgaccagaattgtgtttttagtagatacggggtttcaccctgttagccaggatagcctcgatctcctgacctcgtgatccgcctgcctcagcctcccaaagtgctgggattacaggcgtgagccaccgtgcctggccaatcacatcattcttgtattcacctagtggtcgctgtgtacctcccacgtcaggcactgtactaccagacactgaggatccggtggggagcgagagggactttaaggactgagtcagtaggacatgggctggtgggatagggaaggatgagggagacagagggtcagatgatccccatgtttctgcctggggcacctgaagggaagtcagaaaggaagccaggttgaagagtgatgacaatgagttttgtgtttggtctgcaggacagagatgccgggctgcrgggaggacaggtaggaggtgtgtgtcacaggtaaaggcaattgctctgtgggcctggggtttgatgggaagagacgctaaatcatggttcatgattctttctcaaaattgtaatgcaaagagccctcattgaatctgcattttatagcatgtactgtgcaagtttcggggg

SEQ ID NO: 194975 - DNA, 654 bp, Homo sapiens
acagccatgagtaacatcgaaaaggttgtagcctagccaacacggcgaaaccccatctctacaaaaaatacaaaaagtagttgggcttggtagcatgcacctttaatcccagctgcttgggaggctgaggcaggagaatcacttgaacccagggggcagaggttgcagtgagctgagatcatgccactgcactccagccagggtgacagaatgagaacctgtctgaaaaaagaaaaaaaaaagacaggttgtaacccatcctccaagataccccccatacatctaaaacaattagattaaacagactaaacatgtttctgtcctctgtctcatgtctctcaggcagcagggcttcccatgtattttatgctagcaggcactktcccacaccctcctgaagccacggtgtcttaaggcttcttctgtcataaaacgtgcctttggatccactaccaacaacttcttgacaaggtccagagctaaagcaacaattgggcaaatcacagtgaaaagtataaatatattatcagtaatagtatgccagaattaacaggtcaccatccagaaagagcagagagggtctgagatcatcagggagtcagcagacagggccccctaatcttcctcattctctgtattcagagtactgtgaga

SEQ ID NO: 194976 - DNA, 654 bp, Homo sapiens
acagccatgagtaacatcgaaaaggttgtagcctagccaacacggcgaaaccccatctctacaaaaaatacaaaaagtagttgggcttggtagcatgcacctttaatcccagctgcttgggaggctgaggcaggagaatcacttgaacccagggggcagaggttgcagtgagctgagatcatgccactgcactccagccagggtgacagaatgagaacctgtctgaaaaaagaaaaaaaaaagacaggttgtaacccatcctccaagataccccccatacatctaaaacaattagattaaacagactaaacatgtttctgtcctctgtctcatgtctctcaggcagcagggcttcccatgtattttatgctagcaggcactgtcccacaccctcctgaagccacggtgtcttaaggcttcttctgtcataaaacgtgcctttggatccactaccaacaacttcttgacaaggtccagagctaaagcaacaattgggcaaatcacagtgaaaagtataaatatattatcagtaatagtatgccagaattaacaggtcaccatccagaaagagcagagagggtctgagatcatcagggwgtcagcagacagggccccctaatcttcctcattctctgtattcagagtactgtgaga

SEQ ID NO: 194977 - DNA, 604 bp, Homo sapiens
tatttcacatccaaatatcttctgattttcattttcatgtcttctttgactgaaaaattatttaaggtatgcctttagtttgaagatgaaagaaatttacatttttttctctaataaattgcattttggttacagagtataggccacatgttataatgtttgtttatttgttgtgatttgattcataggctagcataggttcagttctcctaagactttatcaggcttcaaagtatatatatattctctaatttgagcatacagcagtctatatatttcctttamattaagctttttaaatacagtggtaaaaatctgagataatcttactacattttgattatcattgactcagaggtttaagtttcttcaaagttgaggatttagccatttttctttgtaattctgccaatttgtgcttcatatattttacggttgaattgttacatgcatacatgtctttacataatgacttttattcctcagaatgtttttttgtcttaaattatagtttttgatatgaaaatagctatatcagccatatattggttaatatttgttttatttatcatttactcatctcataccttcagaattttgtgtc

SEQ ID NO: 194978 - DNA, 559 bp, Homo sapiens
ctgatttaaaagaaagatttaactttgcaagatgattgcacacatcacaaagcagtttctcagatagattttttttagtttttatccagggatattcactttttcacaattggtctcaatgagattccaaatgtmcattcacagaatggacaaaaacagtgtttccaaactactctatcaaaagagaggtttagctgtgagaggaatgtacacctgtcaaagcagtttctcagaaagcttctttctagtttttatctgtattttctttttcaccatagtctcaaaattctcccaaatatgccttcacatattctacaaaatcattgtttccaaactgcttaatgaaaaaaaggtttaacttttcgaggtgaatgcatacgtaacaaagtattttctcagatagtttccttctagtttttgtgtctggatatttgctttttctccagtggcctctatgatctcccaaatgtccactcacagaaaagacaaactggtgtttccaaactgctgcatcaatggaaagtttatctctgtgagatgaatgcacatatcaaaaagc

SEQ ID NO: 194979 - DNA, 559 bp, Homo sapiens
ctgatttaaaagaaagatttaactttgcaagatgattgcacacatcacaaagcagtttctcagatagattttttttagtttttatccagggatattcactttttcacaattggtctcaatgagattccaaatgtacattcacagaatggacaaaaacagtgtttccaaactactctatcaaaagagaggtttagctgtgagaggaatgtacacctgtcaaagcagtttctcagaaagcttctttctagtttttatctgtattttctttttcaccatagtctcaaaattctcccaaatatgccttcrcatattctacaaaatcattgtttccaaactgcttaatgaaaaaaaggtttaacttttcgaggtgaatgcatacgtaacaaagtattttctcagatagtttccttctagtttttgtgtctggatatttgctttttctccagtggcctctatgatctcccaaatgtccactcacagaaaagacaaactggtgtttccaaactgctgcatcaatggaaagtttatctctgtgagatgaatgcacatatcaaaaagc

SEQ ID NO: 194980 - DNA, 559 bp, Homo sapiens
ctgatttaaaagaaagatttaactttgcaagatgattgcacacatcacaaagcagtttctcagatagattttttttagtttttatccagggatattcactttttcacaattggtctcaatgagattccaaatgtacattcacagaatggacaaaaacagtgtttccaaactactctatcaaaagagaggtttagctgtgagaggaatgtacacctgtcaaagcagtttctcagaaagcttctttctagtttttatctgtattttctttttcaccatagtctcaaaattctcccaaatatgccttcacatattctacaaaatcattgtttccaaactgcttaatgaaaaaaaggtttaactttkcgaggtgaatgcatacgtaacaaagtattttctcagatagtttccttctagtttttgtgtctggatatttgctttttctccagtggcctctatgatctcccaaatgtccactcacagaaaagacaaactggtgtttccaaactgctgcatcaatggaaagtttatctctgtgagatgaatgcacatatcaaaaagc

SEQ ID NO: 194981 - DNA, 331 bp, Homo sapiens
ataaaagcagacaacacagagcagtttctcagatagcttcctcctaatttttatcctgttatgttcactttttcacctttggcctcaaagacctcccaaatgtctgtagtcagaatggacaacaacagtgtttacaaactgctgaargtaaagaaaggtgtaactctgtgagatgaatgcacatataacaaagcaatttctcagaaaccatctttctagtttttatttgaagatattttctttttcaccctaagcctcaatgaactccctaatattccttggcagtttccacaaaaacagtgtttccaaactgatgaatgaaaagaaaggt

SEQ ID NO: 194982 - DNA, 582 bp, Homo sapiens
tcagatagcttccttctagttttcatccttggatatttgcttttttgccattggtctcaatgatctcccaaatgtctattcgcagaatgcagaaaaacagtgttttgaaagtgctaaatcaaaagtaaggtttaactttgtcaggtgaatgcacacatcacaaagcagtttctcagagagcttctttctactttttatctgaagatattttctttttcacataggcatcaaggcgctcccaaatatcccttcacacattctacaacaaaagtgtttccaaactgctgtrttacaagaaaggtataacactgcaagatgaatggacacatcacagagcagtttttcagttggtttctttctactttttatcctgggctatttgcctttttgtcattgtcctcgaaaagttcccaaatgtcctttctctgaataggccattgaagcaagcaattagccttatgaggaaagagttacctgtggataaaggagaaactgaaaaattcacaagtcaagagtttttgagcaaaaacaaaaatatgactattagtcaccaattcagtacagtgaaaaaaaagttgaaga

SEQ ID NO: 194983 - DNA, 582 bp, Homo sapiens
tcagatagcttccttctagttttcatccttggatatttgcttttttgccattggtctcaatgatctcccaaatgtctattcgcagaatgcagaaaaacagtgttttgaaagtgctaaatcaaaagtaaggtttaactttgtcaggtgaatgcacacatcacaaagcagtttctcagagagcttctttctactttttatctgaagatattttctttttcacataggcatcaaggcgctcccaaatatcccttcacacattctacaacaaaagtgtttccaaactgctgtgttacaagaaaggtataacactgcaagatgaatggacacatcacagagcagtttttcagttggtttctttctactttttatcctgggctatttgcctttttgtcattgtcctygaaaagttcccaaatgtcctttctctgaataggccattgaagcaagcaattagccttatgaggaaagagttacctgtggataaaggagaaactgaaaaattcacaagtcaagagtttttgagcaaaaacaaaaatatgactattagtcaccaattcagtacagtgaaaaaaaagttgaaga

SEQ ID NO: 194984 - DNA, 582 bp, Homo sapiens
tcagatagcttccttctagttttcatccttggatatttgcttttttgccattggtctcaatgatctcccaaatgtctattcgcagaatgcagaaaaacagtgttttgaaagtgctaaatcaaaagtaaggtttaactttgtcaggtgaatgcacacatcacaaagcagtttctcagagagcttctttctactttttatctgaagatattttctttttcacataggcatcaaggcgctcccaaatatcccttcacacattctacaacaaaagtgtttccaaactgctgtgttacaagaaaggtataacactgcaagatgaatggacacatcacagagcagtttttcagttggtttctttctactttttatcctgggctatttgcctttttgtcattgtcctcgaaaagttcccaaatgtcctttctctgaataggccattgaagcaagcaattagccttatgaggaaagagttacctgtggataaaggagaaactgaaaaattcacaagtcaagastttttgagcaaaaacaaaaatatgactattagtcaccaattcagtacagtgaaaaaaaagttgaaga

SEQ ID NO: 194985 - DNA, 601 bp, Homo sapiens
atttccattctcagaatggacataaactctttttccaaaaggctgactcaaaagtaagttttaagtctgtgacatgaatgcacctatcacaaagttatttctcagttaccttcctgctaatttttatctaggaatatttactttttcaacattggcctcaaagagctcccaaatatccattcacagtatgtacaaaaaatgtgtttccaaattgctgaatccaaagaaggttttacctctgtgagatgaatgcacacattgcaaagyagtttctcaaaaagtttctttctagtttttatctgaagatattttcttttccaccacatgccccaatgcactcccaaatatcacttctcagattctacaaaaacagtgtttccaaagtgctgaatgaaacgacagttttacacatcacaaagtagtttctcagatagcttccttctagtttttgttctgtgatattccctttttcaccataggccttaatgagctcacaaaaatcccatcacagattctagaaaaacattatttccaaacatctgaatgcaaaagaaaagcttaactctgctaaatggatgcacatgtgacaaagcggtttctc

SEQ ID NO: 194986 - DNA, 486 bp, Homo sapiens
gtcccttcacggaatggactgaaagagtgtttccaaactggtgaatcaaggaaaagtttaactctgtgagattaatgcacacaacacaaagcagaatgcttctttctagtttttatctgaagatattttctttttcaccataggcctcawtgccctcccaaatatccctttgcagattctaaaaacacagtgtttccaagcagctgaatgaaaagggatgaatgcacacatcacaaagcagtttctcagagagcttccttctagttttaatcctggaatatttgctttttctcaattggcctcaatgagctcccaaatgtccatttgcagaatagacaaaaacagtgtttgcaaactgctgaatcaaaagaaaggcttaactctatgagataaatgccaacctaaaaaaccagtttctcagaaagcttttctctagtttttgtctgaagatatttttttttcaccagagccttcgatgcagtacaa

SEQ ID NO: 194987 - DNA, 486 bp, Homo sapiens
gtcccttcacggaatggactgaaagagtgtttccaaactggtgaatcaaggaaaagtttaactctgtgagattaatgcacacaacacaaagcagaatgcttctttctagtttttatctgaagatattttctttttcaccataggcctcattgccctcccaaatatccctttgcagattctaaaaacacagtgtttccmagcagctgaatgaaaagggatgaatgcacacatcacaaagcagtttctcagagagcttccttctagttttaatcctggaatatttgctttttctcaattggcctcaatgagctcccaaatgtccatttgcagaatagacaaaaacagtgtttgcaaactgctgaatcaaaagaaaggcttaactctatgagataaatgccaacctaaaaaaccagtttctcagaaagcttttctctagtttttgtctgaagatatttttttttcaccagagccttcgatgcagtacaa

SEQ ID NO: 194988 - DNA, 592 bp, Homo sapiens
ttttctttttcatcataggctcccaaatatacctgtgcaagttttacaaaaacagtgtttgccaactgctgaatgaaaagaaagtttaactctgagagatgaatgcacacatctcaaagtggtttctcagatagttttcttctaatttctatcttgggatatttgctttttttgccattgrcctcaatgagctctcaaatacccattcacagaatggacaaaaaaacagtgttacaaattgctaagtcaaaagaaatgtctaactctgtgagttgaatggacaaatcacaaagcagtttctcagaaagcttctttctactatttatatgaatacagtctctttttcaccatagcctcaatgcactcccaagtaaccctttgcagattcttcaaaaacagtttttccaaactcctgaatgaaaagaaaagttaaaatctgtgaggcaaatacacacatcacaaaggagtttctcagaaactttctttatttttgttgtgtgaagatattttctttttcaacataggcctgtatgccctcccaagtatcactttgaagattctacaaaacagcctttcaaaactgctgaatgaa

SEQ ID NO: 194989 - DNA, 592 bp, Homo sapiens
ttttctttttcatcataggctcccaaatatacctgtgcaagttttacaaaaacagtgtttgccaactgctgaatgaaaagaaagtttaactctgagagatgaatgcacacatctcaaagtggtttctcagatagttttcttctaatttctatcttgggatatttgctttttttgccattgacctcaatgagctctcaaatayccattcacagaatggacaaaaaaacagtgttacaaattgctaagtcaaaagaaatgtctaactctgtgagttgaatggacaaatcacaaagcagtttctcagaaagcttctttctactatttatatgaatacagtctctttttcaccatagcctcaatgcactcccaagtaaccctttgcagattcttcaaaaacagtttttccaaactcctgaatgaaaagaaaagttaaaatctgtgaggcaaatacacacatcacaaaggagtttctcagaaactttctttatttttgttgtgtgaagatattttctttttcaacataggcctgtatgccctcccaagtatcactttgaagattctacaaaacagcctttcaaaactgctgaatgaa

SEQ ID NO: 194990 - DNA, 592 bp, Homo sapiens
ttttctttttcatcataggctcccaaatatacctgtgcaagttttacaaaaacagtgtttgccaactgctgaatgaaaagaaagtttaactctgagagatgaatgcacacatctcaaagtggtttctcagatagttttcttctaatttctatcttgggatatttgctttttttgccattgacctcaatgagctctcaaatacccattcacagaatggacaaaaaaacagtgttacaaattgctaagtcaaaagaaatgtctaactctgtgagttgaatggacaaatcacaaagcagtttctcagaaagcttctttctactatttatatgaatacagtctctttttcaccatagcctcaatgcactcccaagtaaccctttgcagattcttcaaaaacagtttttccaaactcctgaatgaaaagaaaagttaaaatctgtgaggcaaatrcacacatcacaaaggagtttctcagaaactttctttatttttgttgtgtgaagatattttctttttcaacataggcctgtatgccctcccaagtatcactttgaagattctacaaaacagcctttcaaaactgctgaatgaa

SEQ ID NO: 194991 - DNA, 367 bp, Homo sapiens
tacacatttgttataccaatgtaaacatttgatactacctttaggcctaatatctggtcaatttttrtaaatactccaagtgtgcttgaaaagaatagaaattctttaactgttgattagccttactaattttacgtttatttattcaattaccaaagatgaaatgttaaaatctctcactgtgtagatttttttattgctctttccaattctaattttggctttatttattttgagactacattattaggtatccacaattttataaaaattaagaaaaaattagaaaagtttagaaaaaaattagaaaaatatagaaaatgatgtgacagaagcacacatgggctttatctggatgatctcttgt

SEQ ID NO: 194992 - DNA, 367 bp, Homo sapiens
tacacatttgttataccaatgtaaacatttgatactacctttaggcctaatatctggtcaatttttataaatactccaagtgtgcttgaaaagaatagaaattctttaactgttgattagccttactaattttacgtttatttattcaattacyaaagatgaaatgttaaaatctctcactgtgtagatttttttattgctctttccaattctaattttggctttatttattttgagactacattattaggtatccacaattttataaaaattaagaaaaaattagaaaagtttagaaaaaaattagaaaaatatagaaaatgatgtgacagaagcacacatgggctttatctggatgatctcttgt

SEQ ID NO: 194993 - DNA, 367 bp, Homo sapiens
tacacatttgttataccaatgtaaacatttgatactacctttaggcctaatatctggtcaatttttataaatactccaagtgtgcttgaaaagaatagaaattctttaactgttgattagccttactaattttacgtttatttattcaattaccaaaratgaaatgttaaaatctctcactgtgtagatttttttattgctctttccaattctaattttggctttatttattttgagactacattattaggtatccacaattttataaaaattaagaaaaaattagaaaagtttagaaaaaaattagaaaaatatagaaaatgatgtgacagaagcacacatgggctttatctggatgatctcttgt

SEQ ID NO: 194994 - DNA, 367 bp, Homo sapiens
tacacatttgttataccaatgtaaacatttgatactacctttaggcctaatatctggtcaatttttataaatactccaagtgtgcttgaaaagaatagaaattctttaactgttgattagccttactaattttacgtttatttattcaattaccaaagatgaaatgttaaaatctctcactgtgtagatttttttattgctctttccaattctaattttggctttatttattttgagactacattattaggtatccacaattttataaaaattaagaaaaaattagaaaagtttagaaaaaaattagaaaaatatagaaaawgatgtgacagaagcacacatgggctttatctggatgatctcttgt

SEQ ID NO: 194995 - DNA, 594 bp, Homo sapiens
gccttcacagcaagagatggaccagaggtttgagacaagggggccaccactcagaaggggaggagggcaaaggaactcctgagggaggaaagtatcagagaggaggctttcatgtctcagtgatatcactcagcagcatggcatggagtctgtagttcacagagttccaaagagcagaagcagcttggrgtctttacagcctagagtttatctgtggcaagcagattttggatgtagtttcccagggcatgtaaatcaggcaggctctaaatgcctacaaatctgcatgtctgggctatgtttaacacaattggatgtttaaaaatttgagtttggtgccagttggtttttgagctaatgggtttcagcttgctgtgaagaaataacctaggcgccaatacacagaggccatccttgtctcatttacattatatgcagtgactctatccttttttgctcacaattgttttattcatttcttttagatttgtttactttactgagattatttggtaggtaagatttcagtttattgtagtttgctaattcattattcaaagtgttctaataaaaattttgttccatccttaatcc

SEQ ID NO: 194996 - DNA, 594 bp, Homo sapiens
gccttcacagcaagagatggaccagaggtttgagacaagggggccaccactcagaaggggaggagggcaaaggaactcctgagggaggaaagtatcagagaggaggctttcatgtctcagtgatatcactcagcagcatggcatggagtctgtagttcacagagttccaaagagcagaagcagcttggggtctttacagcctagagtttatctgtggcaagcagattttggatgtagtttcccagggcatgtaaatcaggcaggctctaaatgcctacaaatctgcatgtctgggctatgtttaacacaattggatrtttaaaaatttgagtttggtgccagttggtttttgagctaatgggtttcagcttgctgtgaagaaataacctaggcgccaatacacagaggccatccttgtctcatttacattatatgcagtgactctatccttttttgctcacaattgttttattcatttcttttagatttgtttactttactgagattatttggtaggtaagatttcagtttattgtagtttgctaattcattattcaaagtgttctaataaaaattttgttccatccttaatcc

SEQ ID NO: 194997 - DNA, 594 bp, Homo sapiens
gccttcacagcaagagatggaccagaggtttgagacaagggggccaccactcagaaggggaggagggcaaaggaactcctgagggaggaaagtatcagagaggaggctttcatgtctcagtgatatcactcagcagcatggcatggagtctgtagttcacagagttccaaagagcagaagcagcttggggtctttacagcctagagtttatctgtggcaagcagattttggatgtagtttcccagggcatgtaaatcaggcaggctctaaatgcctacaaatctgcatgtctgggctatgtttaacacaattggatgtttaaaaatttgagtttggtgccagttggtttttgagctaatgggtttcagcttgctgtgaagaaataacctaggcgccaatacacagaggccatccttgtctcatttacattatatgcagtgactctatccttttttgctcamaattgttttattcatttcttttagatttgtttactttactgagattatttggtaggtaagatttcagtttattgtagtttgctaattcattattcaaagtgttctaataaaaattttgttccatccttaatcc

SEQ ID NO: 194998 - DNA, 590 bp, Homo sapiens
tcatttacattatatgcagtgactctatccttttttgctcacrattgttttattcatttcttttagatttgtttactttactgagattatttggtaggtaagatttcagtttattgtagtttgctaattcattattcaaagtgttctaataaaaattttgttccatccttaatccccatttaaacaaagctgctgtgggtaaggtcatcaatggcctttgtgttatcaaatccattttgttaacaaaattttaatgtttaaaattttcttatgtgtacacatgtttaatttatgtaatttcaaaacggggtatcatacatggaatttggtagttttctttcctttttttgttcacttactctgttttttaatgctttactgtaacccacaatgcagtgtccccaatatttattatgtataactgatattcacataaaacatattttgtcattaagtgttatctttttccacataggtgttcctgtctttagtcttctattttctctctctcccgcttctctcccacccttcctctctccatttatgtacgtatttaaatcattttaaaaatcattttatgtatcagttca

SEQ ID NO: 194999 - DNA, 590 bp, Homo sapiens
tcatttacattatatgcagtgactctatccttttttgctcacaattgttttattcatttcttttagatttgtttactttactgagattatttggtaggtaagatttcagtttattgtagtttgctaattcattattcaaagtgttctaataaaaattttgytccatccttaatccccatttaaacaaagctgctgtgggtaaggtcatcaatggcctttgtgttatcaaatccattttgttaacaaaattttaatgtttaaaattttcttatgtgtacacatgtttaatttatgtaatttcaaaacggggtatcatacatggaatttggtagttttctttcctttttttgttcacttactctgttttttaatgctttactgtaacccacaatgcagtgtccccaatatttattatgtataactgatattcacataaaacatattttgtcattaagtgttatctttttccacataggtgttcctgtctttagtcttctattttctctctctcccgcttctctcccacccttcctctctccatttatgtacgtatttaaatcattttaaaaatcattttatgtatcagttca

SEQ ID NO: 195000 - DNA, 590 bp, Homo sapiens
tcatttacattatatgcagtgactctatccttttttgctcacaattgttttattcatttcttttagatttgtttactttactgagattatttggtaggtaagatttcagtttattgtagtttgctaattcattattcaaagtgttctaataaaaattttgttccatccttaatccccatttaaacaaagctgctgtgggtaaggtcatcaatggcctttgtgttatcaaatccattttgttaacaaaattttaatgtttaaaattttcttatgtgtacacatgtttaatttatgtaatttcaaaacrgggtatcatacatggaatttggtagttttctttcctttttttgttcacttactctgttttttaatgctttactgtaacccacaatgcagtgtccccaatatttattatgtataactgatattcacataaaacatattttgtcattaagtgttatctttttccacataggtgttcctgtctttagtcttctattttctctctctcccgcttctctcccacccttcctctctccatttatgtacgtatttaaatcattttaaaaatcattttatgtatcagttca

SEQ ID NO: 195001 - DNA, 590 bp, Homo sapiens
tcatttacattatatgcagtgactctatccttttttgctcacaattgttttattcatttcttttagatttgtttactttactgagattatttggtaggtaagatttcagtttattgtagtttgctaattcattattcaaagtgttctaataaaaattttgttccatccttaatccccatttaaacaaagctgctgtgggtaaggtcatcaatggcctttgtgttatcaaatccattttgttaacaaaattttaatgtttaaaattttcttatgtgtacacatgtttaatttatgtaatttcaaaacggggtatcatacatggaatttggtagttttctttcctttttttgttcacttactctgttttttaatgctttactgtaacccacaatgcartgtccccaatatttattatgtataactgatattcacataaaacatattttgtcattaagtgttatctttttccacataggtgttcctgtctttagtcttctattttctctctctcccgcttctctcccacccttcctctctccatttatgtacgtatttaaatcattttaaaaatcattttatgtatcagttca

SEQ ID NO: 195002 - DNA, 556 bp, Homo sapiens
caggtgtgagccaccgcacctggccctcaaagagaatctttctaccttcatcttattttacttcttggtagcattctacagagttgaagattgtacttgtgagttttgagtttcttgatttgttgaatggatgtgattaatttatatctttagtgtgatcatgcagagaaatgtatgagagatagtgatggaaaattacaggaaatctgaaaatttaataaattgttggcatttttattttctcactagtacagggttcatctcagtaattatgaaatgtactacccttttctccttttctatcttattttggaaaattacagccttataatagagatcagaaaygtgttaacattatggctgatctatctgacaacagtgttctaagaaaacagtatcacaaatatactttctcaccataattgttcaaaacagaaattttgtaagcaaagaatcaagcatttaaaccaaaggaaagttagagtgatgtcatctctggttgaaaaacacagtctttctgaacagattttcaatgtccttcaagaccacaactaat

SEQ ID NO: 195003 - DNA, 390 bp, Homo sapiens
tgtagatctaatatgtaaacacatatatyattcccttgttctggatctatcaatgatttcatactttgactatatctaaattatctgcttttcctggccttcaaagtggtctttaattcagtcctgctttccatgggttaaatttcctacaatgctgagatgtttatattggtttcctcctgtcctatgaactttgtactgatttctgccccaataaatttgattatatgaagaaaaaaatactttttttttaagatagggtttcactcctgttgcccaggctggagtgcagtggcacaatcttggctcactgcaaccttggcctcctcaactcaagagattcttgtgcctcagcctcccgagtaactgggactatgggtgcgccattgg

SEQ ID NO: 195004 - DNA, 390 bp, Homo sapiens
tgtagatctaatatgtaaacacatatatcattcccttgttctggatctatcaatgatttcatactttgactatatctaaattatctgcttttcctggccttcaaagtggtctttaattcagycctgctttccatgggttaaatttcctacaatgctgagatgtttatattggtttcctcctgtcctatgaactttgtactgatttctgccccaataaatttgattatatgaagaaaaaaatactttttttttaagatagggtttcactcctgttgcccaggctggagtgcagtggcacaatcttggctcactgcaaccttggcctcctcaactcaagagattcttgtgcctcagcctcccgagtaactgggactatgggtgcgccattgg

SEQ ID NO: 195005 - DNA, 390 bp, Homo sapiens
tgtagatctaatatgtaaacacatatatcattcccttgttctggatctatcaatgatttcatactttgactatatctaaattatctgcttttcctggccttcaaagtggtctttaattcagtcctgctttccatgggttaaatttcctacaatgctgagatgtttatattggtttcctcctgtcctatgaamtttgtactgatttctgccccaataaatttgattatatgaagaaaaaaatactttttttttaagatagggtttcactcctgttgcccaggctggagtgcagtggcacaatcttggctcactgcaaccttggcctcctcaactcaagagattcttgtgcctcagcctcccgagtaactgggactatgggtgcgccattgg

SEQ ID NO: 195006 - DNA, 390 bp, Homo sapiens
tgtagatctaatatgtaaacacatatatcattcccttgttctggatctatcaatgatttcatactttgactatatctaaattatctgcttttcctggccttcaaagtggtctttaattcagtcctgctttccatgggttaaatttcctacaatgctgagatgtttatattggtttcctcctgtcctatgaactttgtactgatttctgccccaataaatttgattakatgaagaaaaaaatactttttttttaagatagggtttcactcctgttgcccaggctggagtgcagtggcacaatcttggctcactgcaaccttggcctcctcaactcaagagattcttgtgcctcagcctcccgagtaactgggactatgggtgcgccattgg

SEQ ID NO: 195007 - DNA, 527 bp, Homo sapiens
agacaatgaggcaatcacttctgaataaagtacaagcattagtaacatctcccctggtctctccagattggttatgctgccacaactgaattctaaatgggttaagtgttatacaattagttaagtttctttggtaggtatcaaataaaacatccacctaaattcttaagaaccttgttaaatagtgcaatttacaaactctttatacagattctgatagcacatttctattggaagactatggaatcacaatgaggaaggtagtactatatagatcagcagctggcttaattggcttcctgtaacttattaacaaattaggttacaaaatacaaaggcaacttaatgaatcatcatatttggcattgaactcaaagctgaattgtgtgaattgtgagatgctttccataattcaacttgcttaattacccatatgaattaatcattcatacctcaagcctgctaacacttttggayacctgatgtttatgtaatggtggtgctcatttgctgagtaaggcatgagt

SEQ ID NO: 195008 - DNA, 452 bp, Homo sapiens
tgatttagcaatttggaaaccctctttttgtccattctatgaatggaaatttgggaactcattgaaaacaatggggaaagtgaatatcccagggtaaatatagaakaagaatatctgagaaactgctttgtgatggatgtgggcattcatctcacagagttaaacctttcttttcattcagcagttggaaacagtgtttttgtccattctgtgaatggacatttgggagttcatggaggccaaaggttaagtagcaaatgttccctgataaaactggaaggaacctatatgagaaactgctttggttatgtgcatacatcacacagaattaaaccttattttctttcagcaatatggaaacactgtttttgtggaatctgcaaggggatattttagagcatattaaggcatatggtgaaaaataaaatatcttcagataaaaagtagaaaaa

SEQ ID NO: 195009 - DNA, 452 bp, Homo sapiens
tgatttagcaatttggaaaccctctttttgtccattctatgaatggaaatttgggaactcattgaaaacaatggggaaagtgaatatcccagggtaaatatagaataagaatatctgagaaactgctttgtgatggatgtgggcattcatctcacagagttaaacctttcttttcattcagcagttggaaacagtgtttttgtccattctgtgaatggacatttgggagttcatggaggccaaaggttaagtagcaaatgttccctgataaaactggaaggaacctatatgagaaactgctttggttatgtgcatacatcacacagaattaaaccttattttctttcagcaatatggaaacactgtttttgtggaatctgcaaggggatattttrgagcatattaaggcatatggtgaaaaataaaatatcttcagataaaaagtagaaaaa

SEQ ID NO: 195010 - DNA, 598 bp, Homo sapiens
tatgagaaactgctttggttatgtgcatacatcacacagaattaaaccttattttctttcagcaatatggaaacactgtttttgtggaatctgcaaggggatattttagagcatattaaggcatatggtgaaaaataaaatatcttcagataaaaagtagaaaaaagctttctgagaagctgctttgttatgtgcgctttcaacacacagagttaaacctttcttttgattcagcaatttggaaacaccatttttatctatttggagaatggacatttaggaactctttgcagccaatggcgaaaaagtgaatatcccaggataaaaactacaagaaagttttctgagaaccagctttgtgatgtgagcattcatctcacaaagttaaacctttcttttgattcagcagtttggaaacaccgtttttatctattcagagaatggacatttcagatctctttgarccccaaagtgaaaaagcgaatctcccatgataaaaaacagaaggaatctatctgataaactgccttgtgatgtgtacattcacctcaaagagttaaacttttcattcagcagtttggaaaaactgttttggtag

SEQ ID NO: 195011 - DNA, 422 bp, Homo sapiens
cttatagtcatctaaacctattgatccctaccagttgttaatgattacttaaaaataatcacaactccttctggctcagatatataatttaattaaaaaaaaatttaaccactaacatttatttctttttaaagtcagagatgattaaggaaaccatctttctttctctggctttcacttggtatcctaccagtgaatctgaatctttccgtccccccagtttttaagggggtgagggcatgagccattttgagtgaggtgtgggtagggaaattacaatatatctttttcaatgagttgttgaactatccctctgcacataatcttcgaaatagccctggataacatatkaatagcttggatcattttaaatgctgttaaataatgtcaagagatggggaggaaaggtggattaatgagta

SEQ ID NO: 195012 - DNA, 620 bp, Homo sapiens
tggctgtttttgttttcttctgtatgcaaaaattgatttcagaggcttcaaacacatagatatcctacagcaaacaagagaaaacagcaaataaacacagtctgcagagagtggtggtggtggtggtggttttgtaaattaccgaaaagccgcaggttataggaatcaccctcattttccatgcccatggcatgaaaatcccccatgatgatgtatttatttcatgttctcgttgtcttaggttttcggtggctgtagttgggggtaaggtgccgcagtgtctcttgttaaactggccttacaggaccccatrcttcagggtgagggctgactgcaaggacactcaccatgcgaagttagaacgtgatgaaatcagacacgaactaaatatctgtagaggactagaatcaaaattagtgtgctgttgagcacttctcctaaactctctaagcctcagtttaattgtcactaaataaggataaggtacctacttcattgtgtcaccgaagaacacgcagagctgcactgcacgctttctacaacacactcagaaaaactcgtgctaccaccggggttgaaattttcttgaaggtggcaccttacacaataaggttagggaa

SEQ ID NO: 195013 - DNA, 641 bp, Homo sapiens
ttttttgtagggtagggatactaaccatccatctctcagttttccttcagctgagaatttcttgattcccctcagtactggaacatactttcactggatatagaattctatgttgataattcttttcttccagaatttgaaaatgatgccttgctggtttcttatgagaaatccactatcacatgaatgttttccctctgggtgaggtgttagtgcgctttcttcctgctccttttttttctttgtgtttaattttcagatggtttactaagacgcgtcttggtgtagatttgtttctttgtttggttggttatgctgcttggattttgcccagtttcttcaatctcttgttgttcaatgccttttaccaaatttgttaaattttcagatacttttacttcaagtgttgttcaatcctaccttctttttttttctctttctggggttcggatggcatgaattttagatttttttgtgtgtgataacaccatatgtcttcagatcctttttttgtttgttttcaatctactgttctctctattgttctgtttgaatactttttattgttttctcttcagttcrctgtttgtttgctttatttcctctgctctgctgtttagaaaatccattgactttcattt

SEQ ID NO: 195014 - DNA, 466 bp, Homo sapiens
ggtcaaaaaattaagctatttttaaccgaatctgacctcaggatgggaaagagagtgaaaaattaaaaagcaatggaagtaagcacaaataacaaggtgaattacaatagatcagactacaagcaaccgtaaaattttgcgtgaaagactgtaagaaatagtagaaagctattaataaggattgtggtaaatgtggatgcgctaaaatggcagggtatcatattaattttataaaaacaagttgcatgtaggccaattctgtagtttaaaaatgaaatatatgcatacatacctgtgttattggtgatgtatatcatctatatcctgggcttttatatgttaacgcaatcatagcagctgaaaatttatctactttatatatttatatataagatgctggaataartttaattacataaaatgattctgatggatgcaaccaacctcgatatttagccaaatagtt

SEQ ID NO: 195015 - DNA, 557 bp, Homo sapiens
tggctcattttccaattttagaaagaaattaccctacatatttttttagcctgaaatttgataaggtaatttttgtagaactgaaagtaagtctctgaaattaaaaatataaaaatccaagatttaatttttattcatagataatagtaaaacaatgttcaagattatgattatctgccaatcaatatatactgcttcaagttcaaaattatttttaggtgcatcatcacctgtgatattcrttaccaccctattacccattagttccccttacagaagtagaaattgaggttcagattatgcatgagactcaaagtcattaaatatgcaataacttcaagatgaggattctaagagactaagatcaagaagagatataataataatacaatttataggacattaaaaagttacttcctgctctgtttctttggttgaattcccccagaaacagagtctgagacaaggatttaagcacaagtagtttatttggaaagagattgttggaagacatttctccacaggagtctcacatttccatacatcttgtgagcaga

SEQ ID NO: 195016 - DNA, 435 bp, Homo sapiens
  misc_feature (1)...(435): n = A,T,C or G
nnnnnnnnnnnnnnnnnnnnnnnnnnnnnnnngcccaaaaaacttttctattacctggcatttcaccattataactttattcttagagatagataacaaaatattagaaaaaataccaggcaagcagtgaaaagagcttggattttgactttaggtataccatctgcaaaatattttttcttcctttctgaatgtcaggtttyttatgtctcaaaatacataccttttatttctcagaatgattatgataaaacaggcaatatatatatcatgtgtaaatgctctaaaaattatcatcaatcaagtgttatgcataattttaactgtttagttctgatgtttctctttaaagatgtttttatgagggtaactcctgagagttaaagacaagattaatatctaagaagatgaaaggaggcaatggtagaaccaagg

SEQ ID NO: 195017 - DNA, 555 bp, Homo sapiens
ccactgaaggttgccctagggtgtactaactcctctgtacttatacgtatgccaaaaagagaaaccctcagctgaaaagcaaaagatgtgctatacacacttaagagtgagctgctaggagagcaagatgagttaaatttcatatggaactaggcaaaagccacagtggacatcagagatgaagctgaggggatggaggtaagagggatacagcaggaatctggtaccttgaccttcaagatttattttaataaattrtctaagctcattcaacttatttgcagcacatgttaagaattattaccccctcatcagagcacatcctttagttgatgtatgtgtatttaacctattattttagaatttggcataattattggctgtgtcctcatctgaatatatagaatttctcacaacatcctactttacatagtaggtaggtcatctataattgcttgtttagaaaaattatttatgaagattttgttactctcttttggcatcacactacaaaaacatttttttccaggtttcatgataagtaataaaattacc

SEQ ID NO: 195018 - DNA, 613 bp, Homo sapiens
cacgcacacacaccccccaaaacagctggcattacacttcatggaagtctttcaaatcctaggacacatctgtctaaaatgaatctacatttctttgaacattgacacttggttttaaggattaagagacacgatagtgattctgttccaccagagggcaccacagactacaatccarcaagcgtgcttgtgggtctgggtacataaactcaataatttaaagcagctacttctaggctttgcatttttctaacatagagagatttttaacttcaacaatgagtattattgatttttcaataaggtaggatttattttaaacacattaatttcactatacacttctgaaatttttacccccacatggaaaacaaacaaaaataaaatggaaacagtagcttaatcttacatgtatatgtgtacttccatgaggttatttatttccaagtccggtaatggaaagctgttttagatacagtaactctatgacaaagtccacctaaaattttgcctcttgggattcatctgggaaaagtatttggaatttgtgggttctgtagaacaggttctaatatccaaggaaactacaagaagcaaggctttcccctccaga

SEQ ID NO: 195019 - DNA, 613 bp, Homo sapiens
cacgcacacacaccccccaaaacagctggcattacacttcatggaagtctttcaaatcctaggacacatctgtctaaaatgaatctacatttctttgaacattgacacttggttttaaggattaagagacacgatagtgattctgttccaccagagggcaccacagactacaatccaacaagcgtgcttgtgggtctgggtacataaactcaataatttaaagcagctacttctaggctttgcatttttctaacayagagagatttttaacttcaacaatgagtattattgatttttcaataaggtaggatttattttaaacacattaatttcactatacacttctgaaatttttacccccacatggaaaacaaacaaaaataaaatggaaacagtagcttaatcttacatgtatatgtgtacttccatgaggttatttatttccaagtccggtaatggaaagctgttttagatacagtaactctatgacaaagtccacctaaaattttgcctcttgggattcatctgggaaaagtatttggaatttgtgggttctgtagaacaggttctaatatccaaggaaactacaagaagcaaggctttcccctccaga

SEQ ID NO: 195020 - DNA, 413 bp, Homo sapiens
atctatataacaaacctgcacaggtacccttgaaattaaaagtttaagaaaaagaaattatctaatctgaagagtacagagaataagaagataaaggggaaaaaaaaccaagaaattaatgaggacacacaaaawaaggagagatattccatactcattcattgaaacaattatttatcagttagctaaagatttttttaggcaaattattattaggtagcatacctgtactactaagtgtgaaataaattcactgtgtgctggttaccaaattgtcatcggggttctggtgagacagaaagtgcttatatgtggtaaattacatgaagcagatttatcgttataaacaggcagcaagggacaagagaggcctgggattcattgtgagccagccccacaagacttatgaaagc

SEQ ID NO: 195021 - DNA, 628 bp, Homo sapiens
gttttggtgtgtttttcaacgtcatatcaccagcagtttcataggtaataaaattatgtatctttatattacattaatctacattgtttacattataattaaacagaatttaatacactgcttgaaaattaagtttatacatgcaatgttataatggtataaatcacttgaagtctataattttagacaaaagttagtataatctattttgctattgttcaaccatcctattcttagtggatgtttatattttgtcatgtgtcagcagaaaaaaatggcagaaattttcctatgattgactatgagaagtaatactagcaaagtgcaatatctaagttgtacttttatcattgtagaagaaaaaataatgtaatcttagtattgaattatttcaatagtacagaatgagacaattttgctagatattcactttcttattactycttttgataatttagagcacatgacattcagcaaaaaggaataaaaaagtctagactgacatcattttctgcaataaacttaacaaattgtaccagttgctgcatattattcctcataaaagaatatttggagagctgaagttgtataatacaggcatagattactcatgttgatgatttaggaa

SEQ ID NO: 195022 - DNA, 607 bp, Homo sapiens
ctgcaaaaacctaacctatacttattaaaactctcaaggtctccaaaagcaagtaatgtctaaaaaattgtcaaagccaagaggcacttaaggagacatgaatacaaaatgtaatgtggtatcctggatgggatcctggaatagaataatgacattaagttcaaactaaggaaatctaaatargactaaaactttaattaatttaatgtaacaataattggtcattaagtatagcaaatgtaccaaactaatgtaagatgttaatactaagagaaaactgagtgtagggtatatgggaattgtctgggctatcttcacaataatttcataaatctaaactgttctaaaataaaacccttactaagaagtatcttatataaatatgtgaaatttagatatcctatgattctcaattttataatttcaagtatataactataacctagtaatttattctactccatgctcttccaccaaagatctctgatatggtttggatctgtgtccccaccaaaaatcaagttgaattgtcatcccaagtgttggtggtggggcctggtgggaggtgactggatcacagggtcgtatttttcatgcatggtttagc

SEQ ID NO: 195023 - DNA, 495 bp, Homo sapiens
tattcaacactgtgttgtttcacaggcactttcatatgtagtaagtccaaactgaagccataagcttctccaaccccttcttgaaaaggccttgtcctttctattccatgatgtccttcatctgtgaatcatccctccaactctattgtgcaagtaagaactgataattcactsttgaaatatctttttatattacctccaatatataatccaccaattatcaatgttgaatatttctcttaagtagcttctgagctcatctttgtatctccagcagcatgtcatcgctcacctcgacttctgccgtggcttctagaatgacagtcctgcaagcacacttgcctgcctctagtctattatacccaaaccctagtcggagcaattacttcaaaatgtcccccactttaaaatcctttactggctaccaatttcttaggtatctcattcaattcagcctcctatagactgggtggcttataaacaaactgccataga

SEQ ID NO: 195024 - DNA, 463 bp, Homo sapiens
gagtattgtagggtaaatcacctgatagcaataatgtaagcatacctttagaatgatcttgtacggcagatgcacttgaacatgtgttctgagatagggaatcctggaatggccaacacatagattcattccttgtctatgaggaacatctgagcccctgtcctgtcctatggaacatgggttgtacagaggattcaggttctgagttttgggttaaattaaggttgccaagtagaggaagaggttagggggaagaagttaagtgaaaatgctatataaactgcatgatgattgcaagtggttgtggttctgctgcccagctcgccactggactgtaggaaggcagatatgttatctggcctgccgcaaccgaactgtttctgtacataaggggttttcctgtctagcctaccgacactagtctcwatctcctgtatgtacaccccttacaaaaccccacgtc

SEQ ID NO: 195025 - DNA, 524 bp, Homo sapiens
agacttcttgatagctgaacaataaattaagtaataagatataatctactctaggtatattcatctacatggatgaatcataaaacacttgattgagccaaaaaattaaggcaaagtcactgatatgactgttatgatgatgccagaaacaccttggcctaatgtgctaactttaaaactgattgcacagtgcatttcctctgaatttttcatgtttgattcctctgtttcattaacttcccacatcagaatcatcaggaattgcccttgcttccatcttgagaatgtgtcctgactgtgatcactttttaccacctcttccttgattactttaatccaaactaccacttttattttacctgaaattctgcaataatctcttaagctatctccatcttctgttcttgatcacagccagtctatccccacacagcagccagtgaggtcctttttaactatagtgttgtyatgccactcctttttcccatgaagtccaggagctgtccctggcactattgtcatac

SEQ ID NO: 195026 - DNA, 396 bp, Homo sapiens
acagggcaatccagtggtggtgggctggacagtagaactgctactgttaataaaacgcatgcaggtaatatcgcattttcacttagcactctccctccttacttccacctggcaaccttcacttaacccaaaacaaaaagctttgaactctatatagctgggattctgctggatgggccatggatgcaaatactccagttgtctactaccagattccttagctcactactgtcaatttgaaatcatcagatatttttaatatctcctcctctgaccattagtttttgttgttactgttgtgytgtctgttttatttttgttattgttcttcctttaaagcaaactcctattaacattatttgattattattaaatatgattacttagcttgaacaa

SEQ ID NO: 195027 - DNA, 576 bp, Homo sapiens
tgtattggtaacaagttcccaggtggtgctaatgctgcaggtctaggaaccacaccttgagaatcactgctttaggaaccagactctagtgaatagagaagtgggtggaagagatgagaaagctgttacaggaacccatgataagatgaagtgtggtcttggatgggaaagtaacaataagtaatgcttatgaaccagataccattctaaacatttttcatatatttgctaataattgtcatactaagcctacaaagtagatacttttactattctcattttacagatgacagagaggcaggtaagttgctcagaggccacctagctactaagtggaggaaccagaacccaggcattacggtccttgagaccgtgacttgaaccaccatgttataatgccagtgtatggcagtgaatatgagaagatggatttgagatccgtatttcagatgtgaactcaatttaacttggcagctgattaagagtgaaggagaacagaatcaaaagattcctacatttctgatctgaayatttaaacggatgatgataaaatacaacaaaatggaactataggaa

SEQ ID NO: 195028 - DNA, 482 bp, Homo sapiens
cttttcaagatctttgtgattacattaggtctatctgaataacccaggataatgtctcttttttaaggtcagctgataagcaatcttaataataacctcacttcacctttgccatgtaaagtaacatattcacacattcaaaggagtagaatgtggacatctgtgaggagccatttttctgcttacaacattgctaatgctttgtgttatatctaagaaatgattgcctaacccaaggccrtgatgatttgcttctgcatttcctaataaaagttttgcaattttcacttacattgggtctatgatccatttttgcttgtgatgtgaagtagtggtccaatttcctttttttacatgtagatatacagttggcccagcacaatttgttgaaaaaacttctttcctccagtgaaatgtcttggtactattgtcaaaaactacttgaccataaatgtaagggcttatttctggactctgaattc

SEQ ID NO: 195029 - DNA, 482 bp, Homo sapiens
cttttcaagatctttgtgattacattaggtctatctgaataacccaggataatgtctcttttttaaggtcagctgataagcaatcttaataataacctcacttcacctttgccatgtaaagtaacatattcacacattcaaaggagtagaatgtggacatctgtgaggagccatttttctgcttacaacattgctaatgctttgtgttatatctaagaaatgattgcctaacccaaggccatgatgatttgcttctgcatttcctrataaaagttttgcaattttcacttacattgggtctatgatccatttttgcttgtgatgtgaagtagtggtccaatttcctttttttacatgtagatatacagttggcccagcacaatttgttgaaaaaacttctttcctccagtgaaatgtcttggtactattgtcaaaaactacttgaccataaatgtaagggcttatttctggactctgaattc

SEQ ID NO: 195030 - DNA, 634 bp, Homo sapiens
attttcatttcagtacataagatgcaaaatgggaaatgactaagtcagttataaaatctttgtaggataataaatgctaatttacaataacttccaacaaacaccaacaagtgtttatacccaagtctaaaagttactgcagtactaaggtcagaaccaatataattttcccatatggcgagactttgtgtattaaatgacaccacagtatcatgaaatccaaagaagagatcttagtgggtcctttcaaaactgcagaattttccaaatggtttgtctcttgttacagagccttctcattccgtttgtcctttttgaatcattagcttcagcaatattttcttgacattttgtttcttcttttgcaccttttccctagcctcaatcatcttggccagtttccaggacaacagggcacatgttaggagccrtgaagtaggagacaaagtcgctattgtaaggaagccacaccggtccttcacagtccattccacaacatactcagcctaagcctgcagagcaatcgtcttcataggagccataggaaaacatgcttgagcaatgatctctgtcattgaccttggattattaatgagccaatcacaatttcagatgactcttggttgtttctctt

SEQ ID NO: 195031 - DNA, 607 bp, Homo sapiens
taaattttggctgacacattaatgccattgtttgttgttgaataattgaatttttaggaaataatcattttttttcggtgctatycactaggtgaattatttcaggagaccaaaatctagaagagagtaaaaaatatattcagaaaagaatggtgcagtgttaagtgcaattcaaagatctgtataaactcctatgcgcaccaatagcaacctaatacacgatgaattgaagatctacacttaagagctaaaactataaaactcttagaaaaaaaaatgtatatataagtctctgtgagcttggattaggcaatagtttcttagagattacaccaaaagcaaaacaaccaaagaaaaaatagataaattggacttcatcaaaattaaaaagtttatgcttcaaagacactatcaagaaagtaaaatgacaacccatggaatcagagaaaatgtttgcaaacaatatatctgataagtgtccagtatccagaatgtataaaaaactctaacaactcaacaataaaaagacaacacaacttaaaaatgggtaaaggattttaatagacatttatctcaataagatacatgaatggtcaacgagcacatg

SEQ ID NO: 195032 - DNA, 607 bp, Homo sapiens
taaattttggctgacacattaatgccattgtttgttgttgaataattgaatttttaggaaataatcattttttttcggtgctatccactaggtgaattatttcaggagaccaaaatctagaagagagtaaaaaatatattcagaaaagaatggtgcagtgttaagtgcaattcaaagatctgtataaactcctatgcgcaccaatagcaacctaatacaygatgaattgaagatctacacttaagagctaaaactataaaactcttagaaaaaaaaatgtatatataagtctctgtgagcttggattaggcaatagtttcttagagattacaccaaaagcaaaacaaccaaagaaaaaatagataaattggacttcatcaaaattaaaaagtttatgcttcaaagacactatcaagaaagtaaaatgacaacccatggaatcagagaaaatgtttgcaaacaatatatctgataagtgtccagtatccagaatgtataaaaaactctaacaactcaacaataaaaagacaacacaacttaaaaatgggtaaaggattttaatagacatttatctcaataagatacatgaatggtcaacgagcacatg

SEQ ID NO: 195033 - DNA, 659 bp, Homo sapiens
atgtacacattaccctaattagtacagggagaattttccagtatagtccatatattaggccacaaaagaagcttcagcaaatttataaaaactgaaaccatattgaatatcttctcagaccacagtggaataaagctagaaatcaataataaaggraactttggaaactctacaaacatatggaaattaaacaacatgctcctgaatgaacattgagtcaatgaagtaattaagaaaaactaaaaatatttcttgaaacaaatgaaaatggaagctcaacatacccaaaccaatgccatacagaaaaagcagtgctaagagagaagtttatagcaagaaatgtctacctagaaaaagtagaactatttcaaataaacaacctaatgatttacctcaaggaactagaaaagtaacaagagacaaaactcaaaattattaggaggaaagaaataatacagatcagagcacagaactaaatgaaatccatagtaaaaaaaaaatacaacagattaacaaaactaaaacttgttcttttgaaaatataaacaaagataaacaaattttgaaaagataaacaaaaataaatcactagctaggctaaccaggaaaaaagagcgaagacccaaataaatggaatcagaaacccaaacaactgatac

SEQ ID NO: 195034 - DNA, 508 bp, Homo sapiens
aatgtggttgccaaatgttatcatttttgattactgataggtgactgtccagagctcacagtttttatgggaaawataatgcttaaagtgacctcattgtgtcaatgctcactgtgttattgcaaaatcatttcagaatacaaagatggtctttactgtcaagcctggatgtaaattgttcagatctctgatcaaagaaggtatgtattaaatttcacttaactttgggcactcactggatctttaccaaaagatgttccacttctctgagtttattcatctatttttggtaacaagattttatagcaaagctgcttgatacagtttaaatctgggtccccccctcaaatctcatgtcaaattgtaatctccagtgttggtggtggggcctggtgggaggtgagtggatcatgggggcagtttctcctgaatggtttaccaccacgcgccttggtcttgtcatcaagataatgcattaccagagatctagtgtttaaaagtgtgtagc

SEQ ID NO: 195035 - DNA, 508 bp, Homo sapiens
aatgtggttgccaaatgttatcatttttgattactgataggtgactgtccagagctcacagtttttatgggaaatataatgcttaaagtgacctcattgtgtcaatgctcactgtgttattgcaaaatcatttcagaatacaaagatggtctttactgtcaagcctggatgtaaattgttcagatctctgatcaaagaaggtaygtattaaatttcacttaactttgggcactcactggatctttaccaaaagatgttccacttctctgagtttattcatctatttttggtaacaagattttatagcaaagctgcttgatacagtttaaatctgggtccccccctcaaatctcatgtcaaattgtaatctccagtgttggtggtggggcctggtgggaggtgagtggatcatgggggcagtttctcctgaatggtttaccaccacgcgccttggtcttgtcatcaagataatgcattaccagagatctagtgtttaaaagtgtgtagc

SEQ ID NO: 195036 - DNA, 594 bp, Homo sapiens
gttactgacatggatataaattctgaaaattcatcaagctgggccatcatgattacagcatggccacactttatttatatactmtatacttcaagaaaacggtttttggaaactgatatttcacagtccttcttaacaattcagaaataatttcactttgaggtggcacgaggtcatcaaattaaatatgaatgaccgtccctcatccttaggctctgaatccaacaggctgcattcaatgccagactgagacactgactatgtgaagctggtcaaatcttcaattcagtgaacttagtttcttcatctccaatgtgaatgaaaagtgattactaaataagataatccatttaaagaacatataacattgctaaaatagaatacaaacattcaataatatggcaactatctgcatcaggaaaataagatagagagaaaagtaaatttaaactatttatatgaaatgtcttggaagtgctttgcaaaataaagatgaaattgttttgttttacacataacaatcaataaaagttacttgatagtttagatttggtgtacacagaataattgtatttatatgatgcttagcatata

SEQ ID NO: 195037 - DNA, 594 bp, Homo sapiens
gttactgacatggatataaattctgaaaattcatcaagctgggccatcatgattacagcatggccacactttatttatatactctatacttcaagaaaacggtttttggaaactgatatttcacagtccttcttaacaattcagaaataatttcactttgaggtggcacgaggtcatcaaattaaatatgaatgaccgtccctcatccttaggctctgaatccaacaggctgcattcaatgccagactgagacactgactatgtgaagctkgtcaaatcttcaattcagtgaacttagtttcttcatctccaatgtgaatgaaaagtgattactaaataagataatccatttaaagaacatataacattgctaaaatagaatacaaacattcaataatatggcaactatctgcatcaggaaaataagatagagagaaaagtaaatttaaactatttatatgaaatgtcttggaagtgctttgcaaaataaagatgaaattgttttgttttacacataacaatcaataaaagttacttgatagtttagatttggtgtacacagaataattgtatttatatgatgcttagcatata

SEQ ID NO: 195038 - DNA, 594 bp, Homo sapiens
gttactgacatggatataaattctgaaaattcatcaagctgggccatcatgattacagcatggccacactttatttatatactctatacttcaagaaaacggtttttggaaactgatatttcacagtccttcttaacaattcagaaataatttcactttgaggtggcacgaggtcatcaaattaaatatgaatgaccgtccctcatccttaggctctgaatccaacaggctgcattcaatgccagactgagacactgactatgtgaagctggtcaaatcttcaattcagtgaacttagtttcttcatctccaatgtgaatgaaaagtgattactaaataagataatccatttaaagaacatataacattgctaaaatagaatacaaacattcaataatatggcaactatctgcatcaggaaaataagatagagagaaaagtaaatttaaactatttatatgaaatgtcttggaagtgctttgcaaaataaagatgaaattgttttgttttacacrtaacaatcaataaaagttacttgatagtttagatttggtgtacacagaataattgtatttatatgatgcttagcatata

SEQ ID NO: 195039 - DNA, 564 bp, Homo sapiens
gtaactggcctttaaactcatgaaaatgcttgagaacactcaggggaaaaagtgagtaagtagagaaaaaagaaagtactcagctaagtgggttgaagacagtacaggaaatattgaaggagactgtctattgtttgattgatttctttcaaagaaagaatacaaagtaagttgataactgaaggacaacggtaggtcaatgtaaacttttaacaaaaagggaattattcattaatgagaatgataatactaaaatgagagggagagctaagggacagaatttacttaatattgggagatctcatcaatttagcataagacatgtggtaactttgtagaagkttattgttatgaatgctgtgggagtgaatgcattgggaaactaaaatagaatgtttggcactgttgagtatccttttaagttttgtaatgaattgaaatcatgttattagttacaacgtagatgagcctggaggacattatgttaagtgaaataagacaggcacagagagagaaaaaccacatgttctcacttatatgtgggagctaaaaatgggcttataa

SEQ ID NO: 195040 - DNA, 564 bp, Homo sapiens
gtaactggcctttaaactcatgaaaatgcttgagaacactcaggggaaaaagtgagtaagtagagaaaaaagaaagtactcagctaagtgggttgaagacagtacaggaaatattgaaggagactgtctattgtttgattgatttctttcaaagaaagaatacaaagtaagttgataactgaaggacaacggtaggtcaatgtaaacttttaacaaaaagggaattattcattaatgagaatgataatactaaaatgagagggagagctaagggacagaatttacttaatattgggagatctcatcaatttagcataagacatgtggtaactttgtagaaggttattgttatgaatgctgtgggagtgaatgcattgggaaactaaaatagaatgtttggcactgttgagtatccttttaagttttgtaatgaattgaaatcatgttattagttacaacgtrgatgagcctggaggacattatgttaagtgaaataagacaggcacagagagagaaaaaccacatgttctcacttatatgtgggagctaaaaatgggcttataa

SEQ ID NO: 195041 - DNA, 567 bp, Homo sapiens
tttcatagctcccctgggttggaggtaaaaagtttctattccttaggaaatggaataaaataaattggttaaaagaagttttgagattcattcgtccatagcattctaaaataggaattagcttagaaaggtcatcaaygaccaaaattatctgagtttggtggagataaaaaagcaagactgaaagttatattttttttcaagcaatgtttgaatggataaagtacagaaggagaaaaatggttgcatttctatgcattgaaaatgcttatttggttttcttttaagcttgttgtttcaaatggcccacttaaatttactgactctataccaaataaattaatctcacttttcacactgctatccctctagtttcttgcctcaatttattccagaatgacattctacatttattcaataagtactcagagggatgtgttatgtgcatggcattcaactaaccattagttggacaagacaaactaagtaaaggatatctttcctgccttcttaaggtttgcagtttaattatcttgatttcgagcctcattctcttacattttcact

SEQ ID NO: 195042 - DNA, 303 bp, Homo sapiens
ttcttgcctcaatttattccagaatgacattctacatttattcaataagtactcagagggatgtgttatgtgcatggcattcaactaaccattagttggacaagacaaactaagtaaaggatatctttcctgccttcttaargtttgcagtttaattatcttgatttcgagcctcattctcttacattttcactaattttccatattttttctaagtctctgagaagttttgatagtgaattccatcacctttatattagctaagctctcattggctttctaactcaatttatcacatggata

SEQ ID NO: 195043 - DNA, 548 bp, Homo sapiens
accattccaagtgctatatttcttgctaataaaaccaaataacaatgttcagggtaaattttaatgaattaatgcttataatgcaaactatgctttcatcaattttattcagaagcacacgattaattatacaacagatattttatatgattgctcagagtaaagactatttttatttgcttgaatgacaacataatttattaaatgaataaatacacggattcgtcttctccatcaccatttyaggcatgtttttgtgacatataccttcttcaccatgaactccttcctaaccaaccattatatctaaaataaattatcagcaaacataaatattgtgctattccataactacctcacatgagctagatgatgggaggcataattcataataagcagaccctacctttaaattctataaagccacagcatttaaattataactatgccacacagcagtaacctattttcctattaattatatcccataaaagcaatataccttcactaattaattatacttgaagtaacaactatggcttaattaa

SEQ ID NO: 195044 - DNA, 548 bp, Homo sapiens
accattccaagtgctatatttcttgctaataaaaccaaataacaatgttcagggtaaattttaatgaattaatgcttataatgcaaactatgctttcatcaattttattcagaagcacacgattaattatacaacagatattttatatgattgctcagagtaaagactatttttatttgcttgaatgacaacataatttattaaatgaataaatacacggattcgtcttctccatcaccattttaggcatgtttttgtgacatataccttcttcaccatgaactccttcctaaccaaccattatatctaaaataaattatcagcaaacataaatattgtgctattccataactacctcacatgagctagatgatgggaggcataattcataataagcagaccctacctttaaattctataaagccacagcatttaaattataactatgccacacagcagtaacctattttcctattaattatatcccataaaagcaatatascttcactaattaattatacttgaagtaacaactatggcttaattaa

SEQ ID NO: 195045 - DNA, 557 bp, Homo sapiens
taattttacaaaaagccacagaaagcttattttagaaagaaagagaaacaagcacaaaattctagaggcagaaaaagggttggcatatacaaagactgtggaaataattaagaatgttttgggtgtgataagaaaagaagggaagtgtatgacatgtggttggagaggtaggtagaaaacatcaagtcaggatctatggtcattaaaaagaagttggaaatttttctttatattagcagaggaaagccaaacaaggacttaaagcagaaagtagggaatgaagagtcaagatcttgtgtgctttaaaaaaaaaaaagccactctgactactgtgaaaatagagcatttagggaggagatgacaagargggaggcagatttgcaatgcattgtggtattctgacagagagatgggtgtggctttgagaagtgttcacggaagaaatggaaatcttggaaatggagagtcatggggaaaaaaagaacctaggtcgacctctaggttttgggcatgagtcatacaggcacagtgtagtaccatttattgggatgagaaaa

SEQ ID NO: 195046 - DNA, 540 bp, Homo sapiens
tactgatcttgaaaagtggggtattgaggtattttacttggttgtaagccatcaacgtgttttacaaatgtgatattakgttttgatattagtaaaaaaaagaagcttcaaaatgtcctctctttctttgaatgcaatcacaatcatttcctttttgaattttaaatataagtaacctaaaacttaataacttgctcacaagtctagaagcagacaaaatatcacccacaaacctgatttataatactacgttaaactgacttaaggctttagacattcataaacatcttttaatctattccccttttgcatggatatgtaaatatatactccaggaggtataatttttgtagttattgtagtgcttttgtaatgaagaactaagtctattttcacagtgatagagaattgagttgagttcttttgaccctggatggatttgtctattttttaaggtgctacttaaaaatgtataggagaaaataaaaataaattatctctttcataagttaaaaatattttacatttcagcattctgaa

SEQ ID NO: 195047 - DNA, 540 bp, Homo sapiens
tactgatcttgaaaagtggggtattgaggtattttacttggttgtaagccatcaacgtgttttacaaatgtgatattaggttttgatattagtaaaamaaagaagcttcaaaatgtcctctctttctttgaatgcaatcacaatcatttcctttttgaattttaaatataagtaacctaaaacttaataacttgctcacaagtctagaagcagacaaaatatcacccacaaacctgatttataatactacgttaaactgacttaaggctttagacattcataaacatcttttaatctattccccttttgcatggatatgtaaatatatactccaggaggtataatttttgtagttattgtagtgcttttgtaatgaagaactaagtctattttcacagtgatagagaattgagttgagttcttttgaccctggatggatttgtctattttttaaggtgctacttaaaaatgtataggagaaaataaaaataaattatctctttcataagttaaaaatattttacatttcagcattctgaa

SEQ ID NO: 195048 - DNA, 540 bp, Homo sapiens
tactgatcttgaaaagtggggtattgaggtattttacttggttgtaagccatcaacgtgttttacaaatgtgatattaggttttgatattagtaaaaaaaagaagcttcaaaatgtcctctctttctttgaatgcaatcacaatcatttcctttttgaattttaaatataagtaacctaaaacttaataacttgctcacaagtctagaagcagacaaaatatcacccacaaacctgatttataatactacgttaaactgacttaaggytttagacattcataaacatcttttaatctattccccttttgcatggatatgtaaatatatactccaggaggtataatttttgtagttattgtagtgcttttgtaatgaagaactaagtctattttcacagtgatagagaattgagttgagttcttttgaccctggatggatttgtctattttttaaggtgctacttaaaaatgtataggagaaaataaaaataaattatctctttcataagttaaaaatattttacatttcagcattctgaa

SEQ ID NO: 195049 - DNA, 379 bp, Homo sapiens
atggtttagaatcaaattcaataaagaaacatcagcttgagatcagactctctgaggaatgtttttttttcctgatgaatctsagccattcaaggtccttataaataagtgagagcacctttgatttttgactttttatagttaacagtttcagtttgctaatacaaaagacctcatgccttttcatccagaaaacagagaacactttctattatgtaagagtattatgtttgaaggagtatgtttgcttcaactatgcgtgctatggtacagaaagaaaaaccacctccctgtaggtctaaatccaaggggttttcaatgtatttgggttaagttatgttgtaaggttatagctctctaagatttttacaagatgcat

SEQ ID NO: 195050 - DNA, 559 bp, Homo sapiens
tctacaagttaaattgtaaaatattgtttgttgtatctgaaaaaatctttagaacaagaaatgtaactgggtagcctgttatatcaaagaaccctcgatttattaagcctcctcatagccatatccttatatagccctctctgacactgacttaatagacacttgacaaatgatagtaaatttaggcttgccaaattaaaatggcagcaatgccaaatgagaacctgatctactctaccagagagactaagtggaggagaacccagctgatagcaccagtgaagtgccagatatttgagtgatgtcactttggactatgtaggccttgtcagtcatataaggaaacctaggcaagactccgactattatcctcctgagcccaaccaaagttaacaaattgtgagtttgtgttttaagcaactaartttgatgactgctaattacacagcaatggataattgaaataacaactaaagattaaagatgagataatgtgttgtgtttaaaaatttagcaagtgagtacttcatgaatatatttaccttgatggcattacaag

SEQ ID NO: 195051 - DNA, 602 bp, Homo sapiens
gttctaactactcaggaggctgagaaaggaagattactttagcccaggagctcaaaggtgcagtgagctgtgactgcactccagcccgtctaaaaaaaaaaaaaaaaggaaagaaaagaaaaaaagaaataaaaaggtatacacattttttttctgargtggatggaaatatgtcatgtcagaggtaaattgtgacttgagtaagttttatgttgagcaactctttttgtttacattttctatgttgcccaaataaagtcttattttcataaatcactgctttacataacaacttttcctgcagccctgggtatggtggcacacagttgtagtcccaggtacactggatgctgaggcaaaaggatcatttgaacccagaacttcaaggtcaacctgggcaacatagcaagatcctatctgtagcaaaaatttttttaatgataattctcatgcaaaattcagtttgcactgttttaaaaaatgaaacacttataagagcatggtcataaggcaattctgacttggtgtcaagccatttaaacttagatataacctaggatttaggatccttgctattgtttacatagtaagtccacatttaa

SEQ ID NO: 195052 - DNA, 452 bp, Homo sapiens
cggtacctcttgcagatttgtctagcgttacccaatgyttgtgattgctagtaatattagtgaaataagtatgcaaatcttttaataactgaatagaatccttccctgaacaatttcccaggtgttattgctgttgctatcttattaaatattcaatgccatctattatatcctatacagagtcaaataataagcttacataaactaatatttaatataatactaataaatttaagatgatataaagcagaataaaataacatttcagaataaaaagactttgaagcttccctgtattacttgataagatttaggtacagtctcaagaaaacattttttttttccttcttctgcatcagctcatctacaaaccaatttatttctgaaataggccccaggggcaggctggttggtgactgtaatgggggatatctgactggccactcaaggaa

SEQ ID NO: 195053 - DNA, 452 bp, Homo sapiens
cggtacctcttgcagatttgtctagcgttacccaatgcttgtgattgctagtaatattagtgaaataagtatgcaaatcttttaataactgaatagaatccttccctgaacaatttcccaggtgttattgctgttgctatcttattaaatattcaatgccatctattatatcctatacagagtcaaataataagcttacataaactaatatttaatataatactaataaatttaagatgatataaagcagaataaaataacatttcagaataaaaagactttgaagcttccytgtattacttgataagatttaggtacagtctcaagaaaacattttttttttccttcttctgcatcagctcatctacaaaccaatttatttctgaaataggccccaggggcaggctggttggtgactgtaatgggggatatctgactggccactcaaggaa

SEQ ID NO: 195054 - DNA, 570 bp, Homo sapiens
cacctactttttttttcaattctaagagctgcgttgtgcttttccaacrcattcatttttgcttgctttaaattccaagtaatttctattgtctttaaacaactgcctacctaaaataattattaaatatatagctaaaacactaaattaaataaacttacattgttttccttgctgtaagaattctctaagcctttcttattttaatatgcatcatgaacctccagttgaggcaatgtgcaacacattttgagagacatgatctacctgttggaatcttaacatttagaacagatatattgatcagtgtataatttttggattatcaaagatgggaataaaattgagctataatatataaaataagaggatttatatatgtttgtttttttactccccatttcacctgctacttctttatggataacagttatcccacttgatggaatttttctcttttcatccattacttttttatttaaagtattccctctcctaggatgtaagtttctatagactgaaatgttgttatttaatggtaataagccttattttcaggctgctttacag

SEQ ID NO: 195055 - DNA, 570 bp, Homo sapiens
cacctactttttttttcaattctaagagctgcgttgtgcttttccaacgcattcatttttgcttgctttaaattccaagtaatttctattgtctttaaacaactgcctacctaaaataattattaaatatatagctaaaacactaaattaaataaacttacattgttttccttgctgtaagaattctctaagcctttcttattttaatatgcatcatgaacctccagttgaggcaatgtgcaacacattttgagagacatgatctacctgttggaatcttaacatttagaacagatatattgatcagtgtataatttttggattatcaaagatgggaataaaattgagctataatatataaaataagaggatttatatatgtttgtttttttactccccatttcacctgctacttctttatggatmacagttatcccacttgatggaatttttctcttttcatccattacttttttatttaaagtattccctctcctaggatgtaagtttctatagactgaaatgttgttatttaatggtaataagccttattttcaggctgctttacag

SEQ ID NO: 195056 - DNA, 484 bp, Homo sapiens
attgtgcttattcaaacttctcttctcttcttcagaggcaaacctgtataayttcgttggtttgtttgtttgttttaagacgtagtcttactctgttacccaggctagagtgcagtggtacaatgtgaggtcactgcaacctccgcctcccgggttcaagcgattctccggcttcagcatcccaaataactcggattaaacccttataatttctatcatgattgattaattttgttcatcttcaaattccaataattagaattcctacaggatgtgtgtgtgagtgtgtatctggtttattttctttagcataaatacatatttgagatttagccaaatatttgtgtgtatcatttgtttatttttcctcatatttctgagttgcctacgtatttgtcagagtttgcttattcattagtctgttagtgaatattcagattgctttcagaattagcttttacaaataaaggacttaggtgcattc

SEQ ID NO: 195057 - DNA, 477 bp, Homo sapiens
tgcttattcaaacttctcttctcttcttcagaggcaaacctgtataatttckttggtttgtttgtttgttttaagacgtagtcttactctgttacccaggctagagtgcagtggtacaatgtgaggtcactgcaacctccgcctcccgggttcaagcgattctccggcttcagcatcccaaataactcggattaaacccttataatttctatcatgattgattaattttgttcatcttcaaattccaataattagaattcctacaggatgtgtgtgtgagtgtgtatctggtttattttctttagcataaatacatatttgagatttagccaaatatttgtgtgtatcatttgtttatttttcctcatatttctgagttgcctacgtatttgtcagagtttgcttattcattagtctgttagtgaatattcagattgctttcagaattagcttttacaaataaaggacttaggtgca

SEQ ID NO: 195058 - DNA, 514 bp, Homo sapiens
gcttattcaaacttctcttctcttcttcagaggcaaacctgtataatttcgttggtttgtttgtttgttttaagacgtagtcttactctgttacccaggctagagtgcagtggtacmatgtgaggtcactgcaacctccgcctcccgggttcaagcgattctccggcttcagcatcccaaataactcggattaaacccttataatttctatcatgattgattaattttgttcatcttcaaattccaataattagaattcctacaggatgtgtgtgtgagtgtgtatctggtttattttctttagcataaatacatatttgagatttagccaaatatttgtgtgtatcatttgtttatttttcctcatatttctgagttgcctacgtatttgtcagagtttgcttattcattagtctgttagtgaatattcagattgctttcagaattagcttttacaaataaaggacttaggtgcattctcaaacaggtttttgtgtaaatatatgcttttatt

SEQ ID NO: 195059 - DNA, 483 bp, Homo sapiens
ctcttctcttcttcagaggcaaacctgtataatttcgttggtttgtttgtttgttttaagacgtagtcttactctgttacccaggctagagtgcagtggtacaatgtgagstcactgcaacctccgcctcccgggttcaagcgattctccggcttcagcatcccaaataactcggattaaacccttataatttctatcatgattgattaattttgttcatcttcaaattccaataattagaattcctacaggatgtgtgtgtgagtgtgtatctggtttattttctttagcataaatacatatttgagatttagccaaatatttgtgtgtatcatttgtttatttttcctcatatttctgagttgcctacgtatttgtcagagtttgcttattcattagtctgttagtgaatattcagattgctttcagaattagcttttacaaataaaggacttaggtgcattctcaaacaggtttttgtgt

SEQ ID NO: 195060 - DNA, 518 bp, Homo sapiens
gcttattcaaacttctcttctcttcttcagaggcaaacctgtataatttcgttggtttgtttgtttgttttaagacgtagtcttactctgttacccaggctagagtgcagtggtacaatgtgaggtcactgcaacctccgcctcccgggttcaagcgattctccggcttcagcatcccaaataactcrgattaaacccttataatttctatcatgattgattaattttgttcatcttcaaattccaataattagaattcctacaggatgtgtgtgtgagtgtgtatctggtttattttctttagcataaatacatatttgagatttagccaaatatttgtgtgtatcatttgtttatttttcctcatatttctgagttgcctacgtatttgtcagagtttgcttattcattagtctgttagtgaatattcagattgctttcagaattagcttttacaaataaaggacttaggtgcattctcaaacaggtttttgtgtaaatatatgcttttatttttg

SEQ ID NO: 195061 - DNA, 514 bp, Homo sapiens
cttattcaaacttctcttctcttcttcagaggcaaacctgtataatttcgttggtttgtttgtttgttttaagacgtagtcttactctgttacccaggctagagtgcagtggtacaatgtgaggtcactgcaacctccgcctcccgggttcaagcgattctccggcttcagcatcccaaataactcggattaaacccttataatttctatcatgattgattaattttgttcatcttsaaattccaataattagaattcctacaggatgtgtgtgtgagtgtgtatctggtttattttctttagcataaatacatatttgagatttagccaaatatttgtgtgtatcatttgtttatttttcctcatatttctgagttgcctacgtatttgtcagagtttgcttattcattagtctgttagtgaatattcagattgctttcagaattagcttttacaaataaaggacttaggtgcattctcaaacaggtttttgtgtaaatatatgcttttattt

SEQ ID NO: 195062 - DNA, 495 bp, Homo sapiens
ctcttctcttcttcagaggcaaacctgtataatttcgttggtttgtttgtttgttttaagacgtagtcttactctgttacccaggctagagtgcagtggtacaatgtgaggtcactgcaacctccgcctcccgggttcaagcgattctccggcttcagcatcccaaataactcggattaaacccttataatttctatcatgattgattaattttgttcatcttcaaattccaataattagaattcctacaggatgtgtgtgtgagtgtgtatctggtttattttctttagcataaatamatatttgagatttagccaaatatttgtgtgtatcatttgtttatttttcctcatatttctgagttgcctacgtatttgtcagagtttgcttattcattagtctgttagtgaatattcagattgctttcagaattagcttttacaaataaaggacttaggtgcattctcaaacaggtttttgtgtaaatatatgctt

SEQ ID NO: 195063 - DNA, 485 bp, Homo sapiens
gtgcttattcaaacttctcttctcttcttcagaggcaaacctgtataatttcgttggtttgtttgtttgttttaagacgtagtcttactctgttacccaggctagagtgcagtggtacaatgtgaggtcactgcaacctccgcctcccgggttcaagcgattctccggcttcagcatcccaaataactcggattaaacccttataatttctatcatgattgattaattttgttcatcttcaaattccaataattagaattcctacaggatgtgtgtgtgagtgtgtatctggtttattttctttagcataaatacatatttgagatttagccaaatatttgtgtgtatcatttktttatttttcctcatatttctgagttgcctacgtatttgtcagagtttgcttattcattagtctgttagtgaatattcagattgctttcagaattagcttttacaaataaaggacttaggtgcattctcaa

SEQ ID NO: 195064 - DNA, 478 bp, Homo sapiens
cttattcaaacttctcttctcttcttcagaggcaaacctgtataatttcgttggtttgtttgtttgttttaagacgtagtcttactctgttacccaggctagagtgcagtggtacaatgtgaggtcactgcaacctccgcctcccgggttcaagcgattctccggcttcagcatcccaaataactcggattaaacccttataatttctatcatgattgattaattttgttcatcttcaaattccaataattagaattcctacaggatgtgtgtgtgagtgtgtatctggtttattttctttagcataaatacatatttgagatttagccaaatatttgtgtgtatcatttgtttatttttcctcatatttctgagttgcctaygtatttgtcagagtttgcttattcattagtctgttagtgaatattcagattgctttcagaattagcttttacaaataaaggacttaggtgcattc

SEQ ID NO: 195065 - DNA, 540 bp, Homo sapiens
ggaagctccattaaaattggtaaaggaagaaacataatatgaaaggagggaaataatraggtaaaagatgcagagactgctttccagacaaagtaagaatgaacttcactttggaataacaaagcagtgcttgcttggcaaggtgagtcttagaatctgactaacatcaacagggcagagtctcaggtaattaacaaaaccaggaaggaacagggagcagcaatgctaaaacacaagaaaccaggttactttgtcctacttcatagttgttattttcctaatcattggagataagctatgattaacagaaaaactacccatgtaaaatattgtcacccaacttttaagaaaaacaagaaagaagatacaaaacttagcaaacagaataagtaatttcagagaatcagaattaagaaaagaaacaaatgtaattacagtaagtgtaattcatatcttcagagacatgcaagaagaggttgcattttagaaaatactgataatagctcttggattaaaaactcaacagatgttctgaagaga

SEQ ID NO: 195066 - DNA, 495 bp, Homo sapiens
gagggaaataataaggtaaaagatgcagagactgctttccagacaaagtaagaatgaacttcactttggaataacaaagcagtgcttgcttggcaaggtgagtcttagaatctgactaacatcaacarggcagagtctcaggtaattaacaaaaccaggaaggaacagggagcagcaatgctaaaacacaagaaaccaggttactttgtcctacttcatagttgttattttcctaatcattggagataagctatgattaacagaaaaactacccatgtaaaatattgtcacccaacttttaagaaaaacaagaaagaagatacaaaacttagcaaacagaataagtaatttcagagaatcagaattaagaaaagaaacaaatgtaattacagtaagtgtaattcatatcttcagagacatgcaagaagaggttgcattttagaaaatactgataatagctcttggattaaaaactcaacagatgttctgaagaga

SEQ ID NO: 195067 - DNA, 571 bp, Homo sapiens
tcttagagacaaaaaaggggaagctccattaaaattggtaaaggaagaaacataatatgaaaggagggaaataataaggtaaaagatgcagagactgctttccagacaaagtaagaatgaacttcactttggaataacaaagcagtgcttgcttggcaaggtgagtcttagaatctgactaacatcaacagggcagagtctcaggtaattaacaaaaccaggaaggaacagggagcagcaatgctaaaacacaagaamccaggttactttgtcctacttcatagttgttattttcctaatcattggagataagctatgattaacagaaaaactacccatgtaaaatattgtcacccaacttttaagaaaaacaagaaagaagatacaaaacttagcaaacagaataagtaatttcagagaatcagaattaagaaaagaaacaaatgtaattacagtaagtgtaattcatatcttcagagacatgcaagaagaggttgcattttagaaaatactgataatagctcttggattaaaaactcaacagatgttctgaagagaacaatagacatag

SEQ ID NO: 195068 - DNA, 389 bp, Homo sapiens
agacttgcagagacagaaatgactgtcatgtgttcttatacacataaagccctagaaacaggagccacagcacatcatgcactggggccatatggggaagtaccrgagtcagtgaaggcaaaaggagcaagactaaagcatgagccagagcctttaatatggttttccttggaaggaatgagtgagacagtgtaagcagctgagcaggtttaagactgggtagtgtgagtactttttgtgtaatttagtccctagtgttccagcacctgattctggggtgacgaaagcagagggataatgtcccagaccacaggagccatataataagagtcaagtgagggtgtggattctggattggttggtttgcatataaataacatgatcatagg

SEQ ID NO: 195069 - DNA, 537 bp, Homo sapiens
aacacttaacttactttccccccaccacgtttttgaaaattacccctagtccttttttgcaggtttcatctttactatttttcaaatgttagaggaccattatgctcaggactttcacttcttatctttcttatctttgctttcttactaatttttgtgtcattaatttcctgatatttcatattacacctaaacactggacacyacacccaacactccctgacttatccacgtggatatcagttaggaatctcaaaattaatatgtctgtatggagccactgaaactccccaaatttgctcttccccattctgtttaatggcaactcccattttatagtttctcagctcaatattcttggtgtccccttttaattctgtctctatatctctgtcactctcttcctgtatctgtctgattctctccccctctctcctctctcttgctcactctcactcttgctctctctccctgcttcacacacacacaaatacgcacagacagacagacacacacacacacacacacacacatttt

SEQ ID NO: 195070 - DNA, 537 bp, Homo sapiens
aacacttaacttactttccccccaccacgtttttgaaaattacccctagtccttttttgcaggtttcatctttactatttttcaaatgttagaggaccattatgctcaggactttcacttcttatctttcttatctttgctttcttactaatttttgtgtcattaatttcctgatatttcatattacacctaaacactggacactacacccaacactccctgacttatccacgtggatatcagttaggaatctcaaaattaatatgtctgtatggagccactgaaactccccaaatttgctcttccccattctgtttaatggcaactcccattttatagtttctcagctcaatattcttggtgtccccttttaattctgtctctatatctctgtcactctcttcctgtatctgtctgattctctccccctctctcctctctcttgctcactctcactcttgctctctctccctgcttcacacacacacaaatacgcacagacagacagacasacacacacacacacacacacatttt

SEQ ID NO: 195071 - DNA, 291 bp, Homo sapiens
gaccagaagaaaggccgacgtgcaagaaacccagcctccggcgcacagggaacatgtgtcccaaggcgcacgcacacacagacggacagagacagaaagagagggcgacggaaagagcgagaagggagagagggagagagagagagagagagagagagacttaagagagagacggtagtgggcacacagacacgcrcgcgcgcgcacacacacacgcagacacacagacacacacacacccccataacggacacagacatacagcaggtaacacccacccccaggcagccc

SEQ ID NO: 195072 - DNA, 291 bp, Homo sapiens
gaccagaagaaaggccgacgtgcaagaaacccagcctccggcgcacagggaacatgtgtcccaaggcgcacgcacacacagacggacagagacagaaagagagggcgacggaaagagcgagaagggagagagggagagagagagagagagagagagagacttaagagagagacggtagtgggcacacagacacgcgcgcgcgcgcacacacacacgcagacacacagacacacacacacccccataayggacacagacatacagcaggtaacacccacccccaggcagccc

SEQ ID NO: 195073 - DNA, 461 bp, Homo sapiens
tgatgtgattattacacattgcatgcctgtgtcaaactatctcatgtaccccataaatatatacacctaccatgtactcatataaattaaaaataraaataaattttttaaaaaagtgtgagttttaaaggtgaggtttgccctccagcgctggtgcctgccaggtgtgaccttcacatcatctttccacatggtccaggtccccatctgcagaggccaacagttcccagagtgaccttcctcagaaaacagggtcttggaggagacagtcagaagaagggggcctcgtcttccccactgcacagccccttgtggggattggaagtgagggtctctgcccacaagttggcagtcaccataagctgttttgtgggaggaagcatagggcatataggtcagtgctggaacagcatttcctgatcctgacttggagaaggtgttaaaatcttgacattcccgac

SEQ ID NO: 195074 - DNA, 461 bp, Homo sapiens
tgatgtgattattacacattgcatgcctgtgtcaaactatctcatgtaccccataaatatatacacctaccatgtactcatataaattaaaaataaaaataaattttttaaaaaagtgtgagttttaaaggtgaggtttgccctccagcgctggtgcctgccaggtgtgaccttcacatcatctttccacatggtccaggtccccatctgcagaggccaacagttcccagagtgaccttcctcagaaaacagggtcttggaggagacagtcagaagaagggggcctcrtcttccccactgcacagccccttgtggggattggaagtgagggtctctgcccacaagttggcagtcaccataagctgttttgtgggaggaagcatagggcatataggtcagtgctggaacagcatttcctgatcctgacttggagaaggtgttaaaatcttgacattcccgac

SEQ ID NO: 195075 - DNA, 461 bp, Homo sapiens
tgatgtgattattacacattgcatgcctgtgtcaaactatctcatgtaccccataaatatatacacctaccatgtactcatataaattaaaaataaaaataaattttttaaaaaagtgtgagttttaaaggtgaggtttgccctccagcgctggtgcctgccaggtgtgaccttcacatcatctttccacatggtccaggtccccatctgcagaggccaacagttcccagagtgaccttcctcagaaaacagggtcttggaggagacagtcagaagaagggggcctcgtcttccccactgcacagccccttgtggggattggaagtgagggtctctgcccacaagttggcagtcaccataagctgttttgtgggaggaagcatagggcatataggtcagtgctggaacagcmtttcctgatcctgacttggagaaggtgttaaaatcttgacattcccgac

SEQ ID NO: 195076 - DNA, 515 bp, Homo sapiens
agaccagcctggccaacatggcaaaaccccgtttctacaaaaaatacaaaaattagctgggtatggtgatgcgcacttgtagccccagctactcgggaggctgaggtaggacaattgcctgaacccacgaggcagaggttgcagtgagctgagatcctgtcactgcactccagtctgcgggacagagtgagactctgtcccaataataaataaataaataaataatctagaagtacaattgcttagccaaatttcttatgcattttgaatgataagagttrctgcctcatttctgttacaaaggctatggtaatttacactcaaaacacagaataggttggttgttgtcacatatggagtcttactgttgccgagactggagtgcagtggtgtaatcctagctcattgtagcctccaacgcctaggctcaagcaatcctcttacctcagcctccctcccaattaactaggattacaggtgcatgccaccacacccggctaattttattcttagtt

SEQ ID NO: 195077 - DNA, 515 bp, Homo sapiens
agaccagcctggccaacatggcaaaaccccgtttctacaaaaaatacaaaaattagctgggtatggtgatgcgcacttgtagccccagctactcgggaggctgaggtaggacaattgcctgaacccacgaggcagaggttgcagtgagctgagatcctgtcactgcactccagtctgcgggacagagtgagactctgtcccaataataaataaataaataaataatctagaagtacaattgcttagccaaatttcttatgcattttgaatgataagagttgctgcctmatttctgttacaaaggctatggtaatttacactcaaaacacagaataggttggttgttgtcacatatggagtcttactgttgccgagactggagtgcagtggtgtaatcctagctcattgtagcctccaacgcctaggctcaagcaatcctcttacctcagcctccctcccaattaactaggattacaggtgcatgccaccacacccggctaattttattcttagtt

SEQ ID NO: 195078 - DNA, 515 bp, Homo sapiens
agaccagcctggccaacatggcaaaaccccgtttctacaaaaaatacaaaaattagctgggtatggtgatgcgcacttgtagccccagctactcgggaggctgaggtaggacaattgcctgaacccacgaggcagaggttgcagtgagctgagatcctgtcactgcactccagtctgcgggacagagtgagactctgtcccaataataaataaataaataaataatctagaagtacaattgcttagccaaatttcttatgcattttgaatgataagagttgctgcctcatttctgttacaaaggctatggtaatttacactcaaaacacagaataggttggttgttgtcacatatggagtcttactgttgccgagactggagtgcagtggtgtaatcctagctcrttgtagcctccaacgcctaggctcaagcaatcctcttacctcagcctccctcccaattaactaggattacaggtgcatgccaccacacccggctaattttattcttagtt

SEQ ID NO: 195079 - DNA, 515 bp, Homo sapiens
agaccagcctggccaacatggcaaaaccccgtttctacaaaaaatacaaaaattagctgggtatggtgatgcgcacttgtagccccagctactcgggaggctgaggtaggacaattgcctgaacccacgaggcagaggttgcagtgagctgagatcctgtcactgcactccagtctgcgggacagagtgagactctgtcccaataataaataaataaataaataatctagaagtacaattgcttagccaaatttcttatgcattttgaatgataagagttgctgcctcatttctgttacaaaggctatggtaatttacactcaaaacacagaataggttggttgttgtcacatatggagtcttactgttgccgagactggagtgcagtggtgtaatcctagctcattgtagcctccaacgcctaggctcaagcaatcctctyacctcagcctccctcccaattaactaggattacaggtgcatgccaccacacccggctaattttattcttagtt

SEQ ID NO: 195080 - DNA, 380 bp, Homo sapiens
aaacctaacttgtagtcgttgtacaactataaacatggttgatgctttaagagaaagatcttgatggaaagggttaaatgtraaaattgatcatatgaattgggtcattcttatcacaccaaataaaaccatcaacgagccagggggaggaggcattcagggcaaaaacaccactccaaaagcgtaattctctgcatgcctggctgctgaaattacctgctttaagctgaaaccagttttatcaaatggctactgaaacaacctcttgaacactaagactagctttacccaccactgtccctcacctatcagagcctgccagctctcaaaaactttactggtgccagtgaactttctcaaagagaaatacataccgtttt

SEQ ID NO: 195081 - DNA, 380 bp, Homo sapiens
aaacctaacttgtagtcgttgtacaactataaacatggttgatgctttaagagaaagatcttgatggaaagggttaaatgtgaaaattgatcatatgaattgggtcattcttatcacaccaaataaaaccatcaacgagccagggggaggaggcattcagggcaaaaacaccactccaaaagcgtaattctctgcatgcctggctgctgaaattacctgctttaagctgaaaccagttttatcaaatggytactgaaacaacctcttgaacactaagactagctttacccaccactgtccctcacctatcagagcctgccagctctcaaaaactttactggtgccagtgaactttctcaaagagaaatacataccgtttt

SEQ ID NO: 195082 - DNA, 571 bp, Homo sapiens
tgctattctcttctgtattttatgtgaatgccacaaacatttttaaaattttaaagaagtaaacatatatrcaacatagatttttaaaatgagatatatgctgaaacaaagttttgaggaggtataatgttccgaaatgtaattagatgacaaattatttctggtacacatttcctagcacttatatttttcacccactcataaaacaatgtgaagtaggtcatactgagtcaccaaattaaacattcaaattattctacatctccaaaagtagcccataattaaaaggaatttcatattggaataactggacctaatttgcttattcattaaattgtgtccaagtgtagtctctgaattatatcaattagggaactagaaggcatacttaaaaagagctgaattaacagtgcaaataaagtaaccactgtggatacttttgaaaattctagtattaattttgttagtcaatgcaatggaaatacatcagtagcatagtaataaaaaatatttctttttatagcatctttgataattataaaattaataaagatttattatttaaaaaaac

SEQ ID NO: 195083 - DNA, 571 bp, Homo sapiens
tgctattctcttctgtattttatgtgaatgccacaaacatttttaaaattttaaagaagtaaacatatatacaacatagatttttaaaatgagatatatgctgaaacaaagttttgaggaggtataatgttcygaaatgtaattagatgacaaattatttctggtacacatttcctagcacttatatttttcacccactcataaaacaatgtgaagtaggtcatactgagtcaccaaattaaacattcaaattattctacatctccaaaagtagcccataattaaaaggaatttcatattggaataactggacctaatttgcttattcattaaattgtgtccaagtgtagtctctgaattatatcaattagggaactagaaggcatacttaaaaagagctgaattaacagtgcaaataaagtaaccactgtggatacttttgaaaattctagtattaattttgttagtcaatgcaatggaaatacatcagtagcatagtaataaaaaatatttctttttatagcatctttgataattataaaattaataaagatttattatttaaaaaaac

SEQ ID NO: 195084 - DNA, 579 bp, Homo sapiens
agtgtcttatatttctatttgttttacagtgtttcctgaggaacatatgttttacattttgatgaactcaagttgtcaatttctactttgatgaaayggtgtttgtgtcatgtctaagtagtatttactagcctgaggtcaaatacttttctatattttctcctatacataatttttcttccttttttttcactttgtttttacattttacatttaggcatatgatctgtactaaattaatttttgtatcatgagttacgtgttaaagttctactttttgcatatgagtatctaattgttccagcagaatttgttgaagggctatcttttatttactgaattacctttgtatctttggagaacaccaatttaccaaaattctgtacatatatttctgaattttctattatcttccaatgacatttctgtctatctttatgccaatatcacactattttcattactgtagccttataagctttggtattagattgtgctaatccttcaaaaatattcttatttttaaggattattttggctattttagactctttgcatttctactgaagttttaaaatt

SEQ ID NO: 195085 - DNA, 436 bp, Homo sapiens
ccaatttaccaaaattctgtacatatatttctgaattttctrttatcttccaatgacatttctgtctatctttatgccaatatcacactattttcattactgtagccttataagctttggtattagattgtgctaatccttcaaaaatattcttatttttaaggattattttggctattttagactctttgcatttctactgaagttttaaaattagtgtgtaaattcctataaaacaatgcctaataatattttaattgggactgtattgaatctatatttagggataatcacattttaccatgtgaattttctaacccatattcatattacatctttccatttatttaagtcttctttaactttctgcagtgttttgagttttagtgtaccagactcttacatcatttgatagattaattcctaattcttctac

SEQ ID NO: 195086 - DNA, 436 bp, Homo sapiens
ccaatttaccaaaattctgtacatatatttctgaattttctattatcttccaatgacatttctgtctatctttatgccaatatcacactattttcattactgtagcctyataagctttggtattagattgtgctaatccttcaaaaatattcttatttttaaggattattttggctattttagactctttgcatttctactgaagttttaaaattagtgtgtaaattcctataaaacaatgcctaataatattttaattgggactgtattgaatctatatttagggataatcacattttaccatgtgaattttctaacccatattcatattacatctttccatttatttaagtcttctttaactttctgcagtgttttgagttttagtgtaccagactcttacatcatttgatagattaattcctaattcttctac

SEQ ID NO: 195087 - DNA, 436 bp, Homo sapiens
ccaatttaccaaaattctgtacatatatttctgaattttctattatcttccaatgacatttctgtctatctttatgccaatatcacactattttcattactgtagccttataagctttggtattagattgtgctaatccttcaaawatattcttatttttaaggattattttggctattttagactctttgcatttctactgaagttttaaaattagtgtgtaaattcctataaaacaatgcctaataatattttaattgggactgtattgaatctatatttagggataatcacattttaccatgtgaattttctaacccatattcatattacatctttccatttatttaagtcttctttaactttctgcagtgttttgagttttagtgtaccagactcttacatcatttgatagattaattcctaattcttctac

SEQ ID NO: 195088 - DNA, 436 bp, Homo sapiens
ccaatttaccaaaattctgtacatatatttctgaattttctattatcttccaatgacatttctgtctatctttatgccaatatcacactattttcattactgtagccttataagctttggtattagattgtgctaatccttcaaaaatattcttatttttaaggattattttggctattttagactctttgcatttctactgaagktttaaaattagtgtgtaaattcctataaaacaatgcctaataatattttaattgggactgtattgaatctatatttagggataatcacattttaccatgtgaattttctaacccatattcatattacatctttccatttatttaagtcttctttaactttctgcagtgttttgagttttagtgtaccagactcttacatcatttgatagattaattcctaattcttctac

SEQ ID NO: 195089 - DNA, 454 bp, Homo sapiens
tatattttgattctctactgatagatatataggtcaaatctagggtttaaaraaaatcccaacaatgctgctataagcactcatacatgtttcactgtgtatgcatgtgtgagaatttttccacaatatatactcagaggtacccttgctggatcaagagcaactgtacattttcacattttaggtacttccaagttttctccaaagtggttgtacagtgtatgtttaccagcactgtaaatgtaaatgaaatatatctttattacccttggtattatcacacattttcttatttaccagtctaatcactggtgagatggaatcaggattgataaacctattcatgattcctcttttctttcttcaaattgcctttatatttaggttactctactactggaatacttttccttataatatctttctttatattatcaacagttttgaatgttaa

SEQ ID NO: 195090 - DNA, 454 bp, Homo sapiens
tatattttgattctctactgatagatatataggtcaaatctagggtttaaagaaaatcccaacaatgctgctataagcactcwtacatgtttcactgtgtatgcatgtgtgagaatttttccacaatatatactcagaggtacccttgctggatcaagagcaactgtacattttcacattttaggtacttccaagttttctccaaagtggttgtacagtgtatgtttaccagcactgtaaatgtaaatgaaatatatctttattacccttggtattatcacacattttcttatttaccagtctaatcactggtgagatggaatcaggattgataaacctattcatgattcctcttttctttcttcaaattgcctttatatttaggttactctactactggaatacttttccttataatatctttctttatattatcaacagttttgaatgttaa

SEQ ID NO: 195091 - DNA, 454 bp, Homo sapiens
tatattttgattctctactgatagatatataggtcaaatctagggtttaaagaaaatcccaacaatgctgctataagcactcatacatgtttcactgtgtatgcatgtgtgagaatttttccacaatatatactcagaggtacccttgctggatcaagagcaactgtacrttttcacattttaggtacttccaagttttctccaaagtggttgtacagtgtatgtttaccagcactgtaaatgtaaatgaaatatatctttattacccttggtattatcacacattttcttatttaccagtctaatcactggtgagatggaatcaggattgataaacctattcatgattcctcttttctttcttcaaattgcctttatatttaggttactctactactggaatacttttccttataatatctttctttatattatcaacagttttgaatgttaa

SEQ ID NO: 195092 - DNA, 454 bp, Homo sapiens
tatattttgattctctactgatagatatataggtcaaatctagggtttaaagaaaatcccaacaatgctgctataagcactcatacatgtttcactgtgtatgcatgtgtgagaatttttccacaatatatactcagaggtacccttgctggatcaagagcaactgtacattttcacattttaggtacttccaagttttctccaaagtggttgtacagtgtatgtttaccagcactgtaaatgtaaatgaaatatatctttattacccttggtattatcacacattttcttatttrccagtctaatcactggtgagatggaatcaggattgataaacctattcatgattcctcttttctttcttcaaattgcctttatatttaggttactctactactggaatacttttccttataatatctttctttatattatcaacagttttgaatgttaa

SEQ ID NO: 195093 - DNA, 327 bp, Homo sapiens
gaccttctagagttcagtgttcacctggggtccgaagtccacctagggcttgggtgtccaaatagggcctggtgtcagcttgagatttgtgtatttacctagggcctggttgtccacttggggcttgattttttacttggtttttgtgttaatctggggtctagtgtccacctggggcctrggtatccacctagggactattgttcagctggagactaatgactacctatggcctggtaatcacctaaggctttgtttcacttaggtacttggtgccaaactgttgcctgctgttcacctggggtatggtgtccacctggggtctgg

SEQ ID NO: 195094 - DNA, 327 bp, Homo sapiens
gaccttctagagttcagtgttcacctggggtccgaagtccacctagggcttgggtgtccaaatagggcctggtgtcagcttgagatttgtgtatttacctagggcctggttgtccacttggggcttgattttttacttggtttttgtgttaatctggggtctagtgtccacctggggcctgggtatccacctagggactattgtycagctggagactaatgactacctatggcctggtaatcacctaaggctttgtttcacttaggtacttggtgccaaactgttgcctgctgttcacctggggtatggtgtccacctggggtctgg

SEQ ID NO: 195095 - DNA, 327 bp, Homo sapiens
gaccttctagagttcagtgttcacctggggtccgaagtccacctagggcttgggtgtccaaatagggcctggtgtcagcttgagatttgtgtatttacctagggcctggttgtccacttggggcttgattttttacttggtttttgtgttaatctggggtctagtgtccacctggggcctgggtatccacctagggactattgttcagctggagactaatgactacctatggcctggtaatcacctaaggctttgtttcacttaggtmcttggtgccaaactgttgcctgctgttcacctggggtatggtgtccacctggggtctgg

SEQ ID NO: 195096 - DNA, 553 bp, Homo sapiens
aggaattcaagacaagactagagtatgttaagataccacaaaaagaaaaaaatatatatatagcaagagctttcttgagtaagcaaattttatacatataaaaataatttacatgcaaatgaccaagaggaaaggttaagtgactctggtgtaaataattagtttaytgattctgccagagcatattaagaaaaattcactttggcaaaataatatggatttaaagaagtaacaagtgggtttctctaaagcacagtttggctttttactagaatatcaagtcacctttttgggtgaggagagtacaatgggagtgggcagctggtgcaaataaacatttaaaattacttaaaacttcaacaaatgggatctgtatttaaatctgttttggtctgtcttccctttgttttttctaatccattccaacaatgcaaacctcagccactgtcaagggcaatctcagactggaggttgctgcctagggtgaggttctagcaagactgacaagcagagctcagggaaaagtctgcatgggaaaacagagccagactta

SEQ ID NO: 195097 - DNA, 525 bp, Homo sapiens
gaattcaagacaagactagagtatgttaagataccacaaaaagaaaaaaatatatatatagcaagagctttcttgagtaagcaaattttatacatataaaaataatttacatgcaaatgaccaagaggaaaggttaagtgactctggtgtaaataattagtttactgattctgccagagcatattaasaaaaattcactttggcaaaataatatggatttaaagaagtaacaagtgggtttctctaaagcacagtttggctttttactagaatatcaagtcacctttttgggtgaggagagtacaatgggagtgggcagctggtgcaaataaacatttaaaattacttaaaacttcaacaaatgggatctgtatttaaatctgttttggtctgtcttccctttgttttttctaatccattccaacaatgcaaacctcagccactgtcaagggcaatctcagactggaggttgctgcctagggtgaggttctagcaagactgacaagcagagctcagggaaaagtc

SEQ ID NO: 195098 - DNA, 552 bp, Homo sapiens
ggaattcaagacaagactagagtatgttaagataccacaaaaagaaaaaaatatatatatagcaagagctttcttgagtaagcaaattttatacatataaaaataatttacatgcaaatgaccaagaggaaaggttaagtgactctggtgtaaataattagtttactgattctgccagagcatattaagaaaaattcactttggcaaaatwatatggatttaaagaagtaacaagtgggtttctctaaagcacagtttggctttttactagaatatcaagtcacctttttgggtgaggagagtacaatgggagtgggcagctggtgcaaataaacatttaaaattacttaaaacttcaacaaatgggatctgtatttaaatctgttttggtctgtcttccctttgttttttctaatccattccaacaatgcaaacctcagccactgtcaagggcaatctcagactggaggttgctgcctagggtgaggttctagcaagactgacaagcagagctcagggaaaagtctgcatgggaaaacagagccagactta

SEQ ID NO: 195099 - DNA, 526 bp, Homo sapiens
ggaattcaagacaagactagagtatgttaagataccacaaaaagaaaaaaatatatatatagcaagagctttcttgagtaagcaaattttatacatataaaaataatttacatgcaaatgaccaagaggaaaggttaagtgactctggtgtaaataattagtttactgattctgccagagcatattaagaaaaattcactttggcaaaataatatggatttaaagaagtaacaagtgggtttctctaaagcacagtttggctttttactagaatatcaagtcacctttttgggtgaggagagyacaatgggagtgggcagctggtgcaaataaacatttaaaattacttaaaacttcaacaaatgggatctgtatttaaatctgttttggtctgtcttccctttgttttttctaatccattccaacaatgcaaacctcagccactgtcaagggcaatctcagactggaggttgctgcctagggtgaggttctagcaagactgacaagcagagctcagggaaaagtc

SEQ ID NO: 195100 - DNA, 554 bp, Homo sapiens
aaggaattcaagacaagactagagtatgttaagataccacaaaaagaaaaaaatatatatatagcaagagctttcttgagtaagcaaattttatacatataaaaataatttacatgcaaatgaccaagaggaaaggttaagtgactctggtgtaaataattagtttactgattctgccagagcatattaagaaaaattcactttggcaaaataatatggatttaaagaagtaacaagtgggtttctctaaagcacagtttggctttttactagaatatcaagtcacctttttgggtgaggagagtacaatgggagtgggcagctggtgcaaataaacatttamaattacttaaaacttcaacaaatgggatctgtatttaaatctgttttggtctgtcttccctttgttttttctaatccattccaacaatgcaaacctcagccactgtcaagggcaatctcagactggaggttgctgcctagggtgaggttctagcaagactgacaagcagagctcagggaaaagtctgcatgggaaaacagagccagactta

SEQ ID NO: 195101 - DNA, 552 bp, Homo sapiens
ggaattcaagacaagactagagtatgttaagataccacaaaaagaaaaaaatatatatatagcaagagctttcttgagtaagcaaattttatacatataaaaataatttacatgcaaatgaccaagaggaaaggttaagtgactctggtgtaaataattagtttactgattctgccagagcatattaagaaaaattcactttggcaaaataatatggatttaaagaagtaacaagtgggtttctctaaagcacagtttggctttttactagaatatcaagtcacctttttgggtgaggagagtacaatgggagtgggcagctggtgcaaataaacatttaaaattacttaaaacttcaacaaatgggatctgtatttaaatstgttttggtctgtcttccctttgttttttctaatccattccaacaatgcaaacctcagccactgtcaagggcaatctcagactggaggttgctgcctagggtgaggttctagcaagactgacaagcagagctcagggaaaagtctgcatgggaaaacagagccagactta

SEQ ID NO: 195102 - DNA, 251 bp, Homo sapiens
ggacattataccaagtcacaacatgaggcatgagatacctcagatgttgttccctctaaatctcatgttgaattgtgatatccccaatgttggtggtaggtctggagggaggtgattggatcatgggggtggatttctcagaaatggtctagcatcctgtccctggtgctgtcyttgtgatagtgagtgaattcttgcaagatctatttgtttaaaagtgtgtggtgcttcccctgccttgccaggtgatg

SEQ ID NO: 195103 - DNA, 564 bp, Homo sapiens
gtaactggcctttaaactcatgaaaatgcttgagaacactcaggggaaaaagtgagtaagtagagaaaaaagaaagtactcagctaagtgggttgaagacagtacaggaaatattgaaggagactgtctattgtttgattgatttctttcaaagaaagaatacaaagtaagttgataactgaaggacaacggwaggtcaatgtaaacttttaacaaaaagggaattattcattaatgagaatgataatactaaaatgagagggagagctaagggacagaatttacttaatattgggagatctcatcaatttagcataagacatgtggtaactttgtagaaggttattgttatgaatgctgtgggagtgaatgcattgggaaactaaaatagaatgtttggcactgttgagtatccttttaagttttgtaatgaattgaaatcatgttattagttacaacgtagatgagcctggaggacattatgttaagtgaaataagacaggcacagagagagaaaaaccacatgttctcacttatatgtgggagctaaaaatgggcttataa

SEQ ID NO: 195104 - DNA, 564 bp, Homo sapiens
gtaactggcctttaaactcatgaaaatgcttgagaacactcaggggaaaaagtgagtaagtagagaaaaaagaaagtactcagctaagtgggttgaagacagtacaggaaatattgaaggagactgtctattgtttgattgatttctttcaaagaaagaatacaaagtaagttgataactgaaggacaacggtaggtcaatgtaaacttttaacaaaaagggaattattcattaatgagaatgataatactaaaatgagagggagagctaagggacagaatttacttaatattgggagatctmatcaatttagcataagacatgtggtaactttgtagaaggttattgttatgaatgctgtgggagtgaatgcattgggaaactaaaatagaatgtttggcactgttgagtatccttttaagttttgtaatgaattgaaatcatgttattagttacaacgtagatgagcctggaggacattatgttaagtgaaataagacaggcacagagagagaaaaaccacatgttctcacttatatgtgggagctaaaaatgggcttataa

SEQ ID NO: 195105 - DNA, 415 bp, Homo sapiens
tttaataccacttttaaatccgtaaataaaataatgggtttttatctaactggatgagctgtgacttaagcatctaaaggcatcctgtgttttgtccaggtgccaaaaggaagatagttgtttttcatagtgacatcagtaaccagtgtggaatggacaggagatagctgacccctgcaaagttatacaatcttgacccttgatctcattgccttcattcttacgtggcrcctgtcttgtgataactggagtccatattagcagccttcacttgagccatccctaactaagcctggtttccctttttggttcattgatcaatctgacgtcatttgtttttatcttccatttatgtatcagcatttgtttagtgttgatgctgcccctcagtcccacttcttttattattgaattc

SEQ ID NO: 195106 - DNA, 423 bp, Homo sapiens
ggaattccagtctgtatgattctacaatctcacactgtactgtccctgttatagcagtcattacattacactgaaattttttatgactgtcttccctagtagaaatgatcatctttatcaggaggtggcagatcagggaccatgtagtcgcttcattctttttttcatggtctaacatgacgcctactacatgcagtagatgctccaacactgcttatagaatgaatgagtttatgttaaaacaaatgtaaacagtaattacagaatatggaaaagatctccctccttaaacttccaaagacatgccacgtgatgcaatattattttgctcaagaagactttaataccatcgacagacgtgcattcctttttctatkaattaaaaagttataagtatcattttaaagatattaacaatataaa

SEQ ID NO: 195107 - DNA, 447 bp, Homo sapiens
caattttcaggcaaatatttgtcatagaaggtgacatggaaagtctgatcatctctctttgttgtttagcacacctatatccactgatttgtcaagacttgcacagtggtgatattttgactccatcattccttctcattgttaatgamgcagctttagaagtttcttacacaatggtgcagtgtcctcttcaatcatctcgtacctagaggtgcaggttatgcagggaaatgagataaggaactgattgcagatgagctggtttcccagaatcctgtaacactgactactgtgttttattggtttgtttcattataaactagtggatatcaacatacatatttgctttttgtctatgatagttattattttttgtttcactggtctatgggagaaaatttcttcagattggatcttggaatttttggacacacccctgggacttct

SEQ ID NO: 195108 - DNA, 488 bp, Homo sapiens
tcaggttcaattttcaggcaaatatttgtcatagaaggtgacatggaaagtctgatcatctctctttgttgtttagcacacctatatccactgatttgtcaagacttgcacagtggtgatattttgactccatcattccttctcattgttaatgacgcagctttagaagtttcttacacaatggtgcagtgtcctcttcaatcatctcgtacctasaggtgcaggttatgcagggaaatgagataaggaactgattgcagatgagctggtttcccagaatcctgtaacactgactactgtgttttattggtttgtttcattataaactagtggatatcaacatacatatttgctttttgtctatgatagttattattttttgtttcactggtctatgggagaaaatttcttcagattggatcttggaatttttggacacacccctgggacttctggggtcaaaacagagaaaagaaagctcaggtact

SEQ ID NO: 195109 - DNA, 488 bp, Homo sapiens
tcaggttcaattttcaggcaaatatttgtcatagaaggtgacatggaaagtctgatcatctctctttgttgtttagcacacctatatccactgatttgtcaagacttgcacagtggtgatattttgactccatcattccttctcattgttaatgacgcagctttagaagtttcttacacaatggtgcagtgtcctcttcaatcatctcgtacctagaggtgcaggttatgcagggaaatgagataaggaactgattgcagatgagctggtttcccagaatcctrtaacactgactactgtgttttattggtttgtttcattataaactagtggatatcaacatacatatttgctttttgtctatgatagttattattttttgtttcactggtctatgggagaaaatttcttcagattggatcttggaatttttggacacacccctgggacttctggggtcaaaacagagaaaagaaagctcaggtact

SEQ ID NO: 195110 - DNA, 522 bp, Homo sapiens
tcctttcaaaatattattataggcaatgtgcctagacactcaagagctctgaaaatgatgtgcaagaagactaacattgtttccatgcctggtaacacaacatctattctgcagcccatggatcaatgagtcattttgacattcaagtttttttatttaagaagcacattttataaagctctaaattccatagataatgatacctctgatgaatgtggacaaagtaaattaaaaaccttctggaaaggattgaccattctagcttctatgaaaaacattcatgattcattagaggaggrcaaaatatcaatattaaaaggtgtttggaagaagtttattccaaccctgatggattattctgaggagatcaagacttcagtgaaggaagtaactgcagatgtggtggaaatagcaagaggactggaattagaagtggaacctgatgatactgggttgccgtaatttcattataaaacttgaacagatgaagaattgcttcttacggatgagcaaagaagttgg

SEQ ID NO: 195111 - DNA, 522 bp, Homo sapiens
tcctttcaaaatattattataggcaatgtgcctagacactcaagagctctgaaaatgatgtgcaagaagactaacattgtttccatgcctggtaacacaacatctattctgcagcccatggatcaatgagtcattttgacattcaagtttttttatttaagaagcacattttataaagctctaaattccatagataatgatacctctgatgaatgtggacaaagtaaattaaaaaccttctggaaaggattgaccattctagcttctatgaaaaacattcatgattcattagaggaggacaaaatatcaatattaaaaggtgtttggaagaagtttattccaaccctgatggattattctgaggagatcaagacttcagtgaaggaagtaactgcagatgtggtggaaatagcaagaggactggaattagaagtggaacctgatgataytgggttgccgtaatttcattataaaacttgaacagatgaagaattgcttcttacggatgagcaaagaagttgg

SEQ ID NO: 195112 - DNA, 469 bp, Homo sapiens
gaattatttaatattttttggaagtgttacaaattgatcttagtgtgtcatttttgaccaactgaccaacttgtgccaagggtcttttcttatacttaattctacaagagtcaattagattaattacatctgatccaataacatcctattgttcaattagtttcagcaaacaatattactgcctgtcttattacttttttattcaaaattgttcatagcaaccttgctggcaggtactatcagaaggtaatgaatttgagcttatcttattttgcagaccacgtgttaacatatcataatatgagcacmatataaaaatgcatatgatgtttttctgtgcagtacattaggaagacccaagcttttggatgttgcttttttcttaaaaaataacttgacatctaattttcatttgttgttactttttaaattatgattttatagattcatttggttatttttaaaatgt

SEQ ID NO: 195113 - DNA, 602 bp, Homo sapiens
tttgtcaattgtttagaggcagaaaagattacatttccgtacaagaagtccagattagttgaagacactagaattcaaagcctgcaaagattataccaaatgtatacgtatgcatttttaaactatctagattgctcccaacctgtaaaatttcaacagactcaaattatatctgtgccttggaaataaaataggtgattaattagccattaaagtaggagaatcaaaagatcagctgatatcaggattaaattgtcttttaccccaagaagtacaattttaaaaaaatctggttagagaccgattaatcatgaagtgactcttttggagaagttttgctctgagtcttttagttttgataacttcatgtccttgactttttaaataacacaataaactagctaacttaaattwtattttatttattgatatttatataaatatatgtctatataaatatgtttatataaatatatgttttataaatatgtttatgtaaatatagcaaatttatacttgctatcagattatctggtgcattgctgattgctctgcctttcagtgagagtcactggggaaatttatatctcaccaaaagaaaa

SEQ ID NO: 195114 - DNA, 614 bp, Homo sapiens
ctattattcgcaatgaaaatagataagcaataataatatatgcacattattccccttcacaggagcaatcattctcccagagaccatatgatgatttataaacctggcacatgataaagataataaattgactgctctagaaatcactgtgttaactgaactgccttgtcatttctgccttaagtgcagcttttctagctgcaaatggcaagggaaaataatcaatacaagagaaatcttagctttaaaaaggtaaaacaatgcaaacgcaatgcctttctgaaaagaatgtactttcarttagaaatacttgaaaatttgaattcattacctcaagtccagtgaccaatatgtctcaggtactcatattatactctaaatataaattcctgagcttgtccatttagaaccttatatatgaactgtctttgacactcatatgatatcagaaaggtctttcaaattcatttgcctcttctctggagtaaagttcttatactgttataccaagggtattaagggattagtctggtatctttccaattcatttgactagagatcaaatcagattctactagtctgaaaatagaatccctggcctcaggattaaaatc

SEQ ID NO: 195115 - DNA, 628 bp, Homo sapiens
tcaccagctattcaccgttactttgtgactttgagtaagtctcttttcatttatgttttcctttctctaaaatgtgttaattacttttctgtaatcaacctcacagatgtaaygtaatgttcaaattagataactcacctgaaaactctttgaaagctgaagaagagatacacaagtgttaggtagtaatggaaaaataataagctttgaaatctagtacaaaccagtttaaattctgcccttggcccttaccagccttgtggaagtcactgactctttgattctcagtatttataactagaattgggaagaataatatttactttcaaaaaataaaatcttgctgctggataatgctactttggtttttgacggaagtttatcttacctataaatctataggttgcctctaggacttggacattgttttatattaatatcattttcatatatttcaccatgcctaacaccagccaacacacaatatttgcaacacaaacaaggaaaaatagtgaagattagtgattattattccttatgcttttagtcctcgtctactccgattcaattaggtttctgaatataaaggtaacaaatttattggagtctaagaataaaaattgaaggg

SEQ ID NO: 195116 - DNA, 628 bp, Homo sapiens
tcaccagctattcaccgttactttgtgactttgagtaagtctcttttcatttatgttttcctttctctaaaatgtgttaattacttttctgtaatcaacctcacagatgtaacgtaatgttcaaattagataactcacctgaaaactctttgaaagctgaagaagagatacacaagtgttaggtaktaatggaaaaataataagctttgaaatctagtacaaaccagtttaaattctgcccttggcccttaccagccttgtggaagtcactgactctttgattctcagtatttataactagaattgggaagaataatatttactttcaaaaaataaaatcttgctgctggataatgctactttggtttttgacggaagtttatcttacctataaatctataggttgcctctaggacttggacattgttttatattaatatcattttcatatatttcaccatgcctaacaccagccaacacacaatatttgcaacacaaacaaggaaaaatagtgaagattagtgattattattccttatgcttttagtcctcgtctactccgattcaattaggtttctgaatataaaggtaacaaatttattggagtctaagaataaaaattgaaggg

SEQ ID NO: 195117 - DNA, 628 bp, Homo sapiens
tcaccagctattcaccgttactttgtgactttgagtaagtctcttttcatttatgttttcctttctctaaaatgtgttaattacttttctgtaatcaacctcacagatgtaacgtaatgttcaaattagataactcacctgaaaactctttgaaagctgaagaagagatacacaagtgttaggtagtaatggaaaaataataagctttgaaatctagtacaaaccagtttaaattctgcccttggcccttaccagccttgtggaagtcactgactctttgattctcagtatttataactagaattgsgaagaataatatttactttcaaaaaataaaatcttgctgctggataatgctactttggtttttgacggaagtttatcttacctataaatctataggttgcctctaggacttggacattgttttatattaatatcattttcatatatttcaccatgcctaacaccagccaacacacaatatttgcaacacaaacaaggaaaaatagtgaagattagtgattattattccttatgcttttagtcctcgtctactccgattcaattaggtttctgaatataaaggtaacaaatttattggagtctaagaataaaaattgaaggg

SEQ ID NO: 195118 - DNA, 656 bp, Homo sapiens
attgtgtgaatcatgatacaactatgggttcaacatatacattatacagttaataaaaagacttacccaagccttttcatggtcaatgccaaaaatatgtatttatatatcaattctatttcagcatgcttcacttggatacttattgaaattctagcatactttgaaaagtgtattagtgatgcaaagatttaggtaactatactcattataaacaacaacaacaacaacaaaaaacctcattaacagctatatgggcaacccttagttgccttgattatacatggatcttagccatcagggctaagtgaatgcatgtccaccttctcaggatttactttgcatcaggagagttacttcaacagtaattctgtttctagatcagttttgaattattctttttgaaatattctttacatacatttatccttaagctttttgtggttcagtctttgctaatgtgttgataattatgtagcctaattgattctcttgytgttcctctaacatgacctgtttgaatctgggcttccccatgtcactctctctgactgcaaaagtgtcacacatatgtctgaggctcactctctgcctcattcagctctctgctcaaatgtttcctccccagaaaggtctttctgattttctgattcaaa

SEQ ID NO: 195119 - DNA, 379 bp, Homo sapiens
gaaatccaaacacccctggttccaagaattttggataatggatactcaacctatrtatagatagatatggatagattgtatgtaatagactattacgttatacatatatattatataggtcctattatgttggtaaacttagacttttaaaggctcaccatttatcaattacaatgccaagtgctctttatacaaaatatttttaatagtcaaaactaccaaataaaaagtaaaatatgacctccactttacagataaagaaagaaggcttaaaaatgttaagaaatttttgtgaatttaagtgctattcatggggtttaaatttatgtccaagtgaactatgttctaaagtccagtctcttaactaaatgatcatatt

SEQ ID NO: 195120 - DNA, 379 bp, Homo sapiens
gaaatccaaacacccctggttccaagaattttggataatggatactcaacctatgtatagatagatatggatagattgtatgtaatagactattacgttatacatatatattatataggtcctattatgttggtaaacttagacttttaaaggctcaccatttatcaattacaatgccaagtgctctttatacaaaatatttttaatagtcaaaactaccaaataaaragtaaaatatgacctccactttacagataaagaaagaaggcttaaaaatgttaagaaatttttgtgaatttaagtgctattcatggggtttaaatttatgtccaagtgaactatgttctaaagtccagtctcttaactaaatgatcatatt

SEQ ID NO: 195121 - DNA, 508 bp, Homo sapiens
tggaattctgtgggctgtccccataactgaaagacaaattatctgctgttggttgtgttttcaaaaccrtttttcaaactcaaactcttctaaatagaaacaatgaagatccatttaactgcatttatgtaaaataaaataaaaccccagatactctccttttctgcttaagatactactttaccttcaataaagttatttcccttaatatgacatttaaattctacttaactttaccattcaatattctgtaaataaagccactcattcatttatttgtaaaatgtttatggagtgccctcattatcacagaatggtattgagattcacaaccttaccatattattttctaatagtcaagtgatttgctggtatttcctttaccactattcaatcattcttctatgttcttagattgtaattactcgtggcctagtaccaatgagcttttatgctcagatgtgtgtataggaaccaaaatcaacagatggggaaattatggaatgaa

SEQ ID NO: 195122 - DNA, 508 bp, Homo sapiens
tggaattctgtgggctgtccccataactgaaagacaaattatctgctgttggttgtgttttcaaaaccgtttttcaaactcaaactcttctaaatagaaacaatgaagatccatttaactgcatttatgtaaaataaaataaaaccccagatactctccttttctgcttaagatactactttaccttcaataaagttatttcccttaatatgacatttaaattctacttaactttaccattcaatattctgtaaataaagccactcattcatttatttgtaaaatgtttatggagtgccctcattatcacagaatggtattgagattcacaaccttmccatattattttctaatagtcaagtgatttgctggtatttcctttaccactattcaatcattcttctatgttcttagattgtaattactcgtggcctagtaccaatgagcttttatgctcagatgtgtgtataggaaccaaaatcaacagatggggaaattatggaatgaa

SEQ ID NO: 195123 - DNA, 476 bp, Homo sapiens
gatacgataagaaacacatcaaataagactgtcaaaattccatgcaacatattgaaagaaatatcaataacagtaaatatttgtttagtccttagatatgcatgcactggtttaagaagtttacataaactgtcttatctaatccccataaatcagcactgctgtcatctccatttggtatatgagtaagctcaagtttagaaagtttaagtagctttttcaaggccacagacctagtgaggaatgtcactgagatgtgacccatgtaaagcagccctggagtctttaccactgacaagaagctggaaggtactgccagtagggggaacagtgctgcttcctrcgctgctttgggggtctggacaagcagctctgtcgctgagcctagaagagcaccaggcaggaggtgaagaggcccaacagggagggaccttcactactggccagcttaagtttgtgggacatttgagcacaat

SEQ ID NO: 195124 - DNA, 476 bp, Homo sapiens
gatacgataagaaacacatcaaataagactgtcaaaattccatgcaacatattgaaagaaatatcaataacagtaaatatttgtttagtccttagatatgcatgcactggtttaagaagtttacataaactgtcttatctaatccccataaatcagcactgctgtcatctccatttggtatatgagtaagctcaagtttagaaagtttaagtagctttttcaaggccacagacctagtgaggaatgtcactgagatgtgacccatgtaaagcagccctggagtctttaccactgacaagaagctggaaggtactgccagtagggggaacagtgctgcttcctgcgctgctttgggggtctggacaagcagytctgtcgctgagcctagaagagcaccaggcaggaggtgaagaggcccaacagggagggaccttcactactggccagcttaagtttgtgggacatttgagcacaat

SEQ ID NO: 195125 - DNA, 474 bp, Homo sapiens
gaattctacattcttcatttgtattatttatcacacattagaataatgcagttacttgtgtaagaatttgattaatgtttgtctccattaatggtctatgaagagagtggctgtgaatgaataaataaatgaacaaatgtatatgaaatgcttggtggacaagcaaagcatcaaaacactatggactgaattacaaccttggtaagaaagatgcaagctctcgagaaagtggtggstaatagtttattacaaactttctgaagatagttatgacattcttaggatatttataattgatattatcagacatcaaactacttttttaaacataaattttattgaatgaaattgttctgtatatgagattcatgttaaatgtgtagtcttgccacaagaaaaagcaattactttttgaagaacaattttacttcccttgtgactctacttaataaaggcatttacctgtttgggcat

SEQ ID NO: 195126 - DNA, 471 bp, Homo sapiens
ttctacattcttcatttgtattatttatcacacattagaataatgcagttacttgtgtaagaatttgattaatgtttgtctccattaatggtctatgaagagagtggctgtgaatgaataaataaatgaacaaatgtatatgaaatgcttggtggacaagcaaagcatcaaaacactatggactgaattacaaccttggtaagaaagatgcaagctctcgagaaagtggtggctaatagtwtattacaaactttctgaagatagttatgacattcttaggatatttataattgatattatcagacatcaaactacttttttaaacataaattttattgaatgaaattgttctgtatatgagattcatgttaaatgtgtagtcttgccacaagaaaaagcaattactttttgaagaacaattttacttcccttgtgactctacttaataaaggcatttacctgtttgggcat

SEQ ID NO: 195127 - DNA, 564 bp, Homo sapiens
tgataaatttaatgtaacctaagcatacagtgtttataaagtctgcagaagtgtataataatgtcttaggccttcacattgacccaccacttgcttaatgactcwctgactcagagcaactttcagtcctacaagcttcagtcacagtaagtgcaatttaggcaacatgtgaaacctcatccctacaaaaaaatacaaaagttagcccggcatggttacgcacacctgtagtcccatctacttgggaggctgaggtgggaggatacattgagcccaggaggcagaggctgcagtgagccgagatcatgccactgcactccagcctgggcaacagagcaagaccctgttgcccaggctgtcccccatccccccaaaaatcttcaatgcagcctttttactgtaccttttttatttttggatatgattatatacacaaatactttccactgtgtcacaattgcctacagtatttagtacagtaaacatgccatacaggtttatagcacaggagcaatagactattccatatagcctaggtgtatagtaggttgtaccatctaggtt

SEQ ID NO: 195128 - DNA, 564 bp, Homo sapiens
tgataaatttaatgtaacctaagcatacagtgtttataaagtctgcagaagtgtataataatgtcttaggccttcacattgacccaccacttgcttaatgactctctgactcagagcaactttcagtcctacaagcttcagtcacagtaagtgcaatttaggcaacatgtgaaacctcatccctacaaaaaaatacaaaagttagcccggcatggttacgcacacctgtagtcccatctacttgggaggctgaggtgggaggatacattgagcccaggaggcagasgctgcagtgagccgagatcatgccactgcactccagcctgggcaacagagcaagaccctgttgcccaggctgtcccccatccccccaaaaatcttcaatgcagcctttttactgtaccttttttatttttggatatgattatatacacaaatactttccactgtgtcacaattgcctacagtatttagtacagtaaacatgccatacaggtttatagcacaggagcaatagactattccatatagcctaggtgtatagtaggttgtaccatctaggtt

SEQ ID NO: 195129 - DNA, 671 bp, Homo sapiens
cccagccctatccactttaaggagtatgggactaggttctttattagttctccragtgattttgttacacaacaactttgtccactttaaggtgtacgggactaggttctttttggttctccaagtgattttgtcacacaacaactttgaagaatgaattcattggagtgcatgtgccccataagaaggtggagcagaaataccagcatgagagtctaagaagtgattcggtggttgacagagcacaatcagcaatctagacaggtctttagacatgggcaccagtaaatatttagagaaggaggaaggatgcaatggcaaagtagtctagtcaaagatcagggaagatatggtaaaaagaaaagaaggattcaaggcagagaatggtctaagtactagaaaagctaaggagatcagatccacagctccactgcaaaagctaacttgagaaagaaggcaatttcttccattgaggaagaacaagaagaggataaataaagacagcaagtttgagaaggcaggtagagaatattaagggaattgtgtaaattatttttcttatctgctgaaggtgaaagtagaagtgtgtcaattgttaagagacagtagaagcagaatatgagtgtatgtgcaagaagttgcaacaagaatagtgaaaacaatataaaaat

SEQ ID NO: 195130 - DNA, 671 bp, Homo sapiens
cccagccctatccactttaaggagtatgggactaggttctttattagttctccgagtgattttgttacacaacaactttgtccactttaaggtgtacgggactaggttctttttrgttctccaagtgattttgtcacacaacaactttgaagaatgaattcattggagtgcatgtgccccataagaaggtggagcagaaataccagcatgagagtctaagaagtgattcggtggttgacagagcacaatcagcaatctagacaggtctttagacatgggcaccagtaaatatttagagaaggaggaaggatgcaatggcaaagtagtctagtcaaagatcagggaagatatggtaaaaagaaaagaaggattcaaggcagagaatggtctaagtactagaaaagctaaggagatcagatccacagctccactgcaaaagctaacttgagaaagaaggcaatttcttccattgaggaagaacaagaagaggataaataaagacagcaagtttgagaaggcaggtagagaatattaagggaattgtgtaaattatttttcttatctgctgaaggtgaaagtagaagtgtgtcaattgttaagagacagtagaagcagaatatgagtgtatgtgcaagaagttgcaacaagaatagtgaaaacaatataaaaat

SEQ ID NO: 195131 - DNA, 559 bp, Homo sapiens
tatagggaaattctcttgtatgagatgtataaattcctgaatatgaagttgaatgtttacaaacttgatcctgtcttccattgagtcattcatttatttctataataaagtaaatgctgtgatgacctgctgtttttttctagtgcrtgttaaagattcattgcaaaatgctatcctatgcttgtgaattatgcttgtaaatttggtctagaaaaattgtattcatactctcaaactgttttacaaagctgtactggtaggtctgatgggattgttttgctttggtagtatgtattttggttatttgattggttgattaaattttcttcttttaacatgagaattaacattatacttttacatacattgaaatccaaaaaccccatcagtgaaaatcttaaaatgactctacagactatcatatattcagttaaaatgaaaattgaagctatttttgtcttgtgaataaaaaacattcaattcacttgcaaattaacagggcaaacaattattgcagcttaaatagaaaatattttcacagacaaagtaaatagttatt

SEQ ID NO: 195132 - DNA, 407 bp, Homo sapiens
atttactgaactactgttgggatctccaggagcataaacttttatgtgtcttataagttaatttttttccaatgatctagcatgattttgcatatagcatccagccaacaatgtttcttttttacttctacctatttgatcaaactttgtatttctacaaatggtgtacttactttatgttatacattttacttcacctttagtattttcccttatagaawatcagactgtattaattcttagtctttctctatccagattatgtctttgccttccacatatctattccagagcttagcttttacagatatgtatccccttttctcccaactggaccaaatctctattcaagccccacttctaattcttctgtatcacaaccctggagacagccacaaactccactg

SEQ ID NO: 195133 - DNA, 378 bp, Homo sapiens
gcatattacattgagttactctgcagtatttataaacataatttacagtactagtagtataggtagaatcaagatagattgctttaacttttgtagatgtattacagaataatattttaagcaaatgcatttctatgttatattttcaaaagtgtccattatgtgtatactgatggttttatatttggagaattgaatcacttgaggaaaatatagagcaagtttgaaaatgttgaaacagaacatgcagtctttgccttctaatgaaataactttgaaatgtaaatgaagaaaaagtggcagaaaacatgtgtaatagaaaaagtgatagatttcayagaatctgatttagctatagcttttgggaagtcacctaac

SEQ ID NO: 195134 - DNA, 587 bp, Homo sapiens
cctcggtgtttctcaaacatggcagtacgctttcacttcaaggctttctcactggctgtttcctctagctgaaaagatattctaccagatatacttcattcccttattttatttaggtcttaacaaagattaagattaattcactgcctaatctaaagattcagcaaacccgcaaactcactataccctttctcaccttgattttctctatagctatttttttctttattttctgcctcttccacaagaaaaaataagtacttcctcagtacacggttattttttcattactttacttccatgcttagaacagtrcttagcatatggtaggcattcaataaacattagttgcatgagtatcctgatagacatgtgtcaaaaaatatgtggtccctggatcatatgtattaaccaaagtgtttatttgaccaaggtattttattcaagtaagaattaatttaaagaagaaattgtcacagctttctcattattatataagacataattttttttgaatcttctttagtgtgaggcagactatgttttctaggaaaacttctggtttgattagtttctccaaatgtagt

SEQ ID NO: 195135 - DNA, 578 bp, Homo sapiens
gtttccagaatatcataaaatccacgtaacccaaagaaagttaaatattacctcatatttgacaatgcttcatgtataatggtaacaaacaaacyaaatatgtctctcttgggcttcaggggaactaatatccctaacaaagttagtttgagcttaaaaaaagtgaatttggaacttgaaattttgcttttggaaagtttgtgaaatatcaaaggtttaatgcacttgctatcacaaaatagaatcataggtcataaaatattcatttagccaagatgataaagcagaggtgtttactctgtaatagagaggagactcagttttccaaacagtaagacctaaatacagcatgaagccaaccaaagctggctctcctcccttcttttttcccctgcagtttactcaaggtaaacaaaaatcttttattatctcatttatgttacacaaagatttcgttcaaagagaaaatcaaattttacccttatatggcatactaccaatgttaaagttcattttaatgaaactttataagcaaatctatctaatttgcatcagtttgaccataaagtaggatttcc

SEQ ID NO: 195136 - DNA, 578 bp, Homo sapiens
gtttccagaatatcataaaatccacgtaacccaaagaaagttaaatattacctcatatttgacaatgcttcatgtataatggtaacaaacaaaccaaatatgtctctcttgggcttcaggggaactaatatccctaacaaagttagtttgagcttaaaaaaagtgaatttggaacttgaaattttgcttttggaaagtttgtgaaatatcaaaggtttaatgcacttgctatcacaaaatagaatcataggtcataaaatattcatttagccaagatgataaagcagaggtgtttactctgtaatagagaggagactcagttttccaaacagtaagacctaaatacagcatgaagccaaccaaagctggctctcctcccttcttttttcccctgcagtttactcaaggtaaacaaaaatcttttattatctcatttatgttacacaaaratttcgttcaaagagaaaatcaaattttacccttatatggcatactaccaatgttaaagttcattttaatgaaactttataagcaaatctatctaatttgcatcagtttgaccataaagtaggatttcc

SEQ ID NO: 195137 - DNA, 422 bp, Homo sapiens
cactctggttttgagaattttcagcttgtctgctctggtttctctccatctttgttgttttatctamctttggtctttgatgttggtgacctactgatgaggttttggtgtggatgttgtttttgttgatggtgatgctattcctttctgtttgttagttttccttctaacagtcaggtccctcagctgcaggtctgttggagtttgctggagatccactccagaccctgttttcctgggtatcaccagcagaggctgcagaacagcaaatattgctgcctgatccttcctctggaagctttgtcccagaggggcaccctcctgtatgaggtgtctgtctgcccctactgggaggggtctcccagtttggctacacaggggtcagggacccacttgaggagaaagtccgtttgttctcagag

SEQ ID NO: 195138 - DNA, 580 bp, Homo sapiens
actgtgggacttgcaccagcagcctcttgggggctcttgggcctgactagggggttgtaccattgactttcttggktctaaggctgctgaacctggactgaaccatgctactggcttgagccatgctaccagctgctttggttcttcagctagcagatggcctgtagtgggactttgtctctgtgaccctgtgagtaaattccctctaataaatcccctaccaggcattctactggttctgtctctctggaaaaccctgaataatacataactgaaaatcagaattttggaaaatctgtacctgcaccataaatttcctagtacttaaagtattttctgataacataggttgaatgttaatgaatatgattttttatatcatatagggaaatggctcatcatttggaagagctgcataactcagtgaatgaataatgtacaaatgactaatgcatgatgtaacaacatcatgcattaaaaaagatctaatgttttaatgtaacaggacactaaaaatttatttgataaggtttaagattaaattgcaactaatcttcaagcaatgaccacttatccattt

SEQ ID NO: 195139 - DNA, 580 bp, Homo sapiens
actgtgggacttgcaccagcagcctcttgggggctcttgggcctgactagggggttgtaccattgactttcttgggtctaaggctgctgaacctggactgaaccatgctactggcttgagccatgctaccagctgctttggttcttcagctagcagatggcctgtrgtgggactttgtctctgtgaccctgtgagtaaattccctctaataaatcccctaccaggcattctactggttctgtctctctggaaaaccctgaataatacataactgaaaatcagaattttggaaaatctgtacctgcaccataaatttcctagtacttaaagtattttctgataacataggttgaatgttaatgaatatgattttttatatcatatagggaaatggctcatcatttggaagagctgcataactcagtgaatgaataatgtacaaatgactaatgcatgatgtaacaacatcatgcattaaaaaagatctaatgttttaatgtaacaggacactaaaaatttatttgataaggtttaagattaaattgcaactaatcttcaagcaatgaccacttatccattt

SEQ ID NO: 195140 - DNA, 401 bp, Homo sapiens
gaattccaaataatttatatagataatgactgggctggatgtggtggctcacacctgtaatcctagaactttgggagkctgaggcaggcagatcacttgagatcaggagttcaagaccagcctggccaacatggcgaaaccctgtctctgctaaatatacaaaaaattagttggatgtggtggtgcacacctgtaatcccagctactcaggaggctgaagcaggagaatcacttgagcccaggaggtagaggtagcagtgagccgagatcgggtcactgcactccagcctggatgacagagtgacactctgtctcaaaaaatatataataataatagtaatgactgaatatatacagaaatacatacttacataagtaaatgaataggagagaatagacaa

SEQ ID NO: 195141 - DNA, 401 bp, Homo sapiens
gaattccaaataatttatatagataatgactgggctggatgtggtggctcacacctgtaatcctagaactttgggaggctgaggcaggcagatcacttgagatcaggagttcaagaccagcctggccaacatggcraaaccctgtctctgctaaatatacaaaaaattagttggatgtggtggtgcacacctgtaatcccagctactcaggaggctgaagcaggagaatcacttgagcccaggaggtagaggtagcagtgagccgagatcgggtcactgcactccagcctggatgacagagtgacactctgtctcaaaaaatatataataataatagtaatgactgaatatatacagaaatacatacttacataagtaaatgaataggagagaatagacaa

SEQ ID NO: 195142 - DNA, 401 bp, Homo sapiens
gaattccaaataatttatatagataatgactgggctggatgtggtggctcacacctgtaatcctagaactttgggaggctgaggcaggcagatcacttgagatcaggagttcaagaccagcctggccaacatggcgaaaccctgtctctgctaaatatacaaaaaattagttggatgtggtggtgcacacctgtaatcccagctactcaggaggctgaagcaggagaatcacttgagcccaggaggtagaggtmgcagtgagccgagatcgggtcactgcactccagcctggatgacagagtgacactctgtctcaaaaaatatataataataatagtaatgactgaatatatacagaaatacatacttacataagtaaatgaataggagagaatagacaa

SEQ ID NO: 195143 - DNA, 416 bp, Homo sapiens
catacttacataagtaaatgaataggagagaatagacaaatctccagtgaagaagaattctaaatagtttaagcagatacttcctgctcaaggagcatccaccacctttcagtcycttaagtgtgggctgtatgtagtgatttccttcatgatagggaaagaaaaagggaagaatacctttaccactttatcatggagaaacctgacaaatactatcccagccagatcatcaaggtgaacatcagcagtgatgagtgccgttgattccacgtaccctttgtgtgatataacaaaaatgagactttacctctttggtatttatctcccaaatcccataaatccagcctagcaaaaagcaaaatgtcataaaaattccaagtgagggacattctacataatacctgacctgcacccct

SEQ ID NO: 195144 - DNA, 416 bp, Homo sapiens
catacttacataagtaaatgaataggagagaatagacaaatctccagtgaagaagaattctaaatagtttaagcagatacttcctgctcaaggagcatccaccacctttcagtcccttaagtgtgggctgtatgtagtgatttccttcatgatagggaaagaaaaagggaagartacctttaccactttatcatggagaaacctgacaaatactatcccagccagatcatcaaggtgaacatcagcagtgatgagtgccgttgattccacgtaccctttgtgtgatataacaaaaatgagactttacctctttggtatttatctcccaaatcccataaatccagcctagcaaaaagcaaaatgtcataaaaattccaagtgagggacattctacataatacctgacctgcacccct

SEQ ID NO: 195145 - DNA, 416 bp, Homo sapiens
catacttacataagtaaatgaataggagagaatagacaaatctccagtgaagaagaattctaaatagtttaagcagatacttcctgctcaaggagcatccaccacctttcagtcccttaagtgtgggctgtatgtagtgatttccttcatgatagggaaagaaaaagggaagaatacctttaccactttatcatggagaaacctgacaaatactatcccagccagatcatcaaggtgaacatcagcagtgatgagtgccgttgattccacgtaccctttgtgtgatataacaaaaatgagactttacctctttggtatttatctcccaaatcccataaatccagcytagcaaaaagcaaaatgtcataaaaattccaagtgagggacattctacataatacctgacctgcacccct

SEQ ID NO: 195146 - DNA, 416 bp, Homo sapiens
catacttacataagtaaatgaataggagagaatagacaaatctccagtgaagaagaattctaaatagtttaagcagatacttcctgctcaaggagcatccaccacctttcagtcccttaagtgtgggctgtatgtagtgatttccttcatgatagggaaagaaaaagggaagaatacctttaccactttatcatggagaaacctgacaaatactatcccagccagatcatcaaggtgaacatcagcagtgatgagtgccgttgattccacgtaccctttgtgtgatataacaaaaatgagactttacctctttggtatttatctcccaaatcccataaatccagcctagcaaaaagcaaaatgtcataaaawttccaagtgagggacattctacataatacctgacctgcacccct

SEQ ID NO: 195147 - DNA, 537 bp, Homo sapiens
gactggccattctggtgttcaccacgggttatcatgaatttggttagattccaagtgggaatcttaagagtaaattagagcaagagagggatgtgatgccaaggcatttgcatttatttctctgctcattccctgaaagggacctcagctatctggattcttcattgtctctcccaaagcaacattctctacacaaacttcttccaggttgtagtaaccattccctcaccttttccctttgtacctaggacagaaaatagctcctttgtgcatgaggttactgcagtattccttgtattacacctatgaccccttccaattcatgtgcrtaaacagttcatctgtgaatataccctccaaaacctaatctgagtaccttttctttcttgtgattctgatccataccctttgtctccattcattcaataaaaattatgttccagacactattctagacattcacattctagattcttgagaaagagaaagagagagagatttagagagaaagttcctgctagtgaaattgacatttaa

SEQ ID NO: 195148 - DNA, 537 bp, Homo sapiens
gactggccattctggtgttcaccacgggttatcatgaatttggttagattccaagtgggaatcttaagagtaaattagagcaagagagggatgtgatgccaaggcatttgcatttatttctctgctcattccctgaaagggacctcagctatctggattcttcattgtctctcccaaagcaacattctctacacaaacttcttccaggttgtagtaaccattccctcaccttttccctttgtacctaggacagaaaatagctcctttgtgcatgaggttactgcagtattccttgtattacacctatgaccccttccaattcatgtgcgtaaacagttcatytgtgaatataccctccaaaacctaatctgagtaccttttctttcttgtgattctgatccataccctttgtctccattcattcaataaaaattatgttccagacactattctagacattcacattctagattcttgagaaagagaaagagagagagatttagagagaaagttcctgctagtgaaattgacatttaa

SEQ ID NO: 195149 - DNA, 476 bp, Homo sapiens
ttgttttacacagtaccaatatggcttataagtaagartgcttataaataaataagtccaagcaatttaaaagttcatgtgacttaagtaaatctttaataaacaagctggtttaaaattattggtaaaataaaaataggaatatcttcagaattgtcagcatacatttttcctgggtttatatttgtgtctgctagatattttgaggtgttaggttttgacacagaaggttataaaactatgaacccagccaaaacataatgattttgtttgtgtgactttttggacaaataagactaaattattattgttagcttaataaaaacagctgaatcttctgagttatcatattagcaaaatacctatatatttaattttaaggttcttatttaggtgaacatctgatattcacaggctattaaaaatcattaagaaagaaataacttgaaacaatgattagctttgtttaatatttt

SEQ ID NO: 195150 - DNA, 578 bp, Homo sapiens
taattgaatcatggaggcaggtttttcccatgctgttctcatgatagtgaatacatctyacaaaatctgatggttctataagggagaatttccctgcacaagctctctgcctgctgccatccatgtaaaatatgacttgctgctccttgccttctgccatgattatgaggcctccccagccacgtggaactgtaagtccattaaatcctttttcctgtataaattacccagtgttgggtatgtctttctcagcagcatgagaatggactaatacacccaccatgattgtctaaatgaccacctgtttcctgttaaccaactcctcttcttcacccctccctgatacctgttttcctgcatgtagttacatttctgctctataaacctttaattttagtctgctagagagatggatttgagactgatctcccatctccttggctgccaaataaaaccttcttctctggcaatcctagttgtttcaatcactggctttttgtgctatgagcagcaggacccagactgaacccctggtgttttgttaacagtaccttatgttcaattggatgttagtcacc

SEQ ID NO: 195151 - DNA, 578 bp, Homo sapiens
taattgaatcatggaggcaggtttttcccatgctgttctcatgatagtgaatacatcttacaaaatctgatggttctataagggagaatttccctgcacaagctctctgcctgctgccwtccatgtaaaatatgacttgctgctccttgccttctgccatgattatgaggcctccccagccacgtggaactgtaagtccattaaatcctttttcctgtataaattacccagtgttgggtatgtctttctcagcagcatgagaatggactaatacacccaccatgattgtctaaatgaccacctgtttcctgttaaccaactcctcttcttcacccctccctgatacctgttttcctgcatgtagttacatttctgctctataaacctttaattttagtctgctagagagatggatttgagactgatctcccatctccttggctgccaaataaaaccttcttctctggcaatcctagttgtttcaatcactggctttttgtgctatgagcagcaggacccagactgaacccctggtgttttgttaacagtaccttatgttcaattggatgttagtcacc

SEQ ID NO: 195152 - DNA, 494 bp, Homo sapiens
cagccatgggctcatcccagaacttgaagcttctatatcccactgtccatttgtcacttttttggatgtcttttaggcacctcaaattcatggggctcaaacagaaatcttgatcccctgcatgatcatagtcatcttattctttccctggtgtgatggttaattttatgtgtcaacttagctgstccagaaggtgccccaatatttggtgaagcattatctctgggtgtgtctgggagggtgtttctgggtgagatgaacatttgtgtttgtggattgaggaaagttgattgtcttccctaaggtgaatggactttattcagtcgaggcctgaatagaataagaggctgagtagaaataattctctctatatatctgactgtctttgagctgcaacatcaatcctctcttaccttcagacttggactggaacttaccccatgggctcttctggttctcaggctttcagacttggactggaactctaccatcag

SEQ ID NO: 195153 - DNA, 433 bp, Homo sapiens
aatagacgtttctcaaatgaagacatataaatggcaaacagctatatgaaaagggtctcaaaatcattgatcatcagagaaatgcaaatcaaaactacaatgagatcatctcactccagttaaaatggcttttatttaaaagacaggcaataacaagtgctggcaaggatgtggagaaaaggggacacttgtatccagttttgggaatgtaacaactaccatggagaacagtttggaggttcctcraaaaattaaaaatagagctaccaaatgacccagcaatcctattgctaggtgtatacccccaaagaaagaaaatcagtatatcgaagtgatatctgcagcctcgtgtttaatgcagcattattcacaatagctaagatttgtaaacaacctaagtgtccactgacagaagaatgtgtaaagaaaatgt

SEQ ID NO: 195154 - DNA, 542 bp, Homo sapiens
acaattccgagcccctaaatcttgtgttccgacccctcggctgagctccacacacagctggtcttctggctgtgcctgcttccatcactgattcctgcttaaagcacatgttttctgctctgcaagtgcactcagtgcatctgggaatgcacgaaagctcctgcctccagcctctcaagatactaaacacaccttacaaacatgtgtctttccattgtcaaagaatgcagcatggaatgtttgggacatatggtttaaaagaagcctcagtcaacaataccaactaaaaaaccaccttactgaggtgggggctcaataaagcatttctccaggcrgtcgcatgtaggccacacactcatcttccacactggttgaaagcatctagaacctggtgccacgggctcctgaagtcacccgaggctaagcaaagccatcttcctgaaacatttattttatctaagggaagcaaaaataaaaagcttcacctttaccttaagaatataaaatatatttaatataaatgtggcaattaatataacaaa

SEQ ID NO: 195155 - DNA, 411 bp, Homo sapiens
tcagtgcatctgggaatgcacgaaagctcctgcctccagcctctcaagatactaaacacaccttacaaacatgtgtctttccattgtcaaagaatgcagcatggaatgtttgggacatatggtttaaaagaagcctcagtcaacaataccaactaaaaaaccaccttactgaggtgggggctcaataaagcatttctccaggcggtcgcatgtaggccacacactcatcttccacactggttgaaagcatctagaacctggtgccacgggctcctgaagtcacccraggctaagcaaagccatcttcctgaaacatttattttatctaagggaagcaaaaataaaaagcttcacctttaccttaagaatataaaatatatttaatataaatgtggcaattaatataacaaa

SEQ ID NO: 195156 - DNA, 526 bp, Homo sapiens
tctggacagaggttgggaagataaatgcaagagggtttgggatgaggggtgaagggcaagggcacaaaaatgggggctgtggtggaggccagtttgaaaaggatgccagcgatgtggtatgaagctaagcctgccgcatgaactggggtactcctgactcaaagtttatcttagaatccccatttgacctctgattccaagacttgagatgttttagattggagagcctcaaaacatgatgtctctgaaacctggtagaaagatgttgctttctgagtggcaggtggcaaatgaaacacaaaataggcccatgggttgaatttctcattctggcttaggaatttatgacacctgaagaatatgaaggacatcaatatgggggctgaaaagggtgaggtcayagtctgggaagtggtaattggaggaacagcagcttcctggatttctggattgtcatggattcccaataagagatggagggctgaggactgaccctgtttggagcaccgctaaccagtcttgcaat

SEQ ID NO: 195157 - DNA, 622 bp, Homo sapiens
agacatacgggataattggaagggagataaaagacttgcaataagcttctcaaaaggagaggcgacaatgattggaaaagaagtaatattggaagatataatgacttagaattttcctaaactgacaaaagacatcaaaccacaaatatagaaagaacttgaacttgaaccaggataaatgcaaagaaaattacgtttaacacatcatatcacgtgcaccattttattttcaaatggtagcaatacgagtgatagctgacctgaaaaacagaaacaatgtgagccagraaaaaatacgatgatatcctcaaagggctgaaaaaaaaccctgctgatctggagtttatgtcagtgaaaatacagataaaaatgtctttaaatattaagaaccttcaagaaaattctgtacttaaattatttactttaactcatacaatatgtgaactcagtagttttcacatttttttcttcattccttgcataatttataagaatgtaatttatgagtatttaagactcttaaatcttacagatgttgtgaacatattaaaacaggccaaataattaataatcttatttgaaacaattaaaattgatcacttccatattagtaagctttatt

SEQ ID NO: 195158 - DNA, 600 bp, Homo sapiens
gtgtaagtgtgtgcttctgctttctggatgtatctctcaaaattgctctgtctgtttattcagctcctggatctacyttctcttttctttgaattggacaccattcatgtcattgctcactcagaacttcagctgttctcatgatcacatgctttcttccctgtttatgtcctatccactcaagaacactgcttgtgagggtcacaatgaccttcctttgtaagccttttcccacaattaaattgtctttacacctggtccttctcacttgcataatttccatttgaagcacatcctagctacactgaccaaggcaggcataaggcagaagaatctaggaagtgtctgtgtgggaaaatgcaggaaaagttctttgcttggctctttgaaggcatagccctgtccttgaggatgcaactccagcactcccaaaaggcagtgtccagaggaaggcagatgacgatgggttaagagcatctattgaaggtaatgaggctgttcttctgtgagctagcaggaaactgcaatacctacaatgtacaggacaatcttttttttttgagacagaatctcactcatccaggctggagtgcagtggca

SEQ ID NO: 195159 - DNA, 549 bp, Homo sapiens
agaaggataatacaggaaaaaaggattgagtttttctcagccaagaacacatacattgttctttggcattactaaaagctcaaaatatagctgagttcctgataggttcctgataggtttctggcagtttcctggccttgcaacgtggctcaatatgtatgccaggggagagaactcgtgctttctcttcacatctttagggaacagtaccttagttytggaaggaaactgaagtagtttcctaggtctaaaccagagtccaggctccacctgaaagcattaagaggtttcttcctaaatagttttttggcttttttgttttttggggttttttttttttttgaaacagggtcctgctctgtcacgcaggcagtgatgcaatcttggctcaccttaacctcctgggctcaagccaacctcctgagctcaagcgatcctcccacctcagccccaccaagaaactgggactacaggcgcatgccaccacgcccagctaactttttttgtacagatggggttccacatgttgcctcagctgcttcctagttt

SEQ ID NO: 195160 - DNA, 602 bp, Homo sapiens
cattgctggagtggggtctggagctgatatagcatatggccacctgaaatcatcaagcaaaaatagcatgggcatttcaagagcaagcaaaatatctgcagttcagcagaatgactcagtaccttcctttttctctatttcaggataaggtaaaggagatgagttttttccaatrttaacttaaatggcttggttagttaagctttgcagcctcctttatgtagcgtgccaagtgttaacctgtttaaagcttctcttatttatgtttcataataaaggactattaggagacaaattagtagtaagaaacaagcccttccatttaagagtctttatcaaatttaaaaaactaccttccacaaaaaagcatacttaggaaagattaaatgtttggattgccttattggtgagaataaaaaatatttttgatcagctttccatttagatatacttaaattttcaattggatagaagcttaagacagtgcatgggctgggtgcggtggctcacgcctgtaatcccagccctttgagaggccgaggtggatggatcatctgaggtcaggagttggagagcagtctggccaacgtggcaaaattcca

SEQ ID NO: 195161 - DNA, 362 bp, Homo sapiens
aaaccagtgaaaataattcatattcaattgttgattragtatggtcttgctttgtttcacttcccacgggtgaaatctaggatctcttatcaccccacagcctcatatctcccaatcagctggtgttggttaatgccatctccttcagagagaaccagaaaaatgcacttcagaaagaccaaacaaaagcaatggctttcacgttggatgaggtggtctcgtgtagtcttatggcttaatttgtttatctcttaaaagtaatcctcaaaatttttgtccttaagaactgctaaattatttctggccttagggaagcaaattaatttccaagtggctatcctagctacatttgcaataaaaag

SEQ ID NO: 195162 - DNA, 581 bp, Homo sapiens
tatcctagctacatttgcaataaaaagcagattttgatttataaaatatttatttttttgttgaacctttctttaaaattttccactgttttttaccctgtataaaaatagaaattctattttagcaatgcagttgtacaattgaaaaatgctatgaaatatagacyttgaaagtatttaaaataagtcttggttaagaccacttaaactattatcaagccacttacctcttgctaactggaaataaggtcaggcaatagaaaataacagcaagagacaactgaggaactaacaggcaaatcacttcttttaaaattatactttaagttctgggatacatgtgcagaatgtgcaggtttgctacctaggtatacatgtgccatggtggtttgctgcaccaggcaggtcacttctaaaatgagtttgatctccctacaaagccaagctgaactggtgaacaaaatgcacagtcaaggtggaaggttctaggcttactgcccttctacttagcaccctcagccttcccaacttttctaagtgtcaaaaatgtcccaaatatcaggccacaaccaaaataagac

SEQ ID NO: 195163 - DNA, 525 bp, Homo sapiens
ttctcttctgaaattcaaaccattctgacatttttcctggacttgcttttctttccttttttttgagacagagtctcactctgttgcccaggctggagtgcagtggtgcaatcttagcttattgcaacctctgcctcaaaggttcaagtgattcttgtgactcagcctcccaagtagctggaattacagatgcctgccaccacgcctggctagtttttgtatttttaatagggatggtgcttcaccatgttggccaggctggtcttgaactccagacctcaggtgatccacctgcctcggcctcccaaagttttgggattrcagacatgagccactgcgcctggccttggacttgcttttcaatggtaattggacagcgtgggttgtaattttgtctttacattcattattttattcctcgagttcctctgccttctgcctctaaactctggttcacttcacccctctcagtaccttttcatactcttcatcttttatcctccttctgccatcctccactcttcc

SEQ ID NO: 195164 - DNA, 434 bp, Homo sapiens
ctccaacctgggcagaatccagggactttggcacatgttgcagctgtagcrgcatgctgtcagaggtccccatccccaagggcaccccatctccctctgagtagctctagccccagcagactgcaggtccaagagagagtggggccagtttcccagcaggactggggtgcttctgttctgcaggctctcatgcctgacaggccctcccagggacactgcctggccactcccacagaagccagtgcacaacacagcctccactgctcagtatgagtgttctaccagaggctctacctgagtacttccctgtggccaggaagcacttcacatcccccagcataactgttgcctgattccaagagtccagaagacagagcttcagtccagtcctggcactccagggctgcagtgtgcagctcaggagtgccaagcag

SEQ ID NO: 195165 - DNA, 434 bp, Homo sapiens
ctccaacctgggcagaatccagggactttggcacatgttgcagctgtagcggcatgctgtcagaggtccccatccccaagggcaccccatctccctctgagtagctctagccccagcagactgcaggtccaagagagagtggggccagtttcycagcaggactggggtgcttctgttctgcaggctctcatgcctgacaggccctcccagggacactgcctggccactcccacagaagccagtgcacaacacagcctccactgctcagtatgagtgttctaccagaggctctacctgagtacttccctgtggccaggaagcacttcacatcccccagcataactgttgcctgattccaagagtccagaagacagagcttcagtccagtcctggcactccagggctgcagtgtgcagctcaggagtgccaagcag

SEQ ID NO: 195166 - DNA, 434 bp, Homo sapiens
ctccaacctgggcagaatccagggactttggcacatgttgcagctgtagcggcatgctgtcagaggtccccatccccaagggcaccccatctccctctgagtagctctagccccagcagactgcaggtccaagagagagtggggccagtttcccagcaggactggggtgcttctgttctgcaggctctcatgcctgacaggccctcccagggacrctgcctggccactcccacagaagccagtgcacaacacagcctccactgctcagtatgagtgttctaccagaggctctacctgagtacttccctgtggccaggaagcacttcacatcccccagcataactgttgcctgattccaagagtccagaagacagagcttcagtccagtcctggcactccagggctgcagtgtgcagctcaggagtgccaagcag

SEQ ID NO: 195167 - DNA, 434 bp, Homo sapiens
ctccaacctgggcagaatccagggactttggcacatgttgcagctgtagcggcatgctgtcagaggtccccatccccaagggcaccccatctccctctgagtagctctagccccagcagactgcaggtccaagagagagtggggccagtttcccagcaggactggggtgcttctgttctgcaggctctcatgcctgacaggccctcccagggacactgcctggccactcccacagaagccagtgcacaacacagcctccactgctcagtatgagtgytctaccagaggctctacctgagtacttccctgtggccaggaagcacttcacatcccccagcataactgttgcctgattccaagagtccagaagacagagcttcagtccagtcctggcactccagggctgcagtgtgcagctcaggagtgccaagcag

SEQ ID NO: 195168 - DNA, 436 bp, Homo sapiens
actcaactggaggaggacacccccactctcagaacactgagaggggtgagactcatgggtttgcagrctggcatgggaacaggatgtgcctccctacataagaccagaccaggaagggtgtggcctgtctcctagccatggcatctacctgagggagccccacagagggagccctgttaacccaataaaagaaacacagacagtgccagtgtttggagggggctctcctgaggcccaggagtgaacctagtgaggggatcatctctctgcatcccccccacagagcatggctacaaacgtgtggaaatacaaaatagccatgcatctgagtaagggcctatctgctagccattactcttaagcaacatccactggatcacagcccaaatcacataaaaaattattcttccaataaacattcctatgacactcaggg

SEQ ID NO: 195169 - DNA, 436 bp, Homo sapiens
actcaactggaggaggacacccccactctcagaacactgagaggggtgagactcatgggtttgcaggctggcatgggaacaggatgtgcctccctacataagaccagaccaggaagggtgtggcctgtctcctagccatggcatctacctgagggagccccacagagggagccctgttaacccaataaaagaaacacagacagtgccagtgtttggagggggctctcctgaggcccaggagtgaacctagtgaggggatcatctctctgcatccccmccacagagcatggctacaaacgtgtggaaatacaaaatagccatgcatctgagtaagggcctatctgctagccattactcttaagcaacatccactggatcacagcccaaatcacataaaaaattattcttccaataaacattcctatgacactcaggg

SEQ ID NO: 195170 - DNA, 411 bp, Homo sapiens
ggaactgaatgaaattgagatgcaaaaatccatacagaagatcaataaaaccaagagttggttttttgaaagaatacataagattgctagacaactagccagattaacacaatgaagactgaagtaagtacaaccagaaatgacaaagatgacattacaactgatcctacagaaatacaaaagatcctcaggggctattgtgaatgagtcyatgcacacaaattagaaaatctagaggaaaccaataaattcctggaaacacacaacctttcaagactgaatcagaaagaaagtgaaaacttgaacagaccaataacaagttctgaaattgaatcagtaataaaaaactaccaactaaaaatagtcgtgggccagatagattcacaaccaaattctaccagatgtacaaag

SEQ ID NO: 195171 - DNA, 331 bp, Homo sapiens
ctctccttagagcccttcaatgcctttgcagtcatcttagaaccaaagcaaactcttcatcctactgtccaaggccctctgtggcctgcctrctgcccctccccaacccacctttcactgcgcttatgccctctacatccttgcaggaatccgaggagactgtattctctcactgtgggccctggatcatgctgttgcacccactggaaccctctctccttctcctcccattcctcctactcctactcattgttccacatctgagccacagcatcccttcctccaggaagtcttcccaaacttcgggaatagtgtagaaacccctgcttca

SEQ ID NO: 195172 - DNA, 447 bp, Homo sapiens
agtgcagcctagaggacaatgagaaaatgaaattagttcccggtacattttctaggaatattatatttttagatttatttattttttataatttaaagcttcattttttttcagccttggaggtaatcatcaaataactctaacaaaaagggaaaagttcccttggcccagtatccttgtcactaataccctaaaactatctcttctcgttggtggacatttctgtcctcagtggcctgtgagtggcctgtttccaacccccaagcagacacattcatggggctcactatttctcaaatcaccccagatttctgaactgaaatagagcaaaagtaaatattacaatattagacagtctatttgaggcactacagcctttgctttctaaaccatctgtaattcaatacratgttaaatttttgaggtttaacacatcatttttaaccc

SEQ ID NO: 195173 - DNA, 574 bp, Homo sapiens
ttgcaatagcatgtatcaattctgtctttaagaaaaaaacaatatgttctgtgtatgtgaaacatataagaacacatgaaataagtataagctaatgggaagtctaataagattaggaaactattaaaagtttatcttattgtggtcatttcatttacaattctatcaatcattataaataagatataaaataaaagtaaaacctgagaataaaaactgggagccaccaggatccagtctatgcaggaaaccatattcaaagaaaacacaaatcccatttcattcacttaggcttccttgaagagacctccctaaggatttcacaaagcatgccaacatcgaaagtacttcctacattcttttaaaatatttcttcccatccccgaactttcactcacatcagcaactaaataccttycgtctctcttcaaatgcagtttcctcacaacaattatgcctccctttcccttttgtctcttactttcttgtacatgttcacattatccccattcctaaagcacccagtgccatgtgacctacccaccccaccccaccccaccacgcaaactgcatg

SEQ ID NO: 195174 - DNA, 645 bp, Homo sapiens
aaacctgtcaaattaatcctaatacattaaacacacgctataaataataagtgctatgaaggaaaaaaatcggtttctagaaagagaataataggatgggaatcacttatttagattgtaatgtcaatcgaggcatttctaaggaaataaatctaagtcaggatctaaaatataagaatggagctgcagtatatgagcaggagaggaagggagagagcattctagaaataaagaacagcaagaagagtggcataggatgaggaaaaccagggactgtgtagaggctataggccrtcagaaagaatttgaattttatcctaaatgggaagggaagctagtgaaatattttaagcaagagatggcttattcttatcttactttttaaaaaataacactctagctgctctagaaaacaaatcagagatggacaagagtggaaacaaaacaaacaaaagacaggttatttgaacagactaggccagaaataatagtgatgtggaccacggagtgccatcagagatggagaaaatgtactccagataaatttaggaggtagaatcttcaggctacactgacggattttataaggaaagggaagaaaatgaaaaaaacaagataacatctggacttatggctttggtaatt

SEQ ID NO: 195175 - DNA, 573 bp, Homo sapiens
gctgtgcttctaacagctggacgtctggaagcctgcagaagctgacacacatatgggtgatatagccyaacagttaggggcttctaagccagggagtgctggcttgagatgaaaacactgtggcacaggtgagcaaggtgtgtgtgtgtgttgggtggtagggaaggaacactgtggcacaggtgagcaaagtgtgtgtgtgtcgggtggtagggaaggcttcttgaaagagcagggtcaggacgtacgcatttggattaagaagtgagacgggtgccaactgaaaaggagctgtagtcacagaagtgcagcggtggccataacaggtatgcttacggttgtggttaagtcagagggaatcaggtccctaagggcctgtggttgactggagtgaaagacatttggaggcataatgcagtttgggagcagtttagattctgcagaaagttttctggaagtagactatgggattagaatgaatgggtcagaaaggaattcctagtacagcaatttcagtccgagccttgctggatgaataggagaatcacaggggccctgctaaactgagcagag

SEQ ID NO: 195176 - DNA, 573 bp, Homo sapiens
gctgtgcttctaacagctggacgtctggaagcctgcagaagctgacacacatatgggtgatatagcctaacagttaggggcttctaagccagggagtgctggcttgagatgaaaacactgtggcacaggtgagcaaggtgtgtgtgtgtgttgggtggtagggaaggaacactstggcacaggtgagcaaagtgtgtgtgtgtcgggtggtagggaaggcttcttgaaagagcagggtcaggacgtacgcatttggattaagaagtgagacgggtgccaactgaaaaggagctgtagtcacagaagtgcagcggtggccataacaggtatgcttacggttgtggttaagtcagagggaatcaggtccctaagggcctgtggttgactggagtgaaagacatttggaggcataatgcagtttgggagcagtttagattctgcagaaagttttctggaagtagactatgggattagaatgaatgggtcagaaaggaattcctagtacagcaatttcagtccgagccttgctggatgaataggagaatcacaggggccctgctaaactgagcagag

SEQ ID NO: 195177 - DNA, 573 bp, Homo sapiens
gctgtgcttctaacagctggacgtctggaagcctgcagaagctgacacacatatgggtgatatagcctaacagttaggggcttctaagccagggagtgctggcttgagatgaaaacactgtggcacaggtgagcaaggtgtgtgtgtgtgttgggtggtagggaaggaacactgtggcacaggtgagcaaagtgtgtgtgtgtcgggtggtagggaaggcttcttgaaagagcagggtcaggacgtacgcatttggattaagaagtgagacgggtgccaactgaraaggagctgtagtcacagaagtgcagcggtggccataacaggtatgcttacggttgtggttaagtcagagggaatcaggtccctaagggcctgtggttgactggagtgaaagacatttggaggcataatgcagtttgggagcagtttagattctgcagaaagttttctggaagtagactatgggattagaatgaatgggtcagaaaggaattcctagtacagcaatttcagtccgagccttgctggatgaataggagaatcacaggggccctgctaaactgagcagag

SEQ ID NO: 195178 - DNA, 573 bp, Homo sapiens
gctgtgcttctaacagctggacgtctggaagcctgcagaagctgacacacatatgggtgatatagcctaacagttaggggcttctaagccagggagtgctggcttgagatgaaaacactgtggcacaggtgagcaaggtgtgtgtgtgtgttgggtggtagggaaggaacactgtggcacaggtgagcaaagtgtgtgtgtgtcgggtggtagggaaggcttcttgaaagagcagggtcaggacgtacgcatttggattaagaagtgagacgggtgccaactgaaaaggagctgtagtcacagaagtgcagcggtggccataacaggtatgcttacggttgtggttaagtcagagggaatcaggtccctaagggcctgtggttgactggagtgaaagacatttggagrcataatgcagtttgggagcagtttagattctgcagaaagttttctggaagtagactatgggattagaatgaatgggtcagaaaggaattcctagtacagcaatttcagtccgagccttgctggatgaataggagaatcacaggggccctgctaaactgagcagag

SEQ ID NO: 195179 - DNA, 578 bp, Homo sapiens
aagcttaattatgaaatttagatgagaaacagacaacagaaaagggaaaatgtggctaatggtatgattttgttcccaggtaagtagactgtattaaaggtagaaaaagtgatgaagttgaaccactcacactgagaattataaaaacatatgatatttaatgtagaggtcgtgtgtttgactcatgtgggcttgtctgtgttttgtctcttagatagaaaagcagctgaattcggggacgtttcatgagtggacaagctcttctaacatgatggaaagagaagttgaagtacacctccccmgattcaaacttgaaactaagtatgagctaaattccctgttaaaatctctaggggtgacagatctcttcaaccaggtcaaagctgatctttctggaatgtcaccaaccaagggcctatatttatcaaaagccatccacaagtcatacctggatgtcagcgaagagggcacggaggcagcagcagccactggggacagcatcgctgtaaaaagcctaccaatgagagctcagttcaaggcgaaccaccccttccttttctttataaggcacactcata

SEQ ID NO: 195180 - DNA, 578 bp, Homo sapiens
aagcttaattatgaaatttagatgagaaacagacaacagaaaagggaaaatgtggctaatggtatgattttgttcccaggtaagtagactgtattaaaggtagaaaaagtgatgaagttgaaccactcacactgagaattataaaaacatatgatatttaatgtagaggtcgtgtgtttgactcatgtgggcttgtctgtgttttgtctcttagatagaaaagcagctgaattcggggacgtttcatgagtggacaagctcttctaacatgatggaaagagaagttgaagtacacctcccccgattcaaacttgaaaytaagtatgagctaaattccctgttaaaatctctaggggtgacagatctcttcaaccaggtcaaagctgatctttctggaatgtcaccaaccaagggcctatatttatcaaaagccatccacaagtcatacctggatgtcagcgaagagggcacggaggcagcagcagccactggggacagcatcgctgtaaaaagcctaccaatgagagctcagttcaaggcgaaccaccccttccttttctttataaggcacactcata

SEQ ID NO: 195181 - DNA, 578 bp, Homo sapiens
aagcttaattatgaaatttagatgagaaacagacaacagaaaagggaaaatgtggctaatggtatgattttgttcccaggtaagtagactgtattaaaggtagaaaaagtgatgaagttgaaccactcacactgagaattataaaaacatatgatatttaatgtagaggtcgtgtgtttgactcatgtgggcttgtctgtgttttgtctcttagatagaaaagcagctgaattcggggacgtttcatgagtggacaagctcttctaacatgatggaaagagaagttgaagtacacctcccccgattcaaacttgaaactaagtatgagctaaattccctgttaaaayctctaggggtgacagatctcttcaaccaggtcaaagctgatctttctggaatgtcaccaaccaagggcctatatttatcaaaagccatccacaagtcatacctggatgtcagcgaagagggcacggaggcagcagcagccactggggacagcatcgctgtaaaaagcctaccaatgagagctcagttcaaggcgaaccaccccttccttttctttataaggcacactcata

SEQ ID NO: 195182 - DNA, 588 bp, Homo sapiens
ttcatgaagcagtgtgccctgatacttaaactcatgaaatacaataactgaactccagatactatctgtaacttcaagtgatgttctgagaattttttcccttctgttctcaggcagtcggcataaaaatgggttctctcagcacagctaacgttgaattttgccttgatgtgttcaaagagctgaacagtaacaacataggagataacatcttcttttcttcgctgagtctgctttatgctctaagcatggtcctccttggtgccaggggagagactgmagagcaattggagaaggtatggaattcctcagaggtttgttcagaacccagaagtctttcatgctcccgctctgggtcagcaaaattaattctatctttataccaataaaattgccatcttgagagagaaaaaacacattgaataaatcatatttcttaaaaattgataatggtttgattaatggagtatgctgtaatgcaaacaatgtaatacaagcaacgtgtggtctcttttttactatcagtggtatcacaaataaatctctgcagtttacttttagagtcccttcattcagtgatttaaatgt

SEQ ID NO: 195183 - DNA, 588 bp, Homo sapiens
ttcatgaagcagtgtgccctgatacttaaactcatgaaatacaataactgaactccagatactatctgtaacttcaagtgatgttctgagaattttttcccttctgttctcaggcagtcggcataaaaatgggttctctcagcacagctaacgttgaattttgccttgatgtgttcaaagagctgaacagtaacaacataggagataacatcttcttttcttcgctgagtctgctttatgctctaagcatggtcctccttggtgccaggggagagactgaagagcaattggagaaggtatggaattcctcagaggtttgttcagaacccagaagtctttcatgckcccgctctgggtcagcaaaattaattctatctttataccaataaaattgccatcttgagagagaaaaaacacattgaataaatcatatttcttaaaaattgataatggtttgattaatggagtatgctgtaatgcaaacaatgtaatacaagcaacgtgtggtctcttttttactatcagtggtatcacaaataaatctctgcagtttacttttagagtcccttcattcagtgatttaaatgt

SEQ ID NO: 195184 - DNA, 591 bp, Homo sapiens
gtgtcgttcatctcaaaggcttagttgtgggactgaaggagaagctatagagaatcagaattagaactcagytctctaaactgcaaatttaaccccacccacaaatgtactgggtgttactacagcaatagcatggaggacaggacattgactctgaagctggggcttcctaggctcaaatcttggctctgcaactaacactgatctaggcaaaccactgacattgtccaattctctgtcttctcatcttggactgaaaatagcaataagacatgccacgtagagttatgggaccaaattagtgagatatgtacaacggtgcctggcatgaagttataatactgcaataaatgttagctcttgtttctgttgtcatcctgggcttccacaaggacagattatatcttttattcatcccgtgttactgtctcatccacaaggaggagctcaatacacactggttgacaaaaggattataactttaatgtaaaagctgaataaaatttcaatgaataatgggcaaaactcgttaccttatttaatattaggaaacttcattttggagatgtcagaagattcttgatcatccct

SEQ ID NO: 195185 - DNA, 371 bp, Homo sapiens
tttaacaatgatggtcaaagattctccaagaccgtgctggggatttcttggcatggtcacgtcatggttattgtgratgactatgactcatgtccaaattactggacaattccatcacccagttaagcacctaatggtgcctgtcactgtgacacctaaattgtcagagatgctgtctacacataaccaaaataaaccatgaataggtattttatccccaccttcaaaatgttctagttctgccaaactgattactagcatgtaaaatgctcctctgtgatttatttcatgtagtttataatgtacctttcccgttataaatatgagcatctggaagcccaaatgacttttctagaatgcaaatctgacca

SEQ ID NO: 195186 - DNA, 371 bp, Homo sapiens
tttaacaatgatggtcaaagattctccaagaccgtgctggggatttcttggcatggtcacgtcatggttattgtggrtgactatgactcatgtccaaattactggacaattccatcacccagttaagcacctaatggtgcctgtcactgtgacacctaaattgtcagagatgctgtctacacataaccaaaataaaccatgaataggtattttatccccaccttcaaaatgttctagttctgccaaactgattactagcatgtaaaatgctcctctgtgatttatttcatgtagtttataatgtacctttcccgttataaatatgagcatctggaagcccaaatgacttttctagaatgcaaatctgacca

SEQ ID NO: 195187 - DNA, 371 bp, Homo sapiens
tttaacaatgatggtcaaagattctccaagaccgtgctggggatttcttggcatggtcacgtcatggttattgtggatgactatgactcatgtccaaattactggacaattccatcacccagttaagcacctaatggtgcctgtcactgtgacacctaaattgtcagagatgctgtctacacataaccaaaataaaccatgaataggtattttatccccaycttcaaaatgttctagttctgccaaactgattactagcatgtaaaatgctcctctgtgatttatttcatgtagtttataatgtacctttcccgttataaatatgagcatctggaagcccaaatgacttttctagaatgcaaatctgacca

SEQ ID NO: 195188 - DNA, 637 bp, Homo sapiens
caggattttctgaggttttagtccccagaaagttctccccattaagtcctcacttttgccattctattctgctcctgaaaatttctgagaaaaaaaaaagatgacagatctagaagaagtagaaggaaaaaactagactgagcagtaagtayacagacactgtgccactgcccaaatggtgacttcttttccctttgtcttttaaatttacatcaagttaccctggaggagcctctgagcagaaacacctcattaaagttaccttttgtgtgcactatgccctttccatgacccactggtgccctgtggctaagaatctggtttgatgctgctgactgcctgtgggaaaacacagtgcttcctgtccattagaggtgtgggtatgagtgctgtcacagggaagcagcaattttcctgagtcactataatatcataggtaccaaacatggatttgggggctcagtgtttgtccagtaagaaggaaaaaaaaaatttattaatcaactcaaaaactttaggtgtcagaagaagtaagaacaatagagataaaaaacaaatactatccatgaacaatgaggaaaaaaataaagacttgtcttttgttttttgaaatccaggtcaaggagaccttctctcc

SEQ ID NO: 195189 - DNA, 637 bp, Homo sapiens
caggattttctgaggttttagtccccagaaagttctccccattaagtcctcacttttgccattctattctgctcctgaaaatttctgagaaaaaaaaaagatgacagatctagaagaagtagaaggaaaaaactagactgagcagtaagtacacagacactgtgccactgcccaaatggtgacttcttttccctttgtcttttaaatttacatcaagttaccctggaggagcctctgagcagaaacacctcattaaagttaccttttgtgtgcactatgccctttccatgacccactggtgccctgtgrctaagaatctggtttgatgctgctgactgcctgtgggaaaacacagtgcttcctgtccattagaggtgtgggtatgagtgctgtcacagggaagcagcaattttcctgagtcactataatatcataggtaccaaacatggatttgggggctcagtgtttgtccagtaagaaggaaaaaaaaaatttattaatcaactcaaaaactttaggtgtcagaagaagtaagaacaatagagataaaaaacaaatactatccatgaacaatgaggaaaaaaataaagacttgtcttttgttttttgaaatccaggtcaaggagaccttctctcc

SEQ ID NO: 195190 - DNA, 324 bp, Homo sapiens
ctttggtcaccatccttctattctctatctccataagttcaattgttttgacttttagattccacaaataattgagaayatgcaatgtttgtctttctgtgcctggcttatttcactgaacatagtaacctcctgttctattcatgttgctgcaagtgacagaatctcatccttttttatagctgaatggtactccattgtgtgtaagtatcacattttctttatctatttatctgttgatgaatgcttaggtagcttccaaatcttggctactgtgaacagtactgcaacaaacatgagagtggagatatctcttagatacat

SEQ ID NO: 195191 - DNA, 324 bp, Homo sapiens
ctttggtcaccatccttctattctctatctccataagttcaattgttttgacttttagattccacaaataattgagaacatgcaatgtttgtctttctgtgcctggcttatttcactgaacatagtaacctcctgttctattcatgttgctgcaagtgacagaatctcatccttttttatagctgaatggtactccattgtgtgtaartatcacattttctttatctatttatctgttgatgaatgcttaggtagcttccaaatcttggctactgtgaacagtactgcaacaaacatgagagtggagatatctcttagatacat

SEQ ID NO: 195192 - DNA, 324 bp, Homo sapiens
ctttggtcaccatccttctattctctatctccataagttcaattgttttgacttttagattccacaaataattgagaacatgcaatgtttgtctttctgtgcctggcttatttcactgaacatagtaacctcctgttctattcatgttgctgcaagtgacagaatctcatccttttttatagctgaatggtactccattgtgtgtaagtatcacattttctttatcyatttatctgttgatgaatgcttaggtagcttccaaatcttggctactgtgaacagtactgcaacaaacatgagagtggagatatctcttagatacat

SEQ ID NO: 195193 - DNA, 601 bp, Homo sapiens
cgggaaaaaatggaagttattagtatcayttaatgtgattcaaattaatcatcacctcatttcaccaagaacaaaactaggttctccagttaacatgaaatggtctgtgcaattttattattttccatataaatattaaatgaaatctgtaatcagttatttaacattcgttttagatgtctcatagtattgttatttatatagtcatgtttatcattttctataatgaaatctggcatctatctgccatataaaacaaaatgaaaatcagcataagaggcttccacttaagacaaatggaagttcagaaatttatcatttgagaataaaaggcttccacttaaataaatggaagaaaagctcagaaatatagcacagtgcatatgtctgaatataagatgaccctgaacataaggtgcgtctgcatggtccaagtgaaaagatccaagaagttttttgacctacatgaatatatatgaacatttagatatacataaaatggatgtcatttaatatttattaatttcattaactcatttaaaataaaatacttaattagaaacaactttcttccatctccgtatttcacaaaacaatttta

SEQ ID NO: 195194 - DNA, 601 bp, Homo sapiens
cgggaaaaaatggaagttattagtatcacttaatgtgattcaaattaatcatcacctcatttcaccaagaacaaaactaggttctccagttaacatgaaatggtctgtgcaattttattattttccatataaatattaaatgaaatctgtaatcagttatttaacattcgttttagatgtctcatagtattgttatttatatagtcatgtttatcattttctataatgaaatctggcatctatctgccatataaaacaaaatgaaaatcagcataagaggcttccacttaagacaaatggaagttcagaaatttatcatttgagaataaaaggcttccacttaaataaatggaagaaaagctcagaaatatagcacagtgcatatgtctgaatataagatgaccctraacataaggtgcgtctgcatggtccaagtgaaaagatccaagaagttttttgacctacatgaatatatatgaacatttagatatacataaaatggatgtcatttaatatttattaatttcattaactcatttaaaataaaatacttaattagaaacaactttcttccatctccgtatttcacaaaacaatttta

SEQ ID NO: 195195 - DNA, 646 bp, Homo sapiens
aggagactatgtccaaggcttttccccatccttctattgtcccatctaaccattgctcatgtggtcacagctgcataaggtccacagcttaccttaatcatggcaacaaatggcatgactttcttcatgtatttcttcagttctggcatactgcctagttcactagcaatgactttgttgtcaggcagttttccgttattggcctaagaaaaggaaggagggagagtaatgtagaaaaaaaagtctcaagaataaggcagaacagtagatgtgaccaggcatagaatggtggcctctatcaatccttagagaacagcagaaaagtgtccagccctagcatcayggggaagtgaaagctcaatgaacaatgcagaaggaactctcctattctctataaattaacaacacatactttttagtttagaagagaaaaagaagtgatttgtgttgaatatttctcctgttcagaaactaaatggtctcataaaaacttgttttcaaatttctaaaagcattttattagtcatattaaaataaaaaattacacaactatcatacaagtttatataatgtctgcttttggacacttggaagaaactgttaccacaattgtgaaaagaatccctagctactgacctgttaaaaa

SEQ ID NO: 195196 - DNA, 512 bp, Homo sapiens
cttactttgttctttttgtagttccttgagatgtaaagttaggttgtttatttgagaactgtctttcttaatgtaagcatttatcataataaactatcctgtgagtacagcttttgctgcatcccataagttttggtgtgttgtgtttttatttttgtttgtcttcagatatatttaaaattcaattttgattttctatttgacccaaagattactcgagagtatattgtttagtttccatgtttttgtaagtgttcttattctctcattgttaatgatttctagtttcattccactctgatcagaaaagatactcagtattctttcaatattaaatttgttaagacttgttttgtaatctaatgtgacctagcttagagaatgtttcacgtgcacctaagaagaatgtatatttttctgctgctgggttgaaagtttggtgtatgtctgttgggtccgtttggcctatagygttgttcaagtcttccttttccttatcaattttctgtgta

SEQ ID NO: 195197 - DNA, 437 bp, Homo sapiens
acataatgttgattaatacacagtcctggccaccaaggagcttatagtctagtgaggtaacaagcaagaaaagcttcttttgtcctaatttctactcaactgtgattgcaaacacaaatttagatgcatgakatgctctgagacctgtgtggataagttgcttagagaaacacctcttggttcataaaaaatgcttgtttgacaagcttcttttgtaactagtatctagttttgcagaatataagatccatctctacctgcttccttagacttgaatttccagaacttgccaggtttcctggacacctaacctgggactgggaattagttcccacctcgttctttccacagctgagcattatccttgccttctcctatactcaggccatagcagatccacagatattctcttttccttgagaataggccagaataat

SEQ ID NO: 195198 - DNA, 504 bp, Homo sapiens
tcctcttttgtaatcactattatgtgaggcttcctcaacagtaagcccacctccttttagtgaggaaaagtgcatatgagcatccctgctgtaggttcttatcttgaagataacttttctcttccatacccaaattcctagtgttatacagtccraggatgaggtatgggaacccaaacatgaagttgtcagtgtgtcttacaggaaaagtactaagtgaatgattctgtctattctgtggaggccaagtgatgtaatctttagaaaaaatagacatgatgtgatattatttgggggattttgtaaaccttaaggatatatggtagcgatagtggacaatgtttctcagagacatctttcctcagtactagttttgagagctctcctacagaaagatgtgggtccacaggccaaggatacactctaccccagtcctaactctattgtcagatcatgaattatccatgcaggaatatgtctttcaagtacattgttttggattcc

SEQ ID NO: 195199 - DNA, 517 bp, Homo sapiens
aacatattgctcattcctaaaagctaatattgtgtcatggtgaatatgggtctagggtaaagaggaataaattggaaacttgtaataactctagaaccatagtcttcagagcattgtcccctgaccagtacaagaagtattacttgggaacttgctggaaatgcacttcctcaggaccaagttcagaccttctcaatcagaaacagggggtagaaccccatattttctgtttaacaagccctccacttgatcctaaagtttgagaaccactgttctagaataaagttgaagtcaattccagaaagctaaaaagagatcatcatagatatgtggcagcatttgtatatcctcaaatacaaagaagtatacacaccatgcaatgtctacaactgtgttttttcctcatagctccttgttcattcttgggaggcattaatatatatgttccattaaaargggtgaacttttcaaactgagaaagactgttctttggtgaaaaatacacttacctgaattc

SEQ ID NO: 195200 - DNA, 482 bp, Homo sapiens
ctagggcaatgtgagaagaaatgtgggattagatctcccacaaagagtccccactggggcactgccaagtggatctgtgagaagaggccactgtcctccagatcccagaatagtagatccactgacagcttgcatcatgcacctggaaaagcttcaggcactgaatgccagccagtgaaagcagctgaggggattktacccggcagagtcacaggggcagagctgcccaaggccttaggagcccaccccttgcatcagtgtggcctggacatgagtcatggagtcaaaggagattattttaagctttaagacgtaatgactgccttgaagggtttcagacttgcatagggcctatactcccttttttggctgatttctaccttttaaaatgagtttatttacccactgcctgtacccccagtgtatcttggaagtaactaacttgtttttgattttacagacttatagacagaagggaattg

SEQ ID NO: 195201 - DNA, 594 bp, Homo sapiens
ttccctatcacgagtacagcatgggaaagacccacctccatgattcaattatctctcactgggtcccttccacaacacgtgggaattattggagctaccagatgagatacgggtggagacacagagttaaaccatgtcaatttccccctttagtctcttgcatccatggctgaacacctctatcctagaaattagagttctccctcaacttctgcccagagatttactctggggtcctcacatcctaggaagaagcctttgaaggcaggatctttttatatagaatctaattctcttctgcagtctctattatttttacagggaagctcatgtgtttttgtcctaccaaactccggaaatgtgtgtcattcacacagctttccactctccttgattttagacaacagttatacattggttttcatgctccccaatttccaaaaraattccccaaaaggcactgatatggtttggctctgtgtccccactcaaatctcatcttgaactgttaattcccataatccccatgagtccagggaggaaccagaagggaggtgattggatcatgggagcagtttcctctatgctattctc

SEQ ID NO: 195202 - DNA, 433 bp, Homo sapiens
tttttaacttgatgtgatcctatttgtctatttttcctttagttgtctgtgcttgtagggtattactcaagaaatctctgcccattccaatatcctggagagtttccccaaggaaacatcatgttgaatgsggaaaagctgaaagcattttccctgagaactggaataagacaaggactcacacttttaccacttctattccacatagtagttgaaattttagccagagaaatcagagaagagaaagtaataaaatgcatctaaattgataaaaaggaggttaaactatctgtttgctgatgatacggtcatgtatctagaaaaccccaacgactcatccaaaaagcatgtggatctgataaatgaattcagtaacatttcagtatacaaaatcagtgttcacaaatcagtagcatggctctacatcaacagt

SEQ ID NO: 195203 - DNA, 612 bp, Homo sapiens
atacaggaatattttttggaatggtcatgaggattagccatgatcagtaacagatatattcaatacaattgctgaagagatgttaaaatcttggactgaataatgcagaatgtagaacaaaaataataataggcacattctactcagaactgctcagaacactcttggtgtactgttcaatccaggaaactccactttaagtgatatactgagaaagatagggcatgttttgaggctgttcamaattgcattattattcctaattatgtgctgtcctccctataagaggcttgtagatgtcttaacttgatatgtgacagtaaatcccagtgggaggtttatattttcccaccccatcaatgatagatttggacatgtgatttgctttagcttaaaaaatatgtaaaagtgatttatgcccttcctcaacaaattttgcactttttccttctgttagattggcataacttagggggtactccttccaactgagtcctaaaatgaagatatatggagaagaacttcaacaaaccaatagctgatgttttatgtgaatgagaataaatattgttgtaaccactaagattatggggtttttactactacagcaat

SEQ ID NO: 195204 - DNA, 553 bp, Homo sapiens
gctgggctgcattcccagttaagttgctcattctaactcacaggattagataggaggtcgacacaagatacaggtcataaagaccttgctgataaaacagcatgcagtaaagaagccasctaaatcccaccaaaaccaagatggtgaaaagagtgacctttggtcatcctcactgatacactcccaccagtgccacaacagcttacaaatgccatggcaatgtcataaagttatcctatatggtctaaaaatggaaggaattctcagttctaagaaatgccagaaaacgcatgaataatccaccccttgtttagtatataatcaagaaataactgtaaaaatggacaaccaacagccccctagggctgctctgtctatggagtagccattctttattcctttattttcttaataaacttgctttcacttacaaaataaaaatgttactacttgttgataaggcacctgtcacccaagagctctgatggagatgcacaaggaaattagtgttattttcatgcctgctaatacaacacccattctgaagcccatg

SEQ ID NO: 195205 - DNA, 574 bp, Homo sapiens
ctttttctctttttataaaaagaatctcaatttgaacttatattggattagggccttcctttacaacaccattttaacttaattaccattttaaatgcctgatctgcaaatatagtcacattttgaggtactgagggttagggttaagttcatygtaaaaattttgggaagacacgtttcagctcataatagtttgtttgttttgaagagtttattggaccctgtctgattcagttgcttataacttattgtgtactccttgcaattacccgtgaatgtgcaaagcaattctcccttcctttcccccctctcttcccataatagtttggtttgttttgaatgagtttattgggcctggactgattcagtctccagaacgtattgtggactccttgcagttgcccatgagtgtgcagagcacttctccccacccccgcaaaaacttcttccccatctttgcctctcagccaccacatcctctgttcctatctgccttcctttcttccttccttttcctatttatcctgcatggtgttctctgaggttctttgatcattactttttgaaaattctt

SEQ ID NO: 195206 - DNA, 574 bp, Homo sapiens
ctttttctctttttataaaaagaatctcaatttgaacttatattggattagggccttcctttacaacaccattttaacttaattaccattttaaatgcctgatctgcaaatatagtcacattttgaggtactgagggttagggttaagttcattgtaaaaattttgggaagacacgtttcagctcataatagtttgtttgttttgaagagtttattggaccctgtctgattcagttgcttataacttattgtgtactccttgcaattacccgtgaatgtgcaaagcaattctcccttcctttcccccctctcttcccataatagtttggtttgttttgaatgagtttattggscctggactgattcagtctccagaacgtattgtggactccttgcagttgcccatgagtgtgcagagcacttctccccacccccgcaaaaacttcttccccatctttgcctctcagccaccacatcctctgttcctatctgccttcctttcttccttccttttcctatttatcctgcatggtgttctctgaggttctttgatcattactttttgaaaattctt

SEQ ID NO: 195207 - DNA, 444 bp, Homo sapiens
gagtagtacattctatttagatgtgcgaaaatcaatagattaacatgaaagaatttcctgtttgagcgatagcccataatataatatggtaagtggtggtgagagtggcagaagattatactataactatattggcttatgaatgatcttggtgtgccatgagaggctgtaaataaggaagtgacacartctgattcatacttgaggaaacttatgttaattttaagaatagattggaaagaggaacagtggaagcagattaatagttaggaagctcttgcagtagttcagttgcctataattcctagagtctccaaaactggcatctctaaaactctctggcttattataggtagaaaaaggaatgccgcctccttccttaggatgcacttttagactgcacctgaaactccagcaaacaagtattttgctggccaccttaaa

SEQ ID NO: 195208 - DNA, 448 bp, Homo sapiens
atttgttcagtgcattttgtctttctcatcagcaagaatttaatataaatattatacgttcattttttttctgtcttttgcagggcttccctggcatctttattatccccagcttcctgccatcttgctaaattctttttttttctgtttttccatctaaaatttccttgtgtctttaattattgggttctttacccttttcatatctgaaatgccagaacaaaataaaaccaaatgtctgtcatttttttaaaattttactttaagttctgggatacatgtgaagaatgtactggtttcttacataggtttacatgtgccatggtggtttgctgcacctgtcaacccatcatctaggttttaagccctgcatggattaggtatttgtcctaatgctctccrtcccctctccccgcacccccctgacaggccctgatgtgtgatattc

SEQ ID NO: 195209 - DNA, 487 bp, Homo sapiens
cccatgacccttctgctgccccagccccacaccttccctcagggaccctggtggagtcttccttactggaaggtgatctcagagcacttggccagccgacgtccagcattcttgagcttggtataratttggcccatctcaattgcaccctccagcccaaccacttccagtctcttgtcacttaagtctggggacgaagtagggagtaaagttttacataaacagggtatccccatagggagtcacactttcccttcgtcctgcccactcagctcccaaggctgctcctctcacctggtacacaggttttcaggatatcagggtcggtgatgactttagctgtagcacctaaggcctggttgatcccatagatatccccatggggtctcctggtatcaccccagaggttggagccaccatgcatgctagggatgtttagcactgcgatgccttctagggacaggttgctcagatccagcggtttccc

SEQ ID NO: 195210 - DNA, 574 bp, Homo sapiens
gacccctggttatttctcagtggcctcatttcctacaatttccccttagatttctctgctctaaccaatctggacttcttgctgctcctggaacacaccaggtacattctcatccaagaagaggctttttcttgctggcctctctatctgggcaattattcctccaaaccttcacatgaattgctctctaacttcaattaggtctcagagagggaggractccccctattctttctcttattatcacactttattttttctcatcttcccagctgacattttataaatttatttgcttattatttgtctcccccccacgatggtaaacaagtatacatacacacaacatgcacacacacacacacacacacacacacacacacacacacaatcatgatgccagggattgagtcaaagaacgcatctgaaggagaataatacaatcagaccctgaaaatcagagctgactatatgtttagtacaatggtcaaacataaaacataaaatttttctttaatttatcagactatacttctctaggatcttctcttcattgctcagtaaatttacttgt

SEQ ID NO: 195211 - DNA, 574 bp, Homo sapiens
gacccctggttatttctcagtggcctcatttcctacaatttccccttagatttctctgctctaaccaatctggacttcttgctgctcctggaacacaccaggtacattctcatccaagaagaggctttttcttgctggcctctctatctgggcaattattcctccaaaccttcacatgaattgctctctaacttcaattaggtctcagagagggagggactccccctattctttctcttattatcacactttattttttctcatcttcccagctgacattttataaatttatttgcttattatttgtctcccccmcacgatggtaaacaagtatacatacacacaacatgcacacacacacacacacacacacacacacacacacacacaatcatgatgccagggattgagtcaaagaacgcatctgaaggagaataatacaatcagaccctgaaaatcagagctgactatatgtttagtacaatggtcaaacataaaacataaaatttttctttaatttatcagactatacttctctaggatcttctcttcattgctcagtaaatttacttgt

SEQ ID NO: 195212 - DNA, 574 bp, Homo sapiens
gacccctggttatttctcagtggcctcatttcctacaatttccccttagatttctctgctctaaccaatctggacttcttgctgctcctggaacacaccaggtacattctcatccaagaagaggctttttcttgctggcctctctatctgggcaattattcctccaaaccttcacatgaattgctctctaacttcaattaggtctcagagagggagggactccccctattctttctcttattatcacactttattttttctcatcttcccagctgacattttataaatttatttgcttattatttgtctcccccccamgatggtaaacaagtatacatacacacaacatgcacacacacacacacacacacacacacacacacacacacaatcatgatgccagggattgagtcaaagaacgcatctgaaggagaataatacaatcagaccctgaaaatcagagctgactatatgtttagtacaatggtcaaacataaaacataaaatttttctttaatttatcagactatacttctctaggatcttctcttcattgctcagtaaatttacttgt

SEQ ID NO: 195213 - DNA, 458 bp, Homo sapiens
aatttaaaagaagactatttcatgacatgtaaatgttacatacaattaaaatttcaatgtccataaataatgtttcattggaacgcagctgtgcctattggtttgtgtattgtgtatggctgcttttgtgctacrtctaatagcagtgttgacagtagctgggacagagcctgtggaacccacaaagtcaaaaatattcactatctgattctttatagttaaagtttgctgacccctggtatagtgggtacggaggaaagcaaatgttagaagagaggagaataggatgggaaatggatagggaaaggaggctagttgatggtaaggtcaagaaaagaaagagcttgaacttgatcggactggtactagaaaacggctgggaattaaagcattagtaaaaatattaaactggattttgggacacataattgtactgtgatttgtttggggtaaacact

SEQ ID NO: 195214 - DNA, 392 bp, Homo sapiens
ttgctttcttacatgtattcaggaatggaatgtcactgtttgtttaccattttcttgcctctcttccaccaaattgtgggaagagaggcctagaaawcaattctacctagaagagtacatcagagtcctccctccactaacatgtggtcctttattctctcaaaaaatcattatgccctatgttgagactagatgtataaaataagaagcaatttagtgctaaacctgaaagaggcttagattagtatgaggctacatggtatgctgcttctctccctagctcttcctgatccacagttaatataagaagaggagagcacgagcacatgcccttaagcaagcactaagagtgcccaggagggcacagaagcagatggcagaggagataataa

SEQ ID NO: 195215 - DNA, 597 bp, Homo sapiens
ttattgataccttccattgctattatggttagaaagtcatttctcaccaaaataaaaatgtacaatttaacttttttattgtttttaacatttgttactctatcttaatttactttagtacaaagatgaggaacacataatgccatcatattctagggttcaaattacatataagagagtatatttctaggctgcctactctgytcgatttaaatgtctagcaaatattacatcagtatgacactgtttcaaataccacagctggatcaatatgttttaacatcaggttgaacaagccccacaacattattcttgatggacaaactctaatctaattttcacagagctgtaagagaggtctgtgcctaaatcacacgtttactacgaggaattaactgaaagcacctacatgaagacacctggaaactataaagaacttcctggaaactataaagaactgtataattataaggtagtgcttatatctcactataatatttttgatggcttcttcaaataataaattctccagcagaggtaaaagtaaaatcaataaaacagaaccttactagttacaaatgaatacttttatgtcac

SEQ ID NO: 195216 - DNA, 378 bp, Homo sapiens
ttatttcctcatagccatcattgagaggttaggttatggagttcaatttatactcaaagaattaaaaagtttggmaacaatgataattgcaaagattttctagctatttctagcaaaagcatataggtgaacacatgtttaactctgtcccatggaaacgatggtaaagcaattaataagaggaaataagctatcaggttaaaaaaaaagacgaagaataacagcattcaggacagatgagatttttgaaggagagaaaaacaggaagaaatataatttagaataaataaaacttttatcgtttctttgtgtcgggaacatttcaaatgttatcttctagctattttaaagtatactattgttaacggtaatcccccc

SEQ ID NO: 195217 - DNA, 548 bp, Homo sapiens
taattacacagtgatatggcttattttagtttctgatatatctatatattagatagatctttgctttataatccaaacttgatctgcctgtaagcacatatttcaaaagcaaataaaatcttttgatggcctagaatttggtctgtcttggtaaatttgccatgcacattgaaaagaatgtgtattctactgttgctgggtggattgctctgtaagggtcgattgggtcaactttgctgatggtgttgtttagcttttctgtatgtttattgactttcttaatatttgttctataaattactgagagacaagtgttgaggacttcaactttagttgtagatttgtctatttctcctttcagttctatcagtttttatttcatatatttgaaagctctattgttaggtgattaaacatttaggattgttatgtcttcttgsggaagaaatccctttatgtaattcccctctttatccctggcaatgttctctatttcgaagcctacttagtctgatgcagtattgttacttaaatttttaaaattagta

SEQ ID NO: 195218 - DNA, 433 bp, Homo sapiens
tattaatgctctaatattttttatttctgtcatagtatgcatatgatgtattagacagggctctgggtacagatgggcagggtttaaatgacagatttaaagcagtggctcacacctgtaatcccagcactttgggaggccaaggcagacagatcacttgaggtcaggagttcgagaccagcctggccaacatggcaaaacactgtctctactaataatacaaaaattagccggtcttggtggcacccacctgtaatcccagctactcgggaggcygaggcacaagaataaacctgggaggcggaggttgcagtgagctgagatcacaccactgcactccagcctaggtgacagaataaaactgtcatcaatcaatcaatcaataacggatgttctcctatgtgccctggagcaagtgaattgaaccctggtt

SEQ ID NO: 195219 - DNA, 568 bp, Homo sapiens
cccagaagtgtttgcgaaatgctttctttttcctgtaagtttaaatacttctacagttatgtcttttacaaaagagagatgttagtagcaaaaggtgcaacatttgctaaacagttcaggtgrcatctacgaacaccatcaccctgagttttcacaaacagcctgagagaagatgtcacgttcacttttctgaagccaaaacagaggctcagagaatcagcttaccaaaggtctctcacagctggcagatctaagagtctaaaccgtttctgttgggctcaaggcccatgttccatttggttatactctcctcccacaaaactcccttaggctttggaaactgaaaaaaaatgtaagcggagtgattgattgcctgaggttcctcttgttagaactgatcaattgagccacatctacagcaatattagagagggaggaaacccatgagtcctcaaatcttttttaagagaatcattgatggtcttgaatgcttagatggtccatatggacattcggtgctttttttgtttggcgtaagtgaagcagcatcattgtctggggtaaatac

SEQ ID NO: 195220 - DNA, 568 bp, Homo sapiens
cccagaagtgtttgcgaaatgctttctttttcctgtaagtttaaatacttctacagttatgtcttttacaaaagagagatgttagtagcaaaaggtgcaacatttgctaaacagttcaggtggcatctacgaacaccatcaccctgagttttcacaaacagcctgagagaagatgtcacgttcacttttctgaagccaaaacagaggctcagagaatcagcttaccaaaggtctctcacagctggcagatctaagagtctaaaccgtttctgttgggctcaaggcccatgttccatttggttatactctcctcccacaaaactcccttaggctttggaaactgaaaaaaaatgtaagcggagtgattgattgcctgaggttcctcttgttagaactgatcaattgagccacatctacagcaatattagagagggaggaaacccatgagtcctcaaatcttttttaagagaatcattgatsgtcttgaatgcttagatggtccatatggacattcggtgctttttttgtttggcgtaagtgaagcagcatcattgtctggggtaaatac

SEQ ID NO: 195221 - DNA, 543 bp, Homo sapiens
ttacatagtgcagagggaaaggctggttgccccaccctaatcttattattatgtctttgcctagcaggggccatattgtctgctccttactgtacacatggtttggcaaagagaagggaagatggagccactattttgaacatgcctagtcccaggtagccttytcctatcggcacaactggtggcattcacccgtgcaagcttccagcttgcttatcgatgtctgcagcttaattatacaggctgctctttgttagaaaagaaaatgatttgggggctgcttttcattaaaaggaaaactttaccaaggactcctgtagcctcactatctgcctaagtaatttcttcttaactcctatatcatgaggattgacattcgtcagaggtaaggtgttatgctgcaagttcgtattatttggcaaattgatgggaagacgttacagtaaatagtctccaaacaagatgccatgaattgattattttcctctatgcacatgatactctgcccaccaaaatttatagtctgcttcttactctcttaaa

SEQ ID NO: 195222 - DNA, 543 bp, Homo sapiens
ttacatagtgcagagggaaaggctggttgccccaccctaatcttattattatgtctttgcctagcaggggccatattgtctgctccttactgtacacatggtttggcaaagagaagggaagatggagccactattttgaacatgcctagtcccaggtagccttctcctatcggcacaactggtggcattcacccgtgcaagcttccagcttgcttatcgatgtctgcagcttaattatacaggctgctctttgttagaaaagaaaatgatttgggggctgcttttcattaaaaggaaaactttaccaaggactcctgtagcctcactatctgcctaagtaatttcttcttaactcctatatcatgaggatygacattcgtcagaggtaaggtgttatgctgcaagttcgtattatttggcaaattgatgggaagacgttacagtaaatagtctccaaacaagatgccatgaattgattattttcctctatgcacatgatactctgcccaccaaaatttatagtctgcttcttactctcttaaa

SEQ ID NO: 195223 - DNA, 561 bp, Homo sapiens
cttccccctctccttcctgctccagccacttgggatgtgcctgcttccccttygccttttctaagtttcctgaggcctctccagtcatgcttcctgtacagcctgcagaccggtgagccaattaaacctcttttctttgtaaattagccagtttcaggtagttctttatagcattgagagaacggactaatacaaataccattataaaggaacagtaaaagcgctatggtgactcagatggtgaggaaaggaagaataatatttattcattcacaccacaaatatttcctcaaggactcttcttggcattggagataaattagtaaacaagtagtgagggacctagccctttcatgttttaccaatgttagcacacttcatctttatgagaatgtggtgaagcaagtattattaaaagagggtgactattttactataaggagtataaacaatggcctaccaatagtgtccaaagcacacagcttaaaatagaggagattcagtctctctactcctgtcctctctagaacatagcccaaagtgataacatctattaaagaa

SEQ ID NO: 195224 - DNA, 561 bp, Homo sapiens
cttccccctctccttcctgctccagccacttgggatgtgcctgcttccccttcgccttttctaagtttcctgaggcctctccagtcatgcttcctgtacagcctgcagaccggtgagccaattaaacctcttttctttgtaaattagccagtttcaggtagttctttatagcattgagagaacggactaatacaaataccattataaaggaacagtaaaagcgctwtggtgactcagatggtgaggaaaggaagaataatatttattcattcacaccacaaatatttcctcaaggactcttcttggcattggagataaattagtaaacaagtagtgagggacctagccctttcatgttttaccaatgttagcacacttcatctttatgagaatgtggtgaagcaagtattattaaaagagggtgactattttactataaggagtataaacaatggcctaccaatagtgtccaaagcacacagcttaaaatagaggagattcagtctctctactcctgtcctctctagaacatagcccaaagtgataacatctattaaagaa

SEQ ID NO: 195225 - DNA, 615 bp, Homo sapiens
gatttttctgctttcatttctctaaaaatatttccatatggtacaaatgctttcttttgcatttgctttagtttyagtgattgtgtcatggaagggttaatattataaaaacaaacaaacaagcaaaaatcaaaacagtcttaaataatcagaatcctcctggcagattgtctagtgtcaatttgttttctggcactgattcatctgcatcttcttcctcattgtctggcactggttcagaagcacccatctccatcaagtcatcttctgctaattcttctggtatgatatctattagttcttaaatttctccaagatctttgtattgaaacccttcataccccacctttttttttttttgccatattcacaatctctttcattatttccttgattgcctctgttgtaagtcctgtgaattcatgtacaacatctggacactgtttcctccagcaggaatttattgtttctcacttgatgacttttacagctttttctacaacaatgatagcatcttcagtggtgaaatccttctagattttcatgatgttctttctattggagttctcttccataacattgacaatcctttacatagagtactgtgtgtagtga

SEQ ID NO: 195226 - DNA, 386 bp, Homo sapiens
ttgaacaattaaaatctctctgatttcctcttctacaaccagccagagaaaactctgtttttaaagggttcatgtaattggtcactttaaatttcccacttcaaaaatttccatattttgaggactgctgatttgggatttcatttacatctgtaaaatctctttatagcagtacctagatttgtattatattgaataaccaagggccagtagtcctgaggcgcatctttgaattttgcctaccacaatcctattttcttgtgacttttcatcttaatggtaaatttccagatttactacttaattgacttgtgggtgggtgtttctttytttggttgtgtaagtatcacagacaattaattctgaagagttaagagaattcagac

SEQ ID NO: 195227 - DNA, 589 bp, Homo sapiens
gctctgccttcatgatctaatcacctcccaaaggtcccatctccaaataccattgcactggggattagggcttcaatacaggaatttggggggcttataaagattccatctatagcagacagtgagaggtgaaattagtttcatttaggaaaagggacaagagaaagatgttctgagcagaaagggacaatcattcctgcagaaatgcagagacataagtggctgagctacatccagtctccctgcactgaccctgtgctctggccgggctggcacctggcattcctgatgaaggccccttgcccaccctcacctctggccttactcacatcagctcctcctttacgaacactctcttcccctgcccccaccattttctcctcatggccttccctgaggccatggtgatggccactctcagtgcccatcaccagcagctatggagtgtaatgttaagtgctgaaggcggctcacagacattcaaatcccacrtctgctcctgtttcttgtagatcatgccattgtgatcaggtcacttaactttgcctcattttcctgacctttgaaatgagagtaacaacagtagtac

SEQ ID NO: 195228 - DNA, 588 bp, Homo sapiens
gcaacatctttcatgactatagtacaagatgacaaccaaggaattgccattggcatccatcacacctgacttaattcagatttcaccagttttctgtccactcgtttgagtatgtgtttaattctatgcaattttatcacatgcgcacttattttatggcatgatatgtcctcatgtgacttcaatataaatcaaaatacaaaacagtaataaaatgcatctctaatgtagacacagtacttcaattgattcattgagggtcatctctatgccagccacttttatttaaaaaaagaaagaaagaaacagaaagaatacacagcccctgctgtcacagaacttctaatctcatgggaaaggcagggatatagataattataggaccaaaatgggtacaaaatgaaaaaaaaaaacccttaattggttgcaaaaataatcwagataaataaaattatatattttggtgcttattatgttggccttgatcccaaagtcactcgtacctttaacactatctatgtcttaatatattaatagcactcatgtaacatatgtttaacattttaaaatattagctttaatgatcta

SEQ ID NO: 195229 - DNA, 546 bp, Homo sapiens
tgcactccagtttggatgacagagtgagacctcatctttaaaataaaaataaaataaaatcacaacatcgggtgctagagccatctggaaaccatttaatggaaccccatgcgaataaatgcatggtccagggtcatctgagacaacgacatttatgtttttaagcaaccaagatgccacagtcagaggcaagaatccattcccataattaaacatgaaggactactctgaggaagtgtattcttttcttgaaaataaatttttgaatgcaatcaaaatcaatttcctttcctctggtcctcagtgaacamgatacagagcccactctttacatataagttgcccaaataaattaccagcacttgataaatgtttagtagttccttgctctctgagcaaaatgggggatgaaaatctcaccctctgttggacagatgtggtaattgtaattgtttggaacttgtttgtttaactcaccattttccattaatattcattttttccccaattggtcttaaattcttggttcctgtatagaaagaagac

SEQ ID NO: 195230 - DNA, 540 bp, Homo sapiens
tcccacaactacaaggaacagatgtaatccagtattatctgtaatttgaatcagaatctaaatccaaatcaaagcaccgtgaattggaaaatttatgtcataaagatttggtggttaacacacaacttagcatggtttaagtttgtttctagaccactgtttgttcaagagacattttttttcttaacataggctttatccaatcctagatataatactatctttagaaagacaccaaccaaagtttgcattaaagagttattcagattcttccacgcttcatagccaagtatcccaacagatccagtaaaaccaaagtttactcaaagcaggtcaatttcattgctccaaatgatttgactagttgtgtcaaagcmaggaaaccaagttagtttagtgaaaaagttataccaatagtcagaccaaactgatcaacttatgttgtgtgttcctagctaatctggctatcatctgactagtttgatgaataaagccactaaaaatggatgattctatttgtatgtgaagaaaaatagcaat

SEQ ID NO: 195231 - DNA, 712 bp, Homo sapiens
atgatgaaaagggaaccattgcacactgttggtggaaatgtaaattagtatattagtcattatggaaaacagtatgaagattcctcaaaaattaaaaatagaactactgtaagatccagcaatcacacttctgggtatatatattcaaaggaaataaaatcagtatctcaaagagatatctacattcctatgttaactgcagcattattcacaatagccacaatatttaatcaatctaaatatccattaatggatgaatgaataaagaaaatatggggtgtataatacacacacacgaagacaaagagtgtaatattaataaaccttaaaaaagaaggatattctgtcattttttgacaacatgggtgaacctggaggactgtgaaagttgtcagaaacaaaattgaatcactaacattaagaaaaccctgacaaatagagccagggaaggccatgaagggagggatattatacttacatgcctaataacaaaaatgattacaaaaaccacaaccttgcacaacagacattgaaacctcacacacaaaaatacttctgcaagtacatctgccaagcaactgcctgtccaacctcaaattggcgtcatccttaytattgatctttgtagccaaggataagtatttcaaaacaataatgtaattctcttcattttttccattaaaaacctttttattcctttatctctctgaat

SEQ ID NO: 195232 - DNA, 587 bp, Homo sapiens
ttgtccacatccaagaaataaaaagaaatttatatcttaataactaaattgacttttattcttcaaaaaatatagtaggtttgtaatatatagaaaataatcctagatatgattatttggaacatgtattggatggggagaaaagaaaaactgktttaaataaatgaacaggccaataattgttttttcttacttaaataaaaacctggtattgtcatcaactaaatttttttggaagcacggtcaagctaggcctccagagcaaaaatttcttcctgacatagattgtcttagcaaaccaaaaccaattttaaagtttgctttttcaaggaaatgtttaacttcaaatatctctgatgatagatatttgaatcaggcacattttagataatggaagaataccttctctctctgattcctcattataccttcagaaactagctgacactaattctaaatgtctctctacttctaaaaggctcatgcctttatttgtccttaaacaccacattgatgcttaccttaatatagcattttttgcatgatttttctttcacctcaccttattatctacagacaccattaag

SEQ ID NO: 195233 - DNA, 585 bp, Homo sapiens
taaattcggtacaaattactaaaaaaattatttaaaatagagacatataaaatacaagccccaatttttgtttcattattagattcaagaaacataaaattgctcaaccaaactgctacaaatgtttccaaactgattctcactgcacaccagtgctggctactgagggtcaccctttgaataggacagctctaaaggacttcattgggctttggcccggaatgattacagcaaggtttttttttaaatattttattagcctgatttccctactagtaggatttaaatcccacatcattaactttagttttatttttcccagaatacactcgaacagcaaagtatatttgctaaacatgcttggtgcctcatttatctagtaattctctccttcattctacaaacatttatagaacagttctttgatggttcaaagttctatcttcaaaattctagaaattgagcccagaaaacacagggtttagaaaggcttctaaccatactatcattttaaagtttgtttttgcaagagaagaaccaagtaaaatsctaaaaatagtctctatttttaagtccaatatattg

SEQ ID NO: 195234 - DNA, 296 bp, Homo sapiens
tttttaatcttttgtacctgttcacatagcagcttaatgtttgctgaataaattaataattgtatacaaggatgctagcaacaagtatcaggtcatttaastattgttatgaataatttcagacataaatgtaagggaaaaagaataatataatgaactcctacatacatcatcacctagccgaatcaattactaactcatgaccaatcttagttcatctatattcccacccttaaaattattgtgaagcaaattccaggcagagtacagatctttagagcttccaatgattaggt

SEQ ID NO: 195235 - DNA, 577 bp, Homo sapiens
ttttatgtttgtcaaacacrtgagcagtgaatggtgcaggagtcagaagacgaaaattctgatctgccatagtgactgtaaccttgaataagtcgtaatcctagcattcattagaatgttttattagaatatgttttacaaattgtttattctgtaaagatggaatagaaaaactttttgtaaatctgctgcttttagcttttgcaaatgtatctgttcatctgtatcatgttttaatctgtatcatcacttattcaacatatttttctagtttaacttttaaaaatcatacatttttggttcaaaattaaaatacacacactctgaaaattttctctctcactctgttcccacatttaccactatttgtctaccctttagagtttcatgcttatacagtcatgtatgacagtacaatcttatacctctcattttttacacaaaaggtcacagacaatacatgttgccttgtaccattaatttctcatttactatattgtggtgatgtttccatatcataattttttataagtcaagattatatatgcacatcgttgaaaagttgaataattataaa

SEQ ID NO: 195236 - DNA, 615 bp, Homo sapiens
acctgtgggaattagactgagtagatgagatgtctcttgattttttttttatttgtgtgatataccagaggtgatcacatttcacaggcactcagaaaatcattctgaacatatggcaaaggtaacaatatcaatagtaaagcaaccctttagtgttacacatagcatttttgtctgggaatttgggagagaggtggctatcatttcaaaaaagtcagctttactggtatrtgtaagactttgaaagggatcgatgtaaaaatgaaatgaagagaacacctaaaagatactattgtgaaaataacaataaataggcacctatggacctgatatggagtgtaaatgtttagtcttaggtagttctgactaatcatagaccattaattgaatgatatcatacagattattaatccttaaagaattaaaatgggttcagtcattttagtctccaaactaggcatcgtttatttttgatgtttaaaagttaattaattagtgttatttaatcattctctgatacagtaggtgctctagtgtgtttttttaaaaatgggggcagggggacactctttcttgctgaatgaggctccaacacagacaggataactgcccaaa

SEQ ID NO: 195237 - DNA, 636 bp, Homo sapiens
gagggcttcattgagaagtctctagctgagccttgaagaggagataggatctagagatacagaaataggaaaggagtattttgaggcagaatgagcaatatcacaaaggcccaaagggcacatggtctatgtgggattgggggttcatatgcagggaawaactaatggttctatgtgaaacatgaatgtaggaagaggaaataagactagaaggtaggttggatcctctagtgaagagcctgaaaaaccctgtaaggtagtttgacttttgttcctgggacagtggaacaccagcatagttgtccagaagaggctttagagagactaattcactagacagagagcagagagtatagaccctaatggaagagaagtacagtgttcattcatggaaggagtggctgctgaaaggctttgtccttttgcttgaacttccacacaccaggtcaccccaggaagctcttaaccacatccattctcccactgccttccttccctagactttaaaaaccaagtataggctcagttaaaaatttaaatcaaccagagagttagtttatctactactgccaaaacttaaggcacatcattgaaagggcagtaagtacagtgagaaatctagtcacagtaatagac

SEQ ID NO: 195238 - DNA, 636 bp, Homo sapiens
gagggcttcattgagaagtctctagctgagccttgaagaggagataggatctagagatacagaaataggaaaggagtattttgaggcagaatgagcaatatcacaaaggcccaaagggcacatggtctatgtgggattgggggttcatatgcagggaaaaactaatggttctatgtgaaacatgaatgtaggaagaggaaataagactagaaggtaggttggatcctctagtgaagagcctgaaaaaccctgtaaggtagtttgacttttgttcctgggacagtggaacaccagcatagttgtccagaagaggctttagagagactaattcactagacagagagcagagagtatagaccctaatggaagagaagtacagtgttcattcatggaaggagtggctgctgaaaggctttgtccttttgcttgaacttccacacaccaggtcaccccaggaagctcttaaccacatccattctcccactgccttcmttccctagactttaaaaaccaagtataggctcagttaaaaatttaaatcaaccagagagttagtttatctactactgccaaaacttaaggcacatcattgaaagggcagtaagtacagtgagaaatctagtcacagtaatagac

SEQ ID NO: 195239 - DNA, 591 bp, Homo sapiens
cactgtagccttgacctcctaggctcaagagatcctctcatctcagccaatttgcttttattttttctataaatgtatctcattatgtcataactcacttttatagcagggaaaaagttaatacaagataagatttagatatcctctctccagcaagacccagaactttgattaactctgcctggagaatagaaggtttatgaagatgctaagctatcccaataagacgttgtgtaccaaatgcaattttaggttctgtagatgaagttccagggaattcctcccatttatattaacatgcatgccaaatggtcttggtttttgtttgtttgtttgtttgtttgtttttgatattttatcttggacttggggaactttcakttgttttctctgactgaaataatatctaatttgggaacttgtgagactccaaaataaaatcaaacacttaaagaagtaaaagtaagaaaagatcataaagaaaaatttatgataaatttaaccattgtttcttacaggaacttttaaaattgcaatagtgaaccaacaaaacacagtgaatgaatggacaacaaaactatggccacttgt

SEQ ID NO: 195240 - DNA, 544 bp, Homo sapiens
cttattcaccaccatgagaacagaatggggaaaactgcccacatgattcaattatctcccactgggtccctcccacaacacatgggaattatgagaatataattcaaggtgagttttgggtggggacacagagctaaaccgtatcaccatagctttggtcagccctggggattaaatgtagagttcctcaaaattaccctatggtaaggaacaggccctgctgaaatatttgcagtgaaagaaacacatttttatggtgatttgagggtgtctttggggttctggtttttttgtttgtttgtttgtttgttttytgtcttcttcacactgaatttttccatcttgccaggcagttacttttgtctggcaaaattgtgatggggttgtttgttttatacatcactatgccaaggacaagaagcagccttcagtgttgtttaaatatcacatgtaagatgggccaaaattccagttccatacctgtttgagcagagtacaaaaagaaataggaacaatttagaggacattacagtgagataactat

SEQ ID NO: 195241 - DNA, 545 bp, Homo sapiens
atggggaaaactgcccacatgattcaattatctcccactgggtccctcccacaacacatgggaattatgagaatataattcaaggtgagttttgggtggggacacagagctaaaccgtatcaccatagctttggtcagccctggggattaaatgtagagttcctcaaaattaccctatggtaaggaacaggccctgctgaaatatttgcagtgaaagaaacacatttttatggtgatttgagggtgtctttggggttctggtttttttgtttgtttgtttgtttgttttttgtcttcttcacactgaatttttccatcttgccaggcagttacttttgtctggcaaaattgtgatggggttgtttgttttatacatcactatgccaaggacaagaagcagccttcagtgttgtttaaatatcacaygtaagatgggccaaaattccagttccatacctgtttgagcagagtacaaaaagaaataggaacaatttagaggacattacagtgagataactattggcttagtatatggaagatctttc

SEQ ID NO: 195242 - DNA, 545 bp, Homo sapiens
atggggaaaactgcccacatgattcaattatctcccactgggtccctcccacaacacatgggaattatgagaatataattcaaggtgagttttgggtggggacacagagctaaaccgtatcaccatagctttggtcagccctggggattaaatgtagagttcctcaaaattaccctatggtaaggaacaggccctgctgaaatatttgcagtgaaagaaacacatttttatggtgatttgagggtgtctttggggttctggtttttttgtttgtttgtttgtttgttttttgtcttcttcacactgaatttttccatcttgccaggcagttacttttgtctggcaaaattgtgatggggttgtttgttttatacatcactatgccaaggacaagaagcagccttcagtgttgtttaaatatcacatgtaagatgggccaaaattccagytccatacctgtttgagcagagtacaaaaagaaataggaacaatttagaggacattacagtgagataactattggcttagtatatggaagatctttc

SEQ ID NO: 195243 - DNA, 598 bp, Homo sapiens
ttgcttgtacttttggtgtcatatctattaataagaagccactgcctcatccaagatgacaaaattatgcctgtgtttccttctaagatttttataatttttagctggtacttttargtctttaagttaatttttatatatggtctgaggtaagggtccaactttattcttttgtatgtggatatcccattatctcagcaccatttatttgttgacaaatgattaactttattgtcaggcagatgtttactatgtagctcaaagtgataagtgtcaacactatgttcaaaaggtgtagtttgcagtgcacaggtatactcttgctgtctatgtctagttccatagcaaatgcttacatttttcttaatgataccattccagcagagccccttaaaggtttgtttgttttcatatgtgtgcatttggggatggtggtatttatgtggtgaattagtgggttttttaattcacataaaaccctcatttatagagtgtatagtttgtgccaggcattataccgggatttgggaatgcaaaaatatgcttgctacagaggagagttcagtaaaaaattgttgaaggaagggagaaaatttgg

SEQ ID NO: 195244 - DNA, 383 bp, Homo sapiens
accctcccactccagtcaagacttcagagattgcagccagccctggttgaaatcttactgcaacctcaagagacctaagacccacccaactaagacacttccaggtttctgatccttataaattgtgtagggtaataaatatttgtttggccgggtacagtggctcatgcctgtaatctagccactttgggaggccaaggcgggtggaattgcatgagctcaggagttcaagaccagcctgggcaacgtggtaaaaccctgtttctacaaaaaaaaatgtgaaaattatctgggcatggtggtgtgsaccttgtagtcccagctactcaggaggatgaggtgggaggattgcttgagctcaggaggttgaggcgcagtgagcc

SEQ ID NO: 195245 - DNA, 529 bp, Homo sapiens
gcctatatatacttgtgaagtgagtgaattaatgaatgaatgagtaaaagagacatatagtttcatagctgccaagagaagaatggcaagtcatatgctacwaagagtcatccttaacttgattgtgaaagttattgcgtttgatcattgggaaatcatagaagggattcatgttagcaagaagggaaggcaatgaaaaagtagaggcaatgaatatgaattcctttctcaaaaagttggcaacgaacggaaaaagaaagtggagggaagttagtaagtgataactcaagagggaagaatgctgcaaaaaaagttttattttagaataatgaaaacctggatttctggtttctggttccacatggaaggagcttggaaatagccaccccactctaacaacaattaaaaagctgaacagagggggaaaaaatcaacaactcttcttggatccagagaggggaaaggacacagaggaaactgcttgctgcaaggttggacagacagagaggcaaacatggggagtcacagt

SEQ ID NO: 195246 - DNA, 529 bp, Homo sapiens
gcctatatatacttgtgaagtgagtgaattaatgaatgaatgagtaaaagagacatatagtttcatagctgccaagagaagaatggcaagtcatatgctactaagagtcatccttaacttgattgtgaaagttattgcgtttgatcattgggaaatcatagaagggattcatgttagcaagaagggaaggcaatgaaaaagtagaggcaatgaatatgaattcctttctcaaaaagttggcaacgaayggaaaaagaaagtggagggaagttagtaagtgataactcaagagggaagaatgctgcaaaaaaagttttattttagaataatgaaaacctggatttctggtttctggttccacatggaaggagcttggaaatagccaccccactctaacaacaattaaaaagctgaacagagggggaaaaaatcaacaactcttcttggatccagagaggggaaaggacacagaggaaactgcttgctgcaaggttggacagacagagaggcaaacatggggagtcacagt

SEQ ID NO: 195247 - DNA, 577 bp, Homo sapiens
ataacaagcaaattgggacctgagaaaggggcaaatattgtacaccctgaatagacacatatgacatcattgtattacagcacagcatgaattacagcatagcaactcatacttgagacaataattcccacaccacaaacatgaacccagtatcttcctgatatgatttggctgtgtccccacccaaatctcatcttgaattgtagctcccataattcccacatgttgtaggagataactgaatcatgcgggtggttcctcccatactattctcatgatagtggataagtctcacgagagctgatgattttataaggggtttctcctttcacttggttctcattctctcttgtctgccaccatgtaagacataccttttgctttctgccgtgattgtgaggtctccccagscacgtggaacgtccattaaacctctttatttctttataaattacccagtctcaggtgtgtctttatcagcagcgtgaaaacgaattaatacatttccttttaaatttgtgaaaaatcaatgagaaaatgtatatgaaagcactttgtaatgtgccaaatgctacat

SEQ ID NO: 195248 - DNA, 551 bp, Homo sapiens
ggacaaccaacttgaataatagtttggcagttttcttataaagctagatacatacttacaagacattacaacaatttcatccctaggtatttaaccaaagaaatgaaarcatttgttcacttgtggtgggatatggatggccccaggcatgcagcagtggtgcaattatttaaactttcagtggtgaattggggtgaaatactaatggaagggactgcactggtgggtgcaacttgtaaagcattggaaaatacaggggaagtagtaattataagcactgtgtggaattggatggaagacacttactgtaatgaatcatcaattaaaggctaatcacaaaaaccagaagatatccttgtggtatctcctctcttctcctctcctgtggctagagagcagaaacaaacttaagaatcagagtagcagagcttcaaaggatgttgaattctccaccttcaaccttagcaagtctgatataccaagctcagggccctaattggggaagattgggagataatgccagcacactgatagggtagtacttggaagct

SEQ ID NO: 195249 - DNA, 562 bp, Homo sapiens
taaaaactcaataaagacaagaacttcgttcaccgttttcacagctttgtctccagacataaaacaatggccaacacagacgcttaaatacttggtaaatcaatgaataaatgagtaaatagatggctaaataaaaagagcgaacaaatatatatattctttttatcagtataatcataaagaaaaaattcaaaagaaacaaaagctacattcyataagatgttcgtaagtgcattaactgtaatagcagaagagcaaaccccatctaaacatctaatgacagggctttagccatttattaatccatttattcaagaaatgttttttgagtgctcactagatgctaggaactctatttgcctttctacactgaatttattctagtgagagaaatagccattaaagacatcagtatgtactacgatgccaggcaatgataaatgctgggaaaagaaaaatcaggaaagtttaaagagtgagggaatagggtattcaatgttaccttattattaggagatttatgtagaaaagtgtttataattcaatgtgtgaaatacaacac

SEQ ID NO: 195250 - DNA, 389 bp, Homo sapiens
tatcgaaaataaaacattctacagaaataatctaccaccatttacaattgaggtaattyattataatgcctgaattctatattttaaagccaaattttctctgtcattcattttggaaagcttcaattattttttcaagaactacacaaattaaaattctctgtgtaaaagtgaaataccatccttctttgaaacaactaataactatcacttggaggttgtcttcttttttcacagtcattgtaaaagctactttatatatcttatcttcacaataatcttagatggatggcttcattgacatagaaacaggttcaaaatgctaaatgtttgttactggtatgccttctagtactggtgaccaatgggtaactaagaagatggcaaag

SEQ ID NO: 195251 - DNA, 489 bp, Homo sapiens
cactttaaaatgttttctaaaacacaaatatactttctaaaataattaaggtcataaagacagggccatcttacagacacctccattctaatatgagtaagattaaaattttaatgatttataaaattacaagttatataaataattttaccaaggagcattaaaaagctaacatttattatcacctatacattattgtttcttacaataactctatgaggtgggcaatatttccagtttataaataaggaaactgaggccctgagaaactgaaaaattaaaggacacatattaagtgagaagccattctgtttaattcaaaatcaatgctcttaattatcagtgccttaattatgaatcaattagttctcctttcagccgcactggaataaataatactacacaaatctttctattgcacaggacactattacyaggcaaatatatgaagcaagtgatattaggaggcagacagtaggtagccaaaga

SEQ ID NO: 195252 - DNA, 444 bp, Homo sapiens
aatattgatgcaaagctaaaagctcttataaaaattatcacggccattgttcaacttttcccctgaatattgatgaaacaaaactgaaggctaccctcttacctaaactygattctatgccagacaataataaattgatttcctttctgggaaaagaatgcatggtaacacagtaaatgatcattttccatttgaaagaagtagaaatgttatttggtctgtcacgtggcgtcttcccaccggtttcataagtcctaattctgcccaatatctatgacctgaccaaagcctccttaggtgtatgttatgattacatccttactacgactggatagctaatgccacaatagtcactattaatcactcagtaagtacttctgagtaccagtaatgccagagacagaccaccagcagaactagattgcagactttaagtcctgtctc

SEQ ID NO: 195253 - DNA, 486 bp, Homo sapiens
tgacttctccacagttatcactccactttatattcccataagcaatgcayacaatgcatatccagttccacatcctaaccaacagtcttctcaaatggtaattcattatactttttatgtattggtatatcagtgtagttgaatttgccttttgctaatggttaatgatattgagcatcttttcacatgcttctgggccatttgctttcataaactaagacgtgggtactagatgtgctccttgatgctgggccgtcactgcctctaggtcctctcagctgaaagagttaaagaaatatacatacttgtacatacaactatatttccatatttatctctctgtaattatttgttatacttttacttccaattccagtgcaataccataacattcattctagcccttcttctttccttaattataactgatttctcagacaataaaaaacctggctctcattatccataatacattttttttgctta

SEQ ID NO: 195254 - DNA, 486 bp, Homo sapiens
tgacttctccacagttatcactccactttatattcccataagcaatgcatacaatgcatatccagttccacatcctaaccaacagtcttctcaaatggtaattcattatactttttatgtattggtatatcagtgtagttgaatttgccttttgctaatggttaatgatattgagcatcttttcacatgcttstgggccatttgctttcataaactaagacgtgggtactagatgtgctccttgatgctgggccgtcactgcctctaggtcctctcagctgaaagagttaaagaaatatacatacttgtacatacaactatatttccatatttatctctctgtaattatttgttatacttttacttccaattccagtgcaataccataacattcattctagcccttcttctttccttaattataactgatttctcagacaataaaaaacctggctctcattatccataatacattttttttgctta

SEQ ID NO: 195255 - DNA, 654 bp, Homo sapiens
gatcggcgctcagcatacggaggacccgcaccagcactggtctctgaattccctcagtatttattgattactattttcactatctcagcaaggggaatgcggcaggagaacagggtgatagtggggagaaggtcagcaggaaaacatgagcaaaggaatctgtgacacaaataagtttaagggaaggtactatgtcaggatgtgcacataggccagatttatgcttctctctacccaaacatcttagtgtatagtaaagagtaacagagtagcattgccacagtatatctcgcctccagccacagggcggttttctcctatctcagaatagaactaatgtacgattgggttttacaatgagacattccgttcccaggggcacataggagacggaggccttcctcttatctcaactgcaagaagcctttctcttttactaatcctcctcagcacagatcctttactggtgttgggctgtgrgaccgtcaggtctttcccttcccacaaggccatatctcaggctgtctcagtgggcagaaaccttggtcaatacccaggctttcttgggcagaggtccctgcggctttctgcagtgcgttttgcccctggttagtagagaatggagaatggtgatgacttttaccaggcatactg

SEQ ID NO: 195256 - DNA, 355 bp, Homo sapiens
tactggcaatggtgagtcgtggcamcccaagccgcacagggctggtggaggtgcagttattgcaacacagaggagggtagttgtgatcgttagtcaaggaacacagccaacttgcagagatccttcagggagagtgaaaagagtgagcaccctgatttgaccacctgccctccctctcatctcttgctagcactccctaatagctaaatctatcccggaagcagagggcatgcagtctattgaaacgacctattctgatcagcacccatgagtttagggcatggtggaaaaggcagagagtgcatgagtttggagcagagatagaaagttttcagcatacaatcttgagaagata

SEQ ID NO: 195257 - DNA, 355 bp, Homo sapiens
tactggcaatggtgagtcgtggcaacccaagccgcacagggctggtggrggtgcagttattgcaacacagaggagggtagttgtgatcgttagtcaaggaacacagccaacttgcagagatccttcagggagagtgaaaagagtgagcaccctgatttgaccacctgccctccctctcatctcttgctagcactccctaatagctaaatctatcccggaagcagagggcatgcagtctattgaaacgacctattctgatcagcacccatgagtttagggcatggtggaaaaggcagagagtgcatgagtttggagcagagatagaaagttttcagcatacaatcttgagaagata

SEQ ID NO: 195258 - DNA, 424 bp, Homo sapiens
gggctgagtaatgacacccgaagttacccagactctaatccctagaacctgtgagtgttaccgtgtaaggaagaagagactttgcacatgtgttttagtcaggaatgttgagatgggagagtatcccggatcatctgggtgggccctaaatgcagtcagaagtgtcttttcaggagggaaacagagggtgatttcacacagaagatggcaaggtggccctgaagtgacatgctgctcaccagctttgaggatggcaaaaggggccaggagscaagaaatgcgagggatgcagctctagaagctggaaaaggcaaggaaatgcattattttctagggagggagtgtagccccaaggccacagagatttggggccaataaagctgattttggacttctgacctccagaactgtaagaatgaattca

SEQ ID NO: 195259 - DNA, 539 bp, Homo sapiens
tcatagcctccataattatgcgagttgtttcttcctaataaatccctttatatawatacataaatctgtagtgaacaacagcagactttgccacttcaaaatacagaaatggctttttgaagactcagttacagtagtaccatgtgggtggtgataccttgcaaggctggggcaaagttctctaggaagctgtctatgctctgaatcagcatccaacagatggtaccacatctcccatagccagaattcatgggtctagaaatcaaggggtggaaatgggagtggtaccactcacgattacacctggtgacacactagcaaaagttttgcttcctgtttctgtgaccttatactctgctggcctagaggtctagagggaggaatgcttccaccaggagacacaacaatgattccactaaaccagaagttaagatgccacatggtcactgtggcctcctttatacctgtgaataaacaggcaagaggaggagttcctgagctggctggggtgattcatcctgactactcagcagatattg

SEQ ID NO: 195260 - DNA, 554 bp, Homo sapiens
cctccataattatgcgagttgtttcttcctaataaatccctttatatatatacataaatctgtagtgaacaacagcagactttgccacttcaaaatacagaaatggctttttgaagactcagttacagtagtaccatgtgggtggtgataccttgcaaggctggggcaaagttctctaggaagctgtctatgctctgaatcagcatccaacagatggtaccacatctcccatagccagaattcatgggtctagaaatcaaggggtggaaatgggagtggtaccactcackattacacctggtgacacactagcaaaagttttgcttcctgtttctgtgaccttatactctgctggcctagaggtctagagggaggaatgcttccaccaggagacacaacaatgattccactaaaccagaagttaagatgccacatggtcactgtggcctcctttatacctgtgaataaacaggcaagaggaggagttcctgagctggctggggtgattcatcctgactactcagcagatattggaccatgactcctcagtggag

SEQ ID NO: 195261 - DNA, 554 bp, Homo sapiens
cctccataattatgcgagttgtttcttcctaataaatccctttatatatatacataaatctgtagtgaacaacagcagactttgccacttcaaaatacagaaatggctttttgaagactcagttacagtagtaccatgtgggtggtgataccttgcaaggctggggcaaagttctctaggaagctgtctatgctctgaatcagcatccaacagatggtaccacatctcccatagccagaattcatgggtctagaaatcaaggggtggaaatgggagtggtaccactcacgattacacctggtgacacactagcaaaagttttgcttcctgtttctgtgaccttatactctgctggcctagaggtctagagggaggaatgcttccaccaggagacacaacaatgattccactaaaccagaagttaagatgccacatggycactgtggcctcctttatacctgtgaataaacaggcaagaggaggagttcctgagctggctggggtgattcatcctgactactcagcagatattggaccatgactcctcagtggag

SEQ ID NO: 195262 - DNA, 391 bp, Homo sapiens
ctttatcagcagcatgaaaatggactaacacatttcccctttgccttctgccatgactgtaagtttcctgaggcctccccagccatgcagactgtgagtcaattacaactctttcctttataaattacccagtcgtgggcagttctttacagcagaatgaaaacagactaatacaaacaggaattattacttttcrtgtagtgaaaacaatccttgtttcccctgaggttggggctgtctgctgaccaatgctatctctctccaccttagttggcagccccaatatgaaccatctcacctgggtcaaaagccactcatcatcctggactgttctctcccctctctaccaaatgctagtcaccagccctgccaattgcatggcctgactgca

SEQ ID NO: 195263 - DNA, 563 bp, Homo sapiens
gagttcttcctttgtgatattgatgccctccctgcttctgcatgcctgtcggtctgcggtctaagactttcagtgccattgcatgtgagtcgtgcaagtggtcatgcatgcccagtacccagtgacggcaggaaagcactcagtgcttcacaattaagtatgaggagggctgtagttttccgaggacycttcccatcaaattcagcgcattgccttctgtttctgtttggtgtagatttttatcctgaacagttattagattataacaagtaatttttattcttctactaaagtggtcctatggtttgtcatcttaattgggtgaatgcaatgattctcacatgcaaagccacccttaccttactgagatatgccttacctcgtcacattctatgtatttctagattcattttagtaatatcttattatgaatgtttgcatatctatctatgagaaatgttggtctctagtagttttctttacttttaatatcctcctatgttgtcattttcaggcttatgccaacttcaaagagtaagttaattaagaagcattccctcctc

SEQ ID NO: 195264 - DNA, 563 bp, Homo sapiens
gagttcttcctttgtgatattgatgccctccctgcttctgcatgcctgtcggtctgcggtctaagactttcagtgccattgcatgtgagtcgtgcaagtggtcatgcatgcccagtacccagtgacggcaggaaagcactcagtgcttcacaattaagtatgaggagggctgtagttttccgaggacccttcccatcaaattcagcgcattgccttctgtttctgtttggtgtagatttttatcctgaacagttattagattataacaagtaatttttattcttctactaaagtggtcctatggtttgtcatcttaattgggtgaatgcaatgattctcacatgcaaagccacccttaccttactgagatatgccttacytcgtcacattctatgtatttctagattcattttagtaatatcttattatgaatgtttgcatatctatctatgagaaatgttggtctctagtagttttctttacttttaatatcctcctatgttgtcattttcaggcttatgccaacttcaaagagtaagttaattaagaagcattccctcctc

SEQ ID NO: 195265 - DNA, 565 bp, Homo sapiens
caatcaaggtaataaatatatccattatctccagaattttccctggtgtctctttgctttctttgtagtaagagcacttaacatgagatctaccctcttaacaaaattgtaagggcacagcaccatgctgttaactataggcaytaggttgtaaaactgatacctagaatatattcgtcttatataactgtaactttatacactccccatttatccttccccccaacccctgtcaaccaccagtctattttctgcttctataagtttgactattttagataccttatataatagaaatcacgcagtatttgtttttctgtgactgacttatttcacttagcataatgtctttcaggtctatccaccctgtcacaaatggtaagatcttcctttatccttaaatggtaagatttccttctatttaaaggctaaataatattcacacacacacacacatacatattaacatacacatataacactttatttatccattagtgtttgtcaatagagatttgagttattttcatatcttggcttttgtgaataatgcaatgtgcatggg

SEQ ID NO: 195266 - DNA, 378 bp, Homo sapiens
ttttctgcttctataagtttgactattttagataccttatataatagaaatcacgcagtatttgtttttctgtgactgacttatttcacttagcataatgtctttcaggtctatccaccctgtcacaaatggtaagatcttcctttatccttaaatggtaagatttccttctwtttaaaggctaaataatattcacacacacacacacatacatattaacatacacatataacactttatttatccattagtgtttgtcaatagagatttgagttattttcatatcttggcttttgtgaataatgcaatgtgcatgggagttcaggtctctctttaagaccctgatgtcaattcttttggttatgtacccagaaatgg

SEQ ID NO: 195267 - DNA, 536 bp, Homo sapiens
gccattatttataaacaatatgattgtataaatagaacattcaaaattacctacaaaggaatgattaagattaataggtatgaatataaaaatctgctgaattttatatataagcatactatactagaaaactgaactttaaaaatgagtttcctaaaacagcaccaaaatatcaaatatatggtcatgaatgaatgaatatagtggaaccctctacataaaatctacaaaagattatcaaaataaaaaatgaactactaaatagaaggaaaataagtttccctcctcttaggatayagaaagccacaacatagcctcgctcccagcctaataatgagaaaagaaacagataatctacaaagttattaatttttaaatttgtcaaaaagcagaagttgcaaagctaccaggtaaacaattccataggatgtctaactcttctagagagagacaggccacactaactgttttttccttaaacagatgtggtaggtatataaagctattttcagaaagaaaataactaaattttaatg

SEQ ID NO: 195268 - DNA, 570 bp, Homo sapiens
gctgtgcaggatatgccttgttaataatatgtttacaggcagtatgcttggtaaaagtcatcaccattctccattctcgattaaccaggggcaaaatgcactgcagaaagctgcagggacttctgcccaagaaagcctgggtattgtccaaggtttctcccctctgagacagcctgagatgtggcctcgtgggaagggaaagacctgatcgtcccccagcccgacacctgtaaagggtctgtgctgagaaggattagtaaaaaagaaaggcctcttgcagttgagataagagaaaggcctccatctcctacatgtccctgggaacagaacgtctccttgtaaaacccratcatacattcgttctattctgagataggagaaaaaccaccctgtggctggaggtgagatatgctggcggcaatgctgctctgttactttttgctacactaagacgtttgggtggagagaagcataaatctggcctacgtgcacatccagacatagcaccttcccttaaacttatttatgacagattcctttgctcacatgttttcttgctgaccttctccc

SEQ ID NO: 195269 - DNA, 413 bp, Homo sapiens
gtgactgactactgcattgatctagaaccaaaaccacaatatctccaaagtatgccaaagtattgcttgcagaaattaacaatacatatactttattaaataataaatacctgtacatcaagtaaatactttaaatttaagtgaaattaaatagctagcttacatagaaaagttttcagattttccttttaggaggactgtggttcatggccgtccaaactcaaaagtccytacatttccaacaataagatgtgggctaaataacactattaaaacattcattaaaaatcacaactatatatacatatagacatgtaaagataagttttttcttggttataacacagttttaacttagaaaagggtaataaatactatatataatcatcatatttagaatacatttatagaat

SEQ ID NO: 195270 - DNA, 415 bp, Homo sapiens
gacacgggaccagcataacaactttttaacagacatccagattagctggtcttttcaaaaaaaaaaaaaaaaaaaagatacttagagtgataaaagctgatggtgtagagtgagtccctagtgtcactcaaaaaggttttcagattatacaaaaacaagcaagctcctggagccagggtgttaccttcattccaaggtggcctgagaagtcttacaacaacctttgcgtttacttccagagatccagagaagaattagaacagttactgtttttttttttttttttttttttttttggggggggggctctcccmtttttctcctctccttgactcattattaggcagtcaccagctcagtggcaggtagacatctcaaagtccctcagtcttcacccttggggtctgagatggtt

SEQ ID NO: 195271 - DNA, 404 bp, Homo sapiens
cagcttttctctacaatgctttattcgacaccatactgcactctaggtttcccacattctaaagtgcataagctggagaagctatacaatatctatcacatagatctttaagctatttctcctttaggcaactaattatgatctggagtatactataaatacrtgcattagtataaagttatgaattttcccttaaaatattgaatactgtgaaatgtaacttcattctaatgactgtactggcctataagaaatattcttgtttcaagaattcagattacttttaattagcattaaaagtaatcaccctcaagcacttttggaatgtaccatacttaaaccatttcacatgccagtagtcattttttctttaaggttgtttttaattattgtaaagatatttt

SEQ ID NO: 195272 - DNA, 377 bp, Homo sapiens
tgctgggattacaggcgtgagccactgcgcccggccaggacatccttttaagtctttttttgtttccccctcccttgcatatatagctgtacttgtttcaaagcactatggaatttgcaaggggtctgctggagaccgtatttgacttgcggattgcaggccaagtggatcagtggttattggtaggaagggggacggtagggattggtgggaccttttagcagcccttctggtcaccacacagagtggttacccactgggccaatgagtacagccatctctgccctcaaattttctttttgattcagcctccaactctaaagtggcaggaraggtggcctgttcaggagagcaaaacacaactgaggaggcgggct

SEQ ID NO: 195273 - DNA, 589 bp, Homo sapiens
tcataaattaagctcaaagcaaataaatacgcgttataagaagcatacacttaaaagtagttactcttagaaaatccctgaaatggtaatggtatgtatttcacctggggcagtaagggactggtattttcgcttcttttctggagaatacaaaactgaaaaggccacactctctgcgggtcggcaaaagaaaggctaagactggaggatccctagattgggacaggagtagaggattgcctcagatctacaactaagtatgatcccttgtttgtgtttataaaaacaaacgaaaaactacactgccccacagacagctccaaactcagtggaagagaggagggcgggtgggcggcaggtgtcaggtagcctccgctccacgcctttgttgactgtcgccgtcccccaccctcccagctcccgtacggggattcccgcaccaggcgacaggcgcctcggggcggggktctgaggaggtcgctaaggactgcaccggggcttccggcccgtctgggaagcttgcttggctgggccgggacggactcgacagggcgcggaagggagcggtgggcgcgccctgggaggcgag

SEQ ID NO: 195274 - DNA, 589 bp, Homo sapiens
tcataaattaagctcaaagcaaataaatacgcgttataagaagcatacacttaaaagtagttactcttagaaaatccctgaaatggtaatggtatgtatttcacctggggcagtaagggactggtattttcgcttcttttctggagaatacaaaactgaaaaggccacactctctgcgggtcggcaaaagaaaggctaagactggaggatccctagattgggacaggagtagaggattgcctcagatctacaactaagtatgatcccttgtttgtgtttataaaaacaaacgaaaaactacactgccccacagacagctccaaactcagtggaagagaggagggcgggtgggcggcaggtgtcaggtagcctccgctccacgcctttgttgactgtcgccgtcccccaccctcccagctcccgtacggggattcccgcaccaggcgacaggcgcctcggggcggggttctgaggaggtsgctaaggactgcaccggggcttccggcccgtctgggaagcttgcttggctgggccgggacggactcgacagggcgcggaagggagcggtgggcgcgccctgggaggcgag

SEQ ID NO: 195275 - DNA, 573 bp, Homo sapiens
acacatggctttcaccactggagagtttcttgcagtccagtgatgactgcattccagtggtatggtcctaccatgtttctcagtcccctgtatttgttgtgaattgctagttagagctagatgcttgattcaactcaattaacttttttttcaagaagactttataagtggtatgtgtccttccattaggagggacatcattactactagtctctctttttgtgttattagcattcattgataatcgttttctagatctattagggtggcagaatggggatattcaaattctgtcatttcctattgacttactartgctgtaaagttttactcctagttttgaacttaggctcaatgcttcacagccagtaatgtttgcaatatgctgggtctgatttttcttatctgcgactttgttgtagaaaaattatttaatatctaacagtaaggataggctattatgagctatgaaattgtggaaaattcacacagaaggagcctggcatttgaaagggaagaaaataattctgcaaaggtccatttatcccatgatcttttgtgagtgtcaaggtg

SEQ ID NO: 195276 - DNA, 448 bp, Homo sapiens
cataatgcctacttcatagcactctagtgaaaattaaatgatttaatacttctgaggggccaggtgccatagctcacacctgtaatcccagcactttcrgagggtgagtggggggtggattgcttgagtccatgagtttgagaccagcctgggcaacatggtgaaaccccatctctactaaaaatacgaaacagtagctgggcatggtggtgtgcacctgaagctccagctacttgggaggctgggcaaggaggattgcttgggcctgggagttcaagactgcagtgagccatgattgcaccactgcactctaccctgggagacagaacgagaccctgtctcaaaacaaaacaaaacaaaacaaaaaagcctgtgagggcctgcatataaaaagtactcagtaaaggttacctcttattattcccaaggacttatcaaattattcctc

SEQ ID NO: 195277 - DNA, 448 bp, Homo sapiens
gtaatcataatgcctacttcatagcactctagtgaaaattaaatgatttaatacttctgaggggccaggtgccatagctcacacctgtaatcccagcactttcggagggtgagtggggggtggattgcttgagtccatgagtttgagaccagcctgggcaacatggtgaaaccccatctctactaaaaatacgaaacagtagctgggcatggtggtgtgcacctgaagctcsagctacttgggaggctgggcaaggaggattgcttgggcctgggagttcaagactgcagtgagccatgattgcaccactgcactctaccctgggagacagaacgagaccctgtctcaaaacaaaacaaaacaaaacaaaaaagcctgtgagggcctgcatataaaaagtactcagtaaaggttacctcttattattcccaaggacttatcaaattat

SEQ ID NO: 195278 - DNA, 655 bp, Homo sapiens
tggcattttttaatttgtcttgattcatgtgaaagtaatttgaattcacattagtattctggaaactgatcattaacactttttaactgattttgtaaacacattttgcttccaaaataaacataaacagggaaggagaacgctcagtgtagctgaggcatgaagacacacacccattaaagggtaaaggcagaatccccagcgtaaaatggggaaggcgtttgagagtcatttcatcaccaacttgcttcatgaaaaacctrcaagaaaaatgtgaataatttcatatttgcctgatgggggaattttaagctgcagagttgtttatgtgtctatcacggatcattgcaaataattaagatgggttgggaggtggggacagataaacatttgataaggcaggaggggaactacatgtggcaggaatgagcaaaatggctaggctgccttcatgcttagccagagtgggagatttggagatacacaaaattggaaatgttttgtggtccaactctcctccagtcaatgcctggatcccctacctacgttcactggggtgctgcccagcctctacctggatccctccagggcagctcaactgaccttcctatgacactccattgacccacatcctttagttcccagcagtctggca

SEQ ID NO: 195279 - DNA, 455 bp, Homo sapiens
gcttcatgaaataaggtagtacgtcagtagctaatatttattgggcacttattatggggtcagattttatgtgtcaattcttttaaatcctcttaccaaccctgtatgttaggtcatgttatgattcttacttgtagatgagaaaacagaagacaaagaatgtaaacagtttgcccaagaatctagccaagaagtggtggacctagatggaacaatgccagctctaaagcacacacttggatctactgactcctaaaggtccccgggtycttacctacaattccaaactccaaaaagctctgaaaaccacaagttcttctaacttatttaacagtagacctggatttgacctgaattattcagcagcaaaaagtcttctgaactgacttgaggttacttctagtttttatttgtcccatttgatgtaaatactcatacattttcacagaaaaata

SEQ ID NO: 195280 - DNA, 574 bp, Homo sapiens
tggacaactgctccagatcacacacactaaaagtggtggccccaagaggcttgcagcacacttctgggtcccttaagttgtattatataagtaatttaataaagacaatgagccaattgacaattaaaaaaaaaaagttgaccttktctagtgcaaaatagtcttgggtgctagacttaagccaaaagcagccccaaaatttaaggaattgggctacctattttgcagggagatggccccaaaaggtgatacctcttcccctcaaaaacaccatcatgcttctctgctcctctgttgcctgagagtgtcccaaagtctccaggaagacacttaggactctgtgagtgtgaaattaactagggatgtgggcaaatatttagagattcattgtggcattatttaaaataatgctccatcataggggatcagttaattaaattgtgatgcacagatacaatgaataatatagagttatttaagataatattgccaaaatatgtctgccagtaaggaaagtttatcatggaatattattataacacagtatgtaatgatcccttttaaattatatata

SEQ ID NO: 195281 - DNA, 469 bp, Homo sapiens
tttttactaaacataatcatttagtttactaaacagaccattttactaaactggatcttgctctcccatgcatacaacccatttattgacttcccattgccccaggataaaatccaaattctttaacagatccttcccagcctggctcctgggaaggatctcaacgttttttctaggcaatatgtacagaagccatctgggacttctgttatctctgggatgtgccacagtctctctctggcctctgggccctcacacgcatttctcttccaggaagactcttccccctactgttcactgggatagctcctacatgctcgtcctgtctcagcttarctgtcccttcttagaaggtctgcctggacttcctagaccaagtcaggcccctgctagatcctgcagaatccctgtgcttttcccagcattgcgttcatcacaatgcatcataatcgcatccagtgattgcttc

SEQ ID NO: 195282 - DNA, 365 bp, Homo sapiens
ttactgtttatctgtttagaacatttttatttcctaaacctagcaatgttcatctttttcatccagcattttggtttgttttttttacatattgattttcctgttcactggcatgccctgatgaagtcggagcactcacrtgtgctgtctatacaagcatggggcaggaacaggagcagtggggtgcattctctgccctgagaccccttaactccaaggacaggagagagcagtgctcactgtattttttaaaaagaaaaacttgtctttcccctgtgtggttttcccttgagccatcaggatagctaggccgatcattttagtatcgtcccaaccttcacataaaaatcctacagcaaaagctg

SEQ ID NO: 195283 - DNA, 393 bp, Homo sapiens
ctgagcaggactctatgttggatgtcaaggattaaaaatgaataaaacaatagtcctccccttgagtcacttacattctattgtgagagacacaagtaggtacttataatgcaatgtggtaaaggcagcgtggtgctgtgggcatggaggaaggtccatagaatgttgggaacacagagaagtagcaaatctcatagttggagtcaagattgatagaggtgaacaatggcatgggtgtgtgcttgtgcatgcatgcgtgtgtgtgtgtgtgagcgtgtgtgtgtgcatgcgtgcatgcgtacctgctcagrgagtgtggagggagtgtgttttggcaggtaaaatgccaggctgagagcagtgagagatgaggcttgaggtgaggcagagcta

SEQ ID NO: 195284 - DNA, 573 bp, Homo sapiens
tttttgtttgtttgtttgtttgttttaaaaaagactttcattattttaagccactaaattttggggtgatttgttacycagacacatctaatactatgccacagatcattggactctgattggataaggggtggggaagtcatcatgatatcatgatggcagctaccatcccttgaatgcccactctgtgccagccactctactataacttgacccactgtacgtaacctcctccttacaaagatcctggcagggcacggtggctcacacctgtaatctcagcactttgggaggccaaggtgggtggatcacgaggtcaggagatcgagaccatcctggctaacacagtgaaaccccgtttctactaaaaatataaaaaattagctgagcgtggtggcaggtgcccgtagtcccagctcttcaggaggctgaggcaggagaatggcgtgaacccggaaggtggagcttgcagtgagccaagatcgagccactgtactccagcctgggcaatggagcgagactccacctcaaaaaaaaaaaaaaaatcctgagacagggcttatcattcccaat

SEQ ID NO: 195285 - DNA, 584 bp, Homo sapiens
cttgcttgctcagtttttattgaaatttgtgcttattggccgggcgcggtggctcacgcctgtaatcccagcactttgggaggccgaggcgggcggatcacaaggtcaggagatcgagaccatcctggctaacaaggtgaaactacatctctactaaaaatacaaaaaaaaaaaaaaaattagccgggcatggtggcaggcgcctgcagtcccagctactcgggaggctgaggcaggaggatggcgtgaacccaggaggcggagcttgcagtgagccaagattgcrccactgcactccagcctgggcgacagagcgagactctgtctcaaaacaaacaaacaaaataagaaatttgtgcttattgaatttgtgcttcttgtcctgcaactctcagctctgcaggtttggagtttctggttcctagagaggtaactcttccactaggggctcagaaaaagtcctactaaaatttaaactattgcttctacccagtcactttaggtttcacacactaacagacaagcaggcaataagaggagtcactatcctggcaggtctaaccatgatcttcaggaggaggtag

SEQ ID NO: 195286 - DNA, 338 bp, Homo sapiens
atgtgatcagaaatgactagatgactctagttaaaatttttgaaggagggattamattaatatttcaaaacccttactctgtagataaatgtattttaatttttccccttgtatacctttatttacctggggaaggagcttttagggttagggggtggtttgctatctctttagctagcagaatagtgtgcctttgatcctcacacatctgttttgtggacacagcagccatgcttcacaggaaggtcagagctggctaccagcagtcttgccctttactgagcttagtgtcatccttggatgctgtcatatgctgctttgagtgaaccagagaaaca

SEQ ID NO: 195287 - DNA, 338 bp, Homo sapiens
atgtgatcagaaatgactagatgactctagttaaaatttttgaaggagggattaaattaatatttcaaaacccttactctgtagataaatgtattttaatttttcccctygtatacctttatttacctggggaaggagcttttagggttagggggtggtttgctatctctttagctagcagaatagtgtgcctttgatcctcacacatctgttttgtggacacagcagccatgcttcacaggaaggtcagagctggctaccagcagtcttgccctttactgagcttagtgtcatccttggatgctgtcatatgctgctttgagtgaaccagagaaaca

SEQ ID NO: 195288 - DNA, 338 bp, Homo sapiens
atgtgatcagaaatgactagatgactctagttaaaatttttgaaggagggattaaattaatatttcaaaacccttactctgtagataaatgtattttaatttttccccttgtatacytttatttacctggggaaggagcttttagggttagggggtggtttgctatctctttagctagcagaatagtgtgcctttgatcctcacacatctgttttgtggacacagcagccatgcttcacaggaaggtcagagctggctaccagcagtcttgccctttactgagcttagtgtcatccttggatgctgtcatatgctgctttgagtgaaccagagaaaca

SEQ ID NO: 195289 - DNA, 543 bp, Homo sapiens
tactgatttcctactattacagtagttctcagccctggtattaaaaatttgactttaggccaggcatggttggctcacacctataatctttgggaggccaaggtgggcagattgcttgagcctggaagtttgagaccagcttgggcaacatagcaaaaccctgtctctacaacaatacaaaaaattagctcagtgtggtggcatgcacctgtagtcccagctactcaggaggctaaggtagaagaatcacctgagcatggggaggtcaaggctgcagtaggccaagactacaccattgccckccagccgaggcaacagagcaagacccggtctcacaaaaaaaaaaaaaaaaaaagaaagaaagaaagaaagaaagacagaaatttgactttaaaaaaaactttggagtctttcatgagaatattacatttatccactattctcaaagtgtacacactatgaagagagcaaaatcttctctaactgaacagctatatctgttccaatcattctcagaagatcagttatttcagtggctccaaa

SEQ ID NO: 195290 - DNA, 543 bp, Homo sapiens
tactgatttcctactattacagtagttctcagccctggtattaaaaatttgactttaggccaggcatggttggctcacacctataatctttgggaggccaaggtgggcagattgcttgagcctggaagtttgagaccagcttgggcaacatagcaaaaccctgtctctacaacaatacaaaaaattagctcagtgtggtggcatgcacctgtagtcccagctactcaggaggctaaggtagaagaatcacctgagcatggggaggtcaaggctgcagtaggccaagactacaccattgccctccagccgaggcaacagagcaagacccggtctcacaaaaaaaaaaaaaaaraaagaaagaaagaaagaaagaaagacagaaatttgactttaaaaaaaactttggagtctttcatgagaatattacatttatccactattctcaaagtgtacacactatgaagagagcaaaatcttctctaactgaacagctatatctgttccaatcattctcagaagatcagttatttcagtggctccaaa

SEQ ID NO: 195291 - DNA, 394 bp, Homo sapiens
tatgggccaaatccagcccaatgcctgggctggatttaaaaaaacggtttatcttttactttaaaaataaacgttgttttgtttttgtttttagaaattcatattttttaattgacaaataataactgtacatattcatgaaaaacatagtgatgtttctatacacataatgtatagtgatcagatcagggtaattagcatatccatcatctcaaacatgaaaataaagttttattggaactcagccacactcattcatttacatattgtctgtagctgctttcatgctatgaaagcagagttgagtagttgtgacagagaccatatggcacacaastctaaaattttactatcttgccctttagaggagcctgctggaccctgaactagagtg

SEQ ID NO: 195292 - DNA, 553 bp, Homo sapiens
tgggtgacacagagtgagatctcatttcttaaaaaaaagaaacaaacaaaaatttccaaatgattttagaaagtagttcaaaactgttgtttaacttatgaatcaaaaagatataattaaggggggccaggcatggtagcacacgcctgtaatctcactattttgggaggctgaggcaggataatcatttgagcccaggagtttgcgatcagcctggacaacatagtgagaccccatctctacaaaaaaaatttwaaaattagccagatgcgggggtgcatgcctgtagtcccagctactcaggaggctgagatgggaggatcacttgagcctaggaggtcaaggttacggtgagctatgattgcaccactgcactccagcctgggtgacagagtgagaccctctctctcaaaaaaaaaaaaaaaaaaaaagataattaagggaattagagatgtattaggccaggtaatagaagtgaatcacaaatccatattactgggtcaaggcatagaagatacaatcacatgctaactacagatactcctcaacttac

SEQ ID NO: 195293 - DNA, 413 bp, Homo sapiens
acgctgtgcattcacgcaagaccctggcatctcttttgccccctctctcaccatgtgacacaatggctccccttcaccttctgccatgattgtaagcttcctgaagactcaccagaagcagatgccagcccttgtgtgccttgaaactaatgggtaatggtgcatgaaaaatgattaaaagcacagaaaacaggcccccaaaagaaaaagttaaagaaatttccaactcgccacataaaaagaaggtggcaaaagatgtgaagacaaaatgactagatggtggtcccgttctttaattcagcaaccatttaagtgtgggccttgtgtgagatrtgaggctgagggatacagcaaggtcacagacccagctcttaaggtgctctggtttgcaggggagctactgagccacatca

SEQ ID NO: 195294 - DNA, 533 bp, Homo sapiens
acctaaactataggcccttctccagggtcttttgtatgtctcttattttccctatctgttaagagggtacgggttgtgtggtgagcttttggtccttaggggaactggtctttgtgcgggatttcctaatgcatgcaagtaggcagccctggtttccattgctcttcttgccagttgcttaccttacacacgtgataggagcagacagtacctgagggtctgcccttgtaaaacgggaggctgtttttcttaactttcttgctcctgtaccactcaggaacagcaggggcctgggcagtgttaccatttgtggggcttgccatagttgttcatgaggccatgggagcaataatggtcttttgtccstctctgccatttctctcccttgataatctgccagaacaagtagctttgtaagaggggtttttgatttttgattttcagaatttgcaggtgctttctgtatttggtaggtctgtggattctcatgattaaaaagataaatcacaagcacttggtatttgattactaga

SEQ ID NO: 195295 - DNA, 583 bp, Homo sapiens
gagttacgcattatacaacctttgtatctacaaatgttttcacaatgatcataatactaacatatatccatacacagatcgctaaagaaaaactagataaagaataaacaatttcattttactatccttgtaacttctctgtaagctttaaattgctttcaaagtaaaagttcaaaaacagttactgattatcaagtgatgttattaccagtgaaaagacaagccctatataaccaacaaaaaagaagcagtagctgcatacatccagaactcttagcattcaataattaaggggataggataaaaatayacacatgaagaaaagaccaaaacaattattcaacaaagatgaaacaagaatgaaaacaaacacataaaaatatgtacaacttctatataagagaaacaaagattttaaaacaggtgtgattctttatccagcaaataggcaagtttaaacagtgtgacaatacctaatcttgcagagaatatggaacaacttactttgttgttgggtgtataaattagtataactccttaaaaacaactgggaattgtctagttacattaaagatgcataaaa

SEQ ID NO: 195296 - DNA, 583 bp, Homo sapiens
gagttacgcattatacaacctttgtatctacaaatgttttcacaatgatcataatactaacatatatccatacacagatcgctaaagaaaaactagataaagaataaacaatttcattttactatccttgtaacttctctgtaagctttaaattgctttcaaagtaaaagttcaaaaacagttactgattatcaagtgatgttattaccagtgaaaagacaagccctatataaccaacaaaaaagaagcagtagctgcatacatccagaactcttagcattcaataattaaggggataggataaaaatatacacatgaagaaaagaccaaaacaattattcaacaaagatgaarcaagaatgaaaacaaacacataaaaatatgtacaacttctatataagagaaacaaagattttaaaacaggtgtgattctttatccagcaaataggcaagtttaaacagtgtgacaatacctaatcttgcagagaatatggaacaacttactttgttgttgggtgtataaattagtataactccttaaaaacaactgggaattgtctagttacattaaagatgcataaaa

SEQ ID NO: 195297 - DNA, 583 bp, Homo sapiens
gagttacgcattatacaacctttgtatctacaaatgttttcacaatgatcataatactaacatatatccatacacagatcgctaaagaaaaactagataaagaataaacaatttcattttactatccttgtaacttctctgtaagctttaaattgctttcaaagtaaaagttcaaaaacagttactgattatcaagtgatgttattaccagtgaaaagacaagccctatataaccaacaaaaaagaagcagtagctgcatacatccagaactcttagcattcaataattaaggggataggataaaaatatacacatgaagaaaagaccaaaacaattattcaacaaagatgaaacaagaatgaaaacaaacacataaaaatatgtacaacttctatataagagaaacaaagattttaaaacaggtgtgattctttatccagcaaataggcaagtttaaacagtgtgacaatacctaatcttgcagagaatatggarcaacttactttgttgttgggtgtataaattagtataactccttaaaaacaactgggaattgtctagttacattaaagatgcataaaa

SEQ ID NO: 195298 - DNA, 457 bp, Homo sapiens
gcaggccaattggtcaagctgccaaagatatggttataacatcctttcctgcaaacaagctatgttttgctggattccagtcagctgaactttttctcttttgtagtgaagaattgtttctatttctcaggaggacacacagtgacagagaatcaggttcaataactcagagcatctgtctcagatgtcccaggttaagacctctcctaaaggtcaagaacgaatcacaacagctgcttagttacccagcagaataataaacagttctcaagcccartctctctgtctgcaaacatactgtgtctctcactcttcactgcaacattttaaggtgaattgtaaagagtgctgttgtttaccaagcagatgttagagtattaatggtatactatttacatctccttggtggatgtcaaagtttgtgtttgcttgccttgaaccctccttattaacacag

SEQ ID NO: 195299 - DNA, 571 bp, Homo sapiens
attaccaaatacatttttatttgaatccagagtttttcatgtgtctgtaaatgcaattatgtacattcatgaagacaagtgtgacttttaaaaattaacaaaacagactattttggccaaagtctttaaaaccaaaatattgctcaataaagtaattaatttttatcaaagttcagtataagaacaatgttagactacactaaggaatttgattcagataatttatcaggataactcacattgatttttattatgcaacagtctttaagatacaatcatatttacatattcaacagtaaagtcaggacatactctactactgtggtttggtataagataaaattttattacattatatgtaagaacatttgctataatttgttttactaataatttcatctatctagttatttcaatttaattaaaaatgtagtaaagtactcattttataattaataatatgtagacttgctgaaactcaaggaaatatatgacataattctgtccactaagttgcctaayatagaactgagaaagctttgggcccttaggtcctaggttagatgatgga

SEQ ID NO: 195300 - DNA, 403 bp, Homo sapiens
aatagtttttcaaatgttatcttctagaatttttgtggtttcaggtctcaggtttaagtctttgatccatcttgagttgatttttgtataatgtgagagatgaggatctagttttattcttctacatgttgcttgccaattatcccagcaccatttattgaagagggtgtcttttccccacttcatgtttgtgttggctttgtcaagaatcagttggctgtagtatttggctttagttctgggttctstattttgttccattgttctatgtgcctatttttataccagtaccatgctgttttggcaaatacagccttgtagtatagtttgaagttgggtaatgtgatacctccaggtttgttatttttgcttactcttctagacattggcttaggcaaagaat

SEQ ID NO: 195301 - DNA, 582 bp, Homo sapiens
acagcagccacagcagttcactgcaccactcagaatcacatgtttatactaaatctgggagcagctcctacagtttccagggtggcagggggaagagaaatcctgagaaattagtgaaccaaaactgttrcgcctttcctgctctatcatttttagatttccttgatcacaagctagaatgtctactgttcttggtggctcacctggtaacgtgacccagacctccaaccctgagaagtctgagccctgtatgctgttctgtctagccatggttgctacattatttttttctatttaccatagcagttatgcacaggaatgcaaagaggcacccaactagattaccatggttgaaacatatttcttcctgttccgttgtgtaacagcagccctaccgggttatcaagatcaactatcccttctatgatggtgagtcttcttgttgattcctggtctcttggcataaggaaaccaaaatgacaacaatccctattcataaaaatatcagatatcccagtgctggaacactgacccagttgcaactgatctttatagttaaatggaactatttttgtgtcccct

SEQ ID NO: 195302 - DNA, 488 bp, Homo sapiens
aagggtggtttgttggtttataagggatgacataataaagtatcacaaactggatgatgtaatcaacagaattttattttttcacagttcttgaggctagaaatctgagataaaaatattggtagggatggtttcttctggggcctctctccttgccttgttgatggcttcttcatgttcacagagagttctccctttgttcccaaatgtcttcctcttataaggatgtcrctcatgttgaattagggtccatgctagtgacctcgttttaacttaattacctctttacagaccctgtctccaaatatggtcatattttgaggtataggagataggagttcaacacaggaattttcggggggacacaagtcagcctatagctagtgggagtgcttgtagaagttgctgggtgatgctgggccttggttgttttctgggctctctggcatgcctggaggtgtatatcatctggtctgcccagcagccac

SEQ ID NO: 195303 - DNA, 576 bp, Homo sapiens
tgacacctttaaatgatgttctttgactcttatctaattgtctatgtgaccgtcagtgaatatattatctsttcatattttctgtagtcttatttctttttgattagaacatataatatttacacactattttcccatcctaatccccacctttgtaataaaattaattaaaattttaaaaaagtatatttaataacctactgatacttacctgaagtctctctggtcaacttttggctggatgaagctcttctgtagagtattcaaggagggcttgtaagtactgtacaatattctctgagttgtgacatgtttaaaatttcttctggagcctagatacttaaagtacaccttggccatgtagaaaatccttgacaaacatttccttttcttgagtttgtctgaatttgtgcttcactgttgggttgcttgatgttatcatcaagaagtgtggcaccacttgatttttttcccttttggaaatgacattttgtttgttgttttttacctagagacccagataattttttctatattattttatctatgatcctttttatctcatttttgttctca

SEQ ID NO: 195304 - DNA, 584 bp, Homo sapiens
gaggcacggtgagctgagttccgcgccggcgagcgtccctcggggcccccatccggtctctccttcagacccccacactgccgtctctaggcgtcccggtgcctccctcccttcccccaccctgtccgmgctgccggtgcctcggggtcgcggacccgcatgccgccgctccgggaatcgtcctccgctgctcgggcttgcggcctccggggcccgtcctctttctttcccgcacctgccgccctctgctctggccgcctctgcaggccctgcggcctcgaaccccacgtgcgcctctgccgcggggaggaatgtgcggggctcccccggcggcccgcccgccgcgcccctcgtcgccgcagcctcgcctcgccttcgccgccaggccccgcggagccgtcgctgcgcttgtcaaggggctgggaaccatccctgctctcccatatgttgctaacggggtggcgtctggcgcggggatcccgctgcggccccgtagtacgttcgctttctgtttccacgtctctctgcgtcggtgctccggctctgggctgcttacagtaaaccctgaccggagatgggcttcc

SEQ ID NO: 195305 - DNA, 584 bp, Homo sapiens
gaggcacggtgagctgagttccgcgccggcgagcgtccctcggggcccccatccggtctctccttcagacccccacactgccgtctctaggcgtcccggtgcctccctcccttcccccaccctgtccgcgctgccggtgcctcggggtcgcggacccgcatgccgccgctccgggaatcgtcctccgctgctcgggcttgcggcctccggggcccgtcctctttctttcccgcacctgccgccctctgctctggccgcctctgcaggccctgcggcctcgaaccccacgtgcgcctcygccgcggggaggaatgtgcggggctcccccggcggcccgcccgccgcgcccctcgtcgccgcagcctcgcctcgccttcgccgccaggccccgcggagccgtcgctgcgcttgtcaaggggctgggaaccatccctgctctcccatatgttgctaacggggtggcgtctggcgcggggatcccgctgcggccccgtagtacgttcgctttctgtttccacgtctctctgcgtcggtgctccggctctgggctgcttacagtaaaccctgaccggagatgggcttcc

SEQ ID NO: 195306 - DNA, 552 bp, Homo sapiens
ctaagtttctgggaaccctatggtttttcaaagttgcatcaggtcagctgaggggcaaggyactttgtgctgggtctaggaagccaggtactttgtgctgtttcaacaagagctcttctgctttaactagttttatctcaaagtttgataatacatacaaaaaaagtctggctctttaaaaaaaattacaaaaatgtaacagtagaaatacagaattaatactttctacacaaattcttatctctgtaatatcagtttcagtatttcatcctcttaaaatgccttcaacttacacacttccttcacaatgagcataaaagaatgattaagttcaacctttatgctagtataagcatagtataataaagtcacaccctagtttctgaggttgggtatttcctagactctttagtcacttgtacttatcagagggtgtgatgagttacttcattgattttccctgagtttcactttcagaaagtaactttaatgtcaaatgttaaggtatatttttttgtcatcattgcattttggtataatcaatagctaatg

SEQ ID NO: 195307 - DNA, 552 bp, Homo sapiens
ctaagtttctgggaaccctatggtttttcaaagttgcatcaggtcagctgaggggcaaggcactttgtgctgggtctaggaagccaggtactttgtgctgtttcaacaagagctcttctgctttaactagttttatctcaaagtttgataatacatacaaaaaaagtctggctctttaaaaaaaattacaaaaatgtaacagtagaaatacagaattaatactttctacacaaattcttatctctgtaatatcagtttcagtatttcatcctcttaaaatgccttcaacttacacacttccttcacaatgagcataaaagaatgattaagttcaacctttatgctagtrtaagcatagtataataaagtcacaccctagtttctgaggttgggtatttcctagactctttagtcacttgtacttatcagagggtgtgatgagttacttcattgattttccctgagtttcactttcagaaagtaactttaatgtcaaatgttaaggtatatttttttgtcatcattgcattttggtataatcaatagctaatg

SEQ ID NO: 195308 - DNA, 596 bp, Homo sapiens
attagcaaagaaactaatcagctttcttccacataccatttagaaacatgcaacagcacattggaaatggcagcaggaggagagtgaaataaagttaatattttttcaagtctgtcttctggggaagactttgtgcaytgagacttagacaagttatttcctttaatacaataaccttataaagcatgtactaatattccccagtttatagatgatgaatctgaggaacctggagaggttaagttacttgcccatggacctggagagtaaatggctgagctgtgcttggacaccaaaacctacctttgcccaccatactgggagaccagaattgtcctgtggattcggagaaggctggacaggactggttggaggggatgcaattatggaaagagtagatggagtaataaagaacataaccttcgtaagtagtaaatgccaggcactgtgctcaatacttgacttgcctttcctcatttaatcttccacaaaagtactactagtttgtccactttacagtgaggaaaacaaagcacagaatagttaagcaaatcacccaaagttacacagccagttagcaagtcttacaatgaatt

SEQ ID NO: 195309 - DNA, 651 bp, Homo sapiens
gaaaatgcatacctcctgtaaattgtttcctgtcttttagtaaacctttgtttaaatgagtcatatgtttagcaattttaacattttaacttggctctaattaatgataatatagcgtgatttatggtcttctaaagaaatgtagacatagaaaatggagatagaggttaacatgtgaagaagagtttgtattttgggttagaaaattaaatattggcttatgtcagtaagattaggccttactatttgattgtacgagtttactttaaatttctaggctttcagggctttgtaaagataaattttattttaaaacagctttagatttgcagaaaaatggcaaagatagtgcagggagtttccatatacccctcacccactgccttttattaaagtcttatakgagtatgatacttttgttacaatgaatgaaccagtattggtacattattattatttaaagtccctattcattcatatatccttagttttacctaaggttctttttttctattccagggccccactcaggataccacattgcatttagttctcgtgtttcatttatctttgctatagaattttctcagattttccttgtttttcattaccttggcagttttgaggagtactgattaggtattttgtaga

SEQ ID NO: 195310 - DNA, 623 bp, Homo sapiens
taagtttatctcttgctttcattatttctaatcagcatactctccatatgacaactatatctatgataagaaaattgacttctttacctataaatctctgtactttcttgacagacaccaaagaactacatgttgactgtatcttgctggtaacttaaggagaatagtaacttgtagtttccacctttagcaactggacattggccatactctgatttaccaagagagtccttgtaatcacaaaggaaagcagcgatttggcttcagatattaaagcaactttttttgacgtggctagatggttaggaacacactgaagaatagattttcagtaatgagccatactttcaatgaacgtcycaaggaaaacaattttaagatcttgcataaaatagttcatatgcctcaaatttgcatttaattcttacattaggttgaaagctcatgtagaaaacatgtaatgtaaaaattggagagcccaagaacacagtcatttccccttgggtgctaacaaaaatatactacccaacagtgcctttgtttgcagtctaatattttagaaggaaaaaaagaccccacaagcaaacatgttttttttttcttagtccagaaagaagaaatac

SEQ ID NO: 195311 - DNA, 623 bp, Homo sapiens
taagtttatctcttgctttcattatttctaatcagcatactctccatatgacaactatatctatgataagaaaattgacttctttacctataaatctctgtactttcttgacagacaccaaagaactacatgttgactgtatcttgctggtaacttaaggagaatagtaacttgtagtttccacctttagcaactggacattggccatactctgatttaccaagagagtccttgtaatcacaaaggaaagcagcgatttggcttcagatattaaagcaactttttttgacgtggctagatggttaggaacacactgaagaatagattttcagtaatgagccatactttcaatgaacgtcccaaggaaaacaattttaagatcttgcataaaatagttcatatgcctcaaatttgcatttaattcttacattaggttgaaagctcatgtagaaaacatgtaaygtaaaaattggagagcccaagaacacagtcatttccccttgggtgctaacaaaaatatactacccaacagtgcctttgtttgcagtctaatattttagaaggaaaaaaagaccccacaagcaaacatgttttttttttcttagtccagaaagaagaaatac

SEQ ID NO: 195312 - DNA, 578 bp, Homo sapiens
tcttactactgcttttaaatttcatggaacacctattaaattgcttcgcagctaggttatgaggaaggggagccctgctcactcttttaaagttaaaagtgaaaagttacttgcgggtgattagggaaaaccatctcagaggagtggactgttggcatggagaccccacatataactcttgggggatggcaaaaacttgagagaggatgctttatttctcacctcctaaaatgcctttcccagctttctgtggtgagagagaatgagacagcagtcatacctaacagttggtgaaacagttctatgggagtgagggaaagtgaggggcctaggatgagtcagaaacatgtacatacggaaagggagagagacaatcctgattaaattrtgccttcttgcaaaaatatatatatttccacatttgatacaaagtgaagtatataaccttgacaaagcgatatctgtcagaaaaaaaattagaaaaattgctttaaataaacagtccttcaaaagatgtcaggcacagagactttctgagaaaatgtttccaaacttttaaggaacaaatagtatgttat

SEQ ID NO: 195313 - DNA, 594 bp, Homo sapiens
ctgtaatcccagctactggggaagctgaggcaggaaaatcgcttgaacatgggaggttgcagtgagccaagatcataccactgcactccagcctgggcaacagagaaagactctgtttcaaaaaaaaaacattgagtggacaaggaggatattctagtcagacagtcagggatctttaagaaagtgcttgagatgtggttattctacgtgggtgggaggggaatcactacacgctttgagaagcagaactctacttgctatccacttagtttttctttygtttcggtgacagaatttcttcaaaagcgcaatgaagtttcacttctcagctagcacagtgaccacctcttccatgctgtttgaagttctggctgtcttgtggggtccattgttaccacagtagaatccaaccaaggtgggcattgcccccaactcctggtgtgactagcaaccccatataaatggtttttcccatttcttcactttgaaacctcagtcaatagctcaagatccttactatatagaaggaagaagaaagggaacttccttttttaaacaacatttacataacactaacatggcttttattccaga

SEQ ID NO: 195314 - DNA, 569 bp, Homo sapiens
aagctttagactcggaatacatgggctacacacacacaaaaccaaggcctgtggatatgccatgtgttctggggaagactttttacaaaaccaaagaattgagttgtcctcttggggtctatgaaggagtcatctggccttggcatgtgtgatggtgattttcttaattgcctactaatatggtttggctgttcccccacccaaatctcatcttgaattgtagctcccataattcccacgtgttgtgggagggaactgcttggaggtaattgaatcatgggggccggtctctctcatgatagtgaataagtctcatgaaatctagtggttttataaaggggagttctcctgcacacgctctcttgcctgcctccacgtaagacgtgcctttgcttttcctttgccttctgccatgattgtgaggcctccctagcyacgtggaactgtcagtccactaaaccactttcctttatacattacccagtctcgggtatgtctttattagcagtatgagagcagacaaatacacctacctaaaattaagcattcatacgctgtgtgtagcagat

SEQ ID NO: 195315 - DNA, 569 bp, Homo sapiens
aagctttagactcggaatacatgggctacacacacacaaaaccaaggcctgtggatatgccatgtgttctggggaagactttttacaaaaccaaagaattgagttgtcctcttggggtctatgaaggagtcatctggccttggcatgtgtgatggtgattttcttaattgcctactaatatggtttggctgttcccccacccaaatctcatcttgaattgtagctcccataattcccacgtgttgtgggagggaactgcttggaggtaattgaatcatgggggccggtctctctcatgatagtgaataagtctcatgaaatctagtggttttataaaggggagttctcctgcacacgctctcttgcctgcctccacgtaagacgtgcctttgcttttcctttgccttctgccatgattgtgaggcctccctagctacgtggaactgtcagtccactaaaccactttcctttatacattacccagtctcgggtatgtctttattagcagtatgagagcagrcaaatacacctacctaaaattaagcattcatacgctgtgtgtagcagat

SEQ ID NO: 195316 - DNA, 556 bp, Homo sapiens
gcagcattcttggtgaagttatgtacgaagatgtgtggacagaaaatggcaaagtatgcccatgccatggtaaagaagccagtgtgcctggagtatgtgaaacacataaatcactctaagaggcaggatgagaactggatcatggaaggccctgcaccccaagctgaggacttgataggtaatgggtacccagaagcgatttagaatcctgagaatgataaaatcaatattgtggcataaatttggcaagacatgttcaaataaggagagagaaaaggctrgaaaacctcttcagaggtgaaagccacagaaagatgagggcagtgagaacggaaacaaagagtagggaggaaaactattgccaaccatagccagccaggtgagtgcctgactagtggtaagggtggaagactaagggtgaggaaggagccagacgactttgtggttttgaacctgaatgattggtaagtggagagagacagatggactggcagacaacagacagagagagagacagacagagggaagtctcaacctcagggagatgtttggggag

SEQ ID NO: 195317 - DNA, 545 bp, Homo sapiens
ctgtactctgtcctgcatctgctctaatctccacagccagctgacctcacccaggaccttcacccaggatcaggctgatcgattcccacctcacctccacattccacattgttcttcagggcagggtagagagaccttggcagctggtgggggaagagcaggtggtctcaccagctgaccctagaacatatgcagatcataatcatccatggaaaagcaactgsgtttggcaacccgggcaatggaatcaaagctggaagacctggttcaagggccagtttggatccttcctagctgtatggttttggaggaagttcttaaactctctgagcctctgtttccttaactgtaatgtggattcatccttaccttcccgggctgttgggagggtgaagaggatgatatgtgagggaaagctctgtgtaaaggaaagggactgttgctttccacgagaaacattcccacctgcctcacccagcagaaagggctgttccttgccctgccacagccttcacctcctctgcacatttatgactccttcaccc

SEQ ID NO: 195318 - DNA, 618 bp, Homo sapiens
ggtgtgcgggggtgagacaggcccaccctgcccacaggaatgtgctcgtgcgtgctgggtgaagcttgcatcactgctgatggcagtgctgagcccagggctggggctgggggcttcccaggatgctgtccaggtggagcttyggattggaggagctggactgagggcaaagccttgaggggagcagattccttacggggctggccccaggtggtccagggccagggagcaagtcaggccaggtggatctggcacagctgccctggaaagacctgggcctttgcttatggttctacccagggaggacacagagaacacatagcctcctgcctgcctctagccatcacccaaccactctgcccagtggaacccaagtcgttgccctgagagtcaggatcttttgggggctgggagccccatctcctttcagtgtctcaccctcattcactgtgccctcattcacctgtgccctattgcatccctcttccttccaccaaccttctccctgttacaccttggcctggaatgtctcagaatagctgcctcttccaggaaggctttgtgagctcatcgggggaggctgtgatttctcctccctgctgtctcataaatgccctc

SEQ ID NO: 195319 - DNA, 642 bp, Homo sapiens
ctgttcctgcagtgggtgcagattcagttcagcaccttctgaaggcatgccttcctagcagcctttcagtggctctggagatgacagatgtaagacttttgtgaccgtcaccctgtgcctctagctctgactgtccactttcctctcatcccaggcctaaaatgattggaaaytctgaggtcacagtgtccatcctcaccttcaggctcaagagttgtgacacagctcaggcacacagaaggcggttctactgttaaagcctcatcaggaagggcatttctctgcctctctggtcattcctttcagtattgctttggaagttcctcttatagtctgacctcaggcaaccttggtgattggtgattttgtcagataatattcagagaaagatgatatattttaagaaagacaaggaagcagaaatgtttagtgcagaatctgatctaactggctttcaaaggctggtggtcgtggaatgtgagggaggccactggataaactgaggcctcctcaatgtcagtctcctcctggttcccttggaccagaacaagaccagaccccagatctgcagtgggtcctctcacggccctgggccactgcccccttaccttgttgatgaaagatgcgaaacggttgttgagg

SEQ ID NO: 195320 - DNA, 642 bp, Homo sapiens
ctgttcctgcagtgggtgcagattcagttcagcaccttctgaaggcatgccttcctagcagcctttcagtggctctggagatgacagatgtaagacttttgtgaccgtcaccctgtgcctctagctctgactgtccactttcctctcatcccaggcctaaaatgattggaaactctgaggtcacagtgtccatcctcaccttcaggctcaagagttgtgacacagctcaggcacacagaaggcggttctactgttaaakcctcatcaggaagggcatttctctgcctctctggtcattcctttcagtattgctttggaagttcctcttatagtctgacctcaggcaaccttggtgattggtgattttgtcagataatattcagagaaagatgatatattttaagaaagacaaggaagcagaaatgtttagtgcagaatctgatctaactggctttcaaaggctggtggtcgtggaatgtgagggaggccactggataaactgaggcctcctcaatgtcagtctcctcctggttcccttggaccagaacaagaccagaccccagatctgcagtgggtcctctcacggccctgggccactgcccccttaccttgttgatgaaagatgcgaaacggttgttgagg

SEQ ID NO: 195321 - DNA, 518 bp, Homo sapiens
aattcactcatataactacggaaaatggcaaatccaaaatctgcaaagctgatgtgtcagtttgactttgaaggctggaagctgctgtagaaccagagggagctaatgtcccagtttgaaggccataaggcaggagagttctctcctaccagagggagggtcagtcaggcttttgttctattcaggccttcagctgattgaataaaacctacccacaatagggagggcaatctgctttactcagtctatggattcaaatcttaatctcatccaaaacatcctcacagaaatacttagaatagtgttsaccaaatatatgggcacctgtagcccagttaagttgacacataaaattaaccatcatggtaacagtgggtaacagtgggtaatagcattagcaaccaagatctaggtacaagatgtgctcactgctgctggtgtgtcactgcttctgggccctgttaggtgacaataaatacatttatatgtattattatatgtaacaatttgtatctatc

SEQ ID NO: 195322 - DNA, 507 bp, Homo sapiens
gaattcactcatataactacggaaaatggcaaatccaaaatctgcaaagctgatgtgtcagtttgactttgaaggctggaagctgctgtagaaccagagggagctaatgtcccagtttgaaggccataaggcaggagagttctctcctaccagagggagggtcagtcaggcttttgttctattcaggccttcagctgattgaataaaacctacccacaatagggagggcaatctgctttactcagtctatggattcaaatcttaatctcatccaaaacatcctcacagaaatacttagaatagtgttgaccaaatatatgggcacctgtagcccagttaagttgacacataaaattaaccatcatggtaacagtgggtaasagtgggtaatagcattagcaaccaagatctaggtacaagatgtgctcactgctgctggtgtgtcactgcttctgggccctgttaggtgacaataaatacatttatatgtattattatatgtaacaa

SEQ ID NO: 195323 - DNA, 574 bp, Homo sapiens
gaattcctctccctcacggccagatgggagaacagccggaatatccacaggtaggatcatgcagaggtcatcctggcgtctgcctgtgggccttctaagccattttacccttttctgggaagggaggaaagtggygtcctggctgctcggatgtaacctgcatcacagacacagccctggtctgttcagtggaaactatcttactcatgacatcccggtcatatatctggttttacactctggaaaccctcctccaagagacatgccaatcaattgcactttgaacacacacaaagagagctggctgattagaagagccctctgctgagtcttccttcaaagagattaattctttgtcaagaatgagtcatgggccctaatttttcattcccctgcgtcggggctttcaaatatctacacctcttaaagcagagcaggaagaggtttctgttctccatttacactgagtcagtcactcctagcataatggctctcctgacctcattgtcattgtcaccatcctcatcatcagtgtgtgctgatttagtgcttacaggtcagctgggagccatgc

SEQ ID NO: 195324 - DNA, 495 bp, Homo sapiens
caattaataatattgaatatgtaataccccttaatttattcacctcttagatttctttaatcattatttagtagtttctacctatagcttcttttctatatattttgtcagatttatgcctaagtmcttaatctaattgtgctattgtgaataatattgatttttaatttcaaatttcagttctttattgctggtatataagaatgtacttactttttggccaggtgtggtggcttacacctgtaatcccaacactttgggagactgaggcaggtagattgcttgattcccagagttcaaaaccagcctggacaatatggtgaaaccccatctatacaataaatataaaaaatcagccatgcatggtggcatgcacctgtagtcccaactacttgtgtggctgaggtgggaggctcacttgaacaagggaggttgaggctacagtgagctatgatcatgccactgcaccctagcctggataacagaacaaaaccc

SEQ ID NO: 195325 - DNA, 495 bp, Homo sapiens
caattaataatattgaatatgtaataccccttaatttattcacctcttagatttctttaatcattatttagtagtttctacctatagcttcttttctatatattttgtcagatttatgcctaagtccttaatctaattgtgctattgtgaataatattgatttttaatttcaaatttcagttctttattgctggtatataagaatgtacttactttttggccaggtgtggtggcttacacctgtaatcccaacactttgggagactgaggcaggtagattgcttgattcccagagttcaaaaccagcctggacaatatggtgaaaccccatctatacaataaatataaaaaatcagccatgcatggtggcatgcacctgtagtcccaactacttgtgtggctgaggtgggaggctcacttgaacaagggaggttgaggctacagtgagcyatgatcatgccactgcaccctagcctggataacagaacaaaaccc

SEQ ID NO: 195326 - DNA, 495 bp, Homo sapiens
caattaataatattgaatatgtaataccccttaatttattcacctcttagatttctttaatcattatttagtagtttctacctatagcttcttttctatatattttgtcagatttatgcctaagtccttaatctaattgtgctattgtgaataatattgatttttaatttcaaatttcagttctttattgctggtatataagaatgtacttactttttggccaggtgtggtggcttacacctgtaatcccaacactttgggagactgaggcaggtagattgcttgattcccagagttcaaaaccagcctggacaatatggtgaaaccccatctatacaataaatataaaaaatcagccatgcatggtggcatgcacctgtagtcccaactacttgtgtggctgaggtgggaggctcacttgaacaagggaggttgaggctacagtgagctatgatcatgccactgcaycctagcctggataacagaacaaaaccc

SEQ ID NO: 195327 - DNA, 495 bp, Homo sapiens
caattaataatattgaatatgtaataccccttaatttattcacctcttagatttctttaatcattatttagtagtttctacctatagcttcttttctatatattttgtcagatttatgcctaagtccttaatctaattgtgctattgtgaataatattgatttttaatttcaaatttcagttctttattgctggtatataagaatgtacttactttttggccaggtgtggtggcttacacctgtaatcccaacactttgggagactgaggcaggtagattgcttgattcccagagttcaaaaccagcctggacaatatggtgaaaccccatctatacaataaatataaaaaatcagccatgcatggtggcatgcacctgtagtcccaactacttgtgtggctgaggtgggaggctcacttgaacaagggaggttgaggctacagtgagctatgatcatgccactgcacyctagcctggataacagaacaaaaccc

SEQ ID NO: 195328 - DNA, 630 bp, Homo sapiens
caagtataaggtaatatcactaataatgatcattcctatttcagtgctaacatttcctccctctaatggctcacctgccaaactcaagtcagttttatgataaagtgtacaaaaatgaaggaaaaaaatccaaatgggccatgtccctgcctagttaattttccatttatatgtatttcttttaaatagtattaagtttaaaaattaaccgttttgaatggagataaaataggatgaccaaggccactggagacccaccagagtccccacaacctgcaccctttttaaactccttcccttctgtccatccccacagcgctgcaagctggaggctgcggtggcccaktctgagcagcagggtgaggcagccctcagcaatgcccactgcaagctggctgagctggaggacgccctgcagaaggccaagcaggacatggcctgcatgctcaagcagtaccaggaggtgatgaactccaagctgggcttggacgtggagatcgccacttatcgcaaactgctggagggtgaggagatccggtgaggacaggggctccagggtcccttcaggttcctactcagagctggactgaaatattccaggcagagaatgttcaaactgggaaagactct

SEQ ID NO: 195329 - DNA, 630 bp, Homo sapiens
caagtataaggtaatatcactaataatgatcattcctatttcagtgctaacatttcctccctctaatggctcacctgccaaactcaagtcagttttatgataaagtgtacaaaaatgaaggaaaaaaatccaaatgggccatgtccctgcctagttaattttccatttatatgtatttcttttaaatagtattaagtttaaaaattaaccgttttgaatggagataaaataggatgaccaaggccactggagacccaccagagtccccacaacctgcaccctttttaaactccttcccttctgtccatccccacagcgctgcaagctggaggctgcggtggcccagtctgagcagcagggtgaggcagccctcagcaatgcccactgcaagctggctgagctggaggacgccctgcagaaggccaagcaggacatggcctgcatgctcaagcagtaccaggaggtgatgaactccaagctgggcttggacgtggagatcgccacttatcgcaaactgctggagggtgaggagatccggtgaggacaggggctccagggtcccttcasgttcctactcagagctggactgaaatattccaggcagagaatgttcaaactgggaaagactct

SEQ ID NO: 195330 - DNA, 555 bp, Homo sapiens
taaagttcacaagtacagtagacactcgtatatgaaacaatgtgcagaggatggacaaactgagtgactaagaatgaaaataaatgattcttattaaagacatgcaaaacaaagaagaagggcaggtctaagagggtcaagaggtaaggttaggagaggtaccaggagaaccaagaagccttcacggtaggatccgtatcactggctgtggctggactagatgggggatcagcttagactgaggagttgttaatccatgagggagaggctgggaggtagagagtgacatccggctgagtcctgtctgtgcctgtagcccctcagcacctaayaacaccacactgtaagcgcccaggaaacagctgtaaattgacaactcagaagaatgaatctctctcctccaccttccctagaccaggagatgcccccgacttcaatagcaaagcagagatgaacgacctcacgatgacaaacataccagaatgtcatgaggttgagtttctgttcattcaatcagcatttgcagggctgggtgcagtgtggccataaaggcgg

SEQ ID NO: 195331 - DNA, 595 bp, Homo sapiens
taggcattttaattaagctttctatactttgaagctgtttggggagaggaacatactgcattattttttaatgcaaacctttgggaggttcatgatacagaggctagactttaaagagcattgctctttatgtaattctgggttgtgcttatatagagcttgacattattagacgacactaaaagataaaatacaaattctataccctccaaatttaaaaggatcactgtaactctgataaatgtcaagtatcartagtagtacgcttaaacagtcctgaagagacaaaaactgatatgataggcacagccctgcattattgagacagcaatgataaagaacaacacttaagagattttactaacagtttaagagttctggcacggtatagcctgtgtataatgaggcttctaaacgttcagctcacagaactagcgtttgtggagataaaatactttacaaactctgtttcattaatctttacaatatctctgtgaagaattatgaacaccaatcaacagattacagagtgacagcagtaaaatattggatgaattgccaatcctctcaaagagagccctgaagattctcctta

SEQ ID NO: 195332 - DNA, 548 bp, Homo sapiens
tgtcttggaagttaaattgggaaatattgcattctctgagatgataaactctgctgaagataaattatcatgagaaatagttttaattgatttaccataataaaagttatgtgactttgaagtgcaaatgacacattaaaatgaatctacagtatgttgataataaagtggcttctttgttaatggaattactgacactgcagatgctttcaggagcgatgtcttctactgttaatcaagagacttcaatgtaaaatgaatgtgctgtttacttaaatccagcccaactttctcgcttcttccttcagagtaggtcaattttaaggaccaaatatcaaaaattctaaccatcacagagtcaatatttttgctattgcacttctgcttttctctgatcatcttgactacrtgcctacattctttctgtgtaagtaaatccaaaagactgtcagagaaaaggacagtgacaaagtccacagttaagttcaagtttagatgcctacataagtgtaaactagtgacattttttccataatataaattcaaaa

SEQ ID NO: 195333 - DNA, 569 bp, Homo sapiens
gcaggctaaaagcctcagaaatttaaatgaaaataagaaaaaataatctttaagaaatagtttttggaattatgttagattcaaaacaaacttaattgggagaaaaagatggttgaattaagagtaatgatttcaccatatagttaacattaaatgtatatttaagtatactctttttcactraaatgtctcatttttgggaatttctcaggataaaacttcatggaaaatattactgaaatgtaccagaaagcaacggtattgacactaaaccaaagataacatgtagtgatgggcttttgctcaagaccgattagagttgcacaattaaattaaaagcaacattttttttttttgagatggagttttgttcttgtagccaaggctggagtgcaatggcgcgatctctgcttactgcaattctcctgcctcagcctctcgaaaagcaaccatttttaatagctcaaaaggagcaaccttacccaagagaagaaaaaaaattaaattagacacttctgtgtgtaacaatcagcctctggctagatgtttgaattctgtcgattttttga

SEQ ID NO: 195334 - DNA, 569 bp, Homo sapiens
gcaggctaaaagcctcagaaatttaaatgaaaataagaaaaaataatctttaagaaatagtttttggaattatgttagattcaaaacaaacttaattgggagaaaaagatggttgaattaagagtaatgatttcaccatatagttaacattaaatgtatatttaagtatactctttttcactaaaatgtctcatttttgggaatttctcaggataaaacttcatggaaaatattactgaaatgtaccagaaagcaacggtrttgacactaaaccaaagataacatgtagtgatgggcttttgctcaagaccgattagagttgcacaattaaattaaaagcaacattttttttttttgagatggagttttgttcttgtagccaaggctggagtgcaatggcgcgatctctgcttactgcaattctcctgcctcagcctctcgaaaagcaaccatttttaatagctcaaaaggagcaaccttacccaagagaagaaaaaaaattaaattagacacttctgtgtgtaacaatcagcctctggctagatgtttgaattctgtcgattttttga

SEQ ID NO: 195335 - DNA, 619 bp, Homo sapiens
cttagtgattgatttttgactagtctctgtgtttgtctttgatttgttggctattcaaagacactgcttcccatagagaaatttcagtatgctttttgtttttacctctcacatgtctgttctgatagcaggtctagctgaggttttaattctaacttaccagcatggcacatgtatacatatgtaactaacctgcacaatgtgcacatgtaccctaaaacttaaagtataataataaaaaaaaatgcaacctaagttagatcaattagcaaaactagaattggttttgtgtgtgtgatgtagaattctgtgtgtacctactttggactaatggaaaagcttaatttttagaacttctaaaaatattcctaacttcaattacaaatattgtcagtcctattcaacattytactaaaaaagtttaattctaaaaataaatggaatacaacatatttggtggtttcaaggatatggtacagattttaaatacaaatcaaaccccacccccaaaaaaatcatgggatattctcagtgaaggactgtaaaatctttgtaaaagaatctaagctaaaaagtttgtaaacattaaaaagccaggagcagtgcatgtgtttatagc

SEQ ID NO: 195336 - DNA, 590 bp, Homo sapiens
aagcttttttgtatatactttttggctgcatgtaagtcttcttttgaaaattgtctttgacaaacctgacaaaaacaagtaattgggaaaggattccttattcaataaatgctgctgggagaaatggccagccayatgcagaagattgaaactgaaccccttccttacaccatatacaaacattaactcaagattgactagtgatttcaatctaaaactaaaaactctaaaaatccctggatgacaacacaggcaataccattttggacataacaataggcaaagatttcatgataaagacaccaaaagccattgcaacaaaagcaaaaattgacaaatcggagctaattaaaccaaagaacttctgcacagcaaaggaaactatcaagagagtgaaaagacaacctaattttgcgaagtatgcatctgacaaaggtctgatatccagcctctataaggaacttaaacaaacttacaaaaaaaaaaaaaacattaaaaactggggaaaggacacaaataaacacttttcataaggtttcttttatctggaaagttttataatattataattcaaaggccaagcaggagta

SEQ ID NO: 195337 - DNA, 345 bp, Homo sapiens
tatgacaaaacgtgtagatagcatgaatttagaagtatgcaaaatttattgactgctgtattttattattaaaagacacaaacatgataataatggttttcaaagtattgtgcttgttatgattttccaaaaaaargaaatatatatgaaatggaatattacttagtaaaacatgtaaaattatttttgaggtacttttaaacaatgtcatgttattatattactttttctttaattagcccataagaattatagtacataaaatttttaaaaaaataactgtgcatcctgaatgttattgctttctcctaaaaatagattgagtaaattaataacatgttgggg

SEQ ID NO: 195338 - DNA, 467 bp, Homo sapiens
tgcagtaaggttttagaagcagttcagagttagctattgtaacaactcctttttcaaaattctgataagttaaattttttatctttactgtaataaaggatgtatccatttaaatacgccttcttttgtgaaacacaatttagttctgcacaataatctgaatccagtaaagcacacatgtaagaaccattatgcatttcccctacctgcctcattagactgagcatacaaaagagatcaatgactagatggaattgacaaaatatgcattttcccttttcctgatgtgctaagacagatagaaaataccgctttcgtttttctsttcgttcctctgaagcatttcaactttcatttctgtaactgttatcacattcaacgacttcaacacactctccatttcactagcaatctgttagtgatctgctcctttcatctctccacagatttgtcctaatgaaattatt

SEQ ID NO: 195339 - DNA, 620 bp, Homo sapiens
atttttccatttcattctgtaaaactgagataacttttgtatacaatgtggctataaagaaaggcagcagtcctgtgcagaagaggagggctattgaactgtccccactatttctacctcctgtaatcctggcccagaagggaaaaacaggcttcataaattaatatatttatttctattgtatcaaataaaataatctaaaattaaccatttccgcccatagatacatgcctcttttaattaaggctgtgcatgattattttaatcatcgtgatcatcctccttactattagtgaattttgcatccacttttaggaccacatgcattgattgtcagcctctgtactgatccatggaggcaaacagcctctctgacaatgaccataacccttataatrcccctaaccaattgtgcaggaagtcattctctcccagtttctgcaatgagcaacttactccctaaagtgtgagatttgataccttttctcagcatgtgttcagacaaatgttattattggtcataaaattattcagcccagtgacctatggtgacagtgaatttcacaaggtgactgcctgctgagtgaagcatctctttttatttgttttaaatattgtat

SEQ ID NO: 195340 - DNA, 418 bp, Homo sapiens
gaattccatgcatacctgtgtgggagaaaatggatttcaatgactgactataaacccttttgaaacatggctagaaacctttctctagtacctgcaagattgcagtcagtgtctttcgtattgccagtgtctttggtattgtcagtgtaagataatcacgatagagcctctttggaatttggcagtgcagatactttcaagattccctggagaaatcctgactcttgtgtgtattttttttttttttttttttttgtcgagtgtgttccctatatcaactttagctataaatgaaraaaccaataattactttgagcaaaggatgctgaatacttcataagcatataataataattcccagtcttgactcagagttagacctaaggagaggcacagttgggccccaattacatttttt

SEQ ID NO: 195341 - DNA, 551 bp, Homo sapiens
tctgccccaaactcaatctgagctttagttaaggactgatctgctttcagccactaaagattaatttgcattttcctatatttcaattaaatgaaatgatttaatatgtcctcttctgtatytgtctggttgcactcatggaacattccactataatccaatatattatcctatcatacagtcgtttccaagtgcttctagaaattgaaatattatccccttcttcattcttgatattggtagcattttttctcttctctctgtatctcattgtttgaaaacagagccacaggtgtgtcaatttttatgaatattttcaaatcaacatcttaaggttttattaattttatttattgtttatacattttctatataattgatccccattcttcatttttttctttccttatacttactaactttggtcttaaattgctaaattgctcctgttttcctagactcctaaagtggagcacacatttttgttttaaactttcttttactaataaaaacatttagaactataaataatattccaagaattgctttaa

SEQ ID NO: 195342 - DNA, 551 bp, Homo sapiens
tctgccccaaactcaatctgagctttagttaaggactgatctgctttcagccactaaagattaatttgcattttcctatatttcaattaaatgaaatgatttaatatgtcctcttctgtatttgtctggttgcactcatggaacattccactataatccaatatattatcctatcatacagtcgtttccaagtgcttctagaaattgaaatattatccccttcttcattcttgatattggtagcattttttctcttctctctgtatctcattgtttgaaaacagagccacaggtgtgtcaatttttatgaatattttcaaatcaacatcttaaggttttattaattttatttattgtttatacattttctatataattgatccccattcttcatttttttctttccttatacttactaactttggtcttaaattgctaaatkgctcctgttttcctagactcctaaagtggagcacacatttttgttttaaactttcttttactaataaaaacatttagaactataaataatattccaagaattgctttaa

SEQ ID NO: 195343 - DNA, 608 bp, Homo sapiens
cgttccctgtgagtgctgcaaaggtgtgagctcctctcctactccagtcctggctgcagatctcggcttgacactcctgggctgcccaccacacccgtggggttagctcaggctttatgttccctccccarcttagaagccgtagaagggaccttggaagttctgtggcagagggcctgtcccttgtctcttggggcttcaccttggagaaaagcagagccactaccaatatttgcaattggcccaaagtggggcactggcgttgtgggcccaagccaggggcctctgcctggtggtgagcaggggagctggtgggggagacggactggcctcttcttattaggatgcctatggcttgctggaggtgtgggtaaagccctcaaggcctttgttccttcccctgtaccagagtggcaagggaagtatcactgcagtggcaatggcagaggggcttttggttgcttctggaaactctccctcagagaaacagttaatggacacagctaatggcaatgttcagccaagggatggggtggttgcattgctggactgtgccaggggacctgcttggtgaagaacaggagggaaagggttcacagggaggaggg

SEQ ID NO: 195344 - DNA, 612 bp, Homo sapiens
caaaattattcattttatggtgatattttactagcagctctaacggagccagtacttttaaatttatatgcctctgtccaaaggaatacactgttaagaggtttaatcatagcacctgaaaaagtaaaaatgtactctccttggaaatatcttggatacataccaacttcccagtcagtaggacctcaaaagattaaatactagcaacttacacaccttaaatgattatcaaaaattactgggcaatattaattggctttgccccaccttgggcataactactgataagttacaaaacctgttttctattgtaaagggcaatacagccctagactctcccaggtatttaactcctgcagcagaaagggaaatttaggaaatagagcaagctatttctccgacataactagattacatagatgcacaatagtcagtccaattttttgtatttcatactaaacattacccaacagrattaataggacagatggccccagggctgcactttctagaatgggttttttgctcacataccgggactaaaacactatctccctatatccagctagttagtagagtcatctatacaggccacagacaatgcaatctatt

SEQ ID NO: 195345 - DNA, 460 bp, Homo sapiens
ccaagatgaataaagttaacacactatactgtacactttaaaatggttacaatattaaatgttatgttatgtattgttgatcacaattttaaaaatagctacagttgactaactgggtgcggtggctcacacctgtaatcccagtactttgggaggctgaggcaggaggatcacttgacatcaggagttcgggaccagcctggcagacatggtgacatggtgaaaccctgtctctacttaaataaatacaaaaattagccaggtatggtgccgcatgcctgtagtcccagctactcgagaggctgagggagaagaattgcttgaacctaggaggcggaggttgcagtgagccaagatcgcaccactgcactccagcctgggtgacagagtgagactctgtttcggraaaaaaaaaaaaaaaaaaaaaaaggagtagctacaatccaagacaaagagaaat

SEQ ID NO: 195346 - DNA, 378 bp, Homo sapiens
ggaagggtgaggatatctattaattttcaacaacctctataagtttgttttattatctccactttataggtgaggaaactaaggcttcaggacattaaatrttatacaatacaaggccatgagttcacaaaagttgtgtaagcacagttctgaactaggtctatcacatttccaggtccatgctctttctactgcatcctgctgacaagaagggaaagtgtgggaactgatggaggttcagcaggctctgttgtcagcccaacaaaagcaccaaagaaggtaggaggaaaatagaaattgaaataatacataaagttacagcttttgtttactgaacacttatgatatgctagagaatgtactaggatttttcatgcg

SEQ ID NO: 195347 - DNA, 620 bp, Homo sapiens
agacagaaagaatctaggttgctgagggctcagagcaagagggaagggggcaatatgaggctaagagtaaatgaggaasagcttccttcctgggttctttcttacttgtgatacaaagtgagaaagtgataccagtgtatcactcacggagcaaatgtaatggttgtattaaaacatacggtattagataaagtctacatagaaacttacactttgaatttttattttatttggctaaaaagtagccgctttaagttcatatattttctattcccaaagaatttctatggagaattttgtaagtactccacatgccatcttgagatttcattttgtgagttgatcacttttgtaattacaagtgtaataaagggtcattgtagggaatttggaaaacacagaatgacagtccctctaattttgtatatttttgcattctcctgttttaccaattctttacatgtgaagtattgaaattatttttttaaatgaacattttgtccccatgagatcctgagtcttctaaggctaggagttgattctatacacatttatatccccggtgcctagtataatggatggtacctcagaggagctcaacaaaggatttttgaggtgac

SEQ ID NO: 195348 - DNA, 610 bp, Homo sapiens
acaataaaataagctagggagatgaaaatgttactaacaaaatcataaagaagagaaaatatatttactattcattaagtgtgagtggatcattataaaggtctccatcttcatcatcttctcattgagtaggctgaagatgaggaggaagagaagaggttggtcttgctatctcagaggtggcagaggtggaagaaaatccacatataagggracccaagcagctcaaacccatgttgttcaagggtcaactgcatatgccctaaatcaaaggcctatgtatggtactgtgtctccaatagctaaactacatgaatctaggaatcaatgggtgaaagtggatgtagctcctctcacccttacgcttcctagcagaatttatctttcttgtcctgaaaagttaagctctgccaagatggagtccctagttcttatttggaatgggggatgggaagaggtgaagaacacttcaaccaagtgacaaaataaggattccactgaattgaaagcaataaccattaccacctggccactttggaatcatgcccatgaacaaccaggcaaagaaaagttacttcttgctgaggtaatcaatactgattaccatgag

SEQ ID NO: 195349 - DNA, 610 bp, Homo sapiens
acaataaaataagctagggagatgaaaatgttactaacaaaatcataaagaagagaaaatatatttactattcattaagtgtgagtggatcattataaaggtctccatcttcatcatcttctcattgagtaggctgaagatgaggaggaagagaagaggttggtcttgctatctcagaggtggcagaggtggaagaaaatccacatataaggggacccaagcagctcaaacccatgttgttcaagggtcaactgcatatgccctaaatcaaaggcctatgtatggtactgtgtctccaatagctaaactacatgaatctaggaatcaatgggtgaaagtggatgtagctcctctcacccttacgcttcctagcagaatttatctttcttgtcctgaaaagttaagctctgccaagayggagtccctagttcttatttggaatgggggatgggaagaggtgaagaacacttcaaccaagtgacaaaataaggattccactgaattgaaagcaataaccattaccacctggccactttggaatcatgcccatgaacaaccaggcaaagaaaagttacttcttgctgaggtaatcaatactgattaccatgag

SEQ ID NO: 195350 - DNA, 565 bp, Homo sapiens
aggtaaatagcacaaacaagctttaccatgttcattgggtacgcacagcttgggcaaatgccataccctgggatcagggaaagcttcctgaggcaaataatttttaagctgagaccagatagcaaagtgtacacaggatggggaagagtgggcagggaaagtgttccaaaaattagcagcaatgtatgcaaaggcctgagagcaaagggatatgacttttcaaggagaaatcatccaaggcagaatagttgataataaggaaaatgatggccaggttctgttgattatttctgaggatggaataagtatgggaacactgygagtgaatcttagcttggtgtaggaaatgctgtggtgcccacatcaatgcccaagaccaccagtgattttagcctcagctctggtaggcaactctatgtgagctcatactcactgtaggctgctggaatcccacctcaagctctcaacttgtgttttctttcattctgccccagatccttcttcagctgcaggaggagcttactgaagcaatgcaagagagttagtgccccggggccaaacttta

SEQ ID NO: 195351 - DNA, 479 bp, Homo sapiens
gagtttaaggagtctgaaggtcagactctcaaggtcacacattagtagtaagtatcagagttgaaattgtgatgcaagcctgtattagcacagtcttagattctgtgtgttaaaccatgctgcctctcatttacaattaagaggatcatttattcattcattcatctttccatttggaaagacgatttttcctccagaggacccaccctccctataaggcaatgggtgctatgttcacaccaggttatcctgatctgaaataaccttaactataaatcaaacttgtgtcttctagggggcggtacgtacattttataaaataaaaagttcatgctttmagttaaagtttctacccaatagtcactcaaaattcagcctctgatgagaataccagcatttttcattttaagtaactgaagaaatataatgtgaaatacagaaactccttaaaagtgaaaaccaactgataaaactttcag

SEQ ID NO: 195352 - DNA, 462 bp, Homo sapiens
ttagttaagttacgatgtgttcacactggattaggatgagctgtacatccaattactggtacctgttataagaaagccaggtgaagaaacagtcacaccagagaagagcatcatgtgaagactggaggcaaaaaatggagagatgcatctataaatcaaggagtgtcaagaattgtttgtaaccacmagaagctaggaagagtcaaagaaggaatcttctttgaagtgtttggagagaacacagcactgccaacaccttgatttcaggctcctagccttcacaataataggaaaacaaatttctgttttttttagccatgcagtttgtggtaatttgttaaagaagccctagaaactaatatgccttatatcctaaaacctcactataatcatttatctgttccaggagtttatttgtcaaatcctttggattttctgtacagacaaccatgtcatcttcaa

SEQ ID NO: 195353 - DNA, 607 bp, Homo sapiens
gcacacgggtagattacatccctcaccttccttagcaattaggtgcttccagttctcgttaataaaatttaggccattaatgcagatctctttcagcttagcctataaaactcctatgaggttatctatccttctctttcttcatctggtgggtgaatattcacacacagagcacccttggaatccacatcctaaaaatcataaaatcccatggcagcctgggatgcttagtaactagatgcagacctcttcaccaatttaacttgatgtggatgggacatatacatataccatgatagaacacagataatgtatctgttaacactagccagcattaccataaatataggttcaaagacccaaaagaggtaagaataagtgctaggtttttacaccccttcaaagctcatggtcatgccatacccagccatgaccaggttccctaaatgtcgaaaccagcttggttagggataccctaactcagcrgcactagaggaattaaagacacacacacagaaatacagaggtgtgaactgggagatcaggggtctcacagccttcagagctgagagccccgaacagagatttacccacatatttattaaca

SEQ ID NO: 195354 - DNA, 567 bp, Homo sapiens
aaattcctacagcaataacaatgacagaatttgtgagatgcttactggatttcagactctgcattttgctaggcttattgggtttattcttcatcaccattctcattctgcagatgacaggggtaaaactgagagccatggagctcaaggctgcacagctaaaggagatagggccaggattcaaacccagctccctcagcctgcagagagactcgtcctgtgctgttcagccacccagaccaggccaagggaagatgtttttccctttcagcatctttcctggtaatcagyactcatgagacctacagctgtcacaaggtatcatgaagttctattgggtgtaagaaagagttgactacatgctaactctgtcttggtaagagagctagactagccatgctactggggagtgatacagcagtatatgttctcatcaaatatccagttcctgatacagggcctggcatcaaagagacacacgataaatgattcttgaacacattttgaaggaagtcatagcgaatgcactcagggggaccagctctgacctttctgccagtgcttccc

SEQ ID NO: 195355 - DNA, 567 bp, Homo sapiens
aaattcctacagcaataacaatgacagaatttgtgagatgcttactggatttcagactctgcattttgctaggcttattgggtttattcttcatcaccattctcattctgcagatgacaggggtaaaactgagagccatggagctcaaggctgcacagctaaaggagatagggccaggattcaaacccagctccctcagcctgcagagagactcgtcctgtgctgttcagccacccagaccaggccaagggaagatgtttttccctttcagcatctttcctggtaatcagtactcatgagacctacagctgtcacaaggtatcatgaagttctattgggtgtaagaaagagttgactacatgctaactctgtcttggtaagagagctagactagccatgctactggkgagtgatacagcagtatatgttctcatcaaatatccagttcctgatacagggcctggcatcaaagagacacacgataaatgattcttgaacacattttgaaggaagtcatagcgaatgcactcagggggaccagctctgacctttctgccagtgcttccc

SEQ ID NO: 195356 - DNA, 390 bp, Homo sapiens
ccacagtggactcattcagactcacagtcctgtatttaatgttaactttcgggctgatacctggaggggctggagagcttaagttccactccttccctgggtgaagctggcatgagtgtcacgtgggctgcattattttgactgtttttctcatttccctaaagctgactgtggcagaggggcctattccaggctaggaactgstcaccaggttagcttaaccttagagaaagatgaggtgttagaatggaaaagtggccaagattttggttttcctgagctcatttttctcagaaaagccaatgagtgcctaatgactctgcacccactgcccctgcacatacacagtctttgaacaatgtccctgactgtagccaagaaaattcctag

SEQ ID NO: 195357 - DNA, 600 bp, Homo sapiens
atatgctaaatgctttaatctcattatcttattttatgttcacaaacccctgtaagctaggtattatcatttgcattttaccaatgaggagaaactggggcttcaggtgataaaggaacatgtttagggtcatgtagccaataaaggacagaacctagatgcagcacagatacctataatgccgttgctttcaaacactagataatggttcccttgcgcagctcttaaacccacagaacrgtacacaccccacagcatccctctcaaaccttgggacctccagtccttacactgcttactttagtgcaggcatacctatgtgtccggcttttaaaactcataaccctgggctcatgggggccaggtcctttctttttaagcttcttttcttgctgtttcaaccttctgttgtgggatgttgctaaagaaaaaaagtgttcatgacacttgttaaagatggcaaggaagactattcaaggtcagggactaggatgggaagtatagggaccactgcaatggggtcttacagtgggggagacagactggtctcaactctgactccagcaagtgtaagtggagatttatagccaaggagcaagg

SEQ ID NO: 195358 - DNA, 584 bp, Homo sapiens
ccatttgatcaaaataatgctagacagtttctctcttgatctgtttagaatcaagataaggtcaggtgttaattaatgttgaattaccaaaaattcccatggaaatgcatatgacatctacattataaccataattagctaattaaccaatcaattataatgattaatgtgatcataatgaatgtatggcaaatggttattaattcttagagtttccaaagtaaatgcattaatcacagttraacctgtggtaaaatgtgggtgcctaattatctttctgaactctgggtgtgatataataattttcatctgcttagaacttttgccacacattgtcttattattttcctcacaacaaacttgtgaagcagttgaaggaaagttgtacttttattgttgttgtttccatttcacaggtggttaaactaaattttagaggggcaggtgattttcccaatatctcatatcttcatatttcttccttcaaatagatcttccaatgatcttagttgatacttggagttctaagcttgaacatttagacaaggctttccccataccttcccagatgttctgctacataa

SEQ ID NO: 195359 - DNA, 522 bp, Homo sapiens
tatgtcaggtcttgactgtggccctaagtacaagagtgtaataagatatacctattaaacagatgttggactttaatggatatgttttgaacagtcaattggaattaaactttcaataactactgtagaacaagaaaatctatctctttacattaaacaaagcaatgtggcctcttactggttctctgaagcagtgatyttcccagatgggctgtggccagaatcaatgagagaaacttttacaattcagatttttgggtcctcaattgccaagtattttgatttgtggctctagggtgaaatgtaggcagctgaatttttaaatcgtcctaagcatagagacaatcagagacggtaatttatagacagacgtagtcatttttcaaaaatcaatttttgttactatagaccaagtatttcattcacccatttattctacatcaattgatcaattcattcccttatttctgcatttattccccattagtttaatattccctgattacctggtaagcataagtt

SEQ ID NO: 195360 - DNA, 401 bp, Homo sapiens
agtaaactgaggctcagagaggagaggaatgtgcttgaatcttgcagctgggagaaggatagatctatctaacaacatttctgcaggagtgtcacagacctgaggacaaaatgctgagctgcccccaggacacagcaggacaagtgacactctgctgggggtaaccaaaggccatggraggtgcaaagggtggtacctcttacgtgcagagtcaaggagacaatttctaagatgcttccttggggaaaactgaagcaaaaaacagaagttgtggatcctgagctgcaaggccataaggaggaagctgggtacgagcaagaggggatggaagtgtccagaagtggttcaggggatgagcctgaccaacagagactccctgggccagtgagggcagctctagt

SEQ ID NO: 195361 - DNA, 484 bp, Homo sapiens
ctgcaaggaatttggtgaactaaagcatgccctctgtgccgtgggtatgcaagtaaatgaagcctagaccccccttgggctttagtgatagtttcctagctgtgtcttcgcctgaatcttgggaaataaatatttgataggacaacttaagaaggggtgggcactcaagagagagaggcaatgtcaaaaacagaagcttagaaggaagacatggaccaatatattagagaaacagcatatggtgagaatagttgaaggtggagcccagcaaatattaagagtttagggtaagagttagaccttgagggcatgataagaaacaaattttattttgtaggcagygggcgctgtggcaagacttggcatgagaataacccgtttagactgtcactttcaatagttcattctggcagagattctgattaaaatgggggaagttggccatctagccctattgcaacaattgcatttggaagaaaatgag

SEQ ID NO: 195362 - DNA, 640 bp, Homo sapiens
cgcacatcctcctatcctgtctcccagtttcttgctggctccatccctatcacccatctgcttcccagccttaactccactaaccttctgttccaccagttttgttcctcacgcccaaacatgtcagttgcaccgtagcacaaacttcctatttacagtaatggttctcaaccaccaatgttcctttaagctaccaatgactttttttaaaatgctattttccaggccccaccaacattattggatcaaatctctaggagtaaaaccaagacacttattttcatttttcaaaattgtcatagatgattctaaagaacagatatggtggcaaaccactatgttagagcatgagatttgtctccttcatcatctctgctgttgctcttccatcttcccttagtcctgcctctttctgccttgccatctgtctgccttctgggaacaaccttcttccttgataattgcccctgagccatcttttctgtccaagtcactcgatgcctttatcttagagttggctgcttcaaacagcctagaatctcaraattagatagaaaccaagagttcctatttttatcatcctctctaataaatgtttttaaagactgtgcacaagagtctttgggtttgtaaatttcag

SEQ ID NO: 195363 - DNA, 362 bp, Homo sapiens
tctagttttgttgaccttctgatctctagatttactgtctctggtacattttccaaactgaacacagattatgactcttgaaaatgtgtgasttactccagtacaacttttgttcatatctgtacacttatacccagtgtctcacacagtgcctcttacctagcaagccctacaaatattgtgattgtgtatatgtgaaggaatgaatgaatgaagagagaaattaataaaacgtcatgccagcatttgcagggtgactttgcaccttaaatatatattatcttgataaaacataaattttgtgtttttaacattatttttaactatacatttggatcttaattatttatctgccagtcagg

SEQ ID NO: 195364 - DNA, 590 bp, Homo sapiens
tataactcattgtaatgcataatcctcaattggaccctgaactattatagaatcctggatacaacattaaatccctgactttggtaagtgtattctgtctatgtgaaagtgtctttgttattaggaaatacacactgaggtatttgggaataaaggggcatgatgtctataacttactcccaaatgattcataaaaaaagaacacgtaagaatgcacatgcatgtacagaggaaagagcaagggaataaagcaaatgagcagtactctaagagttggtgaatctaggtgaaggctatacccaagctcatgattttctgcaacttttctctaagtttcaaaataaaagatctgaaaaaattatttcaaaataaaagtgaaagctaaaaacaaaaatttcatgggcactcttctttataatctcagcttttccccttccactccatttctactctaccacccttgttcaggcttttatcaatttacttggatgctgtaataaccttctaactgcctcccacttatagtaattttcctcyccacaatacattcggcatactgttaacatcctctttccattcatactccccaa

SEQ ID NO: 195365 - DNA, 612 bp, Homo sapiens
tgtaaaatggggataatagtcccttcttcagagaatgtttgttagaattaaatgagtcaatacatataaaggtctcagaactgccctggcatatggtaagcacatagtgtgccttagctgttagtatttgatcctcacaacaaccctgtagtactacaatttctacctgtgttgggtacttctcaagacactcatattctcagcccagcttttcaccccagctgtttgttcagccacctgctggcacggatgtaacagcgccttgctgagctgtgtggcttctcttacttcctgcttgagatgcctgcagagcccacttggctgttctgacccaagcagacctggaagtgtgggggagctaatatcccatgtggcaccccttgatgccaaggaggtattggagccaatggaaaaaccatcccttcttttattccctgagaagataatccagaggtatattgtgacccatcaaaatccaagttcagttgccccagcagtagccactccaktaatgcatgcagtcatggccttcccccattccccatttccttgagcccatttgcccatccatgcctgtcaatggagctcacgtcccagagtaaactgcccaga

SEQ ID NO: 195366 - DNA, 610 bp, Homo sapiens
cataacatatttaaggtaatgaatgaactcctcatgaaaaactgtcttatcatccatctgaaagacaaaagaaacccttcataaactgcaccgataaaaatcctttattcccaacatcaccctaagactgatgaaagcactagccataataatgcagacaaattaaaatatttatttagtaaactcttarttatccaaaccagccaaagggcaatcaatttgcatgaatttctctccaggctataatgggagtacacaagcttgacttttgacagtgaaaagattcctttgatatatttttttcaatatctttgattctcaataagcctttagtaccagtacgttacaaatacgcttcttcaacaacccaaaatcaatactggcttttatatttctcatattcaggccttcctatcaccagcagtttctttatgagataacttgcacatcctatctcatatcctcaaagccctgtgatgtttactcacaatttttcttggacctcaagataattcatcttccccaaattaattgttctattcttctcaaggttccactcaaaacaaacaaatagtatgtacataaataagaatggccaggccctaaaaat

SEQ ID NO: 195367 - DNA, 535 bp, Homo sapiens
cgaattccttttatttgcatctgttttgtccttgaccccagacactgctttctcctcacccaccctacacacagtcatgttctattattttatttctcaatatttggttaacatctaatattgcaaaaaagatgtagagcaattcatacagacacttagataagagaaaattgagcacaggtgactgaaacatcaatcattttcctatacacaagcagatataacagaagtaacgttacagtagcaagagcaggtatgcagtgctrggcataaacttactgagaatagtgcaggaatgacatgaagaaaactacagacttccctgtgaaacctgcatgatgttcatgagtgagggactggcagaggcaggtgctgttggttgcctactcaatgtctactctttctttttttatttgtacatattcatgggatacaattgcagttttccacatggatattttgcattgtggtgaagtcattattattgtaaattatttcatcaattttggtccaagaaatggaaatgcagcagctt

SEQ ID NO: 195368 - DNA, 420 bp, Homo sapiens
ttttaatttttttctgtaaaaagagggtcttactgtgttgctggggctagttttgaactcctggcctcaagtgatcctcctgcctggacctcccaaagtgctgggactacaggtgcgagccaccacacccagcccattttgcactttatgggatgtcatttcctgattgctcctgaaggacatgtgytcctaataatatggaacacccacttaatccttgcagccctgtgaggtaggccttgttattcctgtctcaggaaaccacagcccagagagggtgctgacctgcccatggttgcgtagcacaaatggcagatcttggatttacatatgcttggctccaagctgttcctaccactccatcaccctgcctttctgtctggctcctggaaggtaattacaatgtctctgatctcatgt

SEQ ID NO: 195369 - DNA, 597 bp, Homo sapiens
cagaagcttcagcctgaaatcattctttttgggctcttcagtagcatcacttctttctactccaccaaacactgagaggcgggctcatctcaggatcagagatggaaaggcctcttctagagttattggccactccctctctcctaatragcagagcgggcagagaggccgggcacactctgacttgtaggtaaccagtttcctcacatccctgcccacaccacagttttggcttttcaacaataaagctgtctctctatcctaggactctcttacggggaacagtaaaactgcaacatgatcacgtacccaaagagtgcattcccagcaagatatattagcagctgttgcctctttacatgatctcctctctccctcattcccctagctatggaaaactttccatctgagtccttaggaaaagatggagggtgtgtgaaatgagagaccgagacatgctgccatctcagaagggctttatttctacttcatcacggtctcatacagacccagaggcatcatcatgtgtttccatttggtatccttgtgactttttgtagtgttttcccttaagaaaactttgagtaaactctgtac

SEQ ID NO: 195370 - DNA, 563 bp, Homo sapiens
aaacaacaacaactaaaaaaaaacactttctttgctcatccacaagaagccactcctcatccattcaagttttatcaagagactgcagcaattcaatcatatcttcaggctccctttctatttctcttcctatttccaccacatatgcagttatttcctccacaaactgtgaacccctcgaagtcatccatgagggctggaatcaacttcttccaaactcctcttaatrctgatattctgacctcctcccatgagtcacaaatgtacttaatggtgcatcctttccaggttttcaacttactttgcccagatggatcggaggaattactaccaatggcagccatagccttacaagatgcatttcttaaatagtaaagacttggaagtcaaaattactccttgatccacgggctgcagaatggatgctgtgttatctgcatgaaaacaacatcaatttccttgtacatctccatcagagctcttgggtgaccaggagcattgtcaatgagtggcagtattttaaaaggaatgtttttttcttagtagtaggtctaaaatggtgg

SEQ ID NO: 195371 - DNA, 487 bp, Homo sapiens
tagaattcagaggaaagtctgggctggaataaagacatgtgcatgatctgcatgtagatgtggctgaggccatgggtgtgcatggtctctctcagggagagcacatagagcctcactgtccacagtagcctgtggccatctgtgcctatttggatttaaattagttcaaattaaatcagattaaaaattcagttcctcagttgcactaagcaaaatgaggaccaggaaatgcccccttggatttaacaatatggcggtcacgggtgaccctagagggagctattttagtggatgaayagggccaggagccaatgtggagtggtttggggagctagagttgaaaaagcaaccaggatagacaacttaaatgcatttggctggaaaagagaggagagaaatagaatgtcgactgaagagtgagcagggatgaggagtggagaagagggctttgtttgtaggtttaataagagaaactagtgtgtatgtt

SEQ ID NO: 195372 - DNA, 625 bp, Homo sapiens
agtattttgcatactcttctgaatgtgctgtgtagaatgaaccataacattttaggttctagcctttatcctctttgtgaattcagaaacattagtttttttcagtaacatatctaagtttggtaatattggtcttacctaaagaaccaaaaacatcttccaagttcacccatgtacttaaagtttttcttagttttctcagagcctaggaaaaatcagaactttttaatatccattaggtgatcaaagtgtgagcctatgatattgcatagagagtaagaaactagctgcagttatatttccattatcttggtaagaaaacaaaagagccttcggaatgtggtcaggaacacagggataaggscatgcattcacacatgccatctcccagggccacagcctgtcaccctgggagcgccgctcttcatagccagctggggtgtgtgcataatgctggctgccaacagggaccgagttcatggttgattccagtgaaactctataatcactgcagttctcaaaaccctatctcagcccaccaatgccgacacacacaccacaggccagctctctcctgaagcacttgcacactcaggaggaacctggtgtggtttgacaaggctgt

SEQ ID NO: 195373 - DNA, 527 bp, Homo sapiens
tcaccaccttggacagttattgtgaaagttaaatgggataatatatattagcagggtgtgagtagaatacaaatcacctaaggattttatccccctaactttagaactggcctccctcccatgagattacagtatttgaaaggggttgtatatatagttctccatctcattttcttatcagtaacctcatcctctattggcccaacaaactggcccctaaacacctgtactggatrctaggaaggtctctgtctcaacttattcacagtctcttacgggaacagatacgcaaaaagaggtgttcttttctcctaaatctgccttggagaatgccacagacagcattctggagaaataaattttgtgtgtttgagctaagaactgaaactggcaacggtaaggaagaggcttttcaggaaagaggcccaaggaagtttagtatgactcagacaacaatatatgcagagcgcaggggacaaggtcaggcatgtattccatataattcatcaatttctacttcttaggtc

SEQ ID NO: 195374 - DNA, 492 bp, Homo sapiens
taatcacacaataatacccggggacttcaacactccatactgaggcagaaaactaacaaaggtattctggacttaaactccacacttgaccrattggacttaatagataactacagaaaaattcacccaacaacaacagagtatacattcttctcattgtcacatggcacatactatgaggttcaacacatgctcagccatgaagcaacacaaagtgaattttaaaaaaatcaaagtcataccaaccatactgtcagatcacagtgcaataaaaataggaatcaataccaaggagagctataaaatcatacaattacattaaagttaaataatcttctcctaaatgactttgtgtaaagaatgaaattgaggcagaaatcaaaaaattatttgaaactaatgaaaacagaaaggcaaataacagaatctttggggcacagctaaagccatattaacaggaaggtttacagcgataaatgcctacatcaacaa

SEQ ID NO: 195375 - DNA, 530 bp, Homo sapiens
caggcaagaaagtcggggaaaaaagagtgacgagtttagaatgatacctacatacataatggaaatgtattgttaaggtagaatttcaaaacatttaggagaaaattgcaaaatatcgttgttgaaaaaatgcttgacaacctggtgtgtawatttaccaggtcaataacgtggttctcaccttcctctgtgtggtaaaaaaatttcagctgcatcagacaaacataaaaatgaaatcgctaaattattagaacaatctatcagcctttggagggctatatttagcaagagatacatttacaaacattcaaatgaaacagattgatatacatgacaacatgaaaagtaaaattatatgcatagcaatgacattactggaaagaaaataaattttaaaaacaaactggaaaaagtttgcaaggcatacaacagggggctaatattatgattaaaaaaagtggtagtaacaaataaaagaccaacaactaaataaaaagatgggcagaacatatttcataagaaatgaagtg

SEQ ID NO: 195376 - DNA, 592 bp, Homo sapiens
aggaaggctttcagaaagattaacagtataaatttttgataatgtactaggtccttccatgtggagacctggccttgccttaattcaatgagttttggttaagtaaactgtttcaagtctgaaaattgattgaggagccatgaatctctggttgattcaggttagacttttgttcactcgacctagaaattttcagtttatatagattgacataatttggcyctgtatacccacccaaatctcatcttgaattgtaatccccatgtgttgggtgaggggccaggtgggagttgattgaatcaaggggacgtcccccttgctgttctcttgatagtgagtgagtttccatgagatctggctgtttgaaagtgtgtggcacttccccctttgctctgcctgcagaactgtgagtcaattaaacctcatgtcttcataaattacccagtctcaagtagtctttacagtagtatgaaaacagactaataaacagatcaagtaaaagcttagtaaactttcatttcttatctacttcaccatgatcaactagccaacaccatatgtttgcaggagtcaggctgttctgattgctgct

SEQ ID NO: 195377 - DNA, 534 bp, Homo sapiens
ttcccagttcagtgactgtagttcccactgtaaggtctgagttacagagaagagcaaccacaaagctcctgaaggatgctaggttttcttcccgcaaaaatttatttcttgcagtagtggtgagagatttgtcttttggatagcctaccctatcaccactacaatgtgggtgaatatgtcttaartgacaaaccgctctaacattccagtctttctaaacctttgaatcccttcctctacattaaatatgataggtttagcatgtctaatgtacaaatggtgggccaccttttggtctatgtttcatccacccaaataaactgatggtgatggcagctgtggcctgtctggactggctactgtgaagatactggatgcaggaggggaaggcgtggccagtgctgtgcactccatggagttggcaggagccagacacaggtgggagccctgcccccttccaagttggcagggccctataaccccgggtacacctgcagtcaacaagctatggctatggacctaggcatccctgag

SEQ ID NO: 195378 - DNA, 326 bp, Homo sapiens
atacacccttccaagactgaaccagaaagaaattgaatccccacaagaccaataaagagttctgaaattgaagcagtaataagtagcctaccaactaaaaaaaccccaggaccagatggaatcacagctgaattctatcaaatgtaccaagaggagttggtacctttcctacaaactattcaaaaaaaatttcaaaggagggactcctccctaactcaatctatgaagccagcaatatcctaataccaaaacctggcagagatacaacmaaaaaaaagaaaacttcaggccgatatctatattgtgttattttacttttaatagga

SEQ ID NO: 195379 - DNA, 511 bp, Homo sapiens
aatttgatttgaatttggctctcccattttcggagtgatattgagcaatcaaaatatttacttgtgcttatttacttctttttaaaaatgacctgttggctttccattttctcttcctctctgcatcacttagctattaccccagtaatactgcctaacgaaccaccccaaaacttagcagcttaagagaacaatcatttcctcttgttcacgcacctgaatttggtcaaactgcagggacttggtggatttaggctgggctcgacagatgtyggcaccaagctgcaagtgagtccagctcagctccatgtgttttctgttttcctggcacctgtgggccagcttgggcatgtcactttcatgtgatggtggaagtgcagaagaacaagccaaattgcacaagtgtatttcaaatatctgttcatttcttgtctgctagcatctcattagataaatcgagtcacatggccaagcatcaaagtagcagaatcttatattcctccatgaaggt

SEQ ID NO: 195380 - DNA, 592 bp, Homo sapiens
aattaaaattattctcttcccattaaatttcactctccctacctcaccaaaaaatctgttttttaaagcacaaaactaaatgcttataacaaatgtaattaaaataatgtaagaattaatgagatacatgaaaaagtaatgtctgtatcttatttttcatgcaagcagattgatatgcattacccactttgttaaaaacatttatctagtaactataacatgagttcgacttgatttttttttaatttaatgtccttactaacaggtaatttctttgttcacccaggatagaygaatgcaactgaattatgttcttgaataaattgccttctggatttcaactacttcttttggaaagtagcaatatcttcaaattaacctcagttaacacgaatggactaaaaaaattgttcaagaatttatgtagttcaaaaattgtcagatttgtggaaatgaataatgtgtttggatttttggaagacctttacaaattttgaacctcctgcagttccatttggtgtaaagaattatactgtaaacaaggggctccatctgtacttttgaaataactattcagttttccatttcagtg

SEQ ID NO: 195381 - DNA, 554 bp, Homo sapiens
gacttataaatcacaatgatctcaaacattcagtggaaatatcaacaagtctgatagagctatttgaacatggaagtcaaattaaatattctacttgctaattggtaatatttgctggtcacttgctacatgccaggtataatgctaacagyatgataggcattatcttatttaatcctcttgacaagcctaagaggtaggtgtctttatcatccacatgtttcaaacagagaaattgctattcagtaacataaccaagttcttatagctaaaaggaggctaagccaagagtgaaacccagtcagggtgggtccagagtttctctcttagccatcttgtttctttgatccattaaaagcaagcatgcaagcaaacaaacaaaaaggttctcggtcatctcctgctctccacccctaagaggcaacattaagactcaggtttattgagaaccttgcatatgcccaaaagatccatcatgattgtcagcacagaatgctttgattctgactagatgctcatagaacaagtccttggagggccatatgagaccttga

SEQ ID NO: 195382 - DNA, 554 bp, Homo sapiens
gacttataaatcacaatgatctcaaacattcagtggaaatatcaacaagtctgatagagctatttgaacatggaagtcaaattaaatattctacttgctaattggtaatatttgctggtcacttgctacatgccaggtataatgctaacagtatgataggcattatcttatttaatcctcttgacaagcctargaggtaggtgtctttatcatccacatgtttcaaacagagaaattgctattcagtaacataaccaagttcttatagctaaaaggaggctaagccaagagtgaaacccagtcagggtgggtccagagtttctctcttagccatcttgtttctttgatccattaaaagcaagcatgcaagcaaacaaacaaaaaggttctcggtcatctcctgctctccacccctaagaggcaacattaagactcaggtttattgagaaccttgcatatgcccaaaagatccatcatgattgtcagcacagaatgctttgattctgactagatgctcatagaacaagtccttggagggccatatgagaccttga

SEQ ID NO: 195383 - DNA, 528 bp, Homo sapiens
taatccacctgtcacactgttgctgcaactcttccagcgtgtttacaacaccgtggtcactttgaaagccctcaatacagaaagccatttgtttcttataaatgcatgtttagatgtagaagaaagtagcacctctctaaaaaaaaatcacccagcagaataccctgtgtagtcctaccatgtaggcagacagctgcagaaaaacagaatatttaaaataaggtaacaaaacaacagtgccctggggacgttcgctcctccttaagtatgtraaacaaagcatcttaaaggcttagttttatagacatagagtgttattgaattcccaaggacactgttctatgcatcggatgtggcatgggtatatatttttttctttgcgaactttctttattgaaggtttgtgcgacggttcagcggaaattatgcggcatcttgcctcaaagagagctgcattaatgtgccaatgccctttatttaatgcactttaaaattctgacgcgccttttaaaaagtatgagttgtgtt

SEQ ID NO: 195384 - DNA, 564 bp, Homo sapiens
tcaagtactcagtagccacataggtgccatggttaacatattgaatagcacagatatagagcatttccattacagcagaaagctccattggatagcactgctctaggagattgtgacttgctcaagttcacatagctagtaagtggcagagccaaggtcttgggcctctgaccccagagctagtggcctcatcccagagcagctttgcctcaccatctagcctacctataggtcccttaccacttaattagtagtgtccactaaagaaaggtaaaccarttttcatatcacccttagagatgcacaaaagggtagcaccattctaatttacaaaatgtaaaaaaggatcaggtgatagggaacacaagccaagtctgaaaataaagagctaaacctcaagcatgttcactagcaacctgaaaattaagtatttgttgctctgtgtctattaaacacccaataattttcaaatattatcagtgtcaggcctttacttttcaaatattattaatgaccaattctgaatcttgaattagccagaagacaaacggcagactggaattc

SEQ ID NO: 195385 - DNA, 579 bp, Homo sapiens
gtgcatacatataaatttcagggcagataaaatattcagatgttaaagaaaactactgctttcagaaaaaaaaataggaaatatctttgtgagtgcaaactatcctccttaagtaacatgcaaaaagcataaaacatataggaaaagatttaggacttctgctgtactaaaatatcaaattattacaaacaaaaacattaaaartaaagttaaaaataacaacaacaacataagccatacaaatagatattaggaaaagatattttcaactcaacaacaaattaaggattactatccagaacacataatgacattctataaattatttttgaaaacccagtgtaaaaatgagctaaggatatgaacaagaaattcacagaataggtaacccaaatggcgagtacatacatgaaagcttcctaatcataccaggaattattgatattcgaattcaaactgatgcagggtagataagctccaaaactggggcttagtctgggctggtttttggcttcgctggggaaagaattcaagagtgagctggtggtagaagaaaacagctttactgaggcaccagcg

SEQ ID NO: 195386 - DNA, 495 bp, Homo sapiens
tgacgaattatgagtgtccagcaattggaaataagtggttagagaaagatagtcattgccctattcagaaatgcaaggttctacctagaccacaatttaaaaatatgtaaaatacactgttcacacattataaccactgcaatggaatccctttcttcttagtggagtagtaagtgtatgccatttctaaatagtgcttctcaatggttatgagaaatatgtcaaagcacttgggggtttctttcaaactaygtatgtgttccccaccccccagaatcactgccatagttagccactgctagtgattactagtaagccactgctagtgacagaagcatgtcatatctctcagctgtcttggaagcagacattaagatgcactaatttagcccgggactggtggctcaggcctgtaatcccagcactttgggagcctgaggcaggaggatcacttgagtccaggagtttgaatccaggctgggcaaaacagcagaa

SEQ ID NO: 195387 - DNA, 596 bp, Homo sapiens
ggtgcagcaaaccaccatgggacatgtatacctatgtaataaacctgcacttctgcacgtgtatcccagaacttaaagtataataaaaataaaaataaaaatcagtataattcactgtatcaacagactaaacaggagacaaaatatgagcttatttaacataaacagaaaaakcatttgacaaaatttatgaggaaaacctcacaggaagatggaatagaaaagaacttcctcaatttaataaatggcatctagcatcatatttaatgatcacagatcaaataagtaaaaaacagaaaaccataaagaacatcaatgataccaaaagaagtttctgtaaaaaggccaataaattaatagtaaaacaaaacaattgtttgcttgccctaaaatattaagaaaatagtttttaatgcatgcaatgtgattgaatatgctccgtaatttttgaaaatttggcttaacactttttgacatgggatccaaaggttttgctataaggtgagttttatctatactatattttagtggccataactgaaaaggacgctttacaaaacacatgaatatacacccgcctgggagaaatacacatg

SEQ ID NO: 195388 - DNA, 596 bp, Homo sapiens
ggtgcagcaaaccaccatgggacatgtatacctatgtaataaacctgcacttctgcacgtgtatcccagaacttaaagtataataaaaataaaaataaaaatcagtataattcactgtatcaacagactaaacaggagacaaaatatgagcttatttaacataaacagaaaaatcatttgacaaaatttatgaggaaaacctcacaggaagatggratagaaaagaacttcctcaatttaataaatggcatctagcatcatatttaatgatcacagatcaaataagtaaaaaacagaaaaccataaagaacatcaatgataccaaaagaagtttctgtaaaaaggccaataaattaatagtaaaacaaaacaattgtttgcttgccctaaaatattaagaaaatagtttttaatgcatgcaatgtgattgaatatgctccgtaatttttgaaaatttggcttaacactttttgacatgggatccaaaggttttgctataaggtgagttttatctatactatattttagtggccataactgaaaaggacgctttacaaaacacatgaatatacacccgcctgggagaaatacacatg

SEQ ID NO: 195389 - DNA, 609 bp, Homo sapiens
aatagtgaaaaagccatgaaattgtttatattcccttatgcactgccttttacccattgctttttaaaatgcaggatttttttaaaatccaaaatacatgggattgattatataattttgagctgagaaggaccttagcaatcattaagtcattcctttcatttyacaaatgagtaaagagaagcatgatgaagttgagtgattttagtaagatttcatggctagttactatcggaactcagatcagaaaagctatagctaataaatacctgcttgcccttacagctattttgccaggtgtgaacaatgaagacattccacctacagactctatcctatctaggtcttaaactgacaagaataaatcccagtggttcattacaagttccgtcccctcaaaagaatatgattcaaacatagtttgtgtaatgccataagccttatatgcttgggaaagggtggaaggtggctggtgggggtggtaaatttcatcccctggaggtcgtcttgaaggtctacttattggaatcaccaggagggcttcttaaaacatagactgatgagtcctatccccagagtttcaggttcagtgggtcaagagtggggcct

SEQ ID NO: 195390 - DNA, 516 bp, Homo sapiens
agtgtgacttcctgaagaatttattgataccttgattttttccccctattttcttctcatcagtgaaacaatgaggtcagggctctatgcccttgaggtctaaagttcccttgtcctcagagtgagagttcatagggctcatttcaaarctctcagccaatgaagaaattaaactggactgtcccaaagaagatgaaaatagaggctttgggagattggcccaaccttgcagttggtttcacagatgcaaacattgggagaattgcgaatttcttcacgtgcttggacttggcattctggaggttacaagtccttgtatgggaacaggtgtttggaacagatgagaattggccattaaatgctatgtacttgagcatctttttaagacatttgtgactaatcattcaccaaagatgaattttgaggaagttttgggccaactcacccaaggaggccgtctccagtgcatggcaaagaaaccatgctcaactactgttgaacatttggaagactgag

SEQ ID NO: 195391 - DNA, 520 bp, Homo sapiens
caaaggtgttgttaaggatactgccctccattcatagtacaaataatgggtatgtttacctgcaggcaagctggcttgactcttagaaccactgtgaattctctggatttcaaatatgtcttttagtgaaggatgctttttaaaccttaaatcttatgcggaatctcacaccatataaaacaaactcttctggctgaacaggttggtgaagaatattgaaacattacagctggcctgctctcacctgctgwacctgccccttactatttctggggaagccaaaggctttaagggaccaagatttgatgtctctgactctctctctctctatgcattagccactagagtttatggcctacttctagaataggtagaagacctgctaaactcattcttagctttatttcttctttcttactattttgtctttatctcattttctgtaactgttactttataattttattttatattttgtaaggcatctcaacttatttctgacacaaggcataaaaaaggt

SEQ ID NO: 195392 - DNA, 520 bp, Homo sapiens
caaaggtgttgttaaggatactgccctccattcatagtacaaataatgggtatgtttacctgcaggcaagctggcttgactcttagaaccactgtgaattctctggatttcaaatatgtcttttagtgaaggatgctttttaaaccttaaatcttatgcggaatctcacaccatataaaacaaactcttctggctgaacaggttggtgaagaatattgaaacattacagctggcctgctctcacctgctgtacctgccccttactatttctggggaagccaaaggctttaagggaccaasatttgatgtctctgactctctctctctctatgcattagccactagagtttatggcctacttctagaataggtagaagacctgctaaactcattcttagctttatttcttctttcttactattttgtctttatctcattttctgtaactgttactttataattttattttatattttgtaaggcatctcaacttatttctgacacaaggcataaaaaaggt

SEQ ID NO: 195393 - DNA, 430 bp, Homo sapiens
gaattcagtggccagaaacaaccctgtgtttccccaggaaggacacagacagcagattagattagggctgacctggcaaggatacagtttttctgccaaccatggcccttgcctgcgaaagcyctctggaccaaaacatctaataacaaaaaaatgcaagcagagagagagtaatcagagaaggctcctccaaacccatgagctgattagaattgaagccagtcagctgaatccactttataccataatcaaactcccatgggcatcaaagaagataaaggcaaaaaaatccatccgaaagacatcaacttcaaagactgaaggaacgtcacatcacacaaattagaaagaaccagcacaagaactctggcaactcaaaaagccagagtgccttttttcctccaaatgaacacactagttccccagcaag

SEQ ID NO: 195394 - DNA, 481 bp, Homo sapiens
accaacattgccacctactaactatgtgaccttgggaaaataatcaacctccatgacctctggactcttcagttataagttactaccacataccttaagggttcttgtctggacaaattgagaagagatgtgaaagcaattttcaacgtgctaacttccagcagaaactgcataataatttatgctgtttgtttagagtatggctcactcaaaggtgtatgttcaatctcatgccgcaaacaagtttggaaggtgagacagttttccacatggagctggacctcccaaccacttttactttaggatgtgcttagtgaatgtcacttgaggtcaacagaggcatcagcttgtggcccaggggttccagccactcaagcctcatccagacayccaaggggaataggaaataagtatcatgacccaactgtaacccatccatggcacaccagtaaggcagttctgaggtaaatattcacatttc

SEQ ID NO: 195395 - DNA, 640 bp, Homo sapiens
atggtttcaagcctcagatttaagtctttgatccatcttgatttgatttttgtataaggtgagagatagggatccagtttcattcttctgcatgtggctagctggttttcccagcaccatttattaagtaggatgtcctttccccaatttatgttttcgtatgctttgttgaagatcagttggttgtacgtatctggctttatttctgtgtttyatattctgttccattggtctatgtgcctgcttttataccagtaccatgttgttttggtaaatatagccttgtggcataatttgcggtccagtaatgtgatgtctccagatttgttctttttgcttaggattgctttgtcaattcaggcacttttttgttttgtattaattttaggatttttttccaattctgtgaaaaatgatgttggtattttgatgtgaattgcatttactctgtagattgcttttggcaattaggtcatttttacaatattgattctgctaatccacgagcttggagtgtgttcccatttgtttgtgtcatctatgatttctttcggcaccaactttagctattatagtttcaatcacaacgcaattctattgcatctattgatgaaatcctaatcaaaatgccagattttgt

SEQ ID NO: 195396 - DNA, 640 bp, Homo sapiens
atggtttcaagcctcagatttaagtctttgatccatcttgatttgatttttgtataaggtgagagatagggatccagtttcattcttctgcatgtggctagctggttttcccagcaccatttattaagtaggatgtcctttccccaatttatgttttcgtatgctttgttgaagatcagttggttgtacgtatctggctttatttctgtgttttatattctgttccattggtctatgtgcctgcttttataccagtaccatgttgttttggtaaatatagccttgtggcataayttgcggtccagtaatgtgatgtctccagatttgttctttttgcttaggattgctttgtcaattcaggcacttttttgttttgtattaattttaggatttttttccaattctgtgaaaaatgatgttggtattttgatgtgaattgcatttactctgtagattgcttttggcaattaggtcatttttacaatattgattctgctaatccacgagcttggagtgtgttcccatttgtttgtgtcatctatgatttctttcggcaccaactttagctattatagtttcaatcacaacgcaattctattgcatctattgatgaaatcctaatcaaaatgccagattttgt

SEQ ID NO: 195397 - DNA, 640 bp, Homo sapiens
atggtttcaagcctcagatttaagtctttgatccatcttgatttgatttttgtataaggtgagagatagggatccagtttcattcttctgcatgtggctagctggttttcccagcaccatttattaagtaggatgtcctttccccaatttatgttttcgtatgctttgttgaagatcagttggttgtacgtatctggctttatttctgtgttttatattctgttccattggtctatgtgcctgcttttataccagtaccatgttgttttggtaaatatagccttgtggcataatttgcggtccagtaatgtgatgtctccagatttgttctttttgcttaggattgctttgtcaattcaggcwcttttttgttttgtattaattttaggatttttttccaattctgtgaaaaatgatgttggtattttgatgtgaattgcatttactctgtagattgcttttggcaattaggtcatttttacaatattgattctgctaatccacgagcttggagtgtgttcccatttgtttgtgtcatctatgatttctttcggcaccaactttagctattatagtttcaatcacaacgcaattctattgcatctattgatgaaatcctaatcaaaatgccagattttgt

SEQ ID NO: 195398 - DNA, 547 bp, Homo sapiens
tggccttgttatataaataaaatccctttagtagtcaaaatcaaaataataaatctttcctctttttttytctttttttggccatttttcttccccaccacaccaccttttttggtatgtgttgggggaaatttaaccatttcagaggactcgttccccataatttgcaactttcctttggacttgagtgagtcagatagtgttggtaaaacccaatgggaaaaagattaaaagaaccacaaaatcagaaacatacaacaacaacaaaactgttaaggaaaacaaacaatcacaaaacttatatgattactgagtactcttatggtaaggagaaattaaaaccagctggttgttaactttagccaagacaaaaccccaattcagctacttacttagggatgggtctcaggctgaagactgctctccaccatcctagaagcaggaaaaaaaacctatcttcccttttggaagccagctcaaactgcataaaggagttacctgccttccctcatcattgaagcaggaaaacttgccttccttgttggaa

SEQ ID NO: 195399 - DNA, 540 bp, Homo sapiens
atgaataatactagggaaatttattcaayggttaccaagcacctattatgacaggcactgagctggatattgagataactgaggtggatcaagggtttaccatacaaccatcccacttcacacctgtgtcttatctaacccttacaaaggtgctattaactggtaatattagaatcccattatgcagataagggaactgctgctaaagaaatgttaatagcttgccaaaggtcacacaactagcaagtggaagacctaggtttttcctgggtctgtctgacttcaaagccagagtaagacagacccagagtcttaatgaatgtgctccccagcctcttcattatcaagtagagaggatacaaagagagtaaaccttgtgaatcccccaaatctgagacaggtctcagttaatttagaaagtttattttgccaaggttgagggtgtgcacccatgacacagcctcaggaggtcctggtaacttgtccaaagtggtaagagcacagtttagttttatacattttagggagacatgagacatc

SEQ ID NO: 195400 - DNA, 542 bp, Homo sapiens
tgaaatttaagttgtctagcttcagttctcaggactttaagaaagcacagcttagttttcagtgactccaaatttggaaatgcggcgaaaaaaagaagaaaaaaattgaaaacattattttgaagacttgtagccaagaaaaattagaattcagtccaaattgtagaaaatartaaaaatagaaaaacattaggaaagaatagaatctaacaacaggtatactatagtttctgaaacacaatttttctctctccagtttcccatttttactaaaggcaaatcatggtagggctggtttgctttattatagttggcctgattatttgtatatagtacagcaaggataattattttttacataggcttttaaatttgctttgatggaactttgttctgtagaaggaatctcagataagacttttttaaagctgagcccagccatggatttgtaccatcaaatacctatcagttgggtgagcctctcctcttgaagttccaagataaaatgtgggtctcctaggcctgtcagaaagtgacattcc

SEQ ID NO: 195401 - DNA, 506 bp, Homo sapiens
cctttcaccagttgagcatcagctccaactctctccagttttgtctatatccctctcaaagtatggtatccagaactgacctccatactccaagggatgttctgatcaagaaaaagaacaaagcaatcctcccaataatgaattgggatacagatgtatctgatgccacctgatatgtctttgtggatacagatgtgaagtccatttctgagtgcacgcatataaataaactccaratatttacacaacacattgctgattcccaccattcctgagctcttttatgctttcttctttctttcttttctatttttttggagatgaggtcttgctccagcccagcctggagtgcagtagcatgatcatagctcactgcagcctcaaactgctgggctcaagtgatcctccccgctcagcctcccgagtagctgggactatgagcatgcaccactacctcctggctaatttttatgccttccatttctattagtgtcatgaacactgaa

SEQ ID NO: 195402 - DNA, 506 bp, Homo sapiens
cctttcaccagttgagcatcagctccaactctctccagttttgtctatatccctctcaaagtatggtatccagaactgacctccatactccaagggatgttctgatcaagaaaaagaacaaagcaatcctcccaataatgaattgggatacagatgtatctgatgccacctgatatgtctttgtggatacagatgtgaagtccatttctgagtgcacgcatataaataaactccagatatttacacaacacattgctgawtcccaccattcctgagctcttttatgctttcttctttctttcttttctatttttttggagatgaggtcttgctccagcccagcctggagtgcagtagcatgatcatagctcactgcagcctcaaactgctgggctcaagtgatcctccccgctcagcctcccgagtagctgggactatgagcatgcaccactacctcctggctaatttttatgccttccatttctattagtgtcatgaacactgaa

SEQ ID NO: 195403 - DNA, 503 bp, Homo sapiens
taattggctatacagtaaatataagagtttatttctgaattgtcaattctattccattaatctgtgtgtgtatccttacgccaagttattataattttgtagtaagttttaaaattagaaagtgtgagtcatccaagcttgtttttctttttcaagatcatttggggtattctgggttccttgtattttcatrttaattttaggaccagcctgctaatttctgcaaaaaagacaggtgagattttgatagggatagtgtgggatctgttaattgatttggatagcattatcattttaacattattaagtcttccaatccatgagcatgggatatctttccatttatttaggcctttaattattattgtttgctcaggatggtttggctactctgggtcttttgtggttcatatacattttaggattattttttctatttctttgaagtatgtcattagtatttttataggcattgcattgaatctattgattgctttgggtag

SEQ ID NO: 195404 - DNA, 454 bp, Homo sapiens
catggtcatagctcacagcaacctcaacctccctggctcaagcagtcctcccaccttagcctcctgagtagctgggaccacaggcacatgccaccacacccagctaatttttttttttttttttttttttggtagggatggggtttcaccatgttgcccaggcccacccccaattcttgactattttcatgttctgggtgactcaggggctgagtcagaaggagccctgtgatgctagcaccttctggatacttgtactsataggtgatatctctccgcctgtcttggcccactgccttggtgctgatgtttttcccgatgcttgtggtctccattgaaattacgtgtaactcctcctgcccattcaccatcttcaccaaccagatgagcctgtcaccattcacttctgagaagacgaatctggtgtcatagacaataaagatgtcacctttgc

SEQ ID NO: 195405 - DNA, 537 bp, Homo sapiens
ttaaacataatttatctctctccagtcctcagttttcttaaaaacaaaccatgataggactgagttgtttgcaaaatagactttggtcttatacttggcttgattctttgcatgaagtgcagcaagaatacttatttttacagagggcttttagattggctttgatggaactctattccacaaggaatctcagataggactttctaaagctgaacccagctgtgggtttttaccctcaaatacctgtgagttgggtaaactcctctcttcttgaggtcccaagagcatagggttcctgggcctgttaaaaagtgacacttyttactcaccgcagattaggaaccctgtacagggactgtgtaggcaaggtatgaggccagttttcccaaggagcttttatcagttctgcaagtcaagcttgactccttaaaaggaagcatacccttccagtcaaaggccttggtaaaacaactagtgtcttcagttgtgtcctgttgcaaagaaaatggaatcttattgcactgatgcaaacaaata

SEQ ID NO: 195406 - DNA, 596 bp, Homo sapiens
gaattcctgcatagtccctcttgcgttatttaattacttgccatccacaggagcctaagaaggtgtggtttgtgatttttgctcatgatcagttgttttctcctgtgcttggtaatttggactatgagaacaacttcaggaggaaaacgtgggaactagaactcgtgtgtggcctgggaaagagcatgttcctccaaaaatagttctatatttgcctctgtcaggggctccaggagtgaatccacataggaagtatatatctgaatcccaaattcacctgcagcacagacctgcaattacacattccctgcagagacacagctgcttcatccagagctcaggtcaagacagacaaagttcttattgtccccatgttaatattgggatcttttttctaattcaacttttagaggctctctaaggttccaaccttatggaacattccacaaccttccagagtgaaagtrtcattcagttccttgccttaggttcctgctataccctggccacctagggcacaggaacagaaggtgtaccccccaccctaccccagtgctcacacactcactactctatttcatgactcctttgtgtcc

SEQ ID NO: 195407 - DNA, 556 bp, Homo sapiens
aggcttgttggttctggagagtgatcgcacagcacagaacagaaaatggcttaaaattggctaccaaccatcacagccctaaaatctcctcagccatccatgactctaggaatttccttgttggctcctcttcccaagcctcagtttcctgccttgtaaataggctcattaygtttccaagaacccagtcaccccattgctcttttttgtttgttttgtttttgagacagagtcttgcttggtcatcaaggctggagtgcagtggtgcaatcacagctcattgcagcctaaacctaatgggctcaagtgatccttctgcctcagcctcattagtagctgggaacacaggtgtgcaccaccatgcatggctatttttttccacagagacagggctggtcgtcaacttctgggctcaagcacttctccctccttggcctcccaaagcactgggattacaggcgcaagccacagcacccagcccatgccattgctcttgaagctgattcccctgtcaaccagtcaggctgcagcccctaacccctcttacacagccaag

SEQ ID NO: 195408 - DNA, 556 bp, Homo sapiens
aggcttgttggttctggagagtgatcgcacagcacagaacagaaaatggcttaaaattggctaccaaccatcacagccctaaaatctcctcagccatccatgactctaggaatttccttgttggctcctcttcccaagcctcagtttcctgccttgtaaataggctcattatgtttccaagaacccagtcaccccattgctcttttttgtttgttttgtttttgagacagagtcttgcttggtcatcaaggctggagtgcagtggtgcaatcacagctcattgcagcctaaacctaatgggctcaagtgatccttctgcctcagcctcattagtagctgggaayacaggtgtgcaccaccatgcatggctatttttttccacagagacagggctggtcgtcaacttctgggctcaagcacttctccctccttggcctcccaaagcactgggattacaggcgcaagccacagcacccagcccatgccattgctcttgaagctgattcccctgtcaaccagtcaggctgcagcccctaacccctcttacacagccaag

SEQ ID NO: 195409 - DNA, 328 bp, Homo sapiens
tgaattctgactaatttttctgaggatgttgttgttgattaagtaatttccatagatttaaactgtataatctttcttccccatgacatgtagctattgaggttgtccctttgtctgcataactyagagatcagtcaagatttggccagatttttctcaagcaccttgaacccataaagctcctacctcctgatgactgatctttgtgtgggtcaggaagcacactcagagtcctcccattctcaagtctgccatggccttactttcccacctggctttcttgagtctcacctgcacaaatgcattggttatctgcaggccagaaatg

SEQ ID NO: 195410 - DNA, 318 bp, Homo sapiens
aaaatattatcaataaattgaccacttacacaattagctccctcaatcatgcctccctgactaatactatcttggtagtatctgctggaaagcctagctgatttttggatggcatttcaatgcaaagtgattacaaaatgaagatgaaaagatggagaatttcatgaagttgattaaacygatgctggtgatgctggggaactctaaatcacaagcaagaaaagtgaaaatcagtgtatgaaggccagataattgaagaaaaaatctaaaagtgataattaatgtcatggtagctcctcctagagagaatgatttgaa

SEQ ID NO: 195411 - DNA, 573 bp, Homo sapiens
actttttaaaaaatatatttaatgtgttccagtcaattaattaattgtctttttaaaaaacattgtctcatctttggccaaagtccctttgtgttggctttggttttcttttaatgtgacctatgagtctttggtagcctctttgctttctgggacagtaagatgctccagtctcagcctgtgtatttcctcccctggcctgggaacccaccattcctccaaggagcyctctctcagtagtgagtgatgcctgcatttgacaatcaggactattggtgtgttcattgcagttgggttgtcattttttccatgcctttttagaggacatccatacaaaacacaaagcttcaggaaaaaaatcatgagctcatcctgacaagttaaacttgaactatactaatgagctttttacttaccttctttcatcttatgcttgtaactccttcattttacactgatagccttggttcctaacaacattaacaaaattacttatttccaccatcctacaccctatataggagagttacaaaatgatcgatagtaatattacaactacaaaattgactatta

SEQ ID NO: 195412 - DNA, 535 bp, Homo sapiens
  misc_feature (1)...(535): n = A,T,C or G
nnnnnnncagctggatatcagccgactgctgtgtaaatatataaataagacccaaattagtattattagtgtgtgacggctctctctgccaagctgctgtagtcagttgccttgaattcttttcatcatctttgcaagtctcagttcagtggcgtgatcagtcccaggggccatctcacaataggtcactgcagatgtgaggagaacaagttctctctgcctgttaacagaccacacttctggaacacttttcaggttcctaacttgtaarttttctaaaataacaccagaaaagatatttgccagtcattatttttgcaaaaatgaagccctctggagtggaataactctgtccttggggtcccaaggactatctgatgtgtgtcacatggtaggtgggaaatgattttcaaacagtgggataaatagtattgagagaaaagttgcattgatttaaggaacatgttaataacccctttctttaaaggacctctatcctccaggcatttaaaataatgataatgtcaccttaatg

SEQ ID NO: 195413 - DNA, 427 bp, Homo sapiens
tctctctcctggcattatcaaacttgcagccataacatctgaggtcactctctcagcaccaggggccttgtgaatctgtgagcactgtgccagcacagccttacaaagytgtggctcagacagggcagatgtgatcctcagtagcagggcaattgtaactatgccaacaatgactctttgggtctgggggaaagtttctgtctatccacagtggactctagaggatagtgtgggccaagtggatatagtattggttcattcagaaaaatacaaacttctctaggtatctcaagctagaaagtgatttaaattaaggaattaagagacaaaatgtgggagctaaaggagcaaaaattgggaaagttggtggtttccaaagatgagaaacatcagaaaatcacagcatcctaccaggagtaatgcccat

SEQ ID NO: 195414 - DNA, 527 bp, Homo sapiens
tcaagaacagaaatggaagttagatgatgtcagaatagtatcttcaaagtgtggagaaattttaaaaaactatcagcctagaagtgtgtatccagaawatagtatgttttagttacaagagtgaaatatattttcataaaacagaacagaaaatttaatattaacagacctttactaaagaaacataaaatatgttgaactccaagtagaatgattctataaaaaaggtagaagatgcaagaaggaattcagtgggtgcaaggatgagagaagattactgtgtaggtaaatctaagcaaagagtaatggtattaaaacaattttaaaaagtctaatttagggagagttagaatttaaaatagatataaattcctccaaaaataatagcatattaatctggacagaatgatcagacttaaaaggagttatgatgtgggaattatttgggaggtgggcaaatattctgatttagaccttaggttaaatatgcacatgaagatttctaagacaatctctaaaagaataca

SEQ ID NO: 195415 - DNA, 458 bp, Homo sapiens
cactctggggactgtggtgggttggggggagcggggagggatagcattgggagrtatacctaatgctagatgacgagttagtgggtgcagcgcaccagcatggcacatgtatacatatgtaactaacctgcacaatgtgcacatgtaccctaaaactttaagtataataaaaaaaaaaaaagaaatgtgtcataatagatggatactgatattcatcttaaagtattatagagtacctctcatttcctttccagtctcagcattctcccttttctattattactgatttataaattaatgaattgcttaagaagtaaaaataatttatttgtctggttgtctgtcaattttgctatgataaaaaatgtccaaaaactgtacttgtacatctgtcccacaaaaataaacactgtatctatccatatctggaataatagaagatttgccacaccagtcaa

SEQ ID NO: 195416 - DNA, 544 bp, Homo sapiens
tacttgtaagtgggaggtaaacatygggtatacatggacatgaagatggcaacaacagacactggagactactagagggcggaggcaagagctgaaaaactatctattgggtacgacgttgatgtgggttcaatcataccccaaacttcagcatcatgcaatatacctttgtaacaaacctgcatatgtaacccctgaatctgaaataaaaattgacaaaggaacaaaacaacaacaacaataaaaagagtgtctgtagagcatagaggatttttaggaaaatgaaaatactctgcatggtattataatggtagacatgtcacatagaatacacaagaccaagagcaaactctgatataaacagtgaactttggtaataatgatgtcaatgtaccgctctgttgggggatgttgatactgggggaggctgtgcacgtgtggggcagggaacacatgggaaatctccatttctgcctttcttttgccatgaacccaaagctgccctaagaaaatcaagttttcataaaaaatagcgtgtcccatt

SEQ ID NO: 195417 - DNA, 544 bp, Homo sapiens
tacttgtaagtgggaggtaaacatcgggtatacatggacatgaagatggcaacaacagacactggagactactagagggcggaggcaagagctgaaaaactatctattgggtacgacgttgatgtgggttcaatcataccccaaacttcagcatcatgcaatatacctttgtaacaaacctgcayatgtaacccctgaatctgaaataaaaattgacaaaggaacaaaacaacaacaacaataaaaagagtgtctgtagagcatagaggatttttaggaaaatgaaaatactctgcatggtattataatggtagacatgtcacatagaatacacaagaccaagagcaaactctgatataaacagtgaactttggtaataatgatgtcaatgtaccgctctgttgggggatgttgatactgggggaggctgtgcacgtgtggggcagggaacacatgggaaatctccatttctgcctttcttttgccatgaacccaaagctgccctaagaaaatcaagttttcataaaaaatagcgtgtcccatt

SEQ ID NO: 195418 - DNA, 609 bp, Homo sapiens
acatccttgtcactctatctctaacactatctcatttacacagataattccttttctacttaaatcatttttgtattgctggaattttttataaatttgcattacttgtataattaattatgaaaaaataataattaaaaaactattttttaggactactaaattagaagttatgtccctcaaaattatcactatccctatgaagttatacctgtctactctgtgtttatatctactttcactgaggtataattaacatgcaattaaatgcacaaatcttgagtgcttagtttgatgagtttagataattgtatacaatcagataaccgccacccaaaacaagatttagcatattaccattcccagggaaagttccatgtgcccctttgtagtcagttcccacctctcccacacaattactctctgttttttcacaaaatagactagttttrctatatttggattttatacaaatggaatcaagcaatatgcttttgtgcctggcttttttcacttaagttaacatctttaaatttatttatgttgtatgtatcagtaatgcattcccttttgttgctgagtattatttcactgtatgaatataccaca

SEQ ID NO: 195419 - DNA, 618 bp, Homo sapiens
caaatgacttagtcttaagaaacctcagtttcgtaatctgtccaacaggaacgatgatccccttcttacaaggtggtgctgagaatctagtgagatgatgcatgcaaagtccccggcacagtacgtgcacctctcagagatgcttcataagtaagagctgtcatcatcttcaccttcatcatcatcaccattgcttaatctatgctttcatcttctacttggagaaactgaggccaaggaacatactgaagaatctacatatgtgtgtatataattaaaatagcaggtggccattagcctgtctccataatttgagttcctacataacaaactgcaacccaaccagtacakaaacacactgaaacctaacctaggagtatatttttgtaacagatagctgggtttcagctaatgacaaacagcttcagccaactgatcagactatgcccaaataaggcaaatgcctcatgacatcatgcccaaataaggcagacacctagctgcagctgatcgggagatttctctacttcacttctgtgtttggcctataagagcttactgctcacacagctggatggagctctctgaacctcttctggttttgagtgctgccagatt

SEQ ID NO: 195420 - DNA, 557 bp, Homo sapiens
taattctataaataatttattagaatttttaggaacatagataccttcttaagtgatcctggttcataagcctctctatcctcattaatggacataggataagtgtgcagaggcattctaagcataccacaatctgactttgtactaaggatgaatctttttagttgacaactccagcagcatagttctacatattcacaaagctaaaattgaaaatcctaatcacaatatactagattattcctcctttagtatgccatgtattaaatgtattatttatacatgactaatacatatatgtattaatacatgacatgtattaaatgtattaaatgtattaaattttattaaatgaaattgtgcttgtaattatrtctcccccattagattaaaagctccttgagtagaaacctgaggtttagtacattgtaggcattgtataattaatgaataaataaatattccctctgaaaaaaaaattatcctactagcttctagacaaatttgaggtggactcctgatatcaacctctgtgacaatcaaagaaagtcagattt

SEQ ID NO: 195421 - DNA, 549 bp, Homo sapiens
catgtaactatcttcattgagcatatcatgggagaagtgttctcaagaataatctttggggctggacgcggatgctcacatctgtaatcccagcactttgggaggctgaggcaggtggatcacctgaggtcaggagttcaagaccagcctggccaaaatggcaaaactccgtctctaccaaaataccaaaaaatacaaaaaatacaataattagctgggcatggtggtgtgcacctgtaatcccagctactagggaggctgaggcaggagaattgcttgaacccaggaggcagatgctgcagtgagttgagatcaaaccactgcattccagcctgggggacacagtgagactctgtctcacacacacacmcaaaaaaaaaaaaaaaaaaaaaaagaaaaagaaaaagaaaaaagaataatctctgggaaacacttgacctatttgtcccataggataaatagaatcttagcccaagtgtcttgggatgtgataagctcagatgctccatgattctgggccatgtgcagaaagatacgcttccacatttt

SEQ ID NO: 195422 - DNA, 573 bp, Homo sapiens
caagctgagaatcaaatcaggaactcaatcccatttacaataactayagaaaaaaacacctaaaaatatacttaaccaaggagttgaaggatctgtacaaggagaattacaaaacactggtaaaaagaaatcacagatgacacaaatggaaaaacatcccatgctcgtagattcgaagaaccaatattgtgaaaatgaccatactgttcaaagaagtgtacagattcaatgaaattcctatcaagaaaccaatgtcatttttcacagaatttaccccagtaacaatgaccattattgaaaagtcaaaaacccatagacgttggtgaggatgcagttaaatggaaatgcttatgcactgttgatgggacgtaaattagaataacctctatggaaaacagtatggaggtttctcaaagaactacaagtaagtctaccattcaatgcaacaatcccactactgggtatctatccaaaggaatagaagtcatatcaaaaagttacctgtacttatatgtttatcacagcacaattcacaattgcaaagatactgtgatggttaatactgaatgtcaa

SEQ ID NO: 195423 - DNA, 573 bp, Homo sapiens
caagctgagaatcaaatcaggaactcaatcccatttacaataactatagaaaaaaacacctaaaaatatacttaaccaaggagttgaaggatctgtacaaggagaattacaaaacactggtaaaaagaaatcacagatgacacaaatggaaaaacatcccatgctcgtagattcgaagaaccaatattgtgaaaatgaccatactgttcaaagaagtgtacagattcaatgaaattcctatcaagaaaccaatgtcatttttcacagaatttaccccagtaacaatgaccattattgaaaagtcaaaaacccatagacgttggtgaggatgcagttaaatggaaatgcttatgcactrttgatgggacgtaaattagaataacctctatggaaaacagtatggaggtttctcaaagaactacaagtaagtctaccattcaatgcaacaatcccactactgggtatctatccaaaggaatagaagtcatatcaaaaagttacctgtacttatatgtttatcacagcacaattcacaattgcaaagatactgtgatggttaatactgaatgtcaa

SEQ ID NO: 195424 - DNA, 573 bp, Homo sapiens
caagctgagaatcaaatcaggaactcaatcccatttacaataactatagaaaaaaacacctaaaaatatacttaaccaaggagttgaaggatctgtacaaggagaattacaaaacactggtaaaaagaaatcacagatgacacaaatggaaaaacatcccatgctcgtagattcgaagaaccaatattgtgaaaatgaccatactgttcaaagaagtgtacagattcaatgaaattcctatcaagaaaccaatgtcatttttcacagaatttaccccagtaacaatgaccattattgaaaagtcaaaaacccatagacgttggtgaggatgcagttaaatggaaatgcttatgcactgttgatgggacgtaaattagaataacctctatggaaaacagtatggagrtttctcaaagaactacaagtaagtctaccattcaatgcaacaatcccactactgggtatctatccaaaggaatagaagtcatatcaaaaagttacctgtacttatatgtttatcacagcacaattcacaattgcaaagatactgtgatggttaatactgaatgtcaa

SEQ ID NO: 195425 - DNA, 570 bp, Homo sapiens
gtctgcaaacatacaagaggctttcacgatgtgccctccagcttcctttccaggctaatttctcaaaccatactccagccatttctgrtcagtttcagttccaccaataagtcatttttttgtatgtttttgtcatattcatctttgtaactgtagattctaagcactgtgcatggtacatttttttttttttttggagctcagtgactgtcaaataaatgtataagtacaacgaagtttctatgtgttcctgcagtttgcaaacagctaaactgactggatttcatttcatgctatttgaggtcttagtataggagctcatggcattcataaaattagtattaatagataatttagaaaagtgtctagtatgtaacattgtgcaataaatgtagtcatgattgtagttttattactactgtcctaaagagcaagctgaaactccaaatttgaatggtaagtctggaatgcaacgacttaaaatctaggctatgtgaatacacgaaattcacttcagggaccctgcagaacatctcaaggtgataaacagagatcttataaaataactga

SEQ ID NO: 195426 - DNA, 570 bp, Homo sapiens
gtctgcaaacatacaagaggctttcacgatgtgccctccagcttcctttccaggctaatttctcaaaccatactccagccatttctggtcagtttcagttccaccaataagtcatttttttgtatgtttttgtcatattcatctttgtaactgtagattctaagcactgtgcatggtacatttttttttttttttggagctcagtgactgtcaaataaatgtataagtacaacgaartttctatgtgttcctgcagtttgcaaacagctaaactgactggatttcatttcatgctatttgaggtcttagtataggagctcatggcattcataaaattagtattaatagataatttagaaaagtgtctagtatgtaacattgtgcaataaatgtagtcatgattgtagttttattactactgtcctaaagagcaagctgaaactccaaatttgaatggtaagtctggaatgcaacgacttaaaatctaggctatgtgaatacacgaaattcacttcagggaccctgcagaacatctcaaggtgataaacagagatcttataaaataactga

SEQ ID NO: 195427 - DNA, 570 bp, Homo sapiens
gtctgcaaacatacaagaggctttcacgatgtgccctccagcttcctttccaggctaatttctcaaaccatactccagccatttctggtcagtttcagttccaccaataagtcatttttttgtatgtttttgtcatattcatctttgtaactgtagattctaagcactgtgcatggtacatttttttttttttttggagctcagtgactgtcaaataaatgtataagtacaacgaagtttctatgtgttcctgcagtttgcaaacagctaaactgactggatttcatttcatgctatttgaggtcttagtataggagctcatggcattcataaaattagtattaatagataatttagaaaagtgtctagtatgtaacattgtgcaataaatgtagtcatgattgtagttttattactactgtcctaaagagcaagctgaaactccaaatttgaakggtaagtctggaatgcaacgacttaaaatctaggctatgtgaatacacgaaattcacttcagggaccctgcagaacatctcaaggtgataaacagagatcttataaaataactga

SEQ ID NO: 195428 - DNA, 571 bp, Homo sapiens
tctcattttaaggtcattacagaagaataaaatctaagaggtagcttttggcttttgccaggaagttattgctgtttagcagagaatagtgtcagtgggttgatgcaaaaagctttttgcaaggaattgctaagcagtggaaaatcagaggcttccatttcaagtgccttatctcaaaataatcattagtattacttgttctctatatttctctatagcaaaggagtccattcatcctctataactgctatacaatatctctgttaaaatgctgagaagatttatcctaaaagaaggcaccaaagcaatgggggtaaggactaagtgctacttgggttaataaatgactagtgttgcttcttcctaatagaaaaaggaaaagacattgaccacatcttccccaaaggaaggagaattgacaaaagtgtcctaaggtgatgataactagcctaaagctaattggactcaaatgtgacrgacccaaaaaaacattccggaatagttcaacgttaccacaatccacccagggttctaacaaatacattctgtgtttgctgatatatgagaggtc

SEQ ID NO: 195429 - DNA, 571 bp, Homo sapiens
tctcattttaaggtcattacagaagaataaaatctaagaggtagcttttggcttttgccaggaagttattgctgtttagcagagaatagtgtcagtgggttgatgcaaaaagctttttgcaaggaattgctaagcagtggaaaatcagaggcttccatttcaagtgccttatctcaaaataatcattagtattacttgttctctatatttctctatagcaaaggagtccattcatcctctataactgctatacaatatctctgttaaaatgctgagaagatttatcctaaaagaaggcaccaaagcaatgggggtaaggactaagtgctacttgggttaataaatgactagtgttgcttcttcctaatagaaaaaggaaaagacattgaccacatcttccccaaaggaaggagaattgacaaaagtgtcctaaggtgatgataactagcctaaagctaattggactcaaatgtgacggacccaaaaaaacattccggaatagttcaacgttaccacaatccacccagggttctaacaaatacattctgwgtttgctgatatatgagaggtc

SEQ ID NO: 195430 - DNA, 619 bp, Homo sapiens
cattaaaccttgcactaggaaaattctcaacrtatcaaatatattattatctccagctggttgagacctacccagtacactatcagaatgcagggcatacctacatgcctctgagtcaacaggcaaaaatgagagttaacgatgttagctagggtgatcaatccaggatgccaaggggaaattggaccactacttcacaatgaatagaggcaaaaatgaatatgtctggaatacaggagatcctttaagatgtctcttagtactgtcatgccccatgattaaggtcaatgggaaattacaacaacccaatccaggcaagcctatgaatggcccagactcttcaggattaaaggtttgggttatcctgtcaggtaaagaaacatgaccagccaaggttgcataatacccaggcacaaccccaaagtagacagctgtagcactgtagcccctttctgaggcattcctgaagaaaataatgaagaaaaatcttcccagtggacagaacttcaagcagtacacgaggttgtatattttgcttggaaggagaaatagccgggtgtgtgactatatactaattcatgggctgtggccaatggtgtggctggaatgtcagggactt

SEQ ID NO: 195431 - DNA, 619 bp, Homo sapiens
cattaaaccttgcactaggaaaattctcaacgtatcaaatatattattatctccagctggttgagacctacccagtacactatcagaatgcagggcatacctacatgcctctgagtcaacaggcaaaaatgagagttaacgatgttagctagggtgatcaatccaggatgccaaggggaaattggaccactacttcacaatgaatagaggcaaaaatgaatatgtctggaatacaggagatcctttaagatgtctcttagtactgtcatgccccatgattaaggtcaatgggaaattacaacaacccaatccaggcaagcctatgaatggcccagactcttcaggattaaaggtttgggttatcctgtcaggtaaagaaacatgaccagccaaggttgcataatacccaggcacaaccccaaagtagacagctgtagcactgtagcccctttctgaggcattcctgaagaaaataatgaagaaaaatcttcccagtggacagaacttcaagcagtacacgwggttgtatattttgcttggaaggagaaatagccgggtgtgtgactatatactaattcatgggctgtggccaatggtgtggctggaatgtcagggactt

SEQ ID NO: 195432 - DNA, 436 bp, Homo sapiens
agtgaggattatcctggggcagtagggactatcctatgacaatgaggaccatcccagtgctgtgaggaccatcctggggcagtaaggaccatctcagtcagtgaggatcatttcagtcagtgaggatcatcctgtggctgggaggaccaccctggggccgtgagactcataaaatacctgtgaagatcattgcaggraaggaagaaaccattctgtgacaggtggaggggtccctgggataaagtggagcgatgggtcccaggagtggtgagggcagggcaggccttccaagcatcctggctgtgctcatgcaggcaggagatgtcacagcactgcttctcctcccccagaagtctagctcagaacttggcctccggcctgggcactgcctcatacctgccagaattgatctcaatggagctgcacaatgagaggt

SEQ ID NO: 195433 - DNA, 532 bp, Homo sapiens
acctccagccacaccctctatctggacccactcccagactcccactgtgaatcccagcttccagtccaacctcccatggactcagagagcaatttaagcctaatgcaaacctaagaaaattaataataaaaattatggcagaaattggcgaaattaaaaacaagtaacctatagagaaaatcaactaaaacaactgtttcttttaaaagatcaataaaattgataattctgtagccaggataacaaagacaaaaaaaaaaacagaagatacatgttagtaagatcagaaatgrcagtggatgcatcatcactgagacaccaagaggatattcatggataataaagccttgtcagtagagaacgaactgctgctggttgcctttattaagatattgaggtgaaacaaaacattaaccaggtcaatagctgcatatgaggtaccaggagatgtgttatttgctcaaacaatgaagccacatgaagagctgtaatgaaattcactgcctggttatacttaggataactcactatc

SEQ ID NO: 195434 - DNA, 519 bp, Homo sapiens
tgggaggcaacgtagaggtctgaacagaattataactctatgttgccaggttgtctttattttgggaaccmttccaaacgttcctacttttcctgtttgagctgttggaaaaatggtactcagtagtattcactggtggttaagggacgaggcttgggtttcagaaagatgtggctctgtcactgactgtggtcttgggtaaaggacttcccttcaccagccttggttcgttcatctgtaagataatagcatttactcttgccaccgttataaggcttaataagagggtggatgaaaatgctatggacagagtacctcatgtgcagtgcagcacaggctttgcacatgttagttggtgttagaactggaagtacccaggagaatatccaaaagtcctacgaccgcattgaacaccagggtgaaggaccagcgtgttcctttcctttctcatatttgcaacagaaatgtcaccacttgggctccgtgacacttttcttgatgacattgtcctgatcatca

SEQ ID NO: 195435 - DNA, 607 bp, Homo sapiens
caatacactctcacaatatagcccttggataaagttgctttaaaaaaataagggcaactggcatcttgtttaagaaatgttcccatcacagtttgactgagcaacttggtagaaccaactcrttcatctggagttgaagggacataaatgaacagatttttaaaataattattcataagatgtcaactctcgtaacactgtttcttgattatctgccgacctgaggggctcttactacgctctcagaataatgtgtgacatgctgacatccagctggtcaatggtagtgagatattcactgagttagagagaagggactgataagtctagccccaattctcctttgtctgtgatctggtcagacacttcatagagaatttaaaggggtatatggtgaaatatatggaaagttgggattctaagatactaaacatttatgtactaggtgataggagacaaaggataaatagtgatcctagaaacacatagattctgttgagggaactatttagacattaggtagaatgtgtagaataagagaaaatggtagtcaggcaaattacaagtccctcccctaccagcaatctagctaagtgacaccaaacaa

SEQ ID NO: 195436 - DNA, 607 bp, Homo sapiens
caatacactctcacaatatagcccttggataaagttgctttaaaaaaataagggcaactggcatcttgtttaagaaatgttcccatcacagtttgactgagcaacttggtagaaccaactcgttcatctggagttgaagggacataaatgaacagatttttaaaataattattcataagatgtcaactctcgtaacactgtttcttgattatctgccgacctgaggggctcttactacgctctcagaataatgtgtgacatgctgacatccagctggtcaatggtagtgagatattcactgagttagagagaagggwctgataagtctagccccaattctcctttgtctgtgatctggtcagacacttcatagagaatttaaaggggtatatggtgaaatatatggaaagttgggattctaagatactaaacatttatgtactaggtgataggagacaaaggataaatagtgatcctagaaacacatagattctgttgagggaactatttagacattaggtagaatgtgtagaataagagaaaatggtagtcaggcaaattacaagtccctcccctaccagcaatctagctaagtgacaccaaacaa

SEQ ID NO: 195437 - DNA, 579 bp, Homo sapiens
ctgtggtgaaataaatgttttgagacctgggttataagtcaaaccttttttaaaatttaattttaccgtagcacttttcagggctttcatgtgttctcttacatatatagawtttttttttctctaattttgatcatggaatgctttgaaaagcatttcttgaggatagtttacaaagtatataccctaggaaacactttctcgaaccaggtaaaagaggttatctgattgggtacatttacaatggacgtgagtcccatttgcattgcatttgttcaggaataggctgacattgaccattcaggagaagtcatcttacacctaatactgtaaatcaaaatgtttgaaacattctatttacaagtggccagatcagtggtgccatttttatctattttgcagtagacattttgaattaaagagttaatatttggttagaagtgataataaaaatatgtcctaagccttgttgcctaagcactggctgagatagattctggccatatacacagctgtacttgtgtgttctagctaaatgccaagtctgcttctaaatttttcttggttttcgtttacaat

SEQ ID NO: 195438 - DNA, 579 bp, Homo sapiens
ctgtggtgaaataaatgttttgagacctgggttataagtcaaaccttttttaaaatttaattttaccgtagcacttttcagggctttcatgtgttctcttacatatatagattttttttttctctaattttgatcatggaatgctttgaaaagcatttcttgaggatagtttacaaagtatataccctaggaaacactttctcgaaccaggtaaaagaggttatctgattgggtacatttacaatggacgtgagtcccatttgcattgcatttgttcaggaataggctgacattgaccattcaggagaagtcatcttacacctaatactgtaaatcaaaatgtttgaaacattctatttacaagtggccagatcagtggtgccatttttatctattttgcagtagacattttgaattaaagagttaatatttggttagaagtgataataaaaatatgtcctaarccttgttgcctaagcactggctgagatagattctggccatatacacagctgtacttgtgtgttctagctaaatgccaagtctgcttctaaatttttcttggttttcgtttacaat

SEQ ID NO: 195439 - DNA, 603 bp, Homo sapiens
catttacaatagccacacataaaattaaatacctaggaactaacctaaccaaagaagtgaaagatctctgtaatgaaaactgtaaaacacttacggaagaaattgaagaggaaaccaaaaaatagaaaaacatttcatgtccatggattggaagaacactattgctaaaatgtccatactgtccaaagtagtccgtagcttcaatgcaatccctatcaaaataccaatgacactcttcacagaaatagcaaaaacaatgctaaaatttatatggaaccacaaaagacccagaatagccaaagctatcctaagcaaaaaggacaaaactggaggaatcacattacctggcttcaaattatactacacagctgtagtaaccaaaacagtgtggtactggcctaaaaaaaacacctagaccaatggamcagaatagagaacccagaagcaaatccacacacctacagtgacctcatttgcaacaaaggtgccaagaacatacactggggaaaaataaacaagtctcttcaataattggtgctggcaaaactggatatccttatgcagaagaatgaaactagaccccacctcttgccatgtaaaata

SEQ ID NO: 195440 - DNA, 473 bp, Homo sapiens
tgaaattcttggaccggcgcaagacggaccagagcgaaagcatttgccaagaatgttttcattaatcaagaacgaaagtcggaggttcgaagacgatcagataccgtcgtagttccgaccataaacgatgccgaccggcgatgcggcggcgttattcccatgacccgcsggcagcttccgggaaaccaaagtctttgggttccggggggagtatggttgcaaagctgaaacttaaaggaattgacggaagggcaccaccaggagtggagcctgcggcttaatttgactcaacacgggaaacctcacccggcccggacacggacaggattgacagattgatagctctttctcgattccgtgggtggtggtgcatggccgttcttagttggtggagcgatttgtctggttaattccgataacgaacgagactctggcatgctaactagttacgcgacccccgagcggtcggcgtc

SEQ ID NO: 195441 - DNA, 530 bp, Homo sapiens
tcttaattacttaaatcactcaaggaaagaaaatttaactttatcttagtgtagcatttctatatttccaaagcatgagtatgatctcattggattctaaaatatgttgctggggaataaaaagtacttaagtgrtatgaaccatttacagatgagatagtcattcagtggcttacccgagccatagaaaatatctggaaggcaactagaatctaggtatttcaaatcttagatctgcaatctttcccccatcttgtactctttagactcattttacccaatacttcctccctgtctctttgcaggacatctcatcaaatctatggattaaaattattccatatatggaatacaatataagtagtgataattacactttaatattccccaagatatgatgtaatttacacagaatagactactaataaatacatttttaaataacattgattctaaaagatcaatttacaagatcaacatgcaaaaatcaatcccattttaaaacactaacaatgaacatgtggaaagca

SEQ ID NO: 195442 - DNA, 548 bp, Homo sapiens
tggtgtggcaggcagcatatttaaatgtcccctaaatttccttccccctgatgaacatgcttcctcactttaaagatgatggatttttttttttttttgacagagtctccctctgtcgcccaggctggagtgcagtggtgcgatcacagctcactgcaagctctgcctcctgggttcacgccattctcctgcctcagtctcccgtgtactgggactacaggtgcccaccaccatgcctggctaatttttttgtatttttggtagagacagggtttcaccatgttacccaggatggtcccaatctcctgaccttktgatccacccacctcggcctcccagaatgttgggattacaggcgtgagccactgtgcctgggctaaaggtgatggattttatactcctgtgactcagttacactatatgacagactatacctccagatagtgagattatccaggtgggccaagcctaactctcaaactctttaaaagcagagagttttctctggccagtagcagaaggaaaaatcaaagagactttatttgata

SEQ ID NO: 195443 - DNA, 452 bp, Homo sapiens
ataactcaatttaaaaatgggtaaaggacctgaataaacatttctcaaaagaagacacctactggtcagtagatgtacaaaaagagacttcaataatcattagagaaatgcaaactacacaatgagatatcacttcacctgttagaatggccattatcagatggacgaaagataataagttttggggaggatgtgaagaacagagaaccctagtatgctattggtgggaatgtaaattactatagtcattatggaaaacagtatataagttccmcaaaaaaaaaaaaaaaaaaaaaatagaactgccttataatctagcaatcccacttgtggtatatatgcaaaggaaatcaaatcaatattccaaagaaatatgtgcattcccatgttcatttcagcattactcacaatagacaagctatggaatcaacctaagtgttcataacagatat

SEQ ID NO: 195444 - DNA, 333 bp, Homo sapiens
actactaagaaagaaagggaagatactaagaaggtgagaaacctgcattttcttcattttatatttctggccaatctgaattacatagtgattataaattgcttcataatatagtgttataaaattatatagtgattatgaatagcttaataatatagttttataaaagatagaaatgagtattttaaaagacatgcattgacaaattagtttttaattawtttattttttgccctcacattgaataagtgatttccaaattgcaatgatgataccccacagacatggctaacaattgtcagttctcatgtgtgcatgactcaacatatagtc

SEQ ID NO: 195445 - DNA, 572 bp, Homo sapiens
ttctcattaagtgactgtaaaaccaccattactacaaaaagttagatgtcattttaagtgtcaactctattcatatctgatgcctaaatcactattctaagaattctgaggttgtatccaagtaataargcagagagaatgatttctgtcaaggactattctagtgctatggtttggggaacaatagaaagattctaccagaattccatggttgcttgggagcaagtggacaaagcctcattgcatgaggctttctacaggaaagggaagaatgaactttgaagaggaaatgtaactaactttactgagtttcaagctctgaaagctggcaaacattttcttctatatatccctgagaggcttcctgagtccattcctgattctgattaatccattggtcccgatattatttacttgcctatgtatatctatgggtctgtctgggtgctccattcagtagcaagtttcttgaatcaggtgagccccaggtgccatgcataccatagctgtgaatgttaaagagtggcaaagtgtctccccataaaaagctatttataaaaacacagttttgt

SEQ ID NO: 195446 - DNA, 572 bp, Homo sapiens
ttctcattaagtgactgtaaaaccaccattactacaaaaagttagatgtcattttaagtgtcaactctattcatatctgatgcctaaatcactattctaagaattctgaggttgtatccaagtaataaagcagagagaatgatttctgtcaaggactattctagtgctatggtttggggaacaatagaaagattctaccagaattccatggttgcttgggagcaagtggacaaagcctcattgcatgaggctttctacaggaaagggaagaatgaactttgaagaggaaatgtaactaactttactgagtttcaagctctgaaagctggcaaacattttcttctatatatccctgagaggcttcctgagtccattcctgattctgattaatccattggtcccgatattatttacttgyctatgtatatctatgggtctgtctgggtgctccattcagtagcaagtttcttgaatcaggtgagccccaggtgccatgcataccatagctgtgaatgttaaagagtggcaaagtgtctccccataaaaagctatttataaaaacacagttttgt

SEQ ID NO: 195447 - DNA, 648 bp, Homo sapiens
gcatggtatactaagttatgtttaatgataactctttataacctaagatgatctttttttttcttgtttgcctgggactaagggctttgattggatgtaggaatttcagtgctaaaaccagacaactcaggatgtgccatcaccctactataagtttaatacatttgtctgttgagactattgaaggagatattaatgggagagcacatagtgcactgcttggcacatagtaactgctccttaagttgtggtagaattgagtctaaatcttttgtagcattaagtctaaatctacatattttgtagaaytgagtctaaatctaaatcttgattgagccgattcatacactgctctttgataaattgtagggaagaacttggccaactgctttgttgttcctttgaacagcttttactgtcaggttcttgggcattgatttctttcagtttcaatttcctaaactgtaaaaggagaatagtaatatgtatctcacagggatattgtaaggattcaataatatgtgattagcacattaaaagtgagtatcacagtggctggctcctactaagctcttaagtggtaactattagaatattaaagtcctttaacattttatatagatgctatttggaatcagtagtcccatc

SEQ ID NO: 195448 - DNA, 565 bp, Homo sapiens
tggctcgaagaggaaagaaaatttttgtcttggggcccaaatacagtcctcttgagtttttacgaagggtaagaattgaaagtaaaatatttatatattgtttctcaagggtctgatatcttytcacattttgttgggactggtgatcatcttgttggtagatttagtttgtctctggaaaggcacacttgagtgactgtgtatctccttttgtgttgctttgataacatttgtcatatatgtctcaattagtagcatttaggaaaccaaatcaatatgtggaccaaattttcaggccttatttaattataaggcttttctcttctaggcaagaatcaccttgtggttagagaaaataactgataagagcagatgtcatgctggagccagggcaatggccaatctctgagaaataggaagatccaaaaactagctggctcaggccaaaggtgtgggcagtgagcagggaataggcaggagttgcatggcacacagaccctgagtctggacaggagggtctgtaagtagatgagcaggcagcatctaaaaatgcctgaaccaaggg

SEQ ID NO: 195449 - DNA, 528 bp, Homo sapiens
acttttctgggggaaaagtactaaagtactcttttgttctagtgaagttgatctgaaagacgtcstccagcaatatatgtagaaaagaaatcagattcactgtctgttgctgaaactctgactttccctctccattcctattcagtgttgcaaagattcaaaactttttgatagcttttaagaggaagtttgaaattgcacaggtgatagagggaattagtttttctgagaaccaaggcaaaaggagtgaatccttaaaactcctgaattgtcaacattgatgttggagccccactccagattcgggttggagtgtgactccgcaagtagacattttggagaaggaggagtggctgatgcagaacctgtggcttaaagtaggaggagggagagagttttctactgggaggcatatgtattaatacaagcttacagacaaagtggagaaggaaacagtagtaaccatattgtcccagattcttctctgacaagccatatgcctgttcaacaaagccattagctgtgtgg

SEQ ID NO: 195450 - DNA, 528 bp, Homo sapiens
acttttctgggggaaaagtactaaagtactcttttgttctagtgaagttgatctgaaagacgtcctccagcaatatatgtagaaaagaaatcagattcactgtctgttgctgaaactctgactttccctctccattcytattcagtgttgcaaagattcaaaactttttgatagcttttaagaggaagtttgaaattgcacaggtgatagagggaattagtttttctgagaaccaaggcaaaaggagtgaatccttaaaactcctgaattgtcaacattgatgttggagccccactccagattcgggttggagtgtgactccgcaagtagacattttggagaaggaggagtggctgatgcagaacctgtggcttaaagtaggaggagggagagagttttctactgggaggcatatgtattaatacaagcttacagacaaagtggagaaggaaacagtagtaaccatattgtcccagattcttctctgacaagccatatgcctgttcaacaaagccattagctgtgtgg

SEQ ID NO: 195451 - DNA, 528 bp, Homo sapiens
acttttctgggggaaaagtactaaagtactcttttgttctagtgaagttgatctgaaagacgtcctccagcaatatatgtagaaaagaaatcagattcactgtctgttgctgaaactctgactttccctctccattcctattcagtgttgcaaagattcaaaactttttgatagcttttaagaggaagtttgaaatwgcacaggtgatagagggaattagtttttctgagaaccaaggcaaaaggagtgaatccttaaaactcctgaattgtcaacattgatgttggagccccactccagattcgggttggagtgtgactccgcaagtagacattttggagaaggaggagtggctgatgcagaacctgtggcttaaagtaggaggagggagagagttttctactgggaggcatatgtattaatacaagcttacagacaaagtggagaaggaaacagtagtaaccatattgtcccagattcttctctgacaagccatatgcctgttcaacaaagccattagctgtgtgg

SEQ ID NO: 195452 - DNA, 528 bp, Homo sapiens
acttttctgggggaaaagtactaaagtactcttttgttctagtgaagttgatctgaaagacgtcctccagcaatatatgtagaaaagaaatcagattcactgtctgttgctgaaactctgactttccctctccattcctattcagtgttgcaaagattcaaaactttttgatagcttttaagaggaagtttgaaattgcasaggtgatagagggaattagtttttctgagaaccaaggcaaaaggagtgaatccttaaaactcctgaattgtcaacattgatgttggagccccactccagattcgggttggagtgtgactccgcaagtagacattttggagaaggaggagtggctgatgcagaacctgtggcttaaagtaggaggagggagagagttttctactgggaggcatatgtattaatacaagcttacagacaaagtggagaaggaaacagtagtaaccatattgtcccagattcttctctgacaagccatatgcctgttcaacaaagccattagctgtgtgg

SEQ ID NO: 195453 - DNA, 421 bp, Homo sapiens
aatggtaacaaatgtggaaatgtggacatcaaagcctgggtaattagtaaagcaaatctccaaagaaaaaaatggatgaagtcatctttcacattccccttctaagccgactggatgaaagaataaagggatttattattttatcaggaaatcaaaaaaagagagagagagaaaagaaatatcagaatgacacaagcatttgctagcaaaaataatgctaaattcatctcaaggtagcttccacttagaaggcaaacctataataaaaggaatgaaataggctttctttgccaccactcaagcaaactaccatttayattactactagctacattcatatccaaagaaaacagatgaagtcaaacacaagttttcaaatactaccaaggatatacaggtaaaaagaaatcataggctggga

SEQ ID NO: 195454 - DNA, 548 bp, Homo sapiens
acttgagtcttctacttgactcttctttcaaactccacttccaatagattgactctgactcttctacttgactcttaaactccacttccaagggattgactccagcttttaaatatatacaaaatctgactactttttaataacctttaytgctagcacgtgagtcaccattgtctcagactgtaattattccagtagcttcataacaagttctcttttcttgcctcttatagtctgttctagctatgattcccatcactcaactaattaagtaaagcattatgtatatcctgatataatgcaatataaaatacaggacaccacttatgaaatattattgccgcaagtagtaacctgtgtcccttgaaggctatatagttaactgtttacaggagataagaggttggagaaacaagttaaatgacaccttagagataatgaagtatattcagaatgtagaacattctataagacaactgacccaatatcttttaaaaagtcaatgccatgttaaaaataaaaagcaaaaaaataggtttgggaactct

SEQ ID NO: 195455 - DNA, 532 bp, Homo sapiens
gaatcagttctgtaggaatagctcacttggccataatactaccacccagaaaacagtatataacctgtgtattattatggttatacacaaagtgaattaagagagaagttatctaaaattaaaaatctgctaaactactcaggaggctaaggtgggaggatttctttgaggcccagaagtcaaggctgcagtgagccatgattgcagcactgcactctagtctgggcaacagagtgagactctgccaaaaacaaaaaagagagagagaaagagggaaaaagaaagagggagagagaagaaggaaggaaggaaggaaagaagaacggaaggaagggagggagggagggaaaactgctgatctgagaatarcagttaaagcaatatatctacaacgcctctttctctgacctgtttaaaaatataaacaaagaacatgtgtttatatgtatgtagatgtgtattttcaaattcacaaaaagacacataataccatgtgatctgactgcctgttgttaccccttacgcatacctc

SEQ ID NO: 195456 - DNA, 558 bp, Homo sapiens
ctggtatgtctttatgagcagcatgagaacagactaacacaatgacattgagcattttttcatgtacctggtggccctctgtatgtcttctttggagaaaagactactcaagtcttttgcccatttttaaatcagattatgttttttactaatgagttgaattccttataaatactggatattaatcccttgtcaggtgtataattcacaaatattttctcctattctgcaggctgtctgttcactttactgatttgtttcctttgctataaagaagctttttggtttgatgtagtcccaattgtttatttttgtttctgttgctcatgcttttgaggcctagtgtaaaaacatccctgcccagactgatgttgtgtagtgtttctcctgaattttcttctagtaatttcatagttttgggccttacatttgaatctttaatttattttgagtkgatttttatatagtaagaaataggggtcaaatttcattcttttgcatgttgatattcagtcttccaagtgaaataagctaggcacattaagacaaatactacac

SEQ ID NO: 195457 - DNA, 608 bp, Homo sapiens
ggcctaaaacatccttttctatctagtataagcagtacttcacttagtaacmttttactttaaaatcacacacacacagtaactgccaacatcttttatattagaccgaagactgactattcggggtctcgcacaaacccggtttttcagcgctagtgttacttatgaagatctagggacgttaacttttactgtcttacctgaattgttaattatatttttgttttgttttcttcctccactcccttgctttccactttcagccccgggaaatggatacaagtagaagaaaattccatttataaagtactgagagaatgatattggattttgctgaacaggcctatcttgaactttggtaaattatttttgacagaatactcttttcaaaatggcatttgctgatttcataaacctttcacgtctggacgaattaccaaatgccatgaattgccactgtgtgtttatgtagaaaatacaaataaaagttattttgatggcttaggtttccttaaacttagttctcttgtttttgggtaactgtgaataattaagttggaatcaagattcagattaactttcctatttgcatagaacacatgagagga

SEQ ID NO: 195458 - DNA, 617 bp, Homo sapiens
aatgaaccatgctctgtggagagagggcattctaggctgagggtaagagtgttgattggtggttaaaatcacagagacttgaagtcaaatcttggtagtttggccagagaaatgtacttctttctgcctcagtgtttaactagaaaatggagaaattcatttggtacctggtgcatgtaagtacaaatatgtgagtgctattattaaaaggaagcatgcataaatackcacagagctaaaaagtatggcccatgggtggagaagaatattagctttatataacgatttgccctcaatgtgtataagcagctaggattcatgtaaaatacaattagtattgacaaggatttgttttattagttgtacatctatagcacaaaacagtgtgcacctgtgtgggatcctcagtcttctttatcaaaaagagatgaaactcctgtactgatcagtagtgggatcacgcctgtgaataaccactatgctccagcctgggcaacatagtgagatcctgtttctaaaaatgaaaaaaagaaagagataaacaaggatgtctccctaccacttactgatggaactgatttgaagtatcccttttttttttttttttggtcaaattg

SEQ ID NO: 195459 - DNA, 617 bp, Homo sapiens
aatgaaccatgctctgtggagagagggcattctaggctgagggtaagagtgttgattggtggttaaaatcacagagacttgaagtcaaatcttggtagtttggccagagaaatgtacttctttctgcctcagtgtttaactagaaaatggagaaattcatttggtacctggtgcatgtaagtacaaatatgtgagtgctattattaaaaggaagcatgcataaatactcacagagctaaaaagtatggcccatgggtggagaagaatattagctttatatarcgatttgccctcaatgtgtataagcagctaggattcatgtaaaatacaattagtattgacaaggatttgttttattagttgtacatctatagcacaaaacagtgtgcacctgtgtgggatcctcagtcttctttatcaaaaagagatgaaactcctgtactgatcagtagtgggatcacgcctgtgaataaccactatgctccagcctgggcaacatagtgagatcctgtttctaaaaatgaaaaaaagaaagagataaacaaggatgtctccctaccacttactgatggaactgatttgaagtatcccttttttttttttttttggtcaaattg

SEQ ID NO: 195460 - DNA, 617 bp, Homo sapiens
aatgaaccatgctctgtggagagagggcattctaggctgagggtaagagtgttgattggtggttaaaatcacagagacttgaagtcaaatcttggtagtttggccagagaaatgtacttctttctgcctcagtgtttaactagaaaatggagaaattcatttggtacctggtgcatgtaagtacaaatatgtgagtgctattattaaaaggaagcatgcataaatactcacagagctaaaaagtatggcccatgggtggagaagaatattagctttatataacgatttgccctcaatgtgtataagcagctaggattcatktaaaatacaattagtattgacaaggatttgttttattagttgtacatctatagcacaaaacagtgtgcacctgtgtgggatcctcagtcttctttatcaaaaagagatgaaactcctgtactgatcagtagtgggatcacgcctgtgaataaccactatgctccagcctgggcaacatagtgagatcctgtttctaaaaatgaaaaaaagaaagagataaacaaggatgtctccctaccacttactgatggaactgatttgaagtatcccttttttttttttttttggtcaaattg

SEQ ID NO: 195461 - DNA, 572 bp, Homo sapiens
cttcaggtcaagattttgccttctgtaggaacttccataagattttctttgcaaaagcttttaagaaggtaactttaaatgtaaaaaaagtgatggtttcttatcaccatttaaattctacaacttttgggtggctggcaagatggccgaatagtaacagctcctgtctgcagctcccagcaagatcaatgcagaaggtgggtgatttctgcatttccaactgaagtacctggctcatctcattgggactggttagacagcggatgtagcccayggagggcgtgccaaggcagggtggggcattacctcacccaggaagcataaaggttgggggaactccctcccctagccaagggaagccatgagggactgtgccatgagggatggtgcactccagcccagttagtattattttcccatggtcttcacaacccacagaccaggagatccccttgggcctatgccaccagggccctgggtttcaagcacaaaactgggcggctgtttgggcagacaccaagctagctgcaggagtagtttttcataccccagtggtgcctggaacgccagca

SEQ ID NO: 195462 - DNA, 520 bp, Homo sapiens
ttagcaatagaacttactctatttcttatttaaaaatctagagaaagaatacttttccatttttgtacagctatgactattctaacacatccatttagcacatattttgaaaacctaataacttcttatacttggataactatatggggagttatggtaatatactagacattaggaaagagtagagtctatttaggtcataatataatctcttgggcttagacccaggttgcacaatgaatccccagttgaatattgtatcctttttttcagcattttaatagcatatatatactgtatttgacatattaaaaatatttggcccaatatttttaaaataactacgtttagttgtgtgtttattatacccacacacagacatgcacatttatgcacatatatttcttaagatatacgtatacatacttacacatctaaatgtagtacaytgtaaaactgtcagttaaatttttaaactattaagaaacagttaattcagataattgaagtcttccctaat

SEQ ID NO: 195463 - DNA, 586 bp, Homo sapiens
atgaaaatccatactaaagatcaataaaaccaaaagttggtactttgaaagaataaataagatggataggctgttaaatagactaataagaaaagagagaagagccaaataaacacaatcagaaatgacaaaattacattaccatcgaccccagaaaaacaaaaaatcctgagattattatgaacaccactgtgcacacaaactagaaaacctaaaagaaatgaataaattcctggaaacatacaaactcccaaaattgaaccaggaagaaattaatatctgaacagaccaataatgagttctgtaaatgaatcagtaattaaaaaataacataccaataagaaaaattcctggatcagatggattcatagaaaaattctaccagatgtataaaggggagttggtaccaatactactgaaaatattcccaaatatcaaggaaggggactactccctaactcattctgtgaagctagctttgttctgatgccaaaacctggaagtgatagaattaaaaygaaaacttgaagccaatatgtctgatgaacatagatgcaaaaaccttcaacaaaatactagcaaatgg

SEQ ID NO: 195464 - DNA, 574 bp, Homo sapiens
cacactttgggactggaactgtagtttaggccaatttaaaaagaaagacagaaagagaaggagagagagagagaaactatgcagtagcactacrttagtcatcatcccaagagtaataaactggcacaagttatggaaatctctctgaccttaatgctcttaatctaaattaggaatgaaaataatacttgtctaatggttaatatgtagataatttttttaatttactgttatattttaggtagtagtggtaaagacgaaaatctaatttcatgacaatgtgaaacagggcactgtgaacagcctattctaacaaaaattagaagtagtataagatattttatttgaaaattgtatttaagtaaagcaatcagtatttcatgtcttgtctcaatgtttcacctctgatgtaggctcacagaagaattaagtctcataaaagacttgattctgggagggaagaaggactggatttgcgtattttctctgtggcctactttcctaacgtccttgttctggtgttccttttccatattgttgttggaatgcaaaataattactagtggctcacaga

SEQ ID NO: 195465 - DNA, 574 bp, Homo sapiens
cacactttgggactggaactgtagtttaggccaatttaaaaagaaagacagaaagagaaggagagagagagagaaactatgcagtagcactacattagtcatcatcccaagagtaataaactggcacaagttatggaaatctctctgaccttaatgctcttaatctaaattaggaatgaaaataatacttgtctaatggttaatatgtagataatttttttaatttactgttatattttaggtagtagtggtaaagacgaaaatctaatttcatgacaatgtgaaacagggcactgtgaacagcctattctaacaaaaattagaagtagtataagatattttatttgaaaattgtatttaagtaaagcaatcagtatttcatgtcttgtctcaatgtttcacctctgatgtaggctcacagaagaattaagtctcataaaagacttgattctgggagggaagaaggactggatttgsgtattttctctgtggcctactttcctaacgtccttgttctggtgttccttttccatattgttgttggaatgcaaaataattactagtggctcacaga

SEQ ID NO: 195466 - DNA, 414 bp, Homo sapiens
gaattcctgacctcaggtgatcacaccgcctcagcctcccaaagtactgggattacaggtgcgagccactgcgcccagccgggagcctcaatttcatattaccttttcctctgttccctgagtatgtattttgggcacatgtggcacwatgtgaaacatcacagaagagctaagagtagcctcagagcagtctgatattagtggaacacaggtaaattccacagatgcgaaggaatgtccgaacctctaatgctttgaaatatttataaaaacagacaagccagtagctataaaacatggtggtttgaagagaaaaaaagtaataataatgagtacagttggctctctgtatgtgtgggttctgaaccagtggattcagccaaccacagatggaaaatattttaaaaatatgca

SEQ ID NO: 195467 - DNA, 594 bp, Homo sapiens
atgtgctcatatttttattgcagcactattcagcaaagttatggaaccartctaaaagtccaccaatagttcattggtatatatacaccgtggaatactatttagccataaaaggaaagaaacatgtcagttgcaataatatgaatgaggctgaaggccattatcctaaatgaactaactcagaagcagaaaatcaaagatggcatgttctcacttataaatgggagctaaataatgggtacatacgtacataaagatggagataataggctctggcgactccaaaaggggagaggtttggaaagggccaaggtttgaaaaattacctattggatacacggttcaatatttgagtgatggatacatgttagaagcccaatccccaccattatgcaatatacccatgtaagaaacatgaacgtgtaccccccaaatctaaaataaaaataaaagtgaaatctggggccgagcgcggtggcttacacctgtaatgccagcactttgggactccgaggcaggcggatcatgaggtcaggggatcgagaccatcctggctaacacggtgaaaccccgtctctactaaaaatacagaaa

SEQ ID NO: 195468 - DNA, 616 bp, Homo sapiens
ggtcatggcagggtattggaggctctccaagctctgcctggacaatcagcattccttaagttggtcagcyctttattaacctgtttcttttggcaactagtcccaggtatagaggacagcattttaggtcatctatttagtgttaggactgttctgaatagagagaggtcctttaaaaatgtcgttctggaatttggcaaattagtacctctctccattgaggctatttaatgttgactgttttcccattcatattctcaccaaatactggtatatttagatgtgtggtgttggtaaaaattaattgcatagattattctcaatactacctcaaaacaaaacaacaacaacaacaaaagataccaacttggtttttgtgtattaaagatttaataattgtaatgagtgaatcttttagcgatagcaacactttcatgatcacttattttaggctagtaatagaagtgggggccaactcaggattttctgattacagcttatgaaatgtgcaaagcatttctcccatatctcaagggttcctgatggtgtttgcacaactgtaactttgcatctgtattttcagctcaggccagagcaatgataaacagcttttgat

SEQ ID NO: 195469 - DNA, 618 bp, Homo sapiens
gctaagcaagaacaatttcagagaattttctctctcctcctttttagttttggtagtaaggataatggtaatgtgagggggaaaaacaagaaattcacaatccaggcacatacagttgataaatgaatcaactgcatacaacattcaggtagaaagtccatgcaggagttttgggaagtaataattctgtggcacaattgtgaactgttccctcgttcctgttgctaaactaaatgcagagaatcttggatatttttatgacaactatgaatcaggtggcatttcttcccctcccccaaagtcagcaaataacatcgtcatggattatataacargatcaaggaaagccttaagaccttcatagacaacaaagggcttttttattaagcagatatttgggctgtttttgtagctgccaggaaatgagacagcaagagtcacctctatagaattttattatagaaggaaaacagaaaaaccaagtgacactattaaaggtgcacaatacactctattaatttagatgtggcacatgaatgacatgtatccccataaatattgtggggccccttctcttttttacagtaggaaggtccctaatatttatcattgacaaac

SEQ ID NO: 195470 - DNA, 496 bp, Homo sapiens
ctccaaccaaactgtaaatcagataggaggaaacaataataaacatttacagcgtggcaagattctaaaactctacatccaatacatcctatctcgggaatttgcttgagaagagtttcactaaaatgaggaagtaaatgaagacagagtagggtataaagtacagggaatctcctggttattagatgtacagtatgtgtacacagcaacctgtgtgaattagagctatctagaaaaaaaatttcaaaaagataaatctgataaaatgtctaatgcttctgaatgcattaggagactcattrgaaaactggggtagagtttggagttggtactttgatacatacatagaaaaatgaacaaaacaaaaattttcaaaaattgtcagtttaaggaaaaaaatgttgtgtagaaatgaaattcaatcatttatgctccatgtttcaggtgtgagtaacatttacctaattataacagtactagcgttactggaaaaaga

SEQ ID NO: 195471 - DNA, 496 bp, Homo sapiens
ctccaaccaaactgtaaatcagataggaggaaacaataataaacatttacagcgtggcaagattctaaaactctacatccaatacatcctatctcgggaatttgcttgagaagagtttcactaaaatgaggaagtaaatgaagacagagtagggtataaagtacagggaatctcctggttattagatgtacagtatgtgtacacagcaacctgtgtgaattagagctatctagaaaaaaaatttcaaaaagataaatctgataaaatgtctaatgcttctgaatgcattaggagactcattggaaaactggggtagagtttggagttggtactttgatacatacatagaaaaatgaacaaaacaaaaattttmaaaaattgtcagtttaaggaaaaaaatgttgtgtagaaatgaaattcaatcatttatgctccatgtttcaggtgtgagtaacatttacctaattataacagtactagcgttactggaaaaaga

SEQ ID NO: 195472 - DNA, 551 bp, Homo sapiens
tggtggtagttttcccaacttaaatttatctttatcatccacctttatccatagtcctcctcatgattagcacattgtcaataaatatttactaagctgaactgaaagtttttattatgcataaatattaagatgtccatgtccatggtcatgcaggacagcagaagattttttttttaccagtgtatctattgctaacaattgcttcaaggtcaggaaccaactcatgtattagacatgtaaatcttatgaaaatattcatattggaaacagcatgtagcaagtgcaaacagaackaaataaatcctttaatttatcacagtcccctcaaagtatgaattcttcttatagcattatatcaaatttgataaaatccaaaaatattttatctcaatattttaaaagtgttgatgctgtatacattgagttattgtacaattgaatggaacccacattcaaagtttttcctcaatgttaaaatgaaatggttctctctgtgattctttctgtttgcagttcttctcatttcattgttagaatttgcctctact

SEQ ID NO: 195473 - DNA, 425 bp, Homo sapiens
gagagagcagtgaagagtgtactgtaatattcttatgtgagaaatagtggagggaatgagaggtggtcagccttaaactgccattgttgctctgtgtatcagggctcagggactttcagactctccagggattccttacagtttttacattcrtttctcagttgcaaacataatctcttcactctatgagaactctagatctgaatccttgttatgagtcaggagtccactctagtttactctcttgtcagtaactagacttgaaatgttttgatattaattgatatcataataagattggttacagaaatagcaaagagcgagcgtccccatcctatgaccatatcggcaccagaagagaaacacatctacagtttttcccttggcataggccctggtattctgttagggaacaggttataaag

SEQ ID NO: 195474 - DNA, 425 bp, Homo sapiens
gagagagcagtgaagagtgtactgtaatattcttatgtgagaaatagtggagggaatgagaggtggtcagccttaaactgccattgttgctctgtgtatcagggctcagggactttcagactctccagggattccttacagtttttacattcatttctcagttgcaaacataatctcttcactctatgagaactctagatctgaatccttgttatgagtcaggagtccactctagtttactctcttgtcagtaactagacttgaaatgttttgatattaattgatatcataataagattggttacagaaatagcaaagagcgagcrtccccatcctatgaccatatcggcaccagaagagaaacacatctacagtttttcccttggcataggccctggtattctgttagggaacaggttataaag

SEQ ID NO: 195475 - DNA, 425 bp, Homo sapiens
gagagagcagtgaagagtgtactgtaatattcttatgtgagaaatagtggagggaatgagaggtggtcagccttaaactgccattgttgctctgtgtatcagggctcagggactttcagactctccagggattccttacagtttttacattcatttctcagttgcaaacataatctcttcactctatgagaactctagatctgaatccttgttatgagtcaggagtccactctagtttactctcttgtcagtaactagacttgaaatgttttgatattaattgatatcataataagattggttacagaaatagcaaagagcgagcgtccccatcctatgaccatatcrgcaccagaagagaaacacatctacagtttttcccttggcataggccctggtattctgttagggaacaggttataaag

SEQ ID NO: 195476 - DNA, 425 bp, Homo sapiens
gagagagcagtgaagagtgtactgtaatattcttatgtgagaaatagtggagggaatgagaggtggtcagccttaaactgccattgttgctctgtgtatcagggctcagggactttcagactctccagggattccttacagtttttacattcatttctcagttgcaaacataatctcttcactctatgagaactctagatctgaatccttgttatgagtcaggagtccactctagtttactctcttgtcagtaactagacttgaaatgttttgatattaattgatatcataataagattggttacagaaatagcaaagagcgagcgtccccatcctatgaccatatcggcaccagaagagaaacacatctacagtttttcccttggcataggycctggtattctgttagggaacaggttataaag

SEQ ID NO: 195477 - DNA, 199 bp, Homo sapiens
acaatcagacaaaaaaaaaagcagaataatgaggagatacagagtgataggagatgaaatgggagaggggttcagattacatgaattttataggacttggtgatttagattttattcyagtatgttgagaatccacagatcattttaagcaaaaaaaaatggcatgatctcatttatattttaaaactcagttggcttt

SEQ ID NO: 195478 - DNA, 553 bp, Homo sapiens
attgctattaagcacaaactactgacacatcaccttatggttgtgtgagatatactgagccgtccttcttgtcctcacatctctaaycttctcaccttctgactgtcccctctgctcactctgttggtctccacaacactcttcaaacatgctcagcacactctcacccagagcctttacactggcttcttcactgtctggggtgctcttctctcaggtaatcaagtggctcactcactcacctctttaaaatctgtgctcaaatactgctttctgttcatatggaccctaaacacctgtctgtacttccaattccttttttttttttttttttggagacggagtcttgctctgttacccacgctggagtgcagtggtgcaatctcggctcactgtaacctccgcctcccaggttcaagcaattctcctgccttggcctcccaagtagctgggattagaggtgcatgccactgagcccggctaatttttgtatttttagcagagaacgggtttcaccatgttggccagtctggtctcgaactcctgacctcaa

SEQ ID NO: 195479 - DNA, 553 bp, Homo sapiens
attgctattaagcacaaactactgacacatcaccttatggttgtgtgagatatactgagccgtccttcttgtcctcacatctctaatcttctcaccttctgactgtcccctctgctcactctgttggtctccacaacactcttcaaacatgctcagcacactctcacccagagcctttacactggcttcytcactgtctggggtgctcttctctcaggtaatcaagtggctcactcactcacctctttaaaatctgtgctcaaatactgctttctgttcatatggaccctaaacacctgtctgtacttccaattccttttttttttttttttttggagacggagtcttgctctgttacccacgctggagtgcagtggtgcaatctcggctcactgtaacctccgcctcccaggttcaagcaattctcctgccttggcctcccaagtagctgggattagaggtgcatgccactgagcccggctaatttttgtatttttagcagagaacgggtttcaccatgttggccagtctggtctcgaactcctgacctcaa

SEQ ID NO: 195480 - DNA, 553 bp, Homo sapiens
attgctattaagcacaaactactgacacatcaccttatggttgtgtgagatatactgagccgtccttcttgtcctcacatctctaatcttctcaccttctgactgtcccctctgctcactctgttggtctccacaacactcttcaaacatgctcagcacactctcacccagagcctttacactggcttcttcactgtctggggtgctcttctctcaggtaatcaagtggctcactcactcacctctttaaaatctgtgctcaaatactgctttctgttcatatggaccctaaacacctgtctgtacttccaattccttttttttttttttttttggagacggagtcttgctctgttacccacgctggagtgcrgtggtgcaatctcggctcactgtaacctccgcctcccaggttcaagcaattctcctgccttggcctcccaagtagctgggattagaggtgcatgccactgagcccggctaatttttgtatttttagcagagaacgggtttcaccatgttggccagtctggtctcgaactcctgacctcaa

SEQ ID NO: 195481 - DNA, 553 bp, Homo sapiens
attgctattaagcacaaactactgacacatcaccttatggttgtgtgagatatactgagccgtccttcttgtcctcacatctctaatcttctcaccttctgactgtcccctctgctcactctgttggtctccacaacactcttcaaacatgctcagcacactctcacccagagcctttacactggcttcttcactgtctggggtgctcttctctcaggtaatcaagtggctcactcactcacctctttaaaatctgtgctcaaatactgctttctgttcatatggaccctaaacacctgtctgtacttccaattccttttttttttttttttttggagacggagtcttgctctgttacccacgctggagtgcagtggtgcaatctcggctcactgtaacctccgcctcccaggttcaagcaattctcctgccttggcctcccaagtagctgggattagaggtgcatgccactgagcccggctaatttttgtatttttagcagagaacrggtttcaccatgttggccagtctggtctcgaactcctgacctcaa

SEQ ID NO: 195482 - DNA, 639 bp, Homo sapiens
ctaccttaacttaaacatggtattatccaagctcacagtatctgagaaggtttgtgtcrtcatctagcaaactaaagtcaagccctctgtatttccccacctgtgatcttcaaagatatggtgctccttgagatttctgtaaggtaggtctgttctaaaatgtgtgaaaggaagagaacccgaaaaggcaaggtctaagaagatcactcatttggagatggcaagggtcacatcggggttatctaagtcagtgtgatttaccctttggtaaatcatacacatatttcaaaagttactttatatgctgtaattcttgcacacatatttcacggaaaataaattagtattacctcgactatcatccatatcaccatcccttgaatgttctgattggatgtctggaggtgtctgaaggacggccacgctatttctgatttataatcttcaatttcagttttggttttgacagttttcttcttggaactgtaactgtgaggctctgtaactgagtcatccctgattcagtcaaacacacaccatcctgggtataagtcttgggtgggtctaaaattacaaaatcccaagaatacaaatttaaactttcattttaaatttgactgattactgttccaaaatacc

SEQ ID NO: 195483 - DNA, 639 bp, Homo sapiens
ctaccttaacttaaacatggtattatccaagctcacagtatctgagaaggtttgtgtcgtyatctagcaaactaaagtcaagccctctgtatttccccacctgtgatcttcaaagatatggtgctccttgagatttctgtaaggtaggtctgttctaaaatgtgtgaaaggaagagaacccgaaaaggcaaggtctaagaagatcactcatttggagatggcaagggtcacatcggggttatctaagtcagtgtgatttaccctttggtaaatcatacacatatttcaaaagttactttatatgctgtaattcttgcacacatatttcacggaaaataaattagtattacctcgactatcatccatatcaccatcccttgaatgttctgattggatgtctggaggtgtctgaaggacggccacgctatttctgatttataatcttcaatttcagttttggttttgacagttttcttcttggaactgtaactgtgaggctctgtaactgagtcatccctgattcagtcaaacacacaccatcctgggtataagtcttgggtgggtctaaaattacaaaatcccaagaatacaaatttaaactttcattttaaatttgactgattactgttccaaaatacc

SEQ ID NO: 195484 - DNA, 639 bp, Homo sapiens
ctaccttaacttaaacatggtattatccaagctcacagtatctgagaaggtttgtgtcgtcatctagcaaactaaagtcaagccctctgtakttccccacctgtgatcttcaaagatatggtgctccttgagatttctgtaaggtaggtctgttctaaaatgtgtgaaaggaagagaacccgaaaaggcaaggtctaagaagatcactcatttggagatggcaagggtcacatcggggttatctaagtcagtgtgatttaccctttggtaaatcatacacatatttcaaaagttactttatatgctgtaattcttgcacacatatttcacggaaaataaattagtattacctcgactatcatccatatcaccatcccttgaatgttctgattggatgtctggaggtgtctgaaggacggccacgctatttctgatttataatcttcaatttcagttttggttttgacagttttcttcttggaactgtaactgtgaggctctgtaactgagtcatccctgattcagtcaaacacacaccatcctgggtataagtcttgggtgggtctaaaattacaaaatcccaagaatacaaatttaaactttcattttaaatttgactgattactgttccaaaatacc

SEQ ID NO: 195485 - DNA, 639 bp, Homo sapiens
ctaccttaacttaaacatggtattatccaagctcacagtatctgagaaggtttgtgtcgtcatctagcaaactaaagtcaagccctctgtatttccccacctgtgatcttcaaagatatggtgctccttgagatttctgtaaggtaggtctgttctaaaatgtgtgaaaggaagagaacccgaaaaggcaaggtctaagaagatcactcatttggagatggcaagggtcacatcggggttatctaagtcagtgtgatttaccctttggtaaatcatacacatatttcaaaagttactttatatgctgtaattcttgcacacatatttcacggaaaataaattagtattacctcgactatcatccatatcaccatcccttgaatgttctgattggatgtctggaggkgtctgaaggacggccacgctatttctgatttataatcttcaatttcagttttggttttgacagttttcttcttggaactgtaactgtgaggctctgtaactgagtcatccctgattcagtcaaacacacaccatcctgggtataagtcttgggtgggtctaaaattacaaaatcccaagaatacaaatttaaactttcattttaaatttgactgattactgttccaaaatacc

SEQ ID NO: 195486 - DNA, 549 bp, Homo sapiens
tcttgcaatggaacagataattagtagccagagtcccaagaatactgtactactgataaaataatactatcaatatatgttcactgcttaacttctaaagagtacaacaatataccaatgaaagcaaggaaacattcttgattttgaaattccacataattacgtagggagggcagaaggtgctatctaatacctagatatctagtatctagagctttaagagaaagtggtttaaggagaacagaaagtgttagatattttttataatctattaaaagattcagaaacccttcataagaaacagcatagakgaagacaataattctccatctaatttcaagggattcctaaaccctcaaaaaggcctaaattaaaaatcttcagtcttgggtggacacagtggctcacgcctataatcataaaactttgggaggctgaggcgggtggatcacaaggtcaaaagatggagaccatcctggccaacatggtgaaaccctgtctctactaaaaatacaaaaattagctgggcgtggtggcatgcacctgtag

SEQ ID NO: 195487 - DNA, 549 bp, Homo sapiens
tcttgcaatggaacagataattagtagccagagtcccaagaatactgtactactgataaaataatactatcaatatatgttcactgcttaacttctaaagagtacaacaatataccaatgaaagcaaggaaacattcttgattttgaaattccacataattacgtagggagggcagaaggtgctatctaatacctagatatctagtatctagagctttaagagaaagtggtttaaggagaacagaaagtgttagatattttttataatctattaaaagattcagaaacccttcataagaaacagcatagaggaagrcaataattctccatctaatttcaagggattcctaaaccctcaaaaaggcctaaattaaaaatcttcagtcttgggtggacacagtggctcacgcctataatcataaaactttgggaggctgaggcgggtggatcacaaggtcaaaagatggagaccatcctggccaacatggtgaaaccctgtctctactaaaaatacaaaaattagctgggcgtggtggcatgcacctgtag

SEQ ID NO: 195488 - DNA, 544 bp, Homo sapiens
tactatataaattaatatggtgcttatgtacctagaagcagaaaggggcaatcaactaacatttattgagcgcctacggaggcccaatactgggttgggcatgttcatacatgcttttaggagcctactgagcagaataatagaaaatggcacatattttaatgcctttttaaagtccacataattaccttatgctgtacatttaatgtccactgtatttatagatatagtgaccagattttaaagaaatcaagtaagcttcactattattgatacataatttgaaaatacatcaacaaaatctccatctacatttccatgcttagaatcaatagaaaaaataccaaaaaaattaatgtaaagcatgagttcttagggacattttatgatcttagaagatttctatttagactatgaagctaggaattctgaagttcacattcactcctctgtttattctcccctctctcaagggtataagttagcagaatatttgggaatttccaaatccctaacaaacwcctgaaggaagccacaccatgta

SEQ ID NO: 195489 - DNA, 574 bp, Homo sapiens
aacacccatcagaatggcacaaaacttcccaactccagatgctagaagagtataatcttccaattctacaggaaaatacttttcaaagtacaattctcaacctagctacacaagcaactatgtgtgaagacagaatacgttgtagacacaggaagactcaaaattcagctccttcattctccttctaataaagttacttagagatatgcggaacagaatgaggatgtattacaaagaaaaggaagacttgggatctataaatcaacagatcygacaaaggacatcaggccagggaagtttaaggatgagaacaacacacccagaagccactggcacatatcagagcaggagaagggaatgtctagaaagagggtaggacttctcccagaaaaaaacagtactttaaaaaataatcttatatgatagttctatagtaggcaaaaacaaagaacgaatggagagtcactattactttcttgttattaaaaactccatgaaagacaaaagaaactcatagtatactgtttagatctgcagtgaacatttactgagtcataaccaacaccttattaat

SEQ ID NO: 195490 - DNA, 587 bp, Homo sapiens
taaacatgtatatttattattttgattagcttattgatttttaagaatttgtcttagattaccaagttagtatattatttgcccaaatgaaggaaatggcctggggtaagatcagggtggcttagagcagtagccagcaaacatttccaataaagggccagagagtaaacagaaagttttgagggccatatgatctgttgcaactttataaaaactctgccagtgtaatgcaaaaaccgctacaaatatatgtaaacaaaagaacttggccatatttcaataaaagtttatttgcaaacacaggaaatgggccagatttagtctatgggccagtctgcctgaycctggcttaaacaatgacctgaagacaaagtggcagacagatctgaggtgtttagtggcagaacttttaaaatatttatcttcattcctactaagttttcttcacagatacctgtggtcccttttacaaccaaactctcaagtttctccgcttatattcactcttcaaaacactacagtctggtctctacacccacatccactcataactgcttaagccaggcttgtcaagaccttcttattct

SEQ ID NO: 195491 - DNA, 566 bp, Homo sapiens
attatttgcccaaatgaaggaaatggcctggggtaagatcagggtggcttagagcagtagccagcaaacatttccaataaagggccagagagtaaacagaaagttttgagggccatatgatctgttgcaactttataaaaactctgccagtgtaatgcaaaaaccgctacaaatatatgtaaacaaaagaacttggccatatttcaataaaagtttatttgcaaacacaggaaatgggccagatttagtctatgggccagtctgcctgatcctggcttaaacaatgacctgaagacaaagtggcagacagatctgaggtgtttagtggcagaayttttaaaatatttatcttcattcctactaagttttcttcacagatacctgtggtcccttttacaaccaaactctcaagtttctccgcttatattcactcttcaaaacactacagtctggtctctacacccacatccactcataactgcttaagccaggcttgtcaagaccttcttattctcaaatctaatggaaacattagtgtttgtgtttcttgacttctagtacttcaa

SEQ ID NO: 195492 - DNA, 580 bp, Homo sapiens
agtatatgggaccaggctgttttcccataagatagtagaaaattggacaaagtgtatgaaacaactgttttcagatattggacaacacatagtaaaggagacagtggtctctgagaggaaggaaacactcagggagtcctatgatattctgcctagaaacattttccagaatcctgcccagggagggagaacckcagcagagtacaatcaatggcctcgctgaggttaggggaggcgaggcagtggaatttgcaggacacagtactcaaaatgaagaagcaataaggactaagagctccagaaatctacaaaggatcccctgaagtctttggtggaacaccaagccgtacttctagaagcccaaagacccacaaccaggggaaagtacatctactgggaatgtgtaagctgcacaattaccagagcttgcaaaaggctcaaagacaagtgaagcacaaccagtcagagtacaaagacactggtgaacagggggtagaattcagtagtgatcccagaaaggccaagtcttaagtatagggttaaactaatgctaggactgcagctaccaaaatgtggacta

SEQ ID NO: 195493 - DNA, 422 bp, Homo sapiens
gtataaattgtcttttaaattaaatgcatatatttttatgttttactttttcaagacaaaagcaggatattagtacaatataagatttatagaggagcaaatttcttgagataggaaacccttaaaagcagtatttaaagtacttaaatackgtcacatatgtttaataatcataatacttaattgtgagaactgggagctcatgttactactaaaaccaaataaaaattcaatacatatttgttaactcagtttaaggatgtttaccttaatactgacacagtatggatggtaacactgaccacactgagaacaggcaagtaatcttccttctgctccttggccaaaactgccacaaactacacatatatcctgaagttaagaaaacagaacatattttaaatggagactaagctaaaaac

SEQ ID NO: 195494 - DNA, 284 bp, Homo sapiens
gcaggacagaactgccgtctcatttgartatctctctgggcctgattatttaaaaggacttgcatttctcacatgaaagttattttcttttctcaatgtccataaatgagaataaatagatgtaaaatagatcttttcgaggatgaagtaaatggaatgaaaaacaaaacccaagctgaccagaaatcatagagggaagaaaaggttataaatatatggatttttcaaagtgattttaagctattaggaatcagttaaatgttgggggattttgtctgagaatg

SEQ ID NO: 195495 - DNA, 284 bp, Homo sapiens
gcaggacagaactgccgtctcatttgaatatctctctgggcctgattatttaaaaggacttgcatttctcwcatgaaagttattttcttttctcaatgtccataaatgagaataaatagatgtaaaatagatcttttcgaggatgaagtaaatggaatgaaaaacaaaacccaagctgaccagaaatcatagagggaagaaaaggttataaatatatggatttttcaaagtgattttaagctattaggaatcagttaaatgttgggggattttgtctgagaatg

SEQ ID NO: 195496 - DNA, 284 bp, Homo sapiens
gcaggacagaactgccgtctcatttgaatatctctctgggcctgattatttaaaaggacttgcatttctcacatgaaagttattttcttttctcaatgtccataaatgagaataaatagatgtaaaatagatcttttcgaggatgaagtaaatggaatgaaaaacaaaacccaagctgaccagaaatcatagagggaagaaaaggttataaatatatsgatttttcaaagtgattttaagctattaggaatcagttaaatgttgggggattttgtctgagaatg

SEQ ID NO: 195497 - DNA, 284 bp, Homo sapiens
gcaggacagaactgccgtctcatttgaatatctctctgggcctgattatttaaaaggacttgcatttctcacatgaaagttattttcttttctcaatgtccataaatgagaataaatagatgtaaaatagatcttttcgaggatgaagtaaatggaatgaaaaacaaaacccaagctgaccagaaatcatagagggaagaaaaggttataaatatatggatttttcaaagtgattttaarctattaggaatcagttaaatgttgggggattttgtctgagaatg

SEQ ID NO: 195498 - DNA, 539 bp, Homo sapiens
ctcccaaattcagtgttgatgagagcccatttcatggttcatagatggtgccttctttctatgtcctcacayagtggaaggcacacaagaactccattgagcttcttttataaaggcactaatccgattcataagagctcagcccccaagacctggtcacctcccaagtgttctgctctccctgatctgtatcatatacagactctcttggattccttaccaattgcttgagagatcatagtgggtttgtggagaaaaagttttcaagatgatggatctttcccaacttttgcagctgtcagcggtctcccaatctgaccagccccactttgtctttaggaatttattgattattccagctttacttgtcatagtggtgtctatttgcatctgtcctatgtaagtgcatctgtcctctttctccttgcaggtgcttgttttccctcacattttgactcagttcttggcaacctcgttgctataaaaataaagtcatgactttgaagttagtttggttctttcattgttgtcaggttagg

SEQ ID NO: 195499 - DNA, 539 bp, Homo sapiens
ctcccaaattcagtgttgatgagagcccatttcatggttcatagatggtgccttctttctatgtcctcacacagtggaaggcacacaagaactccattgagcttcttttataaaggcactaatccgattcataagrgctcagcccccaagacctggtcacctcccaagtgttctgctctccctgatctgtatcatatacagactctcttggattccttaccaattgcttgagagatcatagtgggtttgtggagaaaaagttttcaagatgatggatctttcccaacttttgcagctgtcagcggtctcccaatctgaccagccccactttgtctttaggaatttattgattattccagctttacttgtcatagtggtgtctatttgcatctgtcctatgtaagtgcatctgtcctctttctccttgcaggtgcttgttttccctcacattttgactcagttcttggcaacctcgttgctataaaaataaagtcatgactttgaagttagtttggttctttcattgttgtcaggttagg

SEQ ID NO: 195500 - DNA, 539 bp, Homo sapiens
ctcccaaattcagtgttgatgagagcccatttcatggttcatagatggtgccttctttctatgtcctcacacagtggaaggcacacaagaactccattgagcttcttttataaaggcactaatccgattcataagagctcagcccccaagacctggtcacctcccaagtgttctgctctccctgatctgtatcatatacagactctcttggattccttaccaattgcttgagagatcatagtgggtttgtggagaaaaagttttcaagatgatggatctttcccaacttytgcagctgtcagcggtctcccaatctgaccagccccactttgtctttaggaatttattgattattccagctttacttgtcatagtggtgtctatttgcatctgtcctatgtaagtgcatctgtcctctttctccttgcaggtgcttgttttccctcacattttgactcagttcttggcaacctcgttgctataaaaataaagtcatgactttgaagttagtttggttctttcattgttgtcaggttagg

SEQ ID NO: 195501 - DNA, 564 bp, Homo sapiens
gtggggacttcttgagaatgactagtcacatgcagctcctagagtacagttcctctctctccgagagcctgtgaaactagagagacacagtatctgcttccatackcctagcattaaatggtataacaggcatgggttagctctatatctgtctcctttttctctagatgtttgatgagacaagtattttaattttgtattccactaatttattcattcaacaaatacttattaggtactgactatagactctttatttattttgcattcccattttgccaacaaggaatctgagaatcagaggcaaaatattacagcttggcccactgaattattttttcttctctgaaaggacctctaggattctccatcaatgaggactttctagtcacagctgcagtgaggtttgagtttagctgattagaccatcaaccacaaagactatacattcaaatacttttatgtggcagaatatctaagaataattcaagctaataaaagatctagagaataattagatatattcattgttaataagagccatttaatattgtagcaaaggca

SEQ ID NO: 195502 - DNA, 564 bp, Homo sapiens
gtggggacttcttgagaatgactagtcacatgcagctcctagagtacagttcctctctctccgagagcctgtgaaactagagagacacagtatctgcttccatacgcctagcattaaatggtataacaggcatgggttagctctatatctgtctcctttttctctagatgtttgatgagacaagtattttaattttgtattccactaatttattcattcaacaaatacttattaggtactgactatagactctttatttattttgcattcccattttgccaacaaggaatctgagaatcagaggcaaaatattacagcttggcccactgaattattttttcttctctgaaaggacctctaggattctccatcaatgaggactttctagtcacagctgcagtgaggtttgagtttagctgattagaccatcaaccacaaagactayacattcaaatacttttatgtggcagaatatctaagaataattcaagctaataaaagatctagagaataattagatatattcattgttaataagagccatttaatattgtagcaaaggca

SEQ ID NO: 195503 - DNA, 468 bp, Homo sapiens
tcactgaaattaggcttcactgacttagcaaatgtcaagaatgatccaccctacccctacccctacccccatcctaaccaaaggctttcctcaagcaggttgaggcctctgagcctgctcyatgatcccttctctcctgctctgcttcttgctggcctgcccactctgttccactctctcacctgcttccctggtcacctcttactgctgctgttctcccaggccctttcccatttttaccccatgggctcttccagggccctgatcactctcaggctcagtctctgagccccagacccctatgtctgaggacccactgggtgtttcgcatactgagcatctctatcagagtctatctgatggatgggctctttcactagaatttacaaaaacaaaaggcagccaatgctgccacaaatgcaaaagatcctgcatgtcctcattattgttccttccctcccacagttc

SEQ ID NO: 195504 - DNA, 362 bp, Homo sapiens
aataccccttccacttcatctcactgaaattaggcttcactgacttagcaaatgtcaagaatgatccaccctacccctacccctacccccatcctaaccaaaggctttcctcaagcaggttgaggcctctgagcctgctctatgatcccttctctcctgctctgcttcttgctggcctgcccactctgttccactctctcacctgcttcyctggtcacctcttactgctgctgttctcccaggccctttcccatttttaccccatgggctcttccagggccctgatcactctcaggctcagtctctgagccccagacccctatgtctgaggacccactgggtgtttcgcatactgagcatct

SEQ ID NO: 195505 - DNA, 362 bp, Homo sapiens
aataccccttccacttcatctcactgaaattaggcttcactgacttagcaaatgtcaagaatgatccaccctacccctacccctacccccatcctaaccaaaggctttcctcaagcaggttgaggcctctgagcctgctctatgatcccttctctcctgctctgcttcttgctggcctgcccactctgttccactctctcacctgcttccctggtcaccycttactgctgctgttctcccaggccctttcccatttttaccccatgggctcttccagggccctgatcactctcaggctcagtctctgagccccagacccctatgtctgaggacccactgggtgtttcgcatactgagcatct

SEQ ID NO: 195506 - DNA, 362 bp, Homo sapiens
aataccccttccacttcatctcactgaaattaggcttcactgacttagcaaatgtcaagaatgatccaccctacccctacccctacccccatcctaaccaaaggctttcctcaagcaggttgaggcctctgagcctgctctatgatcccttctctcctgctctgcttcttgctggcctgcccactctgttccactctctcacctgcttccctggtcacctcttactgctgctgttctcccaggccctttcccatttttaccccatgrgctcttccagggccctgatcactctcaggctcagtctctgagccccagacccctatgtctgaggacccactgggtgtttcgcatactgagcatct

SEQ ID NO: 195507 - DNA, 468 bp, Homo sapiens
tcactgaaattaggcttcactgacttagcaaatgtcaagaatgatccaccctacccctacccctacccccatcctaaccaaaggctttcctcaagcaggttgaggcctctgagcctgctctatgatcccttctctcctgctctgcttcttgctggcctgcccactctgttccactctctcacctgcttccctggtcacctcttactgctgctgttctcccaggccctttcccatttttaccccatgggctcttccagggccctgatcactctcaggctcrgtctctgagccccagacccctatgtctgaggacccactgggtgtttcgcatactgagcatctctatcagagtctatctgatggatgggctctttcactagaatttacaaaaacaaaaggcagccaatgctgccacaaatgcaaaagatcctgcatgtcctcattattgttccttccctcccacagttc

SEQ ID NO: 195508 - DNA, 468 bp, Homo sapiens
tcactgaaattaggcttcactgacttagcaaatgtcaagaatgatccaccctacccctacccctacccccatcctaaccaaaggctttcctcaagcaggttgaggcctctgagcctgctctatgatcccttctctcctgctctgcttcttgctggcctgcccactctgttccactctctcacctgcttccctggtcacctcttactgctgctgttctcccaggccctttcccatttttaccccatgggctcttccagggccctgatcactctcaggctcagtctctgagccccagacccctrtgtctgaggacccactgggtgtttcgcatactgagcatctctatcagagtctatctgatggatgggctctttcactagaatttacaaaaacaaaaggcagccaatgctgccacaaatgcaaaagatcctgcatgtcctcattattgttccttccctcccacagttc

SEQ ID NO: 195509 - DNA, 477 bp, Homo sapiens
cacttcatctcactgaaattaggcttcactgacttagcaaatgtcaagaatgatccaccctacccctacccctacccccatcctaaccaaaggctttcctcaagcaggttgaggcctctgagcctgctctatgatcccttctctcctgctctgcttcttgctggcctgcccactctgttccactctctcacctgcttccctggtcacctcttactgctgctgttctcccaggccctttcccatttttaccccatgggctcttccagggccctgatcactctcaggctcagtctctgagccccagacccctatgtctgaggacccactgggtgtttcgcatactgagcatctctatcagagtctatctgatggatgggctctttcaytagaatttacaaaaacaaaaggcagccaatgctgccacaaatgcaaaagatcctgcatgtcctcattattgttccttccctcccacagttc

SEQ ID NO: 195510 - DNA, 594 bp, Homo sapiens
atttagcatcacccttttggtgctgtgctcgttagagttctcacagtatctaattgtttaaaagtgtgtggcacctccccmctctctctcttgctcctgatttggccatgtaaggcgtgcctgcttccccttcatcttccaccatgattgaaagtttcctgtggttgccccagaagctgagcagatgccagcattatgctccctgaacagcctgtggaactgtgagacaattaaaccccttttctttataaattctccagtctcatgtatttatagcaatgtgagaactgactaatacatagggtctcactgtgttgcccaggctggtctcaaactcctgggctcaagtaatcctcctggctttgcttcccagagtgtagagattacaggcatgagccactgaacctgcccctttccccccaacaacatcttgactgcaacctcctgggagactctgagtcagaagtatccagttaagatgttactgactttctgaaccacagaaactgtgagataataagcatctattgttcctttaagccttaagtttggggctttttttttttacaccaatatataactaatgtagacacc

SEQ ID NO: 195511 - DNA, 594 bp, Homo sapiens
atttagcatcacccttttggtgctgtgctcgttagagttctcacagtatctaattgtttaaaagtgtgtggcacctccccactctctctcttgctcctgatttggccatgtaaggcgtgcctgcttccccttcaycttccaccatgattgaaagtttcctgtggttgccccagaagctgagcagatgccagcattatgctccctgaacagcctgtggaactgtgagacaattaaaccccttttctttataaattctccagtctcatgtatttatagcaatgtgagaactgactaatacatagggtctcactgtgttgcccaggctggtctcaaactcctgggctcaagtaatcctcctggctttgcttcccagagtgtagagattacaggcatgagccactgaacctgcccctttccccccaacaacatcttgactgcaacctcctgggagactctgagtcagaagtatccagttaagatgttactgactttctgaaccacagaaactgtgagataataagcatctattgttcctttaagccttaagtttggggctttttttttttacaccaatatataactaatgtagacacc

SEQ ID NO: 195512 - DNA, 594 bp, Homo sapiens
atttagcatcacccttttggtgctgtgctcgttagagttctcacagtatctaattgtttaaaagtgtgtggcacctccccactctctctcttgctcctgatttggccatgtaaggcgtgcctgcttccccttcatcttccaccatgattgaaagtttcctgtggttgccccagaagctgagcagatgccagcattatgctccctgaacagcctgtggaactgtgagacaattaaaccccttttctttataaattctccagtctcatgtatttatagcaatgtgagaactgactaatacatagggtctcactgtgttgcccaggctggtctcaaactcctgggctcaagtaatcctcctggctttgcttcccagagtgtagagattacaggcatgagccactgaacctgcccctttccccccaacaacatcttgaytgcaacctcctgggagactctgagtcagaagtatccagttaagatgttactgactttctgaaccacagaaactgtgagataataagcatctattgttcctttaagccttaagtttggggctttttttttttacaccaatatataactaatgtagacacc

SEQ ID NO: 195513 - DNA, 594 bp, Homo sapiens
atttagcatcacccttttggtgctgtgctcgttagagttctcacagtatctaattgtttaaaagtgtgtggcacctccccactctctctcttgctcctgatttggccatgtaaggcgtgcctgcttccccttcatcttccaccatgattgaaagtttcctgtggttgccccagaagctgagcagatgccagcattatgctccctgaacagcctgtggaactgtgagacaattaaaccccttttctttataaattctccagtctcatgtatttatagcaatgtgagaactgactaatacatagggtctcactgtgttgcccaggctggtctcaaactcctgggctcaagtaatcctcctggctttgcttcccagagtgtagagattacaggcatgagccactgaacctgcccctttccccccaacaacatcttgactgcaacctcctgrgagactctgagtcagaagtatccagttaagatgttactgactttctgaaccacagaaactgtgagataataagcatctattgttcctttaagccttaagtttggggctttttttttttacaccaatatataactaatgtagacacc

SEQ ID NO: 195514 - DNA, 270 bp, Homo sapiens
caagataaatctttgtaagtacaagaacattaaaaagaacattaagtttgggttaaaaatgcgaaactgcttatgcaggaaaattacgttaaaaaaaaaaaaaaatcctacacctacaaaaacaaccaaacaaaacattgatgatactgggctgawtcactgaatggtgagaatatgagtgattttctcctctcctatttttctcaataccttttctctattatctccttttttaaataagcaagtatatattgttctaaactgaagata

SEQ ID NO: 195515 - DNA, 614 bp, Homo sapiens
tctcagtttgctgaaagctctgatcataaatgggtattggattttatcaaatacttttctctgtgtatgttgatattttcctatgatttttcctctttagcattccttcattatctttttaatatgcatgagatcaatagtgaagtctcctttttgcttctagtattaaaaaatgtgctgcttctccttttttattggtttgcatggccagaggtccactacatttattgatattttcaaagaatcagctttggttttgttgaatttctttataattctttttttcaatttcactaattttgctttaatattcatattttcttctattttatttgcattgaacttgctctttcctttttcttaacattattgattttaagtgttttttatacatgcatgcaatattatatacatttgcctttaattaytggtttttctgcatcccagaaatttgatcaattgtatattcattttaattcagttcaaaatatttacaatttctctcgagatttgtttgtccaatgtgtcatttagaaaactgtcctttcatctccaaatatttagtatttcccagctatctttctgttactgagttccagtttaattgcactgta

SEQ ID NO: 195516 - DNA, 586 bp, Homo sapiens
tacaagtgatttcatcacccaagtagtaaacatactactcaatagatagtttttcaatcctcatcctcctttcaccctccaccctcaggtaagttgcagtgcctattgttaccctctttgtgtctatgtgtactcagaatttagacccacgtataaaggagaacatgtggtatttgtttttctgttcctgcattacttcacttaggatgacaacctccagttgcatccatttcactgcaaaagaaagggtttcattctttttatggctgtgcagtattccactgtgtatatgtactatattttctttatccagtcaaatactgatgagcatctagattgattttatgtccttgctattgtgaaaagtggtacaatgcaaatttgcatgcatgtgtctttatgatataaatacatatatactcgtttggatatatrctcagtaatgggattactgggtctaaaggtacttctgttttaaatttttttgagaaatcttcaaactgctgttcacagtgactgaactaatttacattcctttctgcagtgtataagggctcccttttgtccacaacctaaccagcatttg

SEQ ID NO: 195517 - DNA, 614 bp, Homo sapiens
tccaaacttttttcttggtttttaacatacctagaaactgttgggtcctagctcactacctgggtgacaggatcactgatatcacaaatctcagcatcacatccatattacacacctgcacatgttctctttgartctaaaataaaagttgaaattgttgaaaaaaaaaagcacctaaactaatttatctggtaatagaaactgaagtaattagagctgtagttttatttgaagttttattctgatctgtctaggaatgggactacatttaatatttgctgtagctgcaaataaggctctggtaaggtagcttctcttaggggcaggattttgttggagaaagatcttgtcatatttttaaatgatgacttactttcgtgcttcccctgcttgaatcacaagggaatttttctccatccaaccgcaagaatcttgtgaagctcctgaaggtaaaactcatgaaaatgtagggcggattcccttaagactgggaccccagaagcttttaattctaaagcagtccacagtctccagcaactcgtcagtacagtttaaatttcagtgtttctaccaggtactggctccagtgacttctgctcaggataaactgatct

SEQ ID NO: 195518 - DNA, 485 bp, Homo sapiens
gagatgttatctactttaggttgtaatttgcatttccctaattattagtgatgttgagaattttctttcatgattattgcccatatgtatgtcttcttttgagaaatatctttttttgtcttttgcccactttttttttttttaatggagtctcactctgttgcccaggctggagtgtaatagtgcgatcttggctctccacaacctcagcctcccaggttcaagagaytctcctgcctcagcctccctagtagctgggattataggcacctgacaccacgcaaggctgatttttgtattttaagtagagatgaggtttcatcatgttgaccaggctggtctcgaactcctgacctcaggtgatccacccacctcagcctcccaaagtgctgggattacaggcataagccaccatgtttggctgcccactttttaataggttcatttggggtccttaaattgtcattaactagagttccttgtac

SEQ ID NO: 195519 - DNA, 485 bp, Homo sapiens
gagatgttatctactttaggttgtaatttgcatttccctaattattagtgatgttgagaattttctttcatgattattgcccatatgtatgtcttcttttgagaaatatctttttttgtcttttgcccactttttttttttttaatggagtctcactctgttgcccaggctggagtgtaatagtgcgatcttggctctccacaacctcagcctcccaggttcaagagactctcctgcctcagcctccctagtagctgggattataggcacctgacaccacgcaaggctgatttttgtattttaagtagagatgaggtttcatcatgttgaccaggctggtctcgaactcctgacctcaggtgatccacccacctsagcctcccaaagtgctgggattacaggcataagccaccatgtttggctgcccactttttaataggttcatttggggtccttaaattgtcattaactagagttccttgtac

SEQ ID NO: 195520 - DNA, 595 bp, Homo sapiens
ttttcagttagctgttactattaaataaatggccccaaacacagtagtacaaaactacaaattattgtttctaatgtttctgtgattctgtggaagggctaagaggttgttttgttttgcattgtcttagctgggcctgaatgatctcccactaactcacttacatatctgggtgacacagtttggctctgtgaccccatccaaatctcatttcgaattgtaatctccacatgtcaagggagggaggtgactggatcctgggagtggttttccacatgctgttctcatgatagtgagtgagttttcatgaaatggttttattagcgtctggcacttctcctgtagcacttttccaatctctgcttgtgcctattttgttattgccccactggcaaaagcaagtcatatgccaatccagacttggaagatgcggaaatcaaccccactcatcaataggggaagtagtggcaaagtcacakcacaaaaagatgtatacaaacggattagaggcgtcattgcagctttttttgaaaatgatcttccacatcaatcttttagcctcccttcaagtttctcttctttaagatgaagttta

SEQ ID NO: 195521 - DNA, 529 bp, Homo sapiens
aatttaatggctttattactttcatgtaatcataaaattatatttgcctcacttctttgtatatctatgataataatattcatttttggtgataatccaatgagatgatgcatatgaaaatgcttttatagccaagttatgaaaagtactagacactataattattattattgacattatttttcactctgcttaactttttaaaatatgtattgtaaaagttagagaaatgtagatgacaaatattaaccaaaaccagaaaaaaaattgtagcttaaatgctacttgaaagtagatatgcagtactgtaaagcctggtrattgacatattaaaatctcttaagatgttttatttatttgccaacagatatgtggatctaagctttagttatgcattaatctaaaataattcacctgatttttaaaggaattagctcttgagattgcatgcattgtgaaattagaaattagagtgattaaaattatttatatattatggaaaggatattagggttatatattttaaatg

SEQ ID NO: 195522 - DNA, 593 bp, Homo sapiens
gctattcatcaagacaatggaggaatgacctcaaactcattttggagagcatcaggtctgtcacttctatcataggtctagaattccaaggcctgggggacagaaaaatatcaagagagacctgaggcccctactggcctccacactctcctccctttcctgtaccaccacaaatctctgctccctgctttctggcacaccaatattcaactgtcccacgtgtggttccagtggtcccaggcacagtggtgacacgaagtctatggctctccttggctggaatttaacacaggtgagggtcttgagggtagacctgytcccaaacctccactagacatttccctagtgggagttctctaaagtggccctgcccctgtggcagctctctgcctgggccctgaggctgtctgggacattttttgaaatctaagtggaggcagccatgcacccacagctctgcactctgtgcactagtggagatggcatggtgcagttgccaccaacgtttactgcctgcagcctgtagaagagtggctctgaatagagtgttttctaattagctctatccattcattactttttcctagttttag

SEQ ID NO: 195523 - DNA, 593 bp, Homo sapiens
gctattcatcaagacaatggaggaatgacctcaaactcattttggagagcatcaggtctgtcacttctatcataggtctagaattccaaggcctgggggacagaaaaatatcaagagagacctgaggcccctactggcctccacactctcctccctttcctgtaccaccacaaatctctgctccctgctttctggcacaccaatattcaactgtcccacgtgtggttccagtggtcccaggcacagtggtgacacgaagtctatggctctccttggctggaatttaacacaggtgagggtcttgagggtagacctgctcccaaacctccactagacatttccctagtgggagttctctaaagtggccctgcccctgtggcagctctctgyctgggccctgaggctgtctgggacattttttgaaatctaagtggaggcagccatgcacccacagctctgcactctgtgcactagtggagatggcatggtgcagttgccaccaacgtttactgcctgcagcctgtagaagagtggctctgaatagagtgttttctaattagctctatccattcattactttttcctagttttag

SEQ ID NO: 195524 - DNA, 593 bp, Homo sapiens
gctattcatcaagacaatggaggaatgacctcaaactcattttggagagcatcaggtctgtcacttctatcataggtctagaattccaaggcctgggggacagaaaaatatcaagagagacctgaggcccctactggcctccacactctcctccctttcctgtaccaccacaaatctctgctccctgctttctggcacaccaatattcaactgtcccacgtgtggttccagtggtcccaggcacagtggtgacacgaagtctatggctctccttggctggaatttaacacaggtgagggtcttgagggtagacctgctcccaaacctccactagacatttccctagtgggagttctctaaagtggccctgcccctgtggcagctctctgcctgggccctgaggctgtctgggacattttttgaaatctaagtggaggcagccatgcaccyacagctctgcactctgtgcactagtggagatggcatggtgcagttgccaccaacgtttactgcctgcagcctgtagaagagtggctctgaatagagtgttttctaattagctctatccattcattactttttcctagttttag

SEQ ID NO: 195525 - DNA, 524 bp, Homo sapiens
tggaatcaaatttccaaaaatattttgtaaagaacaaagaattatacataccattatgtcttttaagattttgttaatatttgtaataatttagcaaatttgtcttattataagctaatcacacacatatacaagtcaattttagccacttcttttttaccagcagcagagagatattagatcatagccacwctcacacgtaattgaagcttggaattatacccttttttaaaaaatttatttcatgctgagaagtatggacaaaaagaaaatgctaattttttaaaacaagtagagaatagttccttgggaataaccttctgtctctgcctctcccatattttatttaaaaagcagtggtttataagatgttattatatatactgcaagaaaaaagttgttgcacagtcaaatgccttaaatattggtttattcaaaagtaaatactttgcttactgtataagttaccatcatgtgtaacatggtgacttaattttccaaaaggaaattgatatatataacga

SEQ ID NO: 195526 - DNA, 524 bp, Homo sapiens
tggaatcaaatttccaaaaatattttgtaaagaacaaagaattatacataccattatgtcttttaagattttgttaatatttgtaataatttagcaaatttgtcttattataagctaatcacacacatatacaagtcaattttagccacttcttttttaccagcagcagagagatattagatcatagccacactcacaygtaattgaagcttggaattatacccttttttaaaaaatttatttcatgctgagaagtatggacaaaaagaaaatgctaattttttaaaacaagtagagaatagttccttgggaataaccttctgtctctgcctctcccatattttatttaaaaagcagtggtttataagatgttattatatatactgcaagaaaaaagttgttgcacagtcaaatgccttaaatattggtttattcaaaagtaaatactttgcttactgtataagttaccatcatgtgtaacatggtgacttaattttccaaaaggaaattgatatatataacga

SEQ ID NO: 195527 - DNA, 524 bp, Homo sapiens
tggaatcaaatttccaaaaatattttgtaaagaacaaagaattatacataccattatgtcttttaagattttgttaatatttgtaataatttagcaaatttgtcttattataagctaatcacacacatatacaagtcaattttagccacttcttttttaccagcagcagagagatattagatcatagccacactcacacgtaattgaagcttggaattatacccttttttaaaaaatttatttcatgctgagaagtatggacaaaaagaaaatgctaattttttaaaacaagtagagaatagttccttgggaataaccttctgtctctgcctctcccatattttatttaaaaagcagtggtttataagatgttattatatatactgcaagaaaaaagttgttgcacagtcaaatgccttaaatattggtttattcaaaagtaaatactttgcttactstataagttaccatcatgtgtaacatggtgacttaattttccaaaaggaaattgatatatataacga

SEQ ID NO: 195528 - DNA, 544 bp, Homo sapiens
aattatggaaggaatggggtaatttgagatttttgtttgcttttatataatttcaaataaggaaagtgtttgtgtcgggtttaagttttaagaatttaaattggatgctggttttcatggattagggaagaaagacagaaaatatgaaatgaccacacactgcaatttctgaattagattaggtgaaaagctatgtatctgatgataatgaagaaaaakaggatagctggagaaatattgtgaaaagaaaaatttactacatgaggttggccctctgcaaataaaaaaaccttaaattaatcttctcagataagaaaaaaactatgtaaattataacattcttactgaagccaatctacctattgtaaaagtatttgtatgctacagatatgagcaatgcccatcaagaggagcctaggacacagccaagactgcaaatgtgggtagcttctacctactttcatttcattacatttttaggctatagattatgctcaatttttaagccaaaaattatgaaatattctcattgagtacaggaata

SEQ ID NO: 195529 - DNA, 620 bp, Homo sapiens
actgtagcaaacaagtcaaaaacctgttgaattttctgttaccatcttacagtgttttaaatctgtactgttatgttcaatattttttcttaagaaaaaagatgaagattatatttaactatagtgtaagtataaaaactgtagtatcagcattgatacagtactagtatcttatttaatgaccttacttaaatatttcctattgttccattgctataagtgacaaaaatctggtcctggatccaaggcaagattttaacttgcactgagttgttaaatttctttaatctcccataatctgkaacaattccttggatttttgttgtctttgatgtccttgatatttgtgggatgttcctctatttacatatttgtatgatgtttctttatgattaaattcaagttaaacatttttggcagggttaccagaggaaatatttcatccttctctgagcataatgataggaagcacatgatttctatttgtcccattactgatgaggttaacttgttttgctgagttcaggtagtgtgtaacttctgctctttgatattactatctttccatttctaattaataagtaacttgggcaagtactatcttgaagttatgaccaaga

SEQ ID NO: 195530 - DNA, 562 bp, Homo sapiens
aactttcacttctgcgttggtctctccttctgtcttatgcccctcagtccaattctttcttatgagaaggcaagaattgaggttgctgcagaacgtrtggattcgctgctggtaacgtaggcagatctttcagttggctcttatttccttttgagatacccctatcagtgtgtgtgtgtgtgtgtgtgtgtgtatgtgtttatgtacctccttactttctgctactaaaagattctccatgttcttcctatgtatttcttgtcccagtgtaaaaacagccacagtattagaaaccatagctatgtgctagatatgctcattgttactgaatccatagcttaacttttaaaaacagtgattctaaaggaaaagcatagtaagtgattttgcattatggacagttaaatcgacttcagtttttaaaacatataaatggtttgtcatgaaacttgcaaagaaatcccgctggaaaaacacgtaaaaagccttaaacagccaggcgcggtggctctcgcctgtactcatctctttgggaggccaaggtgggtggatcacctgaggt

SEQ ID NO: 195531 - DNA, 587 bp, Homo sapiens
taaacccttttgttctctatcaacataaaagaaaggggatttaaccatcttgacataataatgaaaaatgcactggtctattataatgatggaatttggttaatttggcttgagagtaagaagtaaatactttggatgtcctctcctggtaagatgcatgtaaacaagacagtgagagatcatctgtacaaattttcatagatctgccacatcaaaagttttaagggatcaatttttcttgcatatgcttgggcatgtctgtcctccaatttgaattaaaagttaatacacrctgtacttcttatcaaaacaaaggagcatagaacttgataggctgctttagaatgtggaaacagcaaatgtcacatttaaagtactgcctggattttggaaggctggcagttttaagtgaacctatagaaagagaggataatgctctaggtttagcctgaagttcagttagctctaacttgtgggtcatgtgacctggtcaaagccatatagtgttatctgtgtcataaggatgatgcatggagtctctgacaatcctcaataaagaactcatagcataaaaccctaggttatgc

SEQ ID NO: 195532 - DNA, 637 bp, Homo sapiens
ctccttttaatttctgattttgtttgttgagttttctgccttctttcttgttttaagaaagttttgtcatcgtataaaaccccaatacctagttttgttggattttctattctccattttgtttatttctgctttaatccttcttcttctaattttgggcttagtttgttcttttcctggtttctctaggtatatacgtaagttgtttattgatgctctttcttccttgttaatgtaggccatttattgatataaaattccctcttagtactgcttttgcttcattccttaagctttggtgtgttttgttttcattatcattttttacgaagtattttagaatttctcttttcttttttcacccattggttgttcaggtgtgcattgtttaatttctatrtacaccctgatgttgagtgcatatgttttggattgttgtaattccctgatgacttggatcttttattattatagattaacttctttgtcttttggtcttttgagataatttttgatttaagtctattttgtttgatataattttaaccttgactccttttttttctactgtttgcatggaataccttttttcatctttttatgttcaacatttgtatgttcttaaatttaagttgag

SEQ ID NO: 195533 - DNA, 446 bp, Homo sapiens
ttcctctacttagagatcttttggtcttcatgatctgaatatacatttttctccttaggtttagggagttttctttaaagaatatatctgaccctctctctatctcttctccctctgtgacttccataaggcattcattggtcgcttaatgatgttttgtatgtttctaatttttttgcctgatttttctttctttttttgttcctctgagtttactgattcttttctctgcttgatcaagtctgcttttggtactctgtattgatttctttttgtttcagttattgtatctctagctctataatttctatttggttatttttatggcttctatatttttattgatattctcrtttgttcatgcattattttcctgattccatttagttgtgtagtgtgttctcttataatttaccaagcttctttaagaccttcattttgaattc

SEQ ID NO: 195534 - DNA, 560 bp, Homo sapiens
tcctccccttttgggtaagaaaccaagctttaaaaggttaagtagtttgcctgtagtttcagagataattagctcgagatagagggaataatccttaggaaaaaaatcatggatttcggaatcagaaaaccttgagatctaatgctgcctgtgacacatattcactgtatgatcagggccagatgcttaacctctcggagcatctayagctgctgcactaaaataacctcaaaggactattgtaatgatgacaataaatattctcagacagcaggggttcaacacattgtaggtgtatataactctactattattactggaagagactctgatgaaatctgcagccttgccatccatccgagtcttcactaagggctctgtttcagggttatttgtagaaagaacatggagttcggtctcccatgcagtcaattacattctgttgttacaaaaaatcatccaaggagatgatactacctaatctgtggaagagttaaaataagatcatttgtgtctttctttatcatgccttatttcctttgcaagagaagaccttgggt

SEQ ID NO: 195535 - DNA, 585 bp, Homo sapiens
  misc_feature (1)...(585): n = A,T,C or G
tgtttaagcttatcctgagaatagctgaggggccattggagggttttcagcagtggagaggtatgatcagatttgtctttttcggaagctatcttttgaaggtttcgtggagarcaacagagaaatatgagttggggaaatgaggatgctggttctcatgtgtgggcccttgggctggtgacagttcttggcagagttttcactgatgtattgctaaatgaggaaggtaaagactgtgtgtgtgtgacgcataacaccacatatatgagaataccaacagtcccagttgtactttcttgagaatgctttattatttggaaactaccgcttttctacttttttttggcactaaaattccttttgtttatgaaataatgttcacagtaggatagtaaatagtaggaatttttttatgtcattaccagacaaaattaaatgtatgtctgtgccttgattcatttgtttttaaacttattgtttcttagtccatgaaatccccaaacctgggaacttctgagctgcatgccattgcaattgtgctcaggtgagagctgatgagttcatcggnnnnnnnnnnnnnnnnnn

SEQ ID NO: 195536 - DNA, 493 bp, Homo sapiens
gaatctaaagagaccatacacaatgaactttaaaattgtaatgtaaacataatcaagagataatgccaagagaataggatgccatcttgaggttatgacctccaactgctgtaaaagtgtgcaaggagaagcaaactgatgtctagaaatacaggytgggtgttagccaagactttcacttgaatgccagtgtcctggggctccccgaatgataactgaatcactgctttataaaatgtagtctttttttataccattctctggaggggggttgtagggcataaaaaattagattgtatttggatgacatgtttgtataaccctttggacgcaaatgtacctgacattatagaatttcttcctgccaagtaaccgaaatttatcagacccttgtcctaatctttcaaagccttaggttttccttctggttgttaaatcaattcacacaatgtgttaatagctccttgaggcaagtggaaaagcttctagaaag

SEQ ID NO: 195537 - DNA, 493 bp, Homo sapiens
gaatctaaagagaccatacacaatgaactttaaaattgtaatgtaaacataatcaagagataatgccaagagaataggatgccatcttgaggttatgacctccaactgctgtaaaagtgtgcaaggagaagcaaactgatgtctagaaatacaggctgggtgttagccaagactttcacttgaatgccagtgtcctggggctccccgaatgataactgaatcactgctttataaaatgtagtctttttttataccattctctggaggggggttgtagggcataaaaaattagattgtatttggaygacatgtttgtataaccctttggacgcaaatgtacctgacattatagaatttcttcctgccaagtaaccgaaatttatcagacccttgtcctaatctttcaaagccttaggttttccttctggttgttaaatcaattcacacaatgtgttaatagctccttgaggcaagtggaaaagcttctagaaag

SEQ ID NO: 195538 - DNA, 493 bp, Homo sapiens
gaatctaaagagaccatacacaatgaactttaaaattgtaatgtaaacataatcaagagataatgccaagagaataggatgccatcttgaggttatgacctccaactgctgtaaaagtgtgcaaggagaagcaaactgatgtctagaaatacaggctgggtgttagccaagactttcacttgaatgccagtgtcctggggctccccgaatgataactgaatcactgctttataaaatgtagtctttttttataccattctctggaggggggttgtagggcataaaaaattagattgtatttggatgacatgtttgtataaccctttggaygcaaatgtacctgacattatagaatttcttcctgccaagtaaccgaaatttatcagacccttgtcctaatctttcaaagccttaggttttccttctggttgttaaatcaattcacacaatgtgttaatagctccttgaggcaagtggaaaagcttctagaaag

SEQ ID NO: 195539 - DNA, 493 bp, Homo sapiens
gaatctaaagagaccatacacaatgaactttaaaattgtaatgtaaacataatcaagagataatgccaagagaataggatgccatcttgaggttatgacctccaactgctgtaaaagtgtgcaaggagaagcaaactgatgtctagaaatacaggctgggtgttagccaagactttcacttgaatgccagtgtcctggggctccccgaatgataactgaatcactgctttataaaatgtagtctttttttataccattctctggaggggggttgtagggcataaaaaattagattgtatttggatgacatgtttgtataaccctttggacgcaaatgtacctgacattatagaatttcttcctgccaagtaaccgaaatttatcagacccttgtcctaatctttcaaagccttaggttttccttctggttgttaaatcaattyacacaatgtgttaatagctccttgaggcaagtggaaaagcttctagaaag

SEQ ID NO: 195540 - DNA, 568 bp, Homo sapiens
aagcttcatcagaatttccatttcctttatccaattcccatcagatgaatcacaaactctcagaatggaaatgttagcttctaagtgaatggtggtagttctgtccctcaagacaatggttataagaggcctcccatggttttctcatcyagtgttgtattagtattattgtttgccaataattcctctaaatgaggaaaagccccacatctctgcaggtgcctccttaccagggcattgcacactttcacagacagctgttgagaatgacagtttcttttgttgaagaggctacccattttagagtctgtgactattgctatggagacaactgcaaaatcagagaaaagctgggtattgggcctgtaaaatcaacaatgctccacagatttctcaccaactaaacctgttcttacaaattagttttgcctattttgaacttaatataaatgaaattgtaaaatatctaccctcttgtgtctgccttctcttgattgacttcacatctatgagatttatttatattgttgcaggtaacagtagtttgttctccttcactgctgtgcag

SEQ ID NO: 195541 - DNA, 445 bp, Homo sapiens
acaatgggtaattagaattaccaccattttccaagtgagaaaactaaggacgagataaaatttatttaaacccagccctgatccagaaaggctggctcttcactctcaggtcaatgcagaatataagtcgctttttccagatgacacagtggccaacagaactgctactggactggtcttactttttccactagaacagtggttcacagaggtagtttctcatgatctattataaagcataactttttacaaaaagtttaacttttyacaaaaatttaactttttcaagttaaaagtttttaacttttaaaacagcaaagttttggctgacttgttaatatacatattttatataaattagaaccaatgaaaagatacctgaaaataacatgtcttgcatacactccattcattcattcatgtaatcagccctgagtgtctggca

SEQ ID NO: 195542 - DNA, 445 bp, Homo sapiens
acaatgggtaattagaattaccaccattttccaagtgagaaaactaaggacgagataaaatttatttaaacccagccctgatccagaaaggctggctcttcactctcaggtcaatgcagaatataagtcgctttttccagatgacacagtggccaacagaactgctactggactggtcttactttttccactagaacagtggttcacagaggtagtttctcatgatctattataaagcataactttttacaaaaagtttaactttttacaaaaatttaactttttyaagttaaaagtttttaacttttaaaacagcaaagttttggctgacttgttaatatacatattttatataaattagaaccaatgaaaagatacctgaaaataacatgtcttgcatacactccattcattcattcatgtaatcagccctgagtgtctggca

SEQ ID NO: 195543 - DNA, 581 bp, Homo sapiens
aaaatgccagaatggactggagcttaattgggagttcttgcaaggaagcccaaaaagcactagagatgctaactactcatgactgccttgtgtacaccttctgcaaggactttcttcccactctaaatttgagtgcttcagaaatcatctgtgaaatcgctagtgttcagtgagtgacaggattttcaaactagtccatttgaatactttctctcactttgctactgaacagaattgaaagctgagaggttaggaaactagtttaacattgcaaaatccttatttaagagatctggatctctggaaaataaccagttkctaaaaaggatggtaccagaggcagtttcttctttccttccttctcctttcccttttttctccaaatgtttattaagcatagactgctccagaaaaggtacaggtcctaagaatacaatgaagagtataaagaaactgttttttcctcatggaactgataatctagggaggaatgcaaacattaatcaaataaccatgtacattaatgtaaacttaccaagagataactgctgcaaaggatgaaaacaagattatgtgaaaga

SEQ ID NO: 195544 - DNA, 487 bp, Homo sapiens
tatatggtatctttatcatctgataatgctgatgtgttgaacagcatataaacagcactagcggttgctggaaaaatgcctataaagtatatatttatttgtttttattgatgacttttttctttatccaaaattactctcaatcttaatcatgatctcaatcttaataacaggctagctagagctaaaatgaagaagatggagtgagggcatacacaaaaggaaaaggaagttatacattctttctaaaagaaaaaataaatataaaatatctggcaaaatttacttgtaacaaagaaaatttgtccagggcttttagacaaaaattagcctatttaaggaaataacatatctcaattttgctacttcaatacacgtcatcagattgtacaggtttaagatttgtttgttaaagtcgagccattgatctctttgctgtttsttttgtaccttcctctcctctcctctcctctccgctcctctccag

SEQ ID NO: 195545 - DNA, 565 bp, Homo sapiens
gcaacaagcacagaatataccttcttcttatctgcacatggaacatactgtaagaataaccacatacgcaaccataaagcaactctcaatgatttttttaaagagcaaaattataccaaccatacttttakaataaaatagaataaaagcagaaatcaacaccaagaatctctcccaaaaccacacaattacatggaaattaaacaacatgcttctaactgacttttgggtaaacaataaaattaaggcagaaatcaaaaatatctgtgaaataaatgaaaacaaagacacaacataccacaatctctgggatgcagcaaaagcagcattaagagaaaagcttatgcatgaaatggagatgtcaaaaagttagaaaaatctcaaattaatgatctatcataatacctagaagaacgagaaaaaaaaaaaaaagaatgaactaactccaaagctagcagaagaaaataaataacaaaacttagagcagaactgagtgaaattgagaccccaaaattcatacaaagaataatgaaacctgaagtcagtttttggaaaaaataaacaa

SEQ ID NO: 195546 - DNA, 590 bp, Homo sapiens
tttaactccatcatagcagatttgcataggaaaagtagccacagacatctataaacaaatgagcatggatgtgttttaatagaactgtatttacaaaacagacagtatctggatttggctctcaggttgtaaattgctaagccctgaattaagaattttaaataatacactttggagattactgagttagctttgagatacataaataacaaagtgattcatcaatcaaatttcaaatttgtaacaaaatataacatgtgaggattctgaaaagttcctccccctaagagtactgtccttcaaccagtaactattttctgagcatgcccttcagaattctacaaaattaggttgttcagctaggtaasggcttatcaatgctaagtataggcatatttccagtgaaattaatttctacagaacttttcccttcggaactatgttgctttcctttctaagaaggcaactaaaaacctctatgaacaaattagggcacctattatgaagagatctcaggatgcttctctcctttctaaataacacattcactttctttatcagatacatttttagagaaaatgccttaggca

SEQ ID NO: 195547 - DNA, 557 bp, Homo sapiens
tgtccttcaaccagtaactattttctgagcatgcccttcagaattctacaaaattaggttgttcagctaggtaagggcttatcaatgctaagtataggcatatttccagtgaaattaatttctacagaacttttcccttcggaactatgttgctttcctttctaagaaggcaactaaaaacctctatgaacaaattagggcacctattatgaagagatctcaggatgcttctctcctttctaaataacacattcactttctttatcagatacatttttagagaaaatgccttaggcaaggccttcttcacacattgtaatgatttaaatttctggtaaagcaagatgaaaagaaagcctagtggagagaattattttgtgtaggctgagcagttttatcgaagccaagaacatagtagtatgtctatggtgattaagcactgaccaagctagmagaaaggaaggtctccagttttaactagacatatatcagattaatttgtccaaactaaaatgagcaagtcaatcgtatttaccaattatttgtgctcctgatgt

SEQ ID NO: 195548 - DNA, 193 bp, Homo sapiens
attacctgttttgttttaaaaaataaacgatttatcttttttcttttttagcacacacacayatacacagacacacagagacacacacacttcacttcatgccttcattttcatgatttcagtattctacttcttccaactaatatgtagccaaccatgccacatagctgtccaaggacaaattagcattaga

SEQ ID NO: 195549 - DNA, 568 bp, Homo sapiens
atttgaaactgttatctctctgtctgtctctttatggctttatcatctatctggttatttgattttatattactaatggcgtatttaactttaacaaaagatgcacaggcctgaaacagaaagaaaattattttcattagggcaagtgagagtgtaataaaaataagtaagaaattttaatggagcaccacgtatttccttaatcaaaccaactcccmagatactctgtaatatcaacataagacttggaaggtggtaattgcttatagatttcttttcctttcaactttcatgtttttaatcttgaattgatgtatgtagttggctcttggttgtctatgaatattaaaaggatgaaagacttgggatgcatcccatgcccttgttttctaactctaccattgaccacccactaagatagattctgggccactgacaatagggaaatatcagcaggaagagggaaaactaaattacaaatgctttaatgtctacaagcattagagcatttttgccttgtgctggctgaaactacaagtagagagctactactaatcattcttgctat

SEQ ID NO: 195550 - DNA, 568 bp, Homo sapiens
atttgaaactgttatctctctgtctgtctctttatggctttatcatctatctggttatttgattttatattactaatggcgtatttaactttaacaaaagatgcacaggcctgaaacagaaagaaaattattttcattagggcaagtgagagtgtaataaaaataagtaagaaattttaatggagcaccacgtatttccttaatcaaaccaactccccagatactctgtaatatcaacataagacttggaaggtggtaattgcttatagatttcttttcctttcaactttcatgtttttaatcttgaattgatgtatgtagttggctcttggttgtcyatgaatattaaaaggatgaaagacttgggatgcatcccatgcccttgttttctaactctaccattgaccacccactaagatagattctgggccactgacaatagggaaatatcagcaggaagagggaaaactaaattacaaatgctttaatgtctacaagcattagagcatttttgccttgtgctggctgaaactacaagtagagagctactactaatcattcttgctat

SEQ ID NO: 195551 - DNA, 573 bp, Homo sapiens
tctgaaatctttgggtataatcatctatcttgtgtgatctaatgtatgttaattcttgtagaagaaatgatttctgctgttataatctgcagcatttatagaaacttgtttgattcaaaagacggtgatggttttgttttccattcatgtttgagattttgagtccagatgaatatctggatacatgaactttataaaaaaggatatcataagaatgttaggagatagtaaaagccaaaaggggrgaatattgctgacccatctcttagaatcataatcttaagtgttctgttcactgtgctgtacttgctgactgcatggtctatttccaagagttgtttttattcctgtggatccaaagtataacaaatggcagagagtaaattaagtattattgcatgggaaggaaaaaaaaagcttactgtattttaggctgattgtatgcatctctgggattttatttttttgccatgctggtttagttagaagacagtttgttaaatggttgttgtgagaaatgaaatgattaattacctatttatctattatctctttatctatatgcttacttgg

SEQ ID NO: 195552 - DNA, 564 bp, Homo sapiens
ctgttttcagtttaactgatgtaattgctcaaactggtcatcattttagtttctcctcctccaatcttcacatataacccaatgtacagtagtctcaaatccatttatctatctcttgaaaaagagcaaataaaaattaaaaacaagagatttaactctccctgttgaaaataagggaagagaccattccccccttccctttcttagattatttacttaagaaaattgtaattataagttatttctctatctctttgaaatgtgtgtaaaccttttaaaaagctgaatagtctcttatcagctttaagacccmggaatgtctttttcaaggacctgagatcatctccttgaaatgtaaatatccagagagattgcatctttatctcccagtctctgtgggaggataggagtaccttactccgagttacaaagctacttcctttcataaagatctgagaagttaaaaatctccttttgataaagctgattagcaaacacagatggccaccctaattaccaggtgaatctaggatgaactatctgtaataaatgatgctgtgaagt

SEQ ID NO: 195553 - DNA, 642 bp, Homo sapiens
atttaaaagaaaagtttgcctttagcatcttttcaatgtggtgttatctcctctcttttagagtgctagatttcaatctgatttttggttctctaccagttgcttcttctttacccccaaaaactcttaactttgaacccggatctgttcttttggaaaaagtttaaattagctcttacatgtttttcgtctccctgcttcaattttatctccctttttctctagcttctgcccttctcctgtcttctaaataaaacttacatcaagatacatagaaaaaataatgaaaacttgawttcatacagaacttatgtttaaatcttgatttcacccctccaattagctgttgtgggaaaatataacacctgatccatagattacatgggtaaaattgggctgaatctgtctatctgcaataattggaaaaagttattgattcagtccattcccagatggacccaaacatgtatgcagctatttagaaatacatggagagtaaagactagtataatgattcatatatgtcccttcaaggtcacctgtcaaagtaagtttcatttcatgggggtgagcactggaagccctcacatttatttctcacctttcttctttttttaatctctctttccacttatgttctgt

SEQ ID NO: 195554 - DNA, 642 bp, Homo sapiens
atttaaaagaaaagtttgcctttagcatcttttcaatgtggtgttatctcctctcttttagagtgctagatttcaatctgatttttggttctctaccagttgcttcttctttacccccaaaaactcttaactttgaacccggatctgttcttttggaaaaagtttaaattagctcttacatgtttttcgtctccctgcttcaattttatctccctttttctctagcttctgcccttctcctgtcttctaaataaaacttacatcaagatacatagaaaaaataatgaaaacttgatttcatacagaacttaygtttaaatcttgatttcacccctccaattagctgttgtgggaaaatataacacctgatccatagattacatgggtaaaattgggctgaatctgtctatctgcaataattggaaaaagttattgattcagtccattcccagatggacccaaacatgtatgcagctatttagaaatacatggagagtaaagactagtataatgattcatatatgtcccttcaaggtcacctgtcaaagtaagtttcatttcatgggggtgagcactggaagccctcacatttatttctcacctttcttctttttttaatctctctttccacttatgttctgt

SEQ ID NO: 195555 - DNA, 547 bp, Homo sapiens
gattcagtccattcccagatggacccaaacatgtatgcagctatttagaaatacatggagagtaaagactagtataatgattcatatatgtcccttcaaggtcacctgtcaaagtaagtttcatttcatgggggtgagcactggaagccctcacatttatttctcacctttcttctttttttaatctctctttccacttatgttctgtcctcctctagccaaatctcatttatctctaagaatgtccagatactgtaaactttaaattcttcagagtggaacatctataaactaactagactattttcttactaatattggtcctttccataggatagttttgaggtattcttatacataaagaccatctattctccaggagcaaggatggagagaaattgaaaggatgcaggggagagagaatagtaaactgattgttccactgggctgggggaaggtggggcagaacaaatgtgtgaaagggcacaaaacctggttctgctacatgtataaagcaacamcattcatgagacagtctaagcaaaaa

SEQ ID NO: 195556 - DNA, 492 bp, Homo sapiens
aatgaaaaatagtacaatccctatggaacacaatatggatatttctcaaagaactagagatagaactaccattcaatccagcaatcccrctactaggtatatattcaaaagaaagaaaatcagtatatcaaagagggatctgcactcctgtgtttattgcagaactactcacaatagccaagatctagaatcaaccaaagtgtccatcaatggataattggataaagaaaatgtatatataaactcaattgaatacaattcataaataagaataaaatcgtgtttttttgcagcaacatggatggtactggaggctgttattttaagtggaagaacttggaaacaaaaagacaaataccacatgttctcacttataagtgtaaactaagtaatatgtacacatagacatagagtgtggaatgattgaaattggagactgggaagtgtggggcaggtgggaagggggtggtgatgagtgatatggtttggctc

SEQ ID NO: 195557 - DNA, 492 bp, Homo sapiens
aatgaaaaatagtacaatccctatggaacacaatatggatatttctcaaagaactagagatagaactaccattcaatccagcaatcccgctrctaggtatatattcaaaagaaagaaaatcagtatatcaaagagggatctgcactcctgtgtttattgcagaactactcacaatagccaagatctagaatcaaccaaagtgtccatcaatggataattggataaagaaaatgtatatataaactcaattgaatacaattcataaataagaataaaatcgtgtttttttgcagcaacatggatggtactggaggctgttattttaagtggaagaacttggaaacaaaaagacaaataccacatgttctcacttataagtgtaaactaagtaatatgtacacatagacatagagtgtggaatgattgaaattggagactgggaagtgtggggcaggtgggaagggggtggtgatgagtgatatggtttggctc

SEQ ID NO: 195558 - DNA, 395 bp, Homo sapiens
atcaatggataattggataaagaaaatgtatatataaactcaattgaatacaattcataaataagaataaaatcgtgtttttttgcagcaacatggatggtactggaggctgttattttaartggaagaacttggaaacaaaaagacaaataccacatgttctcacttataagtgtaaactaagtaatatgtacacatagacatagagtgtggaatgattgaaattggagactgggaagtgtggggcaggtgggaagggggtggtgatgagtgatatggtttggctctgtgaccccacccaaatctcatgtcaaatttaatccccacatgttggaggagaggcctggtgggaggggattgaatcatgggggcggcttcccccttgcacttcttgt

SEQ ID NO: 195559 - DNA, 559 bp, Homo sapiens
ggaggctgcagtgagctgagatcgcaccattgcactccagcctgggcgacagagcaagactcagcaataaaaaaaatatgaaaaataaataaaataaaataaaattttaaaaaagcagcaggcttcctcctttggttttgacagatgttgcctcagaattagtttgagctgttaaakttaagtcaccatccctcaaaaccatacttaagaggattattctgtttagaatggctagctctcctagaataaattacggaataaattacgtaatttactaaaaagagtagtcgttcaattaatttgacaggagtagctcaatttaaaaacaaaatattaatatatgaagtacttcaccatctactgaatttcaaatttagaatggacctaattcctcatcatttctgacaacatattcccacaatatccctggtgaataatagtccactcagtgcttgaacatctccattgatgggaaactcacttctccaaaagaggctgactgatttctgggcaactggaattttcttctttaaattgagagaaaaatagttaacatgtt

SEQ ID NO: 195560 - DNA, 409 bp, Homo sapiens
agactatttgacatataaagcctaattacaatacatttaaatgttaaaccttcacccccaaataaacatgggtcatatatacatcaatttgttcgatacacatatatcaggaccaccttcataactattcataactcatcctataacctgttaaatatatatgcttagccaacttgttcaacataaaactcctaccccaacttatcttcactcaaaatgcctactaatggctttggccagaggcatgcttcccagtctgcaagatagccaccttacagtctataaccctttacaaaaaaataaagtatccttcctaaatttgtaggtcctgtgattttttaacttgacacactgagtcctgtttytggctggaggtgcacttcctagcctgccagcatggccaccttta

SEQ ID NO: 195561 - DNA, 610 bp, Homo sapiens
aagcttaaataagaaagatcacgtgtgtaaaatgctttgaacaatacaggcatgtagtgagtatcagccgagatgattattacaccaacgccttgacaccgtacaaacctcactagcttgtataacccaaatgccagctgggtgcctccatgttcttgcatttgagtgatgacttgggggaactttccaatctctatgtcttggagaagtcccactccctccctgggattgctatgagatctgggagacttgaggtctctggttcacatccctttcctctgagtccacctgggttgaagaattcagctgctacttcattggtttttacaacaaatccgatctcaccaagcattcaggatgtgcccacacttgagtggtggtgggagtggggtgtcgtgggggggtcctcagygcacagttctctctcactgctccttcccccattgtctcccctcctgctttccaacccttccccatctgttcccctcctccctcagctaagcagaagaacgtctccctgagccacaccagtagctgccatttatcaagcacttgttatgggccaggagctgttctaggtactttatagaatcaccacgtttaaacctca

SEQ ID NO: 195562 - DNA, 443 bp, Homo sapiens
cccccctcttatccctctcctccgggatcagctccccaccccactgctgcattctcaggttgctatggagctgccatgctgggcccccaagtaggggtggctctgccaagcccatttccccacggggggagcagtgagctgtcatgctgggtaggtgcttcagggctgggtgggactggccacygaactgggaaggcctggatcacccccctggtagaggagaaagagccagagacttggagtcaaacccagatccttcactggcaaccccacatggcttaggacacgtttctgctcctccttgagcctcagtttccttctctgtaaagtagaactcacaatcccaatcctgtaagactgtcttgggacttaatggcattttctgggcactgctgtgtggcagtcctgtgatgggcattggaatgaaacatgaacaagccata

SEQ ID NO: 195563 - DNA, 442 bp, Homo sapiens
ttgtggagctcccccctcttatccctctcctccgggatcagctccccaccccactgctgcattctcaggttgctatggagctgccatgctgggcccccaagtaggggtggctctgccaagcccatttccccacggggggagcagtgagctgtcatgctgggtaggtgcttcagggctgggtgggactggccactgaactgggaaggcctggatcacccccctggtagaggagaaagagccagagacttggagtcaaacccagatccttcrctggcaaccccacatggcttaggacacgtttctgctcctccttgagcctcagtttccttctctgtaaagtagaactcacaatcccaatcctgtaagactgtcttgggacttaatggcattttctgggcactgctgtgtggcagtcctgtgatgggcattggaatgaaacatg

SEQ ID NO: 195564 - DNA, 444 bp, Homo sapiens
tcccccctcttatccctctcctccgggatcagctccccaccccactgctgcattctcaggttgctatggagctgccatgctgggcccccaagtaggggtggctctgccaagcccatttccccacggggggagcagtgagctgtcatgctgggtaggtgcttcagggctgggtgggactggccactgaactgggaaggcctggatcacccccctggtagaggagaaagagccagagacttggagtcaaacccagatccttcactggcaaccccacatggcttaggacacgtttctgctcctccttgagcctcagtttccttctctgtaaagyagaactcacaatcccaatcctgtaagactgtcttgggacttaatggcattttctgggcactgctgtgtggcagtcctgtgatgggcattggaatgaaacatgaacaagccata

SEQ ID NO: 195565 - DNA, 523 bp, Homo sapiens
ctgactcttcatcacctctgggcccagatttcaaattcccagtagagaaatstggtggcctacctcattgtttcgagaaatcctgcaaggcacagatcactagaagccagtggataagcccttttgggtcagatgttccaatcacccaagagaaggagggatttatgagggtttgagaccagaaaatgggccccactgcccatgtggagccaagtctgaagtgtgcagggtcagaaatcagcccaagattcagctttggccctgctgagggatccaaaggaggacttggcagaggccccagcaactctccctgcaaagcaggtgtagttgttccccaatcctccattcttctctgtaccaaaacctttgcaatttgactttccagctccctccatcaggaattggggtctgttttctcaccccttgggtctcggctgacttcgtaacttgttttgatcaatagaatgcagcaggagtgacagtgctccagttgaagctgtggcctcaacaggcttgcacacgc

SEQ ID NO: 195566 - DNA, 523 bp, Homo sapiens
ctgactcttcatcacctctgggcccagatttcaaattcccagtagagaaatgtggtggcctacctcattgtttcgagaaatcctgcaaggcacagatcactagaagccagtggataagcccttttgggtcagatgttccaatcacccaagagaagragggatttatgagggtttgagaccagaaaatgggccccactgcccatgtggagccaagtctgaagtgtgcagggtcagaaatcagcccaagattcagctttggccctgctgagggatccaaaggaggacttggcagaggccccagcaactctccctgcaaagcaggtgtagttgttccccaatcctccattcttctctgtaccaaaacctttgcaatttgactttccagctccctccatcaggaattggggtctgttttctcaccccttgggtctcggctgacttcgtaacttgttttgatcaatagaatgcagcaggagtgacagtgctccagttgaagctgtggcctcaacaggcttgcacacgc

SEQ ID NO: 195567 - DNA, 633 bp, Homo sapiens
cgctgcagattcccagctcagggacatggttaagacaggatgattttcctctcattcctgctaatttgctgcttctgcttaagctcataaaaagtttcctagcaaaaccatttcggcctgagttcctgctggagcccgctgagctgctgtaattaagctttgattagccggctataaattccctttcrgaagccagcattgcccttggagggccccagcagcgtgttcggtgcatgtctgccccagaacttgggtgatgattcccagtgtcaatggtcaatgagcattgtcagggatggaggcagagatcatcctactcagtctgactgaggtgggcatgtgcaggaaaaagacccaggccaactcactacctcccagaagtgggacaatgatgggctggggttctggaggcaaaggatgctggtatgaacagtccctttggaaagcccttcctggcttctgttttataactccaaacaataggccctgccaaatatatttttctaacatcacaagcttgttgcaaagtcagttttatggatgcactaaacctgccttttaaattatcatcaagtataataaaatggcagaaaatcatcaattttccgagaatgtgagtaaagtgaaagttag

SEQ ID NO: 195568 - DNA, 469 bp, Homo sapiens
agggtctctagataaaaactatcagtgtttacttctggggaggggcatcaaaatagcagaaggaatttcaggagcctattgctctatctgcattacataaatttttaaaagtgagaacatgcttttgaattttgggtataataaaaaaccttaaaayggaaaaaaagcagaagacacattttataaaatattcagacagtatagatgaatacaatctgaaagtgaatgtactccagcatcctatcccccggagagaacaatgcgttatataattttttagatttttgtctttgaatatacaaatatatatatgacagggaaaaaatgattacttaaagccacctactgccttctaaggaagaggagtcctgattactgaattgaagggagtttttgttcactgcgtgagttccagttgaggatatgtatgtttaaagaagctcgagaggttggggggacctagaaaaag

SEQ ID NO: 195569 - DNA, 452 bp, Homo sapiens
gtttacttctggggaggggcatcaaaatagcagaaggaatttcaggagcctattgctctatctgcattacataaatttttaaaagtgagaacatgcttttgaattttgggtataataaaaaaccttaaaacggaaaaaaagcagaagacacattttataaaatattcagacagtatagatgaatacaatctgaaagtgaatgtactccagcatcctatcccccggagagaacaatgcgttatataattttttagatttttgtctttgaatatacaaatatatatatgacagggaaaaaatgattacttaaagccacctactgccttctaaggaagaggagtcctgattaytgaattgaagggagtttttgttcactgcgtgagttccagttgaggatatgtatgtttaaagaagctcgagaggttggggggacctagaaaaagtcccaggct

SEQ ID NO: 195570 - DNA, 587 bp, Homo sapiens
aaattattttaccactcatttggaagagtaccttatcacctactgaagttttttaagtgctaggatctgtttctaagctttctgttaggttcctccggtctatttgatcatttttggacaataatgtaattaaaaaacccaaaccatgagtccttttttttccatggggaartttaattcagttgtatttcttgtcaaaattgattatataattttgcattctcattgagtttaatgctttttttctttttaaagcttttgtgtgttgttcactgctgtatcttcattgcctagaataatgcctggcaaagagcaggaactcaataaatgcgtattaaattaaggtatatgtgaatttagtataggattaaagtggccatttaagtgaagaaggataagtaatgtttctggctagttatccagaaaataaataaatgtacattcttactttatatcatgcacaaaacaaatttcagataaattaaacattcaatcttcaaaataaactaaacaaatattagaaaatgttgggggatgtgtttataacagttgagtagataacagtccttaagataaaaatgcagaag

SEQ ID NO: 195571 - DNA, 590 bp, Homo sapiens
tttttttgtctttccttttattcctgtttttggttctgttccaaaaaataaataaacaatctttgggatcgccctttctcaggtgctttttgccagcacatcctacacttggatgaaatagatggcatcaacaatcaggagkcagagcaagctagaggggaagggtcatgctgtcctaacatgagcttctagggtggtagatttcaatgtctgcagcttgtctactagaatagcatcaacaaagcataatcagtaaaggaaatttccaacctatgttgccaggctgtctgcccagctgacgctgtgataggaacattcctatctctggaatggcagaccacggccactgtggggagcatctagtaagtctaagggaccattgagctctggtttggttgttccttcttaaaaaacacttcagtgagaacagcaaggccctgtttgcttatggtaaagttttaagtttcactgatgctgagaagctaaagatctttgactatatatgagtttagaaacagaccaaatgtttgtttccttttttataagccacaagtcatgtgtttttaatagacctttaattctgtgcatca

SEQ ID NO: 195572 - DNA, 500 bp, Homo sapiens
tacaattactacgagtgaaaaactagggaaagagaggtttctgggtgggatgagacattttgttgggcctgtcagaaaacaaatttgtaagtcatagcctgcacttcatggctattggtttcaggaacagttccaaaggatttttgatacagctgacagaaaggggctgtagatttcagtcatacatttccaagatggtcgggtaaactggagacacctctgtgctttccagatgaaagctagtgtgtttcattctagccttcctggtagcaatgggtggactagaaagtcatattcctgttcctgtagtccatttaatagtgagtatgggtgttttgagttaygctaatcaaaagcaacagtagcagaggggatatataacactgtaagaaaatatctccaacttgatgcacactcccatcaccaagaataacctttctggtgtatgtctgtggaggtcctgatagcaaggtttacccagcagtggcttccatgaggcc

SEQ ID NO: 195573 - DNA, 440 bp, Homo sapiens
aagcaatatggcactgccccatggtcctagcctaaaaaactaaccactgggttagtagaatgactgttctatacccaataccacccaccgcagtacggaagcagactgtttccagattagtaaaggtcttatcatacactacctgccttgctcagggcaggcccagggcatttacaggcatttacaggctattaaatctagtggaataaacaaaggatagaacacccataaayagctagatcattaataagttggcagcaggaatggacacaaactttcagatgtggcatgatcacagatgggactcaggcagtttggaagccttaaatgttcctagtaacccatcttcagtttacccaccatctcctcctcagtacctcttctagtacatagtctctcaggaatagcttttactaataagtcacatgaagtcagtacat

SEQ ID NO: 195574 - DNA, 557 bp, Homo sapiens
tgttccaggagggatgtcttcactagggacagtcccacataaaaggaggactagctgtttttatgcctctactataatgagtgtggctctaatgcttcctggcattgctgaagtttgcactattcatttcaatggcctcctgactttcagaaactctttacttcccaatgagccatgtggcaacagcaaattatcagaaacacacatggaatgtttcacctctctgaattaaagatacattgacttatctgaccaaaaagacttcrttcagagcagaatgagaaagggaaaaacattaggccagagagtgggaatgaaaatggaagttcttggggcagctgtagaatgattataataataataaacggaacaaaatatgttgagctggtagtcagtgacttcccttaccatttgctatggtctgaatgtgtctttccaaatttcctgtgttgaaatctaattcccaatgtgatagttttaaaaggtagggcttgcgagaagtgattacgtcatgagggcacacccttatgaatgagattagtgcccttataaaagag

SEQ ID NO: 195575 - DNA, 516 bp, Homo sapiens
agaaaagaagaggtcaaattatctctgcttactaatgacatgatcttatgtctagaaaaccctgaagatttcaccataaactctcagatttgatgaatgaatttagtaaagctttaggatacaaaattatcatacccaaatcagtagtgtttctatacatcaataatgatcaaactgaaaaacaaattaagaaggcaatcccaatgacaatagctatgaaaataaaagcctagaaatacacttagccacataagtgaaaggtctgtacacagaagactatgaaatactgatgtataaaattgtagatgatgcaaacaaatggaaaaacatcccatgctcatggaatggaagaagtaatgtcattcaaacaatcatacttcccaagcaatctatagagtcartgcaatctctatcaaaatgcaacattttttcaaagaattagaaaaaaatcctaaaattcatatggaaaaaacagcttgaacagccaaagcagtcctaagaaaaaaaaaatagctg

SEQ ID NO: 195576 - DNA, 516 bp, Homo sapiens
agaaaagaagaggtcaaattatctctgcttactaatgacatgatcttatgtctagaaaaccctgaagatttcaccataaactctcagatttgatgaatgaatttagtaaagctttaggatacaaaattatcatacccaaatcagtagtgtttctatacatcaataatgatcaaactgaaaaacaaattaagaaggcaatcccaatgacaatagctatgaaaataaaagcctagaaatacacttagccacataagtgaaaggtctgtacacagaagactatgaaatactgatgtataaaattgtagatgatgcaaacaaatggaaaaacatcccatgctcatggaatggaagaagtaatgtcattcaaacaatcatacttcccaagcaatctatagagtcagtgcaatctctatcaaaatgcaacattttttcaaagaattagaaaaaaatcctaaaattyatatggaaaaaacagcttgaacagccaaagcagtcctaagaaaaaaaaaatagctg

SEQ ID NO: 195577 - DNA, 224 bp, Homo sapiens
taggagtgttgaggagatgtacccaaattcctgtctcaggcttcacttgttgtgaacctcctgaaagacaaagaggaatacacgctaatgcaataaagggggaggatgaaatggaagaaagaatgcagagttttgagggttggtgtcattacagtgagggaatgttcctttaktttttgctgtgttctgaatgaagtggaatggggatgatcctctaagagtgc

SEQ ID NO: 195578 - DNA, 493 bp, Homo sapiens
acctgcatcccaacctgatgcctccctcagcctcctccctccttcctgatatcttctcwtgggcagatgctctcggaaaagcctcgctcactgaatccccccccacccctcgggcatctgtatctcaggggaccgggttggcacaccagggaaggatgccagcttctgcactgaaggaaaagggcagcactgcagggctcagagagagaaggagtgccatgagagctgctctgaaaggattgtcctgacgcagttttgaagagaacccttaggagtagcaggagtcacagcaggagaccaggtggaatgttctaggttctgccacagccaggaaatgatgacgccactgtgacccggggcagcagacaggtgggagaagtggtctgactctgggtgtattttaaagatacaaccaacaggatttcctggtggattaagtgtgccgtgtgagagaaagaggagtcaaggatgttcagcctaggaagctagacca

SEQ ID NO: 195579 - DNA, 493 bp, Homo sapiens
acctgcatcccaacctgatgcctccctcagcctcctccctccttcctgatatcttctcttgggcagatgctctcrgaaaagcctcgctcactgaatccccccccacccctcgggcatctgtatctcaggggaccgggttggcacaccagggaaggatgccagcttctgcactgaaggaaaagggcagcactgcagggctcagagagagaaggagtgccatgagagctgctctgaaaggattgtcctgacgcagttttgaagagaacccttaggagtagcaggagtcacagcaggagaccaggtggaatgttctaggttctgccacagccaggaaatgatgacgccactgtgacccggggcagcagacaggtgggagaagtggtctgactctgggtgtattttaaagatacaaccaacaggatttcctggtggattaagtgtgccgtgtgagagaaagaggagtcaaggatgttcagcctaggaagctagacca

SEQ ID NO: 195580 - DNA, 493 bp, Homo sapiens
acctgcatcccaacctgatgcctccctcagcctcctccctccttcctgatatcttctcttgggcagatgctctcggaaaagcctcgctcactgaatccccccccacccctcgggcatctgtatctcaggggaccgggttggcacaccagggaaggatgccagcttctgcactgaaggaaaagggcagcactgcagggctcagagagagaaggagtgccatgrgagctgctctgaaaggattgtcctgacgcagttttgaagagaacccttaggagtagcaggagtcacagcaggagaccaggtggaatgttctaggttctgccacagccaggaaatgatgacgccactgtgacccggggcagcagacaggtgggagaagtggtctgactctgggtgtattttaaagatacaaccaacaggatttcctggtggattaagtgtgccgtgtgagagaaagaggagtcaaggatgttcagcctaggaagctagacca

SEQ ID NO: 195581 - DNA, 609 bp, Homo sapiens
ttcacttcactattatatatttcactatcattttcactattatattaggtgtaaatctaactttcttcccacagcatttccttggcctatctggaatgcctcgatgccaattcaaggcactttgccttggaaaaggatgtgcattatttcctcaactccctcctctttttctttttactcctattggtcccaattccagatttatttttgtgtcctttgctcctcaaatcatttcaagagctattgactctcttcatcataagagagtagaactgatttagtttctaataatagttgacatgttatgggcatttgtttgttgatggctgtttccattaatttggggttaaccctctaacacaggggatagtgcgatggcctacagctgttaggactccagccactattgcaggggatgttagaatggaggctgccattcctttccatttcctgaacyaactttctagccaatcagtaaatgggtcatcaattccaacattttccaccaattcattgactagaacaattaacccttgtaatgcatttgtgatggttccatctggggcagtattgttaggaattaaagtgcaacactttccatccagcatg

SEQ ID NO: 195582 - DNA, 609 bp, Homo sapiens
ttcacttcactattatatatttcactatcattttcactattatattaggtgtaaatctaactttcttcccacagcatttccttggcctatctggaatgcctcgatgccaattcaaggcactttgccttggaaaaggatgtgcattatttcctcaactccctcctctttttctttttactcctattggtcccaattccagatttatttttgtgtcctttgctcctcaaatcatttcaagagctattgactctcttcatcataagagagtagaactgatttagtttctaataatagttgacatgttatgggcatttgtttgttgatggctgtttccattaatttggggttaaccctctaacacaggggatagtgcgatggcctacagctgttaggactccagccactattgcaggggatgttagaatggaggctgccattcctttccatttcctgaactaactttctagccaatcagtaaatgggtcatcaattccaacattttccaccaatycattgactagaacaattaacccttgtaatgcatttgtgatggttccatctggggcagtattgttaggaattaaagtgcaacactttccatccagcatg

SEQ ID NO: 195583 - DNA, 424 bp, Homo sapiens
accctgtctctcctaaaaaacaaaaattagctgagcgtggtggcacgtgcctgtagtcccagctactcaggaggctgaggcaggagaatcacttgaacccgggaggcagaggttgcagtgagccaagatcacccaytgcaatccagcctgggccacagagcgagactccatctcaaaaaaaaaaaaaaggggggggggtgggggggcggatcagagctcatatcatcacgatgtttttgagagaaatacacaaaagaggaaagcacatcgtccatgcccagtaaatcattgcattctttcaaacgaaatctgtattcaaccaacatttcccgattaggttctctcccaggcactgtctcccttttccaggtgaggccaatgaagcccagctttgggattcaaaccttcagactcacagggactt

SEQ ID NO: 195584 - DNA, 398 bp, Homo sapiens
gagccatagcaaaggcagagtaatgctaataaatcaatgacagctcaccttctagaatgttctcacaggacataagtagctactagtattctccattttctacttctgttaattccacccttcacaccaccaccccacacacacttttttgagaagacttggattttttttttttttttttttttgagacagggtctgtctctgtcccccaggctggagtgcagagacacaatcacatctcactgcagcctccacctyctgggctcaagccatcttccctcctgcctctgcctctcgagtagctgagactacagtgggcaccaccatgcctggctaatttctttgtgcattttttatagagtcggggtcccaccatgttgcccaggctagtctcgaat

SEQ ID NO: 195585 - DNA, 417 bp, Homo sapiens
tgttgtggtccttcctgtgtccaaggcattcatattccagtcaattgttggrgtgagagaagtgaattgctgaatgctgattaagaaaaccatcagaaagtgtaaagcagagaattaaaacagggcagggagactgggagtaaccaagggtgggaggtagttgctttcggttgggagggcagggacatttttttggagggagaagcagttcagctgagctctgggtgaagaaggagcccgtcttgccaagacccaggggaggcttcccccagcagaggccccaaggtgaatggggcttggccaggaaccaaaaactgaaagggaccagagaggaatcctcatcctgccttctctgaccttgctttgagcttttacaaactgctttaaaaatctcttcattttaaattaaaaaaaaaa

SEQ ID NO: 195586 - DNA, 417 bp, Homo sapiens
tgttgtggtccttcctgtgtccaaggcattcatattccagtcaattgttggggtgagagaagtgaattgctgaatgctgattaagaaaaccatcagaaagtgtaaagcagagaattaaaacagggcagggagactgggagtaaccaagggtgggaggtagttgctttcggttgggagggcagggacatttttttggagggagaagcagttcagctgagctctgggtgaagaaggagcccgtcttgccaagacccaggggaggcttcccccagcagaggccccaaggtgaayggggcttggccaggaaccaaaaactgaaagggaccagagaggaatcctcatcctgccttctctgaccttgctttgagcttttacaaactgctttaaaaatctcttcattttaaattaaaaaaaaaa

SEQ ID NO: 195587 - DNA, 408 bp, Homo sapiens
cctgtgtccaaggcattcatattccagtcaattgttggggtgagagaagtgaattgctgaatgctgattaagaaaaccatcagaaagtgtaaagcagagaattaaaacagggcagggagactgggagtaaccaagggtgggaggtagttgctttcggttgggagggcagggacatttttttggagggagaagcagttcagctgagctctgggtgaagaaggagcccgtcttgccaagacccaggggaggcttcccccagcagaggccccaaggtgaatggggcttggccaggaaccaaaaactgaargggaccagagaggaatcctcatcctgccttctctgaccttgctttgagcttttacaaactgctttaaaaatctcttcattttaaattaaaaaaaaaaaaaa

SEQ ID NO: 195588 - DNA, 556 bp, Homo sapiens
gcagaagggcccgggctctgcaaaaggacaccaagagcagaatgagggtgggaagagcatgctccagtctcagcagagaccccatggacttcctgctccgaggagctttcagcctgatggaagaggcatggctcctaaatcgggggaatagagaatctgatggaaggggcacagctgctgctcagggtgaggtttcagtscaggagacagctcctgccctcagggagttcccagtctgatagaggaagcaccttccttcctctgggggactcccagtctgatggtggaggcagccgctgctctggaggaactctcattctcatagagcagaaccatccccagatttagccttgaactcagaggccctgagcttgaatcctgctgtgtgcactggcaggctttctagcttccatttcttgatgtctaaaatggagaagcctaaacatactctacaggtattttgtgggggaatcaagaaaaaggaagcatgtcaagcacttttgcacccagtggatgattcagccctaccctgggggtctgatacagctgcaataat

SEQ ID NO: 195589 - DNA, 624 bp, Homo sapiens
ctttgggttatgtttatataaatatgttattggtatgtgttccgaaatcatgggaaacttctataattctgattgacttagtgtatattatctatagtaattatgttatgttaattagttatgatcatttaaaatagttatgttaaattattgtgtgccacagaggtaatamattcccttgtcaattgtgtctttgactatggctgccctgaaactttttgtcatccacagacaattgtcttgtttaggtcctctttagaagatgctattataatcagttatgaaactctaacaggtgctcttaaatacaagtttctgataactttggatattgtgacatcagaatagaagaaaaactgtcatgactcatggagaactgaaatgttcatgaatatgaagcagaacaggaattaactacacagactgaactaatagaagactgaagtaatctttttgactttttgcttaaaatgttgctgatcctttgttttttcagagtcaaggacaattttcttttgagctattaacagcttttaacaatttagtatactcctatggaacaaaatttagaacatatttgtttatctccacctgatttctccagaatttggaaactatttgtgg

SEQ ID NO: 195590 - DNA, 489 bp, Homo sapiens
gaacaaaatttagaacatatttgtttatctccacctgatttctccagaatttggaaactatttgtgggtattcataacttatggcaatacagttaattgcataagtgcagtaagaatctgttttcatttataataggacacaattggagaaactggttattttgccaaggctttgactggaatggcatgctttcctttaaggaatcaaacttgagttatggagccaataaaagccccttgggaaaactggcctcatacctagtctatacagtccctgtacagggttcctgacctgaggtaagtaaagaatgacagtttctgacaggcccaggarccccaagtttatcttggaacctcaaggggagaggaattcacccaattcaagtatttgatggtaaaaatctatggctgggcttggctttaacaaagttttatctgagattccttctatgaacaaagttccatcaaagccaatttaaaagcctatgt

SEQ ID NO: 195591 - DNA, 532 bp, Homo sapiens
ccacactaccaaaaattatctacagattcaataaaatgcctatcaaaataccaactgcattcttcacagaaatagaaaaaaaatactaaagattttatggaaccacaaatgaccctgaatagtcaaatcaattctcagctaaaagaacaaggctagaggcatcacaccaccaaatgtcaaaatatactacaaacctatattaaccaaaacagtgtggtggctaggtacagtagttcatgcctgtaatttcagcactttgaaaggctgagataggaggatttcttatggccaggagttcaagatcagcctgggcaacaaagagagayaccatctctgccaaaaataaaaataaatttaaaaataaaacaggacagtactggcatgaaatcagacatatagagcattgaaacagattagataacacagaaataaatccatgtatttacagcctattcattttcaacatagccacaaagaccattcatggaggaagtgacagtctctccaataaagggtgctgggaaaactgaat

SEQ ID NO: 195592 - DNA, 532 bp, Homo sapiens
ccacactaccaaaaattatctacagattcaataaaatgcctatcaaaataccaactgcattcttcacagaaatagaaaaaaaatactaaagattttatggaaccacaaatgaccctgaatagtcaaatcaattctcagctaaaagaacaaggctagaggcatcacaccaccaaatgtcaaaatatactacaaacctatattaaccaaaacagtgtggtggctaggtacagtagttcatgcctgtaatttcagcactttgaaaggctgagataggaggatttcttatggccaggagttcaagatcagcctgggcaacaaagagagacrccatctctgccaaaaataaaaataaatttaaaaataaaacaggacagtactggcatgaaatcagacatatagagcattgaaacagattagataacacagaaataaatccatgtatttacagcctattcattttcaacatagccacaaagaccattcatggaggaagtgacagtctctccaataaagggtgctgggaaaactgaat

SEQ ID NO: 195593 - DNA, 611 bp, Homo sapiens
atcttctcagtagtaaagcctgggctctagaaacttggggccacagatctctcagagatctgtccagtggtgagttgaytggggcccagacaagcagcttgtccatcatctcagagtctctcgaaggccaggcctagaactcatctggctgccttactacctggtgtctggaatgggccccctaggcacacagatgtaccatttattcatccagtccatcacccaacacacattgacagcgccccttccattccacaggccctgtgctacatggtaggggaaaaaggacagcagtgtgccacctcccctgtcccctctgaattttggtggtttgtttgtttgtttgttttaatacttaacgaggtttccctatgttgcccaggctggtctgaaactcctgagctcaactgatcctcccactttggcctcccaaagtgctaggattacaggcatgagctgccacacccagcctgctctgagttttcagctcaggagaggagagaagtggggacttgctttgattcccctgaagccaccagagttttcctctcagaggatgtccctgctcatcttctgtgtctgggaactccgcattggttttaaactgaagt

SEQ ID NO: 195594 - DNA, 462 bp, Homo sapiens
gaagccaagaaccctcccaggctaagcccaattttggggttcacctgccctgcttcaacttactctctttccctactcctttctcaattgcccccattagctttcatggctattttgccccatatatgtctcacatttccaactacatcttggcatctgcttccagaggatcagaactcacacatcatctctcagggggaaaacaagtagaggagtggcraaaacaaggaaagtcttaagtctcccctacctaagaagcctacagatctccacttctcatccttcttttagttaacccaaaaaataaaacacctaaataaataggtactcaagattgagataactgccaagaaggaaataaataggattatgtggaaaagagtaaagagatgagggaggaagctacttgttgtaaaagacatatatgataaagaactattctccaaaatacacaaagaattc

SEQ ID NO: 195595 - DNA, 536 bp, Homo sapiens
gcctaaagaagaaaaacaacacaatcgtagcaatagatacagaaaaggcattttacaaagtccagcatttattcatgatttaaaactctcagcaaactaggaataaaaaggaactttcattgagttccaaagactgagcctaggataggggggcaagatggccaactagatgcagccaggaggaacacctgcccttgagggagtgggacattgggaagactgccacactctgagtggatctttagaaggaaggcattgggagctaccgcagtggggcaggatgctgatgatgcaagaggatgtgtattttgggtggaaggggtatgtgggaaacatttgtactttcagctcaattttgctttgaacctcgcrgctctaaaaagtaaaatcttttaaaagaaggggaaagagggaaagggaaatgcagtgtttagccttttagcctctggaatttagggacagataccaggaggctggaataaatgttgagtgagccaagatgcagaaaatacttacccagataactcctaaactcc

SEQ ID NO: 195596 - DNA, 583 bp, Homo sapiens
tctcttgccagtatttcaaacactttggggaacattctcaggagagagtagactctgcctaggggaaaaagagtgggaaattagaacagatgtcatattttccattgcaaataagaccagaagatatgttttattggcygagtgaagcaaaatcattttattggacctctctgacacttggcaacactggaatcaagtcagttctttctctttaaagacaagaaagataataaagtagcaaacatgtgagtaaacagcaggtgtgaggaaaaagccttgtcttttggttgatctgttcattaacagaatgagataaacataggcaaagaaaaggtaaaacagtgcttgttaaaggcagtggaaaacagattagacagcatggtctttgtgataatacacaactgacttttctcataataataacagcaggacaaagcatcttatctgggtcccaataaagtgccaggtgttctgctaggtgcttttacatgtattacttgaatcctcacaattgtccattgtattataacctgagttttgctggtgcttgctcttacctactaacacaggatatcagctcttc

SEQ ID NO: 195597 - DNA, 584 bp, Homo sapiens
tctgcacgatatttctgggagttctcagaagggacttcacatgcattcacagacaggttcaaccactgaccatctttgctgggtaccactrtgtctgtcatggacaaattgctgcagattgtgggcacaagtattgctttcccttgggctttggtggatgtcatcactgtcctccactgccactcctaataggtagcatctgctggacatcactattagttccattggctagcaccattgatggccggaagtgctgaggatttcagagttacatggtgttctgtggagatgaaggagagtatgcctctgccacacactaatagtgggctgccagtggagcacagcattttacaatgaatatgagtctctcagtttttgacttcctgtctctatcccctttctgccagagtaggttccatttgacaaattagaaagtgagtctcaaaggagttaagtaacttgagttaggtaacttgctagaatcacatggctagtaactggaggaactgagggctggactttgatttgtttaaagtctgagctttttcgatacacccaatatactatgctgcctctccattctt

SEQ ID NO: 195598 - DNA, 584 bp, Homo sapiens
tctgcacgatatttctgggagttctcagaagggacttcacatgcattcacagacaggttcaaccactgaccatctttgctgggtaccactatgtctgtcatggacaaattgctgcagattgtgggcacaagtattgctttcccttgggctttggtggatgtcatcactgtcctccactgccactcctaataggtagcatctgctggacatcactattagttccattggctagcaccattgatggccggaagtgctgaggatttcagagttacatggtgttctgtggagatgaaggagagtatgcctctgccacacactaatagtgggctgccagtggagcacagcattttacaatgaatatgagtctctcagtttttgacttcctgtctctatcccctttctgccagagtaggttccatttgacamattagaaagtgagtctcaaaggagttaagtaacttgagttaggtaacttgctagaatcacatggctagtaactggaggaactgagggctggactttgatttgtttaaagtctgagctttttcgatacacccaatatactatgctgcctctccattctt

SEQ ID NO: 195599 - DNA, 584 bp, Homo sapiens
tctgcacgatatttctgggagttctcagaagggacttcacatgcattcacagacaggttcaaccactgaccatctttgctgggtaccactatgtctgtcatggacaaattgctgcagattgtgggcacaagtattgctttcccttgggctttggtggatgtcatcactgtcctccactgccactcctaataggtagcatctgctggacatcactattagttccattggctagcaccattgatggccggaagtgctgaggatttcagagttacatggtgttctgtggagatgaaggagagtatgcctctgccacacactaatagtgggctgccagtggagcacagcattttacaatgaatatgagtctctcagtttttgacttcctgtctctatcccctttctgccagagtaggttccatttgacaaattagaaagtgagtctcaaaggagttaagtaacttgagttaggtaacttgctagaatcacatggctagtaactggaggaactgagggctggaytttgatttgtttaaagtctgagctttttcgatacacccaatatactatgctgcctctccattctt

SEQ ID NO: 195600 - DNA, 549 bp, Homo sapiens
tgagaagtaaacagcattctagttggcttcccttcacagatgcaagaatttaaaaacaaccacaattcccaactggaattctgagaattccattcacttcgctaaaaaacaaaacaaaacaaaataaaaaagaatatataagaagaaattattctaaacagactactttattgaaaaaccacataaaaaattcaagtccaacaccagcaatgggcacacagaaatgtaaggcatattcatggttcgtgaatgtcaatcttaaggatgactgcatatatataatcatatttacaactccaaaacatacttattgtacaaaaataatatataacagcatcrtttagtaacttttctgtttcaagaaacaaaatactcttccctctaaaagaaatgtatggcttattcgctatctggtagctgagataactgaaagttcacacgtgttctttcttatagattgcattcttaatattacccaaacacacttaaaaataggagatatcaaatcagtaagagatatctaacaaatatttaacttgtttttgtttt

SEQ ID NO: 195601 - DNA, 387 bp, Homo sapiens
taaatacaaactctacaaagataacctccaccagaaagtttagttggtgctgtcccagtagatactggttttgattttccaattaataaaatgtgagggactgttttgagaattcatttttgattggacaaccagcatgcaaactcctgtcactctacttagcactaaaacaataagctgtttctacagtattattatatgggtttgcaaataactgcagtgtaaaataaaatgatcagcagtttaataagtaaattatatctcttcaataggtgctgcaggtggtacaagaacacaaaacattttttagggaccaatcgaaaaagaattcaatacaacctaagtgacaaattgaacaygacaagtgtaatacaacttttattcatt

SEQ ID NO: 195602 - DNA, 376 bp, Homo sapiens
tgctattttttcttatttgtaattcagaagtattaactatgtttagggtcaggtagaggaggaattggctcgaggaacattaacccaatattggaccagtggtgagtaagtcaagccagagacttactctgtaagttactgaccgataacttcttttgtggaattcagaattaagcrtagtagatatgtaaactctcaaaagaagtgatcaatattttataattaaaaagccactaccatattttcctctagtccttccctcctactttttattaataaaaatgtttcagtctcagatgtttagagaagagttgtactaacatttgccatggtttgcccccatttaagaaaaactgaggaattaatgtcctagtta

SEQ ID NO: 195603 - DNA, 427 bp, Homo sapiens
ggtaaaattatgatgggaatagacatggcctttttgaggatagacctttagaggtttcggagttgacttactctggataattatgcaatttagaatggtaaaggcaaagagaggaagggttttagcaaaatatgtatcctgattggtcaaaggactctgggagcacagtaccaaaagtctgtccagtagaggtcaatgggagacagtgtgactatatttgttagatagaatacattattttcaggggcagtatgaccatgattttaaataaaaatttcagaygtaaaggtaagtcttttttggagcagattttgattttttgcttaattaatcaaggcctaatgctaaaactgttaagtattcatcatgctactgacaaataaaatctgaatatttgcatataaagtaaaactgaaacatggattca

SEQ ID NO: 195604 - DNA, 461 bp, Homo sapiens
tcatatttacccttctggaaagcaacatagtgaaagaacatttgggaagtgaccttgatgctttcatattgtgctattgtaaatatcattaatgctagaacttttaaacatccatcctatcaagaatcaactgctaagatgtctaaaaagctatattyctacatttcatttctgactcttttcctcaaattgtaaatgagctgtttctagcaagcatggtccttgatgtggcattggagtctactttttagatcactgacatttactaaggcctttcaagaaatgaaggccacattcttcagactgtatttctggaaattatgtgcatatttagctggatttgtttttctgtgcaaggaagagactagagacttgctgtgcaacgttattgggatgcccccttgaataagtctcaaaggtctgagcagctgctcagaatgggaagttgtgcttctttgcca

SEQ ID NO: 195605 - DNA, 462 bp, Homo sapiens
ttacccttctggaaagcaacatagtgaaagaacatttgggaagtgaccttgatgctttcatattgtgctattgtaaatatcattaatgctagaacttttaaacatccatcctatcaagaatcaactgctaagatgtctaaaaagctatattcctacatttcatttctgactcttttcctyaaattgtaaatgagctgtttctagcaagcatggtccttgatgtggcattggagtctactttttagatcactgacatttactaaggcctttcaagaaatgaaggccacattcttcagactgtatttctggaaattatgtgcatatttagctggatttgtttttctgtgcaaggaagagactagagacttgctgtgcaacgttattgggatgcccccttgaataagtctcaaaggtctgagcagctgctcagaatgggaagttgtgcttctttgccaagacaag

SEQ ID NO: 195606 - DNA, 447 bp, Homo sapiens
aagcaacatagtgaaagaacatttgggaagtgaccttgatgctttcatattgtgctattgtaaatatcattaatgctagaacttttaaacatccatcctatcaagaatcaactgctaagatgtctaaaaagctatattcctacatttcatttctgactcttttcctcaaattgtaaatgagctgtttctagcaagcatggtccttgatgtggcattggagtctactttttagatcactgacatttactaaggcctttcaagaaatgaaggccacattcttcagactgtatttctggaaattatgtgcatatttagctggatttgtttttctgtgcaaggaagagactagagacttgctgtgcaacgttattgggatgmccccttgaataagtctcaaaggtctgagcagctgctcagaatgggaagttgtgcttctttgccaagaca

SEQ ID NO: 195607 - DNA, 554 bp, Homo sapiens
ttttttacattgtttatagcatattttaagcccactttactgaatattttaaccccactgttgagacctactgctcagaaaagaaggatccctttcaagatattactgttcactgaaaatgcatgtggtcatccaaaagctyggatggagaggtacaaggagattaatgttttcttgcctgctaacacaatatttattctgcagtccataaatcaaggagtaattttgacttccaagtttaattgtttaagaaatagatttcataaggttatagctgtcatagacagtgattcctctgatgggtctaggcaaagtaaattgaaaacctttcaggaaagattcaccattctagatcccattgagaacattcatgattcatgagagggggtcaagtatcaacataacaggagcttgaaagaagttaattcgagctctcatggatgactttgaggggtttgagactccagtggggaaagtaacagcagatgtggtagaaatagcaaaagaactagaattagaagtgaagcctgatgatgtgactgcattgctaaaat

SEQ ID NO: 195608 - DNA, 550 bp, Homo sapiens
aggtaaatcctgtatatgttcttcctagaaataatcacaattgtaatgaaatcatgtaaatcttgttgatgaatacctatctttcttttttaaatgaatgcactataagggcatggattttctcttcttcaacactgaatcccctgtgcctaggccagtggcttgagtgtaattggcattccataaatgattgttgagtgaatatgtatcctattcctttattaattttcctagctgctctttgcctgttattgtatttctaaaaatgcaatccttggcattttgctgctttgctggtaaaggcattctctccctgtagacaaatggacacacgaataaagcttttgaaatccaaattactatggaaacagcccttgtttccaccagcttgctaagtggagcacagtggycacacatcttacgctggagggagctgaagtcacatacaaattctggcttctcaggttcccctttccttgtagacaccccccaatccttcagttagaactttttttcttcaggtgggttacaatgcaattgattgtgatta

SEQ ID NO: 195609 - DNA, 607 bp, Homo sapiens
taatgtgtaatatgtaaatatattcactttcacaaatccctttgcagctaagggaagctatgttgccagttttggctaataagatacagacagacatgcctagcgccagcatccttctcaagataagacagagtcttgtgggaaagggttacatacctatccctttctttctgcctggaatgggaatagaaggcctggagaggtggcagccatcttgcaaacatgagcactgtcttaatccattaggactgctataacaaaatatgccagactgagcaatttataaaccacagaaatgtattgctcacaattctggaggctgggaastctgagatcaaccaccagcagactccatgtgtggtgaggacccattcctcatcaatggcaccttctacgagttctcacatggcagaagggcaaacagcctccctcagacctcttttataatggcagcaagcccatttataagggcagagccctcatgagctaatcatctcccaaaggcctcacctgttaatgctatcacattggagattaaattcaaacataaaaatgttggggggtacacaaacattcaaaccataacaagcacaaaggcagcaacacc

SEQ ID NO: 195610 - DNA, 458 bp, Homo sapiens
tcaccagtgcaagtactgacaccatgtccttgtctcttggttgcttcttggagttttcagtctcaggatttcagaaccacctggggccgtccagaatgagtcatttcacttttgtttgttttaatcctcgaaataatcctgtatgacaaaatctacattcagtgagaccgattaatccaaaaaattcagacagtatttttattataatgaatcgccctatctataaaatgagttaaaccaagcttgtccaaccataggcttgtgggctggacggctttgaatgcagcccaacacaaatttgtraactttcttaaaacgtgagttttttgtgtgattttttttttaagttcatcagctgtcaccagggttactgtattttatgtgtggcccaagacaattcttcttcttccactgtggcccagggaagccaagattggacacccctaagttaaactgtg

SEQ ID NO: 195611 - DNA, 556 bp, Homo sapiens
gaggtgggaggcagtgggtcacgggggcagatccctcatgaatagcttggcccatccccttggtgatatctgtgctctcgctctgagttcatgcagggtctggttgtttaaaagagtgtggcatctccctcctctctctcttgctcctgctcttgcagtgtgacatgcctgctcccactttgccttctgccatgagtaaaagctctttgaggcctcactgggagctgagcagatgctggtgccacgcttattgcacaggctgcagaaccatgagccarttaaacctcttttctttttcagttacccagtctcaggtatttctttctagcaatgcaaaaaatggcctaacacaaccccaaatctcaaataaggagaagcaatagcattagaaggaggaaaccacagttactgtgagagaagaatgaaagattcttcttccttcctcgtcaagccatgaggatttcacctatcatctgtgggttttgagaaagcaaacttggccagcactctgctgagaacagttgctaactgccaagaaaactgcacataccaatgg

SEQ ID NO: 195612 - DNA, 556 bp, Homo sapiens
gaggtgggaggcagtgggtcacgggggcagatccctcatgaatagcttggcccatccccttggtgatatctgtgctctcgctctgagttcatgcagggtctggttgtttaaaagagtgtggcatctccctcctctctctcttgctcctgctcttgcagtgtgacatgcctgctcccactttgccttctgccatgagtaaaagctctttgaggcctcactgggagctgagcagatgctggtgccacgcttattgcacaggctgcagaaccatgagccagttaaacctcttttctttttcagttacccagtctcaggtatttctttctagcaatgcaaaaaatggcctaacacaaccccaaatctcaaataaggagaagcaatagcattagaaggaggaaaccacagttactgtgagagaagaatgaaagattcttcttccttcctcgtcaagccrtgaggatttcacctatcatctgtgggttttgagaaagcaaacttggccagcactctgctgagaacagttgctaactgccaagaaaactgcacataccaatgg

SEQ ID NO: 195613 - DNA, 618 bp, Homo sapiens
tctagtacatttttaaaagattgggtgttttatagttaaattaatttgattctccttgtcaatcaatcccctaccttctgcccccactccaccagtaccccatacactaaatgttcaagctcacataacacaggcacagctgtgatrgcatctccaaattatatccaaaatcggggcatctctttatttcaatatgaccactcagttcaacaaagcatcacctcaccagaacttccctgacagcctcttcctggtctttattattattttgttctttgccatcacccccaatgtcttcccctctgagcacacagtaacacttgtagaggtaaattaaactatgccatccccaacactttctttgccacttagaacaaaatctaaactccttattcaaacacagtctttagcaaccacttccattatgctctatccacactggacctccttgaacaagccaggttcagttctctcagggattcgcaccagcagtccattctgctctgaaagttctttccccagatctttgcatgccctgcttctcttgtccttttaagctttgactaaaatattacccccaagacaggccctttttgatcacagtctctaaagtacctg

SEQ ID NO: 195614 - DNA, 481 bp, Homo sapiens
ctcaggtattcctggtcatctgcatcctctttccactagcacagtatcagaattatcattgtgacttctcctagatagagccatgtgtctctcagagtctcttctgggaaaacactggggtgggagggggcactgggaggctactgtgtgatggttcaatgtcaggtttcgggactcactccaaagacatgtcaacaatctctgtgttaatgtctccaagagctgcaagagctgctgaggtttggagaatgccaactcacacacacacacagaargattctcatctttaaagttactagattctaaaattcagtccatctgattcaatctatctagaggaagatagtgtgaaagtattaacaacttcctaaaaaagttttatgcaaaagtaattgtgtgtaactggtaatgggaaatagaggaaagagtttcaaaggtatggagaaaaaacttgggaaagtgcagagcctggcgacaaagg

SEQ ID NO: 195615 - DNA, 380 bp, Homo sapiens
aaaaataaaattctctaaactacatcattgtcaattcaattcaatatagggtactagagattttagaataaytttttaggccaggcacggtggctcatgcctgtaatcccagcacttttgggggctgaggtgggcagatcacttgaggtcaggagttcgagaccagtctgaccaacatggtgaaaccctgtctctactaaaaatgcaaaaattagccaggcattgtggcagatgcctgtaacccccactacttaggaggctgaggcaggagaatcactatgagcctgggaggctgaggttgcagtcagcccagattacgcatctgcattccagcctggatgacagaatgagactctgcatcaaaaaataataaataaata

SEQ ID NO: 195616 - DNA, 543 bp, Homo sapiens
aaggctttaatacatgttctccatttttaatgctaggatgtctgaaatttgggaaatatttcttctactcaacacagatgacaaaatctcatttatttcatgttcacaaaaaatcttctyaatctttgtagacaacatttttttcaaacatcaacaatcattattccagcaacaagtgaaatattaatactcccttcaagccctttccataaagagaaattaagtatgctcatccaaacttttgtactggagaccttagtatgacctggaaaaaaaataataagacaatcctggctcttaaaagatggggatccatcacttaacagctggaaaatcttgaatcagattcctaaacctcagtttctttatctataaattggagataagaatacttacttccaaagtctgatatccaaattaagtaagatgaagagattaacatctgcctccttcataacaagcctcaataacatgcagttgtgattgttgtgttgtatagtgattaagtcttcacagatggcacagtgttacagacagtttatt

SEQ ID NO: 195617 - DNA, 543 bp, Homo sapiens
tgttagcctaacaatccttcctcgttacatagctgaatgaatgcgcatgggaaaaatacaactgtgtcaaatacaaataatgcatcctatgattattagattacaataaattaagaaaaattccagtaagacagactttaaatgctgacacatttggagcaatgcagttatctccgagttaatgtatcacttaaaggcaactatgacagtaatgatttcattttaggtaaagactatttttgaaattagctaccaagagaatttttcccattaaaggtttagcttgtgttactttagctactagtactttttttttctttttcgctgctgttattattacattataatgatgatatktatcttctgtggcacctaaagcttttgtgcctggaatatttcaatcagcaaaatggcatagagaaaaacatataaaaccattaatgcctaaagcaattgcatactcttaaaccaaggccacttgtcattttctgtcattcttactgtctccttgcttcacaggtacacgacaatgcaattctatga

SEQ ID NO: 195618 - DNA, 460 bp, Homo sapiens
tgagacctgcattactgaactggttttttaaagcaatggagaagagagaccaagtactcaagaaatcaacaggaaatagattatactatttttgcatggtagcataacagaacacagaatgatttaaggactcttaagtttaaaacaactaaaattaatacaataaaaaggaagaaggcacagagatcaagtgctatatataaccacagggaaaaggtgcccttattatctttttaaatagaccaagttaaggtcagtaacaacacaccagcaggttatgggaaaaaacatgatcattctcacttaatttttgtcaatgtaaattaatcttttaaacagatttgaaattagtaatatccactatgtcaaggacacttgaatgcatcaccggaggatrtaagttgcatttttggctctaatattcatttgcaacttttgcaatgtcacagaagtcacctaa

SEQ ID NO: 195619 - DNA, 614 bp, Homo sapiens
ccaacccccaaatggggttcagaagcttatacaccatctagaggttacagaacaaatggggacttggattgtgcaaaaaagattgtgggaatgggaggagacctggctggcaaacagggccttattatgtaaattaagtctcacaggtagcagccctcagaaagaacagatagtataataaatgtttctttcagaaaaggtgtcagactctcggtttttcttccttagatccggaaagggaaggtctcagagaaaacccggctgcaccactgcaaattttctctacagatgcaagtctccacaatgaaaaacagctcagctacttctgttacgtgccctctgaacagccatctcaaaacatgtcaaagtagtgtatttgggggaaaactatttccttcactctccattttgaactttaaaagtcttcacaaattaaaarccaagtcaatttctttggagagatttgggttagagattgttagataagagataggcaaaggaaggaaaatataaactgggataagcagaaaagaacaaatttaaatatatcatctcgtatcttcttgaatcagtctcagtcctgaaaatagatcaggtcagttaaacagctgtgc

SEQ ID NO: 195620 - DNA, 595 bp, Homo sapiens
ttagctgggaaagaattcaggatacagtccaaattgtaggcaaataataaaaagccaaaaacaatggtcagggctagaatctaataacaggtgtgccacagttttctactgaaacataattttttttctctctagtctccaatttttaccaaagattaatcataataggaccaatttattttcaaaataagttttagtcttcttatattaggcttattactggcataaagtacagcaagactagtgatcggccacacaggctctttttaagttggcttcgctggaaatttttataatgaatttcagattagactctatagggactctcaaggctaggaagtcaagtcaaggatttgccattggattgtgcctgcaatatctgtccaaattggatgcactgctctgttctcaaggtccccaaaatatcytgaggttcctaaacctgtcaaaaagtgacctcctttacttacttcaaggtcaggaaccttgtaagagaaccatgtagacaaagtaccaggccagtctttctttggggctttttataggctctataaagtcaagttcaagtcctcaaagcagcctagtcatgaaaata

SEQ ID NO: 195621 - DNA, 606 bp, Homo sapiens
acttcccgtgcagcctgcagaacagtgagccagttaaacwtttttattttacaaattactcagtctcaggtattattttttaacatttttttttaagttctggagtacatgtgtaggatgtgcagatttgttacataggtaaatgtgtgccacggtggtttgctgcacagatcaacccatcacctagacattagggccagaaaccattagctattcttcctcgtgctctccctgcctggaccctaccccaaaaggccccaatgtgtgttattccccaccatatgtccatgtgtcctcatcattcagatcccacttataagtgagaacatgtaatgtttgattttctgttcctgcattagttttctgaggataacagtttccagctccacccatgtccctgcaaaggacacgatcttgttgctttttatggctgcatagtattccatgatgtatatgtatcacattttctttatccagtctattgttgatgggcattttggttgactccatgtctttgctattgtgaatagtgctgcaatgaacatatgcattcatttattatatctttaaatagaatgatttatattcctgtatgtacataaagga

SEQ ID NO: 195622 - DNA, 569 bp, Homo sapiens
catgacccaatgccagtcagcccactatgattagctcgtcgcccatgggagtcttatacattggtggtgagcactcccatatatttcaagtgttcaaagcatccatttcttatctaaggtgccaagaagtgcatatcccctttcagtaataactatttattgcaaccactgtcagccacctctgaaactatagccagtaacccaccagccattgcacatacaaaggtttcctcttatagtacaaagtaactcctggtactcccaaaagccaaagagatcaggtgattcaatgcaaaagagagcaaagctgtaaacgagggcaaagtagattttcaggatccactaggaagaagagagaagaccccagaatcagtgtgtgtggygtctttttctattttcttctaggtatttcagggttgttagaagtctcttctagatttcttcatgtggtatcaaagatggcaaagaggaaggagaggcaaggagtagaaataaatgggggggaaattaaaaaaaaaacagaaaacagagggacaaattacataatcttaaaaaggggttcagacaac

SEQ ID NO: 195623 - DNA, 402 bp, Homo sapiens
tggtatcaaagatggcaaagargaaggagaggcaaggagtagaaataaatgggggggaaattaaaaaaaaaacagaaaacagagggacaaattacataatcttaaaaaggggttcagacaactgaaaaaaaaattcaaaaacagatccaaaatcagaaagaccttgaatatcagcttctaattaatatgacttctgacaaaggagcactttaaaaaaacttttaaaaagtctctaagtatcagattttagccgggataaatagttgatatccctgatattactggcttttgaaccttattatttttaccaacgttcctcttcccaacaataaatgggtcctcccaaaaggcaaaagtcagaaaatatcaaatgaaaggggtctggctctttaactgggaatt

SEQ ID NO: 195624 - DNA, 386 bp, Homo sapiens
aggaaggagaggcaaggagtagaaataaatgggggggaaattaaaaaaaaaacagaaaacagagggacaaattacataatcttaaaaaggggttcagacaactgaaaaaaaaattcaaaaacagatccaaaatcagaaagaccttgaatatcagcttctaattaatatgacttctgacaaaggagcactttaaaaaaacttttaaaaagtctctaagtatcagattttagccgggataaatagttgatatccctgatattactggcttttgaacyttattatttttaccaacgttcctcttcccaacaataaatgggtcctcccaaaaggcaaaagtcagaaaatatcaaatgaaaggggtctggctctttaactgggaattgaat

SEQ ID NO: 195625 - DNA, 588 bp, Homo sapiens
ggaattcttcagggtttaggttttgctttgttgttgttattttttaatatcttataataggtattataaaaccatttaattaggcaatctggtatatctgggaagttctgctatccaaaatagacattagataaacataaataaaggccaagaaacttagaaaataatgatgcctctttaatatacagattactggagcgggatttttttcctgaattaaacacrtaattttattaaagtgcaatttggcataactattacatttttaaatattgtccttattattttttgcccactccaggaaatgacagcacttcactttatataaagtgaagttaatttttagatcactttgagtcacaaaaatgtagaatattttataatttttagttggggcaaagacttcattttaatgatttgaacagaaattaaactgccacctcaatgctattgacatttaaatcccatgtgagaaatactgcatgatccaacaaagaaaattagagcgctttttgtaaaaaattagaactctcagtcttaatgtttattgcctagcaaacagacttttcctaaatgtaatgaaatgta

SEQ ID NO: 195626 - DNA, 607 bp, Homo sapiens
ccgttttgtgtatcagcttctctgcttctatgatgatctactttcttgttgccactgtatcaacttcagtctttccctcaccttttctagtcatcccgtctcctttcctaagtttttaaagcaaaattcagcaacgttctttcattttcaaaattccatttcttcagttgtaaattatatttgagccattcattttcyaatctctatatgtgtgatttagactatatatccttcctgcttttctgtaattgtgagattccatagctaattatttgtgtttgtcttcgagaaagcattcactatacattcatctcccatatgcttgactttttttttaagcaaagggagttagttatgtattcaccaacttcatgtttcagagctgtaaatcccagaacgtaaccttgaaaaggaattttcaaagttacagagccacatctaacaagaataaaagaagggaaatttttatgagattccttgcaatattgcatttatgctatggcaagcacatagaaaacagtattttcttccaagtggatctgcaatataagtaagatgcaagcactgatgatgctaatagcaaattaactaagataaattgagttga

SEQ ID NO: 195627 - DNA, 607 bp, Homo sapiens
ccgttttgtgtatcagcttctctgcttctatgatgatctactttcttgttgccactgtatcaacttcagtctttccctcaccttttctagtcatcccgtctcctttcctaagtttttaaagcaaaattcagcaacgttctttcattttcaaaattccatttcttcagttgtaaattatatttgagccattcattttctaatctctatatgtgtgatttagactatatatccttcctgcttttctgtaattgtgagattccatagctaattatttgtgtttgtcttcgagaaagcattcactatacattcatctcccatatgcttgactttttttttaagcaaagggagttagttatgtattcaccaacttcatgtttcagagctgtaaatcccagaacgtaaccttgaaaaggaattttcaaagttacagagccacatctaacaagaataaaagaagggaaatttttatgagattccttgcaatattgcatttatgctatggcaagcacatagaaaacagtattttcttccaagtggatctgcaatataagtaagatgcaagcactgatgatgctaatagcaaattaamtaagataaattgagttga

SEQ ID NO: 195628 - DNA, 525 bp, Homo sapiens
ggcttaatcaaatgtcactttgacaacagcagtgataatccggttgcccagatgtcttaccaagcttcgtctgtaagaggaaaagatagagagcatcaatgaaatgaagtgtgaaaaggggaatttacctcttttctttttaattcctgagaatcttcaatttcattaatacattcattttggagaataggggctgtgggaatttaaacactgtcagtcaagatgatcattatctgtgtctcagatatatgatgccttagatttttttaagcctagacttatcataaaaccactagaaagtgamcaagagatattgacagtaaattaaaaactgtctttatatagtaaaaggaagacaattgttttaaaatcatgtcctttaactcacctgtggtgttacagagattaatgttatgttacagctgcttttgtatccaaaatgaatgtttctatttagacaactggggacagcagcattttgtatgtgtgtgtgtgattaaaactgattaatagaatctgaaagtt

SEQ ID NO: 195629 - DNA, 503 bp, Homo sapiens
agagttttttgatggagtcttttggtttttctagataaaaaataatcagcaaaaagagagaattagacttcctcatttgcaacttgaatgccttatatttctctctttgcttgattgctctggctaggacttccaatactatgttgaatagaagtggtgagagtgaacatcttcttttttccagttcttagaggaaacactgtcaagacttcyccaatcagtatgatgttagttatgggtttgtcatatatggcttttgttattttgaggtatgttccttctatgcctaatatattgcatgttttttttgtcataattgaatgttgaattttatcaaatgcttttactgcatctattgagatgatcatatagtttttgtttttcattctgttgatatgatatatcactttttttgatttgtgtatgttgaaccatccttgcatccctgctataaatcccacttgatcatggtatgttatctttttgatgtgctattgaattca

SEQ ID NO: 195630 - DNA, 550 bp, Homo sapiens
cactatatagtttagtaatatttaataagataaaaagaagaaaaccatggcacagtggaataatagagcaaataactattggagcaaatacaagaatcactcaccaaggctgctcctatttttggatgaaataggtgatgcttagtaacatcatttgagctgctcaggaggagtgtctcctaaaactcttcttttcattgaggtatgtatttaatgatactttatttaatgaaacatttrtttcatttctaggcttaaattttgacctctcaatgagatttcctctgaaaatgcagacattctttggtgaggtatcacactgatattaaaattgaataatttatttagctaatttcctccaggttaggaaagcctgggaggaaacacataattattacaagaatgagagggatacagaaaagggtaggtaggtattcctaaaacccacttcatagcccagaacaagattatgtacacaggctagaagtccaatggaaggtagcatctctcaatatccattctacgctttgccaaagtaatggccatttcc

SEQ ID NO: 195631 - DNA, 574 bp, Homo sapiens
agctgagtttcatcctcaagtgcatttaaacctagctgaccttactgggatatttcacatttgccacacaataaaacagtttgaaatgcaagttatctctgataccactaagtaattccaccctgcagtgcagacagwacatcttcaaatcattattttatcccctttcctcagactaatcccctgaccatttctagctggcccctctgccatacaggcctccttttataagtgaatggtttgtgtttcttttagtactgatgatattttattgtcttagtcctcttcacattgagtgtgacacctaaaattgcctagaactaagtaggagttaaataaatgttagttacatttacaaattaattctaatgataccatatctagcaagacattatttctgcctttgaaaagttttggtttaactagcaaggtattggaaggattcctaaggagatgatggttaaatatctgagcagaatttaagaaaagggggcatagccctgctggccataaactcctgcctcctggaaatccctacaaatccttgcaatagaaagagccattgattaaagct

SEQ ID NO: 195632 - DNA, 556 bp, Homo sapiens
ttctaggcaagttccactcaacaccagatcaagcaattctatctatttacactattagcctagttttctcatacagtcatcacaagcataggaagatacttcaaaaccaaaaaaaccaaggtgcatcattaatattcatttaattcaaataccaaatagtttacatagggccagcttagaaatagatactaaatccagagctactgcaatcaaagcttatatgagtgaatatggtagagttgcctgctaaaaggcaatgtaatataattgcagctagaaccctacagtggggaatgaggaattttaaacacacatttgattacagccaccaaaaaaayagacgtaaaaataaaggcatttggctggtccaagatgtaattatcaatcagtcagcacctgtgattcttttacttatttttttgtggttttttttttttaaacaaattttagcccaattttcttgagtcattctctctctgcagcagcagaggaagggcctgtacctccctaccaatgacttggtgtccttattttctaccccaagagcagggatatt

SEQ ID NO: 195633 - DNA, 549 bp, Homo sapiens
atatcccaggggtccccaacctctgggctgtggaccaataccagtccatgccctgttaggaactgggccacacagcagaaggtgagtggccagcagtgagcattaccgcctgmgccccatctcctgtcagatcagaggcggcattagattctcataggagcacaaaccctgctgtgaattacgcatgtgagggacctagtctgtgctccttatgagaatctaactaatgcctgatgatctgaggtggtgcggtttcattctccgcacccaccccattcataggaaaactgtcttccatgaaaccagtcccttgtgccagaaagattggggaatgctgctttctactgtccaacttgtagagtatagagtggactaatgtttcacttggtctgaatactatatggctactgaattaaactgcctaggttctttgaacttgactcctaagttaggtcgatcaatcttgtatcagtacagttgattttaggaacaaaagtgccagacttcctaaatatgttcctggaaatattaacttgttgttatatttga

SEQ ID NO: 195634 - DNA, 549 bp, Homo sapiens
atatcccaggggtccccaacctctgggctgtggaccaataccagtccatgccctgttaggaactgggccacacagcagaaggtgagtggccagcagtgagcattaccgcctgcgccccatctcctgtcagatcagaggcggcattagattctcataggagcacaaaccctgctgtgaattacgcatgtgagggacctagkctgtgctccttatgagaatctaactaatgcctgatgatctgaggtggtgcggtttcattctccgcacccaccccattcataggaaaactgtcttccatgaaaccagtcccttgtgccagaaagattggggaatgctgctttctactgtccaacttgtagagtatagagtggactaatgtttcacttggtctgaatactatatggctactgaattaaactgcctaggttctttgaacttgactcctaagttaggtcgatcaatcttgtatcagtacagttgattttaggaacaaaagtgccagacttcctaaatatgttcctggaaatattaacttgttgttatatttga

SEQ ID NO: 195635 - DNA, 519 bp, Homo sapiens
tgggctgtggaccaataccagtccatgccctgttaggaactgggccacacagcagaaggtgagtggccagcagtgagcattaccgcctgcgccccatctcctgtcagatcagaggcggcattagattctcataggagcacaaaccctgctgtgaattacgcatgtgagggacctagtctgtgctccttatgagaatctaactaatgcctgatgatctgaggtggtgcggtttcattctccgcacccaccmcattcataggaaaactgtcttccatgaaaccagtcccttgtgccagaaagattggggaatgctgctttctactgtccaacttgtagagtatagagtggactaatgtttcacttggtctgaatactatatggctactgaattaaactgcctaggttctttgaacttgactcctaagttaggtcgatcaatcttgtatcagtacagttgattttaggaacaaaagtgccagacttcctaaatatgttcctggaaatattaacttgttgtta

SEQ ID NO: 195636 - DNA, 591 bp, Homo sapiens
ggtctcactgttatgagcacactccattcccggtcgcccttaggatggctctccctacgaaggccacactccgctcagaaggaaaagagaagggcaaggaaaagagacatcttcccttttagaacttgtcctggaagctgcacacatccatgagcctaaatttagtctgagggccacagctaacccaaaggatgattggaaattccaggattctgcaattaagtgcaaattaaaaatagatcctaggcagcaaagagcagcctctttcccccagggccagggaaatgcccatctcctaattgaaggagttcataaaataatgtgattcaatttttaaaaagaaagaaaagctttttaaaaagaattaacagaaaagataagaaaaatctggattagatgcatttaatatattgataagtatccatgcataacagtttttttttcttggatggctgagcatcagaaagggcggtgtgaaggttaggaaaacatctgtagtccctaaggaaagggwtatattaaaatatttttcaaaaatatgtcttagctatggaaatgcagaggagataagctgcactcactctaccaaat

SEQ ID NO: 195637 - DNA, 563 bp, Homo sapiens
ataacttcaaaagtagtataggttgagcatcccaaatccaaaagctgaaactttttgaggacagacatggtgctcaaaggaaatgctcactggagcatattgaatttgagatgtccagatttgggatactcaacagtargtataatgcaaagactccaaaatttaaaataattcaaaatctgaaacacttctggtctcaagcatttctgataagggatactcttagtcatgatgttaatttgtctttatatatgtttccacatatctaagagggtttcactaggggccaccgtgtcatgatactcagccaagcatttcctagaaaagttctgacataaactacttagtccttgttcattgtgaacctcagctcattttctgtttctaatttcaatttggtctcagccttatattctataaatgcacagactagtccacagcagtgtcctacagaggaatgaagtctctcccacacaactgtaggctcacagagattaacattaaatgagacctttgcagtcatttctctgatctgctagcccatgagttgagcccgtttattc

SEQ ID NO: 195638 - DNA, 582 bp, Homo sapiens
aatcaaactctgacttgtgctagctccagtctatcttttctgcaggacgcagatgctgctcctacagctctcttggactgagaagactcttctcatttctgacgtccacacgagtttcctcattactgaagaatgcatttcacgatataacacctaatctacacagctgtatgttgtttgggactcagttaacttagaattgattctcttcctctgtacagtccaggcaattgaaataagttaaatgtttttttccaacatagccacccacatttaaggcatggtgacctaaagtctttccttgagaactcgcacctctgaaaacctgatactttgtagaggcatatggmgaaactcagtgtagcatacaaggtatgcatgcttcttcatggctgcaccgtccactccttccttcagtctgctcttcccccaaagtgatatgtgctttcatttatcatcatcatcatcactatgattttaaatcacaaaaagtccagctgccttatttcacatttttttaaactgtggttccaagcaaattctgaaatgaaatgaagaaaggaaatatatttcagagagaag

SEQ ID NO: 195639 - DNA, 607 bp, Homo sapiens
ctactttcttagttgcagatgtacgtatttggttatgctgcactcatcacagtgccctggtagagaggaaagtgatggttacttaggggcttgggtttcatagtcagctatttaccaaccatgtgacctataaggagttattcgtccttttagagtctcagttttctcagctgacacatgggtatgacaataacagtattcaactcctaggggtgctgtgcacattaaatgaaaggaggcatgtaaagtgtctgtatccattaagcgttcctgaggttcttataaccttatattgcttccattcatttgattatatgtccgcattgttcacaagaatgtgargatcttgagggcaggggctgtgttccatttagctggtataatgccagcaccaagaacagagcctggcatttggaggcagctccgcacatttaatttaaactgaactgaaacagtgcagaaggcagagttgaagtcaggtaccggtgggtgggtggtgtgtcccctggggccatgagggattgcaaacgctgcttacaggtgaaaatccccgccctgagccttcagcagactcagtactaccttggccccctcgaagcagttattt

SEQ ID NO: 195640 - DNA, 541 bp, Homo sapiens
acattgactctagaggaaatagaaactgtaaataggcaagaggtttaattagtaatttaaacatctccccccgacacaaaacagcytaagaccaaatggcttcactgggtgatttctatcaaacatttgaagaagaattaacactaatttttacaagctcttttccacctcctccccccaaaaaagagagagagagagaaatggaagaagtgggaacacttcggtacttatttccagatgaggaagatgaggctggcgaggacgaataaacttccctaggttgcacagcttacaagcgatagggtgaagatctgaactctgcttatctaattattttcctactctgtgtcacccatgtagtgagagatacagaaaagtgtagaaaatggttactatctccaaagacacaaactgtctaattagacacataagaataacatctctgaggaaacaagatgcaaaatacagtgtgttgcaatataaggaatgcagagatttgaagtaaatgacctaggtctgaatccaccagtctctgcttgat

SEQ ID NO: 195641 - DNA, 541 bp, Homo sapiens
acattgactctagaggaaatagaaactgtaaataggcaagaggtttaattagtaatttaaacatctccccccgacacaaaacagcctaagaccaaatggcttcactgggtgatttctatcaaacatttgaagaagaattaacactaatttttacaagctcttttccacctcctccccccaaaaaagagagagagagagaaatggaagaagtgggaacacttcggtacttatttccagatgaggaagatgaggctggcgaggacgaataaacttccctaggttgcacagcttacaagcgatagggtgaagatctgaactctgcttatctaattattttcctactctgtgtcacccatgtagtgagagatacagaaaagtgtagaaaatggttactatctccaaagacacaaactgtctaattagacacataagaataacatctctgaggaaacaagatgcaaaatacagtgtgttgcaatataaggaatgcagagatttgaagtaaatgacytaggtctgaatccaccagtctctgcttgat

SEQ ID NO: 195642 - DNA, 433 bp, Homo sapiens
cctgagatctcaccagatcaatttagataggccctggttctaataattaaacatggaacattatggtaagctcctattgcaaagaattctttggccctctttctgtatacccccaaccctaatttctgattatcaaaaaagaaaatgaattaaatttacatggttagaactggcgcagaacctgactgaagagctgcatctctaaaccagtttttttgacagcccagcagaacagtgccaatacattgcacagacaactggaagaggaggaaggttttggaacagactcccgtttacaggtccttggctggaagaggctggataaaatactgcattgtaagcaatataacaaactgtacttcttgcaggcagtggtgctctggcacttartatttttgaccacatccatttattggctgatgaacagaaatgc

SEQ ID NO: 195643 - DNA, 436 bp, Homo sapiens
ttcctttcatactatattcatgggcatctttctatttcattatctatagaacttctctcatttcttttaaaatatacataatctatttttggaatgaatcacaatttatgatacctaatttttagtactttagtagagatggtgtttcaccgtgtaccaaggctggtcttgaactcctgagctcaggcattctgcctgccttggccttccaaagtgctaggattacaggcatgagccactgcgcctggccatgtttattattgtttctatggaaaattcaaggttttgaattttttttagaagacaggcagtgtgctagttattttgtggaatacaggtgttaagatactcttcctgccattcagtttcttatagtaagtctgttagatattgtgctkaggtttaaacagtgagaagaaatctaaatattgactgc

SEQ ID NO: 195644 - DNA, 494 bp, Homo sapiens
aagtgaattctattttaattccaaggtattaataaatctcagattttagtattcaactataagcataaattcaattatattatcaaaaccacaatattaagttcctctgacacagatccaaatcatgtaagatgtgtgatatatgcctccattctgaggctgagtcacgaattatcactttccaaacacaaacttgaaagaaggaacataaacagaaggtaaacagattcaaggcatccaagtaggctaaacagcatcaataaaagagcatggggttgtttctaccaaaaaaaaaaaaaaaaaaatttagcatggtggkgtgcacttgtagtcctagctctagggaggctgggagagaaggattaagcccagaagttgcagcaagctatgatcatgctactgcactccagcctgggagacagactgaaactctatcttaaaaaaaaaacagtggtggggcggcggggggaagaaaaaaagaaaaaaatgagaat

SEQ ID NO: 195645 - DNA, 580 bp, Homo sapiens
aacaggccatttattcaatattaaccgcatttaaatgtgagaaaaatcaaagattgttaaaggaaacacactacttgtcagaaatggtatgtgttaataattctgagagaaaaattctaattcatctacaacttcaaagggtaacatttcccaggggaacttaaattaatcatagaaaaggaaratgcaatggcattacatgcattttttaggctcttgatattttccttctacctatttaaatgaatttccaaaatgatggactctctctggagtaaacctccagaacaatccgagatgaggctttctgattgtccatatttcatacttagggcagttcagatgcctctgtgataagagaggcttgcagctgacacaaagtttctgatagagaaactgaatttattaaaatacaatatctatcgatgtgctaacacgtaagatgtcttcagggcttcagttaaggtcgatgatttctagtctacataaatttccctggaactgactgtaaactagttaaatggctgactggtgacaaaaagatgaggaaaataatgaatgcatataaagcagcacaaaa

SEQ ID NO: 195646 - DNA, 580 bp, Homo sapiens
aacaggccatttattcaatattaaccgcatttaaatgtgagaaaaatcaaagattgttaaaggaaacacactacttgtcagaaatggtatgtgttaataattctgagagaaaaattctaattcatctacaacttcaaagggtaacatttcccaggggaacttaaattaatcatagaaaaggaagatgcaatggcattacatgcattttttaggctcttgatattttccttctacctatttaaatgaatttccaaaatgatggactctctctggagtaaacctccagaacaatccgagatgaggctttctgattgtccatatttcatayttagggcagttcagatgcctctgtgataagagaggcttgcagctgacacaaagtttctgatagagaaactgaatttattaaaatacaatatctatcgatgtgctaacacgtaagatgtcttcagggcttcagttaaggtcgatgatttctagtctacataaatttccctggaactgactgtaaactagttaaatggctgactggtgacaaaaagatgaggaaaataatgaatgcatataaagcagcacaaaa

SEQ ID NO: 195647 - DNA, 575 bp, Homo sapiens
gagaaagcacacagagagtatttaccatcctggagatcagtgaactgaaaatgttgctagcacatcagtcctagggtgatgagctccgtgggagctcagagtagcaatgagttgtgccagctacccactgagggtgacagtttaaaaacaatggactgaaaaatgttgtaaatttgaaaaacaatgaactgcctggtgtcagtgtttagagattgatgggactggtgcctggaaagccagataggagtgtagaaattcacaccattttaacattcaaagtgtcccttgaaatgattcattaagagccatatagatataaatgcatatctatgtatatagatttatatgcatttgtacacataaacacatgcacattatttatattgttctctctttgtgtttaaaatgctcagaagttgaaacttgtttggaaatattcagtcaagtgaaatgtttccttttgcaatatgcagtttgtcttggtagctcaygctgcctttaactttcttttcccttcctccctatataattaaaggtgaagggcaagcaggagagagagtttttaacttatgctg

SEQ ID NO: 195648 - DNA, 450 bp, Homo sapiens
ttcaacaagtctctagaaggttccaaactttcccacatcttcctatcttcttctaagccctccaaactgtacaaacctctgtccattaccccattccaaagtcatttccacttttcaggtgtctttatarcagtggttcactctgctggtaccaattttctatattaaccaattttcacactgctataaaaagaactacctgaaactaggtaactataaagaaaagagttctaactgacttacagttccacatagctggggaggcctcaggaaacttacaatcatggcagaaggtgaaaggaaagcaaggcacatcttacatggtggcaggagagatagagtgaggggagaagtgccacacttttaaaccatcagatcttgtgagaactcagtcaatatcatgagaccagcatgggggaaatccacccccatgatctaatcactcccatc

SEQ ID NO: 195649 - DNA, 629 bp, Homo sapiens
tagtaataagtttctaacaacttagaattaatgtatcaatgtctgattaattcaaattcttagtctctgacatttttggcaaatgggtagtagagtttgtttttcagtctatgggcatgagagccaatgcctgaaccacaaagagaaaacagtaaatgtgttaaataataaaggttggaaggttatacaccaaacttaacacatgaaaagatgaaaagctggcgatgaaataaggtgtttttctttctacttgatataattctatattagttgaattttttataataagcatgtttttatgtaaaacttctgaaattttatttttcaaagagtcatctaaaataataatattatctgcaacatacttacccatctaggtaataatccatgctctctatttkgtcactttgttcagtcatcccacagactagctcctttggggcaccagtccccagagcaggcactgcagaggctacaaagacaatccttgtaatagcaaacatttatggagtgctatgtggcaggcactgcctcaagaacttatcagagctatctcatttaatcctcacccaattatgtcagacccactcctcaaatgaggaaacgaggcacagagcagttaagtaaat

SEQ ID NO: 195650 - DNA, 560 bp, Homo sapiens
gtgaagggattttgcagatgtaattgaagtccctaatcagttgactttaaattgggtgggcctgacttaaacaattggaagcgcttaaaagagggcttaagacttttctgaagctgggagagaggggagaaagggagagagaggagatttccatttgtagataacagctttggcctgtgcccatgtagttccagcttgcttgtttgtgatcttcccttgttgttggcctgtggacaacagctggggttccaagccagcttgctggtgagcttctctttctgaaggccgctctatggacttcagacttgccaagctggcccccacccacaatttcayaagcgaatttcttgtaataaattcatatattgccaactggttctgcttctctttctgaaccaaaattataatacagagcagcttagctaggctattatggtttggagtttctcatgagggtgtagtcaagatgttggccagtgttgtagtcatcaaggcttgactgagactgaaagatctgtttccaagatgactcattcatatagctggcaagctggtgctag

SEQ ID NO: 195651 - DNA, 571 bp, Homo sapiens
ggtcaccttcctcgtgtcttgctgggttctaaagcaggcttgtttggatcttgtccagtccctttcactacccctcctggggctgggagaggtacctgggcacatctgggtctcctccacacctcaccacatgaattggtacaagagttgtctgggagaagagagtaatccagttcccttctagagtctcacacctaaactgaaacaaatctcctccaccccattcttgaatgtcttatcccacatacccatctccccactgcctcccaaacctctatctttttcttcccacaattccccaagtaagtgaactttcacttacttctgtaggggaagaaagatttcttttctcattcttcaccaggttcatggctgaggcacctataagaaaaggctgattaacaaagaaaaagcacacgtttatctaatataagtyttatgtgacatgagagccttcagaaatgaagacccagagaaacaagaaaacctgtatatttttacacttgactttgttgaagaatggacagtcatggggaagtatgattggacaaaggaggtataacctaatggg

SEQ ID NO: 195652 - DNA, 541 bp, Homo sapiens
aacttacaggggctttcctatggttactggaaggatttgtgatggccgatttcatgtattaaacagacaggactaagggatgccacaaagctkgtaaaaaattatttctgggtgtctgtgagggtgtttccagaagagattcatattcaaattggtagactgagtacagaaaatcatcctcaccaatatgaatggccatcgtccagtttggtgagggcctgaagagaacaaaaaggcaaaggacgagtgagttccatctctatttaggctggcacatcctcttctgctgcatttggacactggtacttctagtttctgggccttcacactcagaacagaacttgcatcatgggttcctgattctcagaccttcggacttggactgaattataccaccagctttcttggttttccagtttgcagatagtggatcatgagactttttggcctccataatcacataagacaattcccataataaatctctctacatatatttaatatatataatcatatagattttaatatatattaaagttat

SEQ ID NO: 195653 - DNA, 541 bp, Homo sapiens
aacttacaggggctttcctatggttactggaaggatttgtgatggccgatttcatgtattaaacagacaggactaagggatgccacaaagctggtaaaaaattatttctgggtgtctgtgagggtgtttccagaagagattcatattcaaattggtagactgagtacagaaaatcatcctcaccaatatgaatggccatcgtccagtttggtgagggcctgaagagaacaaaaaggcaaaggacgagtgagttccatctctatttaggctggcacatcctcttctgctgcatttggacaytggtacttctagtttctgggccttcacactcagaacagaacttgcatcatgggttcctgattctcagaccttcggacttggactgaattataccaccagctttcttggttttccagtttgcagatagtggatcatgagactttttggcctccataatcacataagacaattcccataataaatctctctacatatatttaatatatataatcatatagattttaatatatattaaagttat

SEQ ID NO: 195654 - DNA, 541 bp, Homo sapiens
aacttacaggggctttcctatggttactggaaggatttgtgatggccgatttcatgtattaaacagacaggactaagggatgccacaaagctggtaaaaaattatttctgggtgtctgtgagggtgtttccagaagagattcatattcaaattggtagactgagtacagaaaatcatcctcaccaatatgaatggccatcgtccagtttggtgagggcctgaagagaacaaaaaggcaaaggacgagtgagttccatctctatttaggctggcacatcctcttctgctgcatttggacactggtacttctagtttctgggccttcacactcagaacagaacttgcatcatgggttcctgattctcagaccttyggacttggactgaattataccaccagctttcttggttttccagtttgcagatagtggatcatgagactttttggcctccataatcacataagacaattcccataataaatctctctacatatatttaatatatataatcatatagattttaatatatattaaagttat

SEQ ID NO: 195655 - DNA, 585 bp, Homo sapiens
gggatgcactttgtgaagattaagtgagagaatgtgtatgaaaaccacaaagctataaagttctatggacatccaagtgaccatgcttcgtttaagtaaaattcagtgcaaatagtgcaagcaaatgttttccagtgtgctatgtcacttttcaaagctgtaactactggaaatgctacatctcttgcacttacctgggttatccacaaagacggctaaaataactgtaagtcaatatgtatcaggtaaacacattggactacgcccaggcagctttcaaatagatgacacaagactagggatgtgtccaracatgttctgaacaacaagcattcctctgttttgatataatctgcaaaagttttctgacgcattatttatccttgttaaaaataaaccagaaaccttaattgctaatattatttcaaaactgtgcctttcctatgtggctttacagagggttaaaagaatgaaggaacatatttgaaaaggggagacaagacgaaagacacaatcagaactgcattttttaaaaaattctattttggatttttttttaactttttcataattcagagttttaca

SEQ ID NO: 195656 - DNA, 528 bp, Homo sapiens
taagccatatgtttgaatgagctccctgtgcttctaagaccttcatgtgcctttacaatctatgagaaaggatgatgtgccaggcacagtggcccacacctgcaatcycagtgctctgggaagccacggcaggagaaatgcttgaggccagaagttcaggaccagcccagacaacatagcaagaccctacctctgcaaaatttttaaaaaattagccagacatagtggtgcaaacctgtagtccaagctacttgggaggccaaggcaggaggatcacttgagcccaggagtttgaggctgctgggagccacgattgctccactgcagtctaacctgggtgacagactaagaccctgtctcaaaaaaaaaaaaaaaaaaaaaaaaaagacaatagtgaagatgtctctattttctcctctaatgaaaaggtaaaaacataggttattttctctcctcggcctcctgagcctgcattgattagtgagacacagagcagcatggcaaattcgagtctgaagccagattccc

SEQ ID NO: 195657 - DNA, 394 bp, Homo sapiens
agaactccaagtagctgagttctagttaattaagctttaacagcatgtaattcctaataattaaagacacctttagtgtgtacctaaatagagtaatattagacatgagaatgcttaaatggcttcttttttctccgtttttgattcgtttcttaaaaaatatttttaattattaactatgttaattatctatttttaackgttatttacacaacagttatacctatttatggggtaaatgcaatattttgatacaagcatacaatgtgtaatgatcaaatgagggtcactggggtagtcgttgcctcaagcgtttatcatttctttgtgttagggacattccaatggcttcttttcaagtaaagggagaaacattctaataataccgagataa

SEQ ID NO: 195658 - DNA, 394 bp, Homo sapiens
agaactccaagtagctgagttctagttaattaagctttaacagcatgtaattcctaataattaaagacacctttagtgtgtacctaaatagagtaatattagacatgagaatgcttaaatggcttcttttttctccgtttttgattcgtttcttaaaaaatatttttaattattaactatgttaattatctatttttaacggttatttacacaacagttatacctatttatggggtaaatgcratattttgatacaagcatacaatgtgtaatgatcaaatgagggtcactggggtagtcgttgcctcaagcgtttatcatttctttgtgttagggacattccaatggcttcttttcaagtaaagggagaaacattctaataataccgagataa

SEQ ID NO: 195659 - DNA, 394 bp, Homo sapiens
agaactccaagtagctgagttctagttaattaagctttaacagcatgtaattcctaataattaaagacacctttagtgtgtacctaaatagagtaatattagacatgagaatgcttaaatggcttcttttttctccgtttttgattcgtttcttaaaaaatatttttaattattaactatgttaattatctatttttaacggttatttacacaacagttatacctatttatggggtaaatgcaatattttgatacaagcatacratgtgtaatgatcaaatgagggtcactggggtagtcgttgcctcaagcgtttatcatttctttgtgttagggacattccaatggcttcttttcaagtaaagggagaaacattctaataataccgagataa

SEQ ID NO: 195660 - DNA, 394 bp, Homo sapiens
agaactccaagtagctgagttctagttaattaagctttaacagcatgtaattcctaataattaaagacacctttagtgtgtacctaaatagagtaatattagacatgagaatgcttaaatggcttcttttttctccgtttttgattcgtttcttaaaaaatatttttaattattaactatgttaattatctatttttaacggttatttacacaacagttatacctatttatggggtaaatgcaatattttgatacaagcatacaatgtgtaatgatcaaatgagggtcactggggtagtcgttgcctcaagcgtttatcatttctttgtgttagggacattccartggcttcttttcaagtaaagggagaaacattctaataataccgagataa

SEQ ID NO: 195661 - DNA, 523 bp, Homo sapiens
gaactgtagcctaactgaatgtgtgaacaggctgtaacctactcttgtgccagtcacagagtttcagccaatcaaaggtggataactgttcaaatcgtgttcaaataagtcaaacaccaagctgtaaccaatccagctgtttctgtacctcacttctgttttctgtaccttactttcctttttttgcccataaatcctctgcaatccmgtggcagcactgcagtggctctgaacctattctgctttggaggactgctcagttcataaatcgttctttgctgaattacactctgttaaatttaattagtctaaagttctttcaacagcccagaggaaagggccaatggcagctggtgaaagagatcgttctcagaactacattaataacttctaaatgcaagcatctattatttttgttttagggtccaatatttattctcagaagttctctttcatgatgattgacattcattcaacaaacccacatcgcacacaggtgtctactgtaggtaactgtgtagtt

SEQ ID NO: 195662 - DNA, 523 bp, Homo sapiens
gaactgtagcctaactgaatgtgtgaacaggctgtaacctactcttgtgccagtcacagagtttcagccaatcaaaggtggataactgttcaaatcgtgttcaaataagtcaaacaccaagctgtaaccaatccagctgtttctgtacctcacttctgttttctgtaccttactttcctttttttgcccataaatcctctgcaatcccgtggcagcactgcagtggctctgaacctattctgctttggaggactgctcagttcataaatcgttctttgctgaattacactctgttaaatttaattagtctaaagttctttcaacagcccagaggaaagggccaatggcagctggtgaaagagatcgttctcagaactacattaataacttctaaatgcaarcatctattatttttgttttagggtccaatatttattctcagaagttctctttcatgatgattgacattcattcaacaaacccacatcgcacacaggtgtctactgtaggtaactgtgtagtt

SEQ ID NO: 195663 - DNA, 578 bp, Homo sapiens
tcattttattttctaaagtgtcagactacgttaaggcagtagaattggattccattgtcattataggcactgattcttccaatgttttcaaatatctaatactttataccagccactgcatttccttctgctactataccatctccatttgccactggtgacagttttaagaactaggctgtgtattaatttccttgcacagtctgttcataagaaattaccacaaacttaagtggattaaaaaatatacatttaatctctcatagttctggaggcwataaatctcaaatcaaagtattggcagggccatggtccctctaaacatgtaaggggagaatccttccttaccccttcctgactgtggtggctcgtggcatttcttggattgtgaacacatcactcaaatccctgcctccatcttcatagggtcttccccatgtctctctgtctgtgtgtcttcccctcttcttataaggataccagtcactggatttaaagcgcactctaaatccaggatgattttatcccaacaaccgtaactaattacatctacaaagacaccatttccaaacaagtta

SEQ ID NO: 195664 - DNA, 560 bp, Homo sapiens
aatcctaacctttttgtgttatataggggtaaatatagatacagatatcattgtagatatatcctcccagtctttgttttgycttttatagtcctttgttacacaaaattgtatattttaatatactcaagttatatctcttgttaccttttttattgtattttctctctgccctaaccaatgttgtaaaaatattttcgtaagttttattctaaagttctagtttttgcttttaactttgaatctttactccaaacatacttttgtatatggtataaagctttctacaggaataacttatttccataaagatagaaaaaagtttaaagattttttataaattttgactcaggaattacacttattagaatttatcccaaagaaaggaacggagatgtatgcaaagagttactagagtgatgatcacttcatcctatttatgtggatgaattgcagatactctagatatttaccagtgggaatatgggtgaaataaatttagttacagttatgtaatgtaacagcatgaagctataaaataatacatttgaagaaaattt

SEQ ID NO: 195665 - DNA, 590 bp, Homo sapiens
cctgggtatagagaaccctgaatgagcttcaatattcctttttggtttgttagtaacaagagccagccaagggcagatatgagtcagactatggtgtcacgtacatcccaggctgaccttgaacttgctctgcctgttagaggcccagggacagcaaagagaagcttcccctgccttgttctgggcatgatcactttgcagaggacaatctaatcctttcaacttgacttgttttcatttgtgattttttttttccctcttcctatcaaggctcctaaggacatctgacagcctgatgacaaccaccttaaggtycatcaagacccagacaaaacagaatttcacatcagcagaaagccgagcacctcctgtcttctttccaggactgacatgtttagtcatacacccttctaagttttcttcttggttttacttacttgtgtggtatggccagggccaaggccagggagatgctcagcaggttgccccagtgggaggggtttgatgctgccccgcttttctcctcctgcaaggacataaaccattcctggtgcaaagctgcagacattgttttcttaatacatgaagta

SEQ ID NO: 195666 - DNA, 590 bp, Homo sapiens
cctgggtatagagaaccctgaatgagcttcaatattcctttttggtttgttagtaacaagagccagccaagggcagatatgagtcagactatggtgtcacgtacatcccaggctgaccttgaacttgctctgcctgttagaggcccagggacagcaaagagaagcttcccctgccttgttctgggcatgatcactttgcagaggacaatctaatcctttcaacttgacttgttttcatttgtgattttttttttccctcttcctatcaaggctcctaaggacatctgacagcctgatgacaaccaccttaaggttcatcaagacccagacaaaacagaattycacatcagcagaaagccgagcacctcctgtcttctttccaggactgacatgtttagtcatacacccttctaagttttcttcttggttttacttacttgtgtggtatggccagggccaaggccagggagatgctcagcaggttgccccagtgggaggggtttgatgctgccccgcttttctcctcctgcaaggacataaaccattcctggtgcaaagctgcagacattgttttcttaatacatgaagta

SEQ ID NO: 195667 - DNA, 541 bp, Homo sapiens
aatcaaatggtgtgaaagctggaaagggcctagaatcatctaggcattctctctctctctctttttattttttatttttgagacagagttttgctcttgttgcccaggctggagtgtaatggtgccatcttggttcactgcaacctcctcttcccgagttcaagcgattctcctgcctcagcctcctgagtggctgggattacaggcatgcaccaccacgcccagctaattttgtattttcagtagagactgggtttctccatgttggtcaggctggtctcgaactccygacctcaggtgatctgcctgcctcggcctcgcaaagtgctgggattacagacgtgagcaaccacgcctggcatggggtcctctcattttaaagatgattaaataaggttcaggagaggcactgcacctcatttcctaagcctcactgggagtgattggtaggtccagatgtagcacccgggtcactgcaatgccctcattggagtttgttggagatgccaacttctccttaaatccattgctgcaatgaaag

SEQ ID NO: 195668 - DNA, 562 bp, Homo sapiens
cagcactataactgtattttatttctgtatactagccagaatcattctgaaaaataaacactattacatttacaatarcatcaaaaagaataaaataggtatcatcaaaattatggagtaggcaagctcttattcccaccacaaaaccatcacaaaataaacaaaaaaatatccaagccaaactggacggaactctatagaacaaatcagcctggagcaatgatgcaaaggctgaataaaataaaagacaacttaaaaatgatagaaaacagagtgtatgttttaaatgcaattgccttattttctctctgccttatctacagttgtcaagacagcaacacgtttttccagtgtggcattctagtacatggtcacagaaggagaagagaagaccctactcacaaattatgtgtttgtatgttcaaacttgtctcagggctacttgaaatattgacacaaggcactcatttctgttttgcataaccaagaaatcggaagagaaaagtagcgatcattgctcaaacatttcttaggagattaaaaacaactgcagcaacatagt

SEQ ID NO: 195669 - DNA, 562 bp, Homo sapiens
cagcactataactgtattttatttctgtatactagccagaatcattctgaaaaataaacactattacatttacaatagcatcaaaaagaataaaataggtatcatcaaaattatggagtaggcaagctcttattcccaccacaaaaccatcacaaaataaacaaaaaaatatccaagccaaactggacggaactctatagaacaaatcagcctggagcaatgatgcaaaggctgaataaaataaaagacaacttaaaaatgatagaaaacagagtgtatgttttaaatgcaattgccttattttctctctgccttatcyacagttgtcaagacagcaacacgtttttccagtgtggcattctagtacatggtcacagaaggagaagagaagaccctactcacaaattatgtgtttgtatgttcaaacttgtctcagggctacttgaaatattgacacaaggcactcatttctgttttgcataaccaagaaatcggaagagaaaagtagcgatcattgctcaaacatttcttaggagattaaaaacaactgcagcaacatagt

SEQ ID NO: 195670 - DNA, 545 bp, Homo sapiens
gaatttgagacaaccagagcattattgggcttggggtctaagtccctatgaatacctagaatgccttcccaaggataggcagaaaaaagcccagactgtgaggactacaataattgcctaattctgcaatacctagaaactgacaaacatctacaagcattaagaccatccaggaaaagacgacctcaccaaagtaagcaatggaccaaaaaaaaaaatcttggaaaaacagatatgtgaccattcagatggaatattcaaagtaactctgtggaggaaackcaaaaaaattaaagataacacagagaagaaattcagagttctattagacaaattcaatgaagaaactgaaattattaaatagaatcaagcagaaattctaagttgaaaatgcaattaatatactgaagaatgcatcagtgtatctaggagaatttatctagcagaagaaagaattagtcagcttgaagacaggctatttgaaaatacacagtcagaggagacaaaagaaaaagaataaacaatgaagcatgcctacaagatct

SEQ ID NO: 195671 - DNA, 614 bp, Homo sapiens
gaagggaaaatgtgtgttattggaatagtgggtatggagtgggctttcatctgaatgtatctgcacctgctggtattctcagatgcaacattcaactrcaagagcccagtgaagaaacacggcactcccaaatctcctgtaagtttttgtcttcattttggttccactaatgaagtgaatctggagcttcagagaaggggctcccttctgtgtcattgaatccttgctctgggtctccttgcagagttcaataggtttagtaaggctaatcagttgtttcaagagatggtgtcagcagcatatggtgtcactgaaggagtatgataaaccaggacacagccatttcatgctgggctagagaagcttgggggaaatgatttgtaagtcccagcaggaacctctttgcaaggcagggtctgggctgttgggggcacagaccaggtgagttagatatcaatatgtaaagatgaggacctatggatattaattgaaaatatataaatacttcaaaaaattccaataaattgagtccaaaattaaccccaaattattcaaaacacaaattccttgacaaatattttgggagcaatgagttcataaagaatttgaaacta

SEQ ID NO: 195672 - DNA, 614 bp, Homo sapiens
gaagggaaaatgtgtgttattggaatagtgggtatggagtgggctttcatctgaatgtatctgcacctgctggtattctcagatgcaacattcaactacaagagcccagtgaagaaacacggcactcccaaatctcctgtaagtttttgtcttcattttggttccactaatgaagtgaatctggagcttcagagaaggggctcccttctgtgtcattgaatccttgctctgggtctccttgcagagttcaataggtttagtaaggctaatcagttgtttcaagagatggtgtcagyagcatatggtgtcactgaaggagtatgataaaccaggacacagccatttcatgctgggctagagaagcttgggggaaatgatttgtaagtcccagcaggaacctctttgcaaggcagggtctgggctgttgggggcacagaccaggtgagttagatatcaatatgtaaagatgaggacctatggatattaattgaaaatatataaatacttcaaaaaattccaataaattgagtccaaaattaaccccaaattattcaaaacacaaattccttgacaaatattttgggagcaatgagttcataaagaatttgaaacta

SEQ ID NO: 195673 - DNA, 614 bp, Homo sapiens
gaagggaaaatgtgtgttattggaatagtgggtatggagtgggctttcatctgaatgtatctgcacctgctggtattctcagatgcaacattcaactacaagagcccagtgaagaaacacggcactcccaaatctcctgtaagtttttgtcttcattttggttccactaatgaagtgaatctggagcttcagagaaggggctcccttctgtgtcattgaatccttgctctgggtctccttgcagagttcaataggtttagtaaggctaatcagttgtttcaagagatggtgtcagcagcatatggtgtcactgaaggagtrtgataaaccaggacacagccatttcatgctgggctagagaagcttgggggaaatgatttgtaagtcccagcaggaacctctttgcaaggcagggtctgggctgttgggggcacagaccaggtgagttagatatcaatatgtaaagatgaggacctatggatattaattgaaaatatataaatacttcaaaaaattccaataaattgagtccaaaattaaccccaaattattcaaaacacaaattccttgacaaatattttgggagcaatgagttcataaagaatttgaaacta

SEQ ID NO: 195674 - DNA, 614 bp, Homo sapiens
gaagggaaaatgtgtgttattggaatagtgggtatggagtgggctttcatctgaatgtatctgcacctgctggtattctcagatgcaacattcaactacaagagcccagtgaagaaacacggcactcccaaatctcctgtaagtttttgtcttcattttggttccactaatgaagtgaatctggagcttcagagaaggggctcccttctgtgtcattgaatccttgctctgggtctccttgcagagttcaataggtttagtaaggctaatcagttgtttcaagagatggtgtcagcagcatatggtgtcactgaaggagtatgataaaccaggacacagccatttcatgctgggctagagaagcttgggggaaatgatttgtaagtcccagcaggaacctctttgcaaggcagggtctgggctgttgggggcacagaccaggtgagttagatatcaatatgtaaagatgaggacctatggatattaattgaaaatayataaatacttcaaaaaattccaataaattgagtccaaaattaaccccaaattattcaaaacacaaattccttgacaaatattttgggagcaatgagttcataaagaatttgaaacta

SEQ ID NO: 195675 - DNA, 396 bp, Homo sapiens
atccttttgtttttgaacacttccctgtttccttgtattacaacaaattctaagttcattttctrtattacctcttttgtacatagaattagccatttctctaaagcttgcttgtttctaacgttaacgaatagcagtaaaataaaaaaattgtgataccgtgtataattacttctaggacctctcaacctactggcctagcagacgtgcatgtttatatgaacccatgtttatggacgcatcaaaactacttatgtacctaatcttctgtaactttattatattaaaaatgagaacacactggtctcctgacccaactatgctaccacgtggacctttctagccttccttccttgactgtccataaccatccactttaaagtgaggaatcctatc

SEQ ID NO: 195676 - DNA, 396 bp, Homo sapiens
atccttttgtttttgaacacttccctgtttccttgtattacaacaaattctaagttcattttctgtattacctcttttgtacatagaattagccatttytctaaagcttgcttgtttctaacgttaacgaatagcagtaaaataaaaaaattgtgataccgtgtataattacttctaggacctctcaacctactggcctagcagacgtgcatgtttatatgaacccatgtttatggacgcatcaaaactacttatgtacctaatcttctgtaactttattatattaaaaatgagaacacactggtctcctgacccaactatgctaccacgtggacctttctagccttccttccttgactgtccataaccatccactttaaagtgaggaatcctatc

SEQ ID NO: 195677 - DNA, 396 bp, Homo sapiens
atccttttgtttttgaacacttccctgtttccttgtattacaacaaattctaagttcattttctgtattacctcttttgtacatagaattagccatttctctaaagcttgcttgtttctaacgttaacgaatagcagtaaaataaaaaaattgtgataccgtgtataattacttctaggacctctcaacctactggcctagcagacgtgcatgtttatatgaacccatgtttatggacgcatcaaaactacttatgtacytaatcttctgtaactttattatattaaaaatgagaacacactggtctcctgacccaactatgctaccacgtggacctttctagccttccttccttgactgtccataaccatccactttaaagtgaggaatcctatc

SEQ ID NO: 195678 - DNA, 529 bp, Homo sapiens
gtttagtaaggtatgaactacagcgaaaggctttgccacattctttacatttgtatggtttctctccagtgtgaattctctgatgcacaataagattggaggaacgagtaaaagatttgctacatgctttacatttgtaaaggttttctccagtatcaatttgctgctgtttagtaaggtataaactacagttaaggttaaagaccttgccacattctttccatttayagggtttctcttcggtaggaatgatctgatgttgagtaaggtgcaaactatggtttaagctatccccacatttttcacatttgtatggtttctcttcattatggattatctgctttctaagatttgatgactgactaagatctttatcatatttgttatagctatatgagttttctctgatatggatggtctgatgttgaatatgttttaatgactgggtacaaacttctacacatttattacatttgtaagactgttcttgtttctcttgcccatgcatactctgaagaaagacttcctc

SEQ ID NO: 195679 - DNA, 609 bp, Homo sapiens
gaaaaaaggatttaataaaattcaacatcctttgataataaaaactctcaaaaagctgggtatagaaagaacatacctcaaaataataaaaaccatatatgacagatccacagctagtatcatcctgaatggaggaaaaaaatctgaaagtcttttctctaagatctggaacataacaaggatgtccactttcaacactgttattcaacatagtactggaagtgctagctacagcagcagtaaaacgagaaaaaactaaatggcatccaaattggaaaggaagtcgtcaaattattcttgtttgcagatggtacagtcttatattaagaaaaatctaaagactccaccaaaaaacagtaagaactgataaagttgcaggatataaaatgaacatacaaacatcaatagcatttctatatgccaacagagaatctgaaaaaagagattagaaagtaattccatttacagtagccacaaataaaattaaatayctagacattaacttaaccaaagaagtgaaagatctgtacaatgaaaactataaaacatgaatgaaagacattgaagaggatggctgggtgcagtggctcacacctgtaatcccagcac

SEQ ID NO: 195680 - DNA, 587 bp, Homo sapiens
tgctcacagtatgtactgtgctgggaacatcacatggtgtgagttaagccatataaacccctgggatrtgggtcctaagtatcccataattcccagcaggatttagataatggctcagcctttctatttcttcttgtttccctatcactataaaagctaactatagacagatgggagggatacagaaaggaaggagtcaagtttagttcacaagaatttctccactgggcacggtggctcacgcctgtaatcccagcactttgggaagccaagatgggtgttatcacttgaggtcaggagttcaagatcagcctggtcaacattgtgaaaccctgtctctactaaaaatacaaaaatcagctgtgcatggtggcacacctataatcccagctactcgggaggctgaggcaggagaatcatctgaaccgggaaggcagaagttgtgtgagccgagatgacactattccagcctaggcaacagagtgagattcggtctcaaaaaaaaaaaaaaaaaaaagaagaagaaaaagaatttctcattattctctttatatctttatactgactttgtgacaacttgtgaagca

SEQ ID NO: 195681 - DNA, 549 bp, Homo sapiens
ggttctacaaacacacatacatacacaacagcccagcaaagacacatacatatgcccatgcaaaagtgaatgtatatctaaacrccaaaatagcacacctatttgtttcatattttttaattacttaattgaatttaaactgtgtttgcagtttgaggttgtagtagaaaataatgctcttctacgtgtatgtctgcctattccaatactaaaaagacaaatatatttaaatacatgttttgttaaagctgaatgtaaatgctgttcttgccaaatatgtcactcaaatgtgcaatggtattaactttaaatatcagtctgtttttaataaattgaataactaataagacaaacattgtattacattatttgttaaatttagattgtagttttcaaaccaggaaagataaaattgtttcatttgaaaaattttaaaaaaacttttttggcatgaatattcaatacaaactctagtatttatttgtcaatattcctttatgatagagaacatccaggataatgaaactgaacacagcccatgattttcag

SEQ ID NO: 195682 - DNA, 614 bp, Homo sapiens
tgaaactgaacacagcccatgattttcagggctcactcacaatggcatcttcctagagggtggtctcagagggtccaagcacatggggatttggacttcatcatcaaaacatartgagccccagggctgaacacacagagggcagcaggagctcgagagcccactctgtggtacttagggaaatgaggggatggtctgcaggaccctggaaaagggtgagtagggcagagtctgcaggtagatgagcatattctaaggagaaccattatcctctaaacttggttggcttcagtgattatgaagacaagggaactgattcaccagacttggaggtcagaaagtaaagtgactttctttttccttcatggagactgaggaatgtaaaatactttcaaagaaaaagggaagatggagaaacagtctgaaaaacaggacacctgaagccaaccaaaatggagaacaagagcatttaaagtcttgtttaatttccaaaaacagcagatgaaagaaaaagaaacaaaataccatgtatacgctgagttaatgttaaaaaacatgtacaattgtttgactattacagcacaaaaatacaaaactctaatcattgaaacagt

SEQ ID NO: 195683 - DNA, 614 bp, Homo sapiens
tgaaactgaacacagcccatgattttcagggctcactcacaatggcatcttcctagagggtggtctcagagggtccaagcacatggggatttggacttcatcatcaaaacatagtgagccccagggctgaacacacagagggcagcaggagctcgagagcccactctgtggtacttagggaaatgaggggatggtctgcaggaccctggaaaagggtgagtagggcagagtctgcaggtagatgagcatattctaaggagarccattatcctctaaacttggttggcttcagtgattatgaagacaagggaactgattcaccagacttggaggtcagaaagtaaagtgactttctttttccttcatggagactgaggaatgtaaaatactttcaaagaaaaagggaagatggagaaacagtctgaaaaacaggacacctgaagccaaccaaaatggagaacaagagcatttaaagtcttgtttaatttccaaaaacagcagatgaaagaaaaagaaacaaaataccatgtatacgctgagttaatgttaaaaaacatgtacaattgtttgactattacagcacaaaaatacaaaactctaatcattgaaacagt

SEQ ID NO: 195684 - DNA, 614 bp, Homo sapiens
tgaaactgaacacagcccatgattttcagggctcactcacaatggcatcttcctagagggtggtctcagagggtccaagcacatggggatttggacttcatcatcaaaacatagtgagccccagggctgaacacacagagggcagcaggagctcgagagcccactctgtggtacttagggaaatgaggggatggtctgcaggaccctggaaaagggtgagtagggcagagtctgcaggtagatgagcatattctaaggagaaccattatcctctaaacttggttggcttcagtgattatgaagacaagggaactgattcaccagacttggaggtcagaaagtaaagtgactttctttttccttcatggagactgaggaatgtaaaatactttcaaagaaaaagggaagatggagaaacagtctgaaaaacaggacacctgaagccaaccaaaatggagaacaagagcatttaaagtcktgtttaatttccaaaaacagcagatgaaagaaaaagaaacaaaataccatgtatacgctgagttaatgttaaaaaacatgtacaattgtttgactattacagcacaaaaatacaaaactctaatcattgaaacagt

SEQ ID NO: 195685 - DNA, 614 bp, Homo sapiens
tgaaactgaacacagcccatgattttcagggctcactcacaatggcatcttcctagagggtggtctcagagggtccaagcacatggggatttggacttcatcatcaaaacatagtgagccccagggctgaacacacagagggcagcaggagctcgagagcccactctgtggtacttagggaaatgaggggatggtctgcaggaccctggaaaagggtgagtagggcagagtctgcaggtagatgagcatattctaaggagaaccattatcctctaaacttggttggcttcagtgattatgaagacaagggaactgattcaccagacttggaggtcagaaagtaaagtgactttctttttccttcatggagactgaggaatgtaaaatactttcaaagaaaaagggaagatggagaaacagtctgaaaaacaggacacctgaagccaaccaaaatggagaacaagagcatttaaagtcttgtttaatttccaaaaacagcagatgaaagaaaaagaaacaaaatrccatgtatacgctgagttaatgttaaaaaacatgtacaattgtttgactattacagcacaaaaatacaaaactctaatcattgaaacagt

SEQ ID NO: 195686 - DNA, 529 bp, Homo sapiens
tttttttttttttttttttttaacacaaaagcttattaaaaaaacatagattgtrcagatgtgaataaaaacagcacaggaccctgtgaatctcctcctccctttcacgggaggttgtggctaacactttctgagcattagtgtgtgccaagcacaactccctacagcaactccatgaggaaggtgctattgtcttccctctacagatgaggaaaccaaggctcagagaggtttaatgccttgcccaaggtcacacaggttgtaaatggcagagccaggattccgccccaggcgtcgggctccgatggactttggccgtttgctgaactgcttattcacgatctgttgtgtttctctcctggccctcttatatgcatggcagagatacagacgtgcctgcgtggggtttggagttgggtgggttcaggggtgtgctggcagatgtttaacatctgtttctgggagaaaaaagccctaatgcctagcattttccagcttccatggtgtaaatactcctaccatggtttat

SEQ ID NO: 195687 - DNA, 529 bp, Homo sapiens
tttttttttttttttttttttaacacaaaagcttattaaaaaaacatagattgtacagatgtgaataaaaacagcacaggaccctgtgaatctcctcctccctttcacgggaggttgtggctaacactttctgagcattagtgtgtgccaagcacaactccctacagcaactccatgaggaaggtgctattgtcttccctctacagatgaggaaaccaaggctcagagaggtttaatgccttgcccaaggtcacacaggttgtaaatggcagagccaggattccrccccaggcgtcgggctccgatggactttggccgtttgctgaactgcttattcacgatctgttgtgtttctctcctggccctcttatatgcatggcagagatacagacgtgcctgcgtggggtttggagttgggtgggttcaggggtgtgctggcagatgtttaacatctgtttctgggagaaaaaagccctaatgcctagcattttccagcttccatggtgtaaatactcctaccatggtttat

SEQ ID NO: 195688 - DNA, 529 bp, Homo sapiens
tttttttttttttttttttttaacacaaaagcttattaaaaaaacatagattgtacagatgtgaataaaaacagcacaggaccctgtgaatctcctcctccctttcacgggaggttgtggctaacactttctgagcattagtgtgtgccaagcacaactccctacagcaactccatgaggaaggtgctattgtcttccctctacagatgaggaaaccaaggctcagagaggtttaatgccttgcccaaggtcacacaggttgtaaatggcagagccaggattccgccccaggcgtcgggctccgatggrctttggccgtttgctgaactgcttattcacgatctgttgtgtttctctcctggccctcttatatgcatggcagagatacagacgtgcctgcgtggggtttggagttgggtgggttcaggggtgtgctggcagatgtttaacatctgtttctgggagaaaaaagccctaatgcctagcattttccagcttccatggtgtaaatactcctaccatggtttat

SEQ ID NO: 195689 - DNA, 583 bp, Homo sapiens
tgaaacaatatagtatgtactcttatctatttggcttatttttctcagtagaaataccgagaattaaaccttttatgttgtattgtttattttttaataaataataggtagcatttcagcaaacaaatgtagcataatttgtttttctaagttgctaattggtattcaaacttttcattactttgggtcttactaataaatctgctactcaatttggtaatgtacatagatgataaattatatataaaatatattatttttgcaacaacaataacacrtaaacaagagaatgtgctatttggcaaattttctttagcatgtcaaataattgaagttatgaaacaaaaaacaaacctgtaaaccaaagagtatctgagactaatctcaatagatttaggaagttcattttccaagattaaggacatgcctgtgacaccgcctcagggagtcctgatgatgtgtgcccaagcttgtgggcacagcttggttttatacaatttagggaggcatgagacattaatcaatatatgtatataagatgtacattgatttagttcagaaaggcaggacaacttgaagtggg

SEQ ID NO: 195690 - DNA, 583 bp, Homo sapiens
gtttttctaagttgctaattggtattcaaacttttcattactttgggtcttactaataaatctgctactcaatttggtaatgtacatagatgataaattatatataaaatatattatttttgcaacaacaataacacgtaaacaagagaatgtgctatttggcaaattttctttagcatgtcaaataattgaagttatgaaacaaaaaacaaacytgtaaaccaaagagtatctgagactaatctcaatagatttaggaagttcattttccaagattaaggacatgcctgtgacaccgcctcagggagtcctgatgatgtgtgcccaagcttgtgggcacagcttggttttatacaatttagggaggcatgagacattaatcaatatatgtatataagatgtacattgatttagttcagaaaggcaggacaacttgaagtggggagagggcttctagatcataggtaggtttgagagaaatggttgcattatttgagtttctgattagcctttaactgaatgcacaatttacaggaatagtcacgtaggccttaatctggcttagtgaaataatagagcaaag

SEQ ID NO: 195691 - DNA, 583 bp, Homo sapiens
gtttttctaagttgctaattggtattcaaacttttcattactttgggtcttactaataaatctgctactcaatttggtaatgtacatagatgataaattatatataaaatatattatttttgcaacaacaataacacgtaaacaagagaatgtgctatttggcaaattttctttagcatgtcaaataattgaagttatgaaacaaaaaacaaacctgtaaaccaaagagtatctgagactaatctcaatagatttaggaagttcattttcsaagattaaggacatgcctgtgacaccgcctcagggagtcctgatgatgtgtgcccaagcttgtgggcacagcttggttttatacaatttagggaggcatgagacattaatcaatatatgtatataagatgtacattgatttagttcagaaaggcaggacaacttgaagtggggagagggcttctagatcataggtaggtttgagagaaatggttgcattatttgagtttctgattagcctttaactgaatgcacaatttacaggaatagtcacgtaggccttaatctggcttagtgaaataatagagcaaag

SEQ ID NO: 195692 - DNA, 583 bp, Homo sapiens
gtttttctaagttgctaattggtattcaaacttttcattactttgggtcttactaataaatctgctactcaatttggtaatgtacatagatgataaattatatataaaatatattatttttgcaacaacaataacacgtaaacaagagaatgtgctatttggcaaattttctttagcatgtcaaataattgaagttatgaaacaaaaaacaaacctgtaaaccaaagagtatctgagactaatctcaatagatttaggaagttcattttccaagattaaggacatgcctgtgacaccgcctcagggagtcctgatgatktgtgcccaagcttgtgggcacagcttggttttatacaatttagggaggcatgagacattaatcaatatatgtatataagatgtacattgatttagttcagaaaggcaggacaacttgaagtggggagagggcttctagatcataggtaggtttgagagaaatggttgcattatttgagtttctgattagcctttaactgaatgcacaatttacaggaatagtcacgtaggccttaatctggcttagtgaaataatagagcaaag

SEQ ID NO: 195693 - DNA, 495 bp, Homo sapiens
acacctgggaaaaacaggagaaaatatatgtatttaactcagtagacttcaagctayttacatgttaattaactggaatatttcatagctaaatacctgatctagcatgagaaataatagagatgacacatggagaatgcaacagtgggaagctgaggttcaagttctgatgtttgtttactgatatttgtccgctggcatgtccagaacttcatgagtacagaactcctctaatagtgaaacaaacactcacaggacatgcatttttgtttgaaataagtgtaattcagatgctggtaaaattttctcctcagactcctttgcaccagctcagggctgacgtctgtgttgagtgggttctgggcctgccctgcagctctgccctcaccctgctggggaggatgctgtttgggctcacagagcatattctcccaatgttgctctcccagaatgaaagggctgtcccctggttcacaatcctctttcagcagcatc

SEQ ID NO: 195694 - DNA, 495 bp, Homo sapiens
acacctgggaaaaacaggagaaaatatatgtatttaactcagtagacttcaagctacttacatgttaattaactggaatatttcatagctaaatacctgatctagcatgagaaataatagagatgacacatggagaatgcaacagtgggaagctgaggttcaagttctgatgtttgtttactgatatttgtccgctggcatgtccagaacttcatsagtacagaactcctctaatagtgaaacaaacactcacaggacatgcatttttgtttgaaataagtgtaattcagatgctggtaaaattttctcctcagactcctttgcaccagctcagggctgacgtctgtgttgagtgggttctgggcctgccctgcagctctgccctcaccctgctggggaggatgctgtttgggctcacagagcatattctcccaatgttgctctcccagaatgaaagggctgtcccctggttcacaatcctctttcagcagcatc

SEQ ID NO: 195695 - DNA, 495 bp, Homo sapiens
acacctgggaaaaacaggagaaaatatatgtatttaactcagtagacttcaagctacttacatgttaattaactggaatatttcatagctaaatacctgatctagcatgagaaataatagagatgacacatggagaatgcaacagtgggaagctgaggttcaagttctgatgtttgtttactgatatttgtccgctggcatgtccagaacttcatgagtacagaactcctctaatagtgaaacaaacactcacaggacatgcatttttgtttgaaataagtgtaattcagatgctggtaaaattttctcctcagactcctttgcaccagctcagggctgacgtctgtgttgagtgggttctgggcctgccctgcagctctgccctcaccctgctggggaggatgctgtttgggctcacagagcatattctcccaatgttgctctcccagaatgaaagrgctgtcccctggttcacaatcctctttcagcagcatc

SEQ ID NO: 195696 - DNA, 533 bp, Homo sapiens
cacaaaaaacttacaatcatgatgcaaagggtagcaaacacatgctatttcacatgactgcaggagagagaagtgttaagtgaagagggaagcccctcataaaattatcaaatcttgtgataactcactcactaacaggagaaaagcaggaagaaaacagcccatatgattcaattatttccacctcattccacccttgcaatgtgtgaattattacaataaaaggtgagatttgggtagggacacagagccaaaccatatcattgattttattttctttagaatttacattgtctagctgtaagaaagcacagcttaacttctgctggtttcaagttaggaaaratatttaaaaagggaaataattgaaaacgttattttggagacttgtgcaaagatacgctttaaaattcagtccaaattgtagaagataatataaattgaaaagcgagtggacaaggttaaaatctattaactgatgcactatagtttattttgaaataatatttctctctataattccccaattttat

SEQ ID NO: 195697 - DNA, 596 bp, Homo sapiens
tattgaacctatgcaaataactattttgatataagaatactcacagtttccaaattttggagaaattatgtatataagaagatattatgtttttatttttttcttaataaagtataccatactcaattgttaacaactgtgaatagcttaaaagacaaacttttcctgattctgaaaaaacagaacataagtaattagcaaatgctttaaagaataagccataaaaataatttcagtcttctgtcaattcagttcatgcaattaagtcctgtcctgcttaatattagattaacaatcatcataaatcaatcaggtatcaatgagagtcttggaagttttaatctctataccaatggcacaatttataaaattgtcacaatcgtatatttaagagtactcctcaaaattctatagattattataagccacttgataaagaatcaaagtaaaacaccaactgtggatgactgaagttttmgaatagccatggttaaaggcagaattgaggggaaaatttggttacttctgcaataaacagaaattttacataataatcataaacactaccgataaaatatactaagacatatcaaatc

SEQ ID NO: 195698 - DNA, 596 bp, Homo sapiens
tattgaacctatgcaaataactattttgatataagaatactcacagtttccaaattttggagaaattatgtatataagaagatattatgtttttatttttttcttaataaagtataccatactcaattgttaacaactgtgaatagcttaaaagacaaacttttcctgattctgaaaaaacagaacataagtaattagcaaatgctttaaagaataagccataaaaataatttcagtcttctgtcaattcagttcatgcaattaagtcctgtcctgcttaatattagattaacaatcatcataaatcaatcaggtatcaatgagagtcttggaagttttaatctctataccaatggcacaatttataaaattgtcacaatcgtatatttaagagtactcctcaaaattctatagattattataagccacttgataaagaatcaaagtaaaacaccaactgtggatgactgaagttttagaatagccatggttaaaggcagaattgaggggaaaatttggttacttcygcaataaacagaaattttacataataatcataaacactaccgataaaatatactaagacatatcaaatc

SEQ ID NO: 195699 - DNA, 592 bp, Homo sapiens
tcctcaaccatgggcaccagcatcagagtcgtgaggaagctcaggggtgcccggtgagtcttctccagtcagactcaggacaggaacttcaatgggattccctgactagaatggcttttagggattttgattacagccaagagagaggctggaccaggttcagtgtcatgtaggacctcacaggttttatgtatgacatttctcctgaaaatattcaaatgagtatcagcactgatctggtgctttctgactttcatttttagtggttctcgcttttccatttgcttttcctgctttctggaaaaaaggatgttgtccctgtggtctaaatcctgggrctcaagccctttccctggagcttaggtggggctcaggctgtgactcctgcagccattgggagaggctgctgagactttcttctctctcattattcaggacactccactctgttttctggagacgcatctgggaatgcatgtggccattaggaatgagggcataagcttctttggtcaaaatggggtgaggatgtggaattgatcctgtgctgtgtaaactgtcacagagtcaccttcttcaccggtagtgttag

SEQ ID NO: 195700 - DNA, 592 bp, Homo sapiens
tcctcaaccatgggcaccagcatcagagtcgtgaggaagctcaggggtgcccggtgagtcttctccagtcagactcaggacaggaacttcaatgggattccctgactagaatggcttttagggattttgattacagccaagagagaggctggaccaggttcagtgtcatgtaggacctcacaggttttatgtatgacatttctcctgaaaatattcaaatgagtatcagcactgatctggtgctttctgactttcatttttagtggttctcgcttttccatttgcttttcctgctttctggaaaaaaggatgttgtccctgtggtctaaatcctgggactcaagccctttccctggagcttaggtggggctcaggctgtgactcctgcagccattgggagaggctgctgagactttcttctctctcattattmaggacactccactctgttttctggagacgcatctgggaatgcatgtggccattaggaatgagggcataagcttctttggtcaaaatggggtgaggatgtggaattgatcctgtgctgtgtaaactgtcacagagtcaccttcttcaccggtagtgttag

SEQ ID NO: 195701 - DNA, 592 bp, Homo sapiens
tcctcaaccatgggcaccagcatcagagtcgtgaggaagctcaggggtgcccggtgagtcttctccagtcagactcaggacaggaacttcaatgggattccctgactagaatggcttttagggattttgattacagccaagagagaggctggaccaggttcagtgtcatgtaggacctcacaggttttatgtatgacatttctcctgaaaatattcaaatgagtatcagcactgatctggtgctttctgactttcatttttagtggttctcgcttttccatttgcttttcctgctttctggaaaaaaggatgttgtccctgtggtctaaatcctgggactcaagccctttccctggagcttaggtggggctcaggctgtgactcctgcagccattgggagaggctgctgagactttcttctctctcattattcagsacactccactctgttttctggagacgcatctgggaatgcatgtggccattaggaatgagggcataagcttctttggtcaaaatggggtgaggatgtggaattgatcctgtgctgtgtaaactgtcacagagtcaccttcttcaccggtagtgttag

SEQ ID NO: 195702 - DNA, 591 bp, Homo sapiens
atgtcacatctgtgggtgctgcgtactccctcgatgtgaatatggaaaagttaattacctcttgaggsatctgttgagattagtgctggtctctaaggaacacccaaaatggctcaatagagccagaaagcagactggctcagggcttttgtgatggtttcgtggtgggtcagagtgaggcttcccactcacaggaaggggattgcacagtgtgaaacacccactggtgtcaaatgaggaagctcctgcgattcctaactagattcacattgtgtgataaaagacacacaatagacataacttcatggtcggatatcacaaaatgctgttaatagatgtggtaaaaaggcaactctaaatttttagtcattggagtgtgtataacacaaaaatcattttcaatattttgtaacacatgcatgcaataggacaaaggtatgtgatgagggtaaaatctcgaaagtgtgaatcttccagctaccaagtcatagggtaataactgatgtgtgctgagggaggaaaccatcatgccatagtgctaatggtataacccttggtgaagagagttcaatattttattgaagttttcat

SEQ ID NO: 195703 - DNA, 591 bp, Homo sapiens
atgtcacatctgtgggtgctgcgtactccctcgatgtgaatatggaaaagttaattacctcttgaggcatctgttgagattagtgctggtctctaaggaacacccaaaatggctcaatagagccagaaagcagactggctcagggcttttgtgatggtttcgtggtgggtcagagtgaggcttcccactcacaggaaggggattgcacagtgtgaaacacccactggtgtcaaatgaggaagctcctgcgattcctaactagattcacattgtgtgataaaagacacacaatagacataacttcatggtcggatatcacaaaatgctgttaatagatgtggtaaaaaggcaactctaaatttttagtcattggagtgtgtataacacaaaaatcattttcaatattttgtaacacatgcatgcaataggacaaaggtatgtgatgagggtaaaatctcgaaagtgtgaatcttccagctaccaagtcatagggtaataactgatgtgtgctgagggaggaaaccatcatgccatagtgctaatggtataacccttggtgaakagagttcaatattttattgaagttttcat

SEQ ID NO: 195704 - DNA, 549 bp, Homo sapiens
cagacactttgggaaaggaagattttgtgactgccccttttttggggaaagggattcaagaggatagaaaagctcttcagtatgtggtcccttagaatttcaaactacaacaagctaaccatattcaatttcaagcaatcccatatatatttgtatttttatctttaacagcctatatttcataygccagactctgccttaggtaatctcatatgctggctttgttactctctacaagaacttgcttcttgttaaatttaagattttttttaacttcagttatcctaagcattcagaaatttgcaaaatttcatcttgactgtttatctgttattgttgatgtagttgtaagaaaaaaagaaaatatattcctcatttatgtacattttcaagttgagtagtagatttttagtactaccagagtaataaaataatttgaacattgttaagctgcttaacagaaaatcaaattatggtaaatttgttcaatggaatactacacaacatttataataaataattgtctgatacatgcaacaagaaggtaaa

SEQ ID NO: 195705 - DNA, 488 bp, Homo sapiens
atttttagtactaccagagtaataaaataatttgaacattgttaagctgcttaacagaaaatcaaattatggtaaatttgttcaatggaatactacacaacatttataataaataattgtctgatacatgcaacaagaaggtaaaatatctaagtatttttgctgartaaaataaaccagacaaatgagaagatttaccatataatttcatttatataaattctggaaaataaaaactgaacttaagcaatataacaacaaggtaaaatatctaagtattgatgttcaggaaaataaagcaaacaagaatatgtactatgttattccattttaataaattctgataaattaaattgaatctacagcaatataaagaagatcagaatttaccatttggggaaatggtagaagaagggaagaggaaaggaggaggaatatggaagaatgagagggaaattttgagaattttctggttcaccttgataact

SEQ ID NO: 195706 - DNA, 349 bp, Homo sapiens
tgttcaatggaatactacacaacatttataataaataattgtctgatacatgcaacaagaaggtaaaatatctaagtatttttgctgaataaaataaaccagacaaatgagaagatttaccatataatttcatttatataaattctggaaaataaaaactgaacttaagcaatataacaacaaggtaaaatatctaagtattgatgttcaggaaaataaagcaaacargaatatgtactatgttattccattttaataaattctgataaattaaattgaatctacagcaatataaagaagatcagaatttaccatttggggaaatggtagaagaagggaagaggaaagg

SEQ ID NO: 195707 - DNA, 566 bp, Homo sapiens
cacaccactgatccctgatgaaaggctctaggctgtggccgggagaggcagtctcttcttccagagcacactctgtttgatgggagatgtcatctctgccctcgaggagccccagctgatgggggagcttttgcccttaggaagctctcagtctgatggggaagacgctgtccctgccctcaggaggctcttggtctgagaggggagacataattcattctctctgagtgccctcagtctgatgggggagacaccgtccctgccctcaggaggctcccagtctgatgggggaatattggctctgtcctcaggagcccrgtctaaggagggtgtctcagccccactcctgagggtaaggattccatggccacagtctggacagtgggccagtcacacttgacagtgggcatgttgccagcaggaccctttgggatgtgtctgagcctggaggtgagtggcacgggggctggcaaggctagggtggaggcaagcaggttccgctgtctgccgccttcacacctttctccttccacatgcatagatgagcccaccagccccagcactga

SEQ ID NO: 195708 - DNA, 470 bp, Homo sapiens
tttatgacatctacagttttgtcttttacagaatgtcaaataaaatgtatacaacatatttcaaataacctcactgaagaaggtgrcacataaagtttctcacctatataacttagaaatcagggtgttctgtaaatctaaagtataaagaaactgcacttaaacacttttttctagtcaataaacatacttccaacaggggtacaagttaacaattctaataccacgatgcatatattctaaattgtacaacaaattgaatgaatggccaatgatgggaggggttcctcactttgcagtaggtggttatggacaggcaaggaaggaaagcttgaaacattcatgtatcatcatagtacattgtagataccagtgttctaaagtttgaggcaataaacatacagaagattggatacataaatagattagatgggtccattaacatgggttaatatatacatacacatttt

SEQ ID NO: 195709 - DNA, 470 bp, Homo sapiens
tttatgacatctacagttttgtcttttacagaatgtcaaataaaatgtatacaacatatttcaaataacctcactgaagaaggtggcacataaagtttctcacctatataacttagaaatcagggtgttctgtaaatctaaagtataaagaaactgcacttaaacacttttttctagtcaataaacatacttccaacaggggtacaagttaacaattctaataccacgatgcatatattctaaattgtacaacaaattgaatgaatggcmaatgatgggaggggttcctcactttgcagtaggtggttatggacaggcaaggaaggaaagcttgaaacattcatgtatcatcatagtacattgtagataccagtgttctaaagtttgaggcaataaacatacagaagattggatacataaatagattagatgggtccattaacatgggttaatatatacatacacatttt

SEQ ID NO: 195710 - DNA, 471 bp, Homo sapiens
atttatgacatctacagttttgtcttttacagaatgtcaaataaaatgtatacaacatatttcaaataacctcactgaagaaggtggcacataaagtttctcacctatataacttagaaatcagggtgttctgtaaatctaaagtataaagaaactgcacttaaacacttttttctagtcaataaacatacttccaacaggggtacaagttaacaattctaataccacgatgcatatattctaaattgtacaacaaattgaatgaatggccaatgatgggaggggttcctcactttgcagtaggtggttatggacaggcaaggaaggaaagcttgaaacattcatgtatcatcatagtasattgtagataccagtgttctaaagtttgaggcaataaacatacagaagattggatacataaatagattagatgggtccattaacatgggttaatatatacatacacatttt

SEQ ID NO: 195711 - DNA, 485 bp, Homo sapiens
cttttagtttactgatttggcctgtgatgtgtgattggcgctgattttctcataagactgacaatagcaatgaagggttggcatagcaattaggagttcttcatgaactcccagctctcagaataatttccaaggaatctgtgttttgaatargcttgggttttatttctcactctattgaaaataattttgtgatgtatttacatcaggaaacaagacactctaacaagagagctgtttttaggtgaggtgcaaagtagtggagagatggaggtgtccttgaattctcagaattgctggaacttgaataccaagttcacctctgaaaggcagtagtctatctgtgaggatatcaatcagctctgccttcaggaatctttggatgtggaaaagatcaggagtgtgatttatttttatccatcgtggttagagggaaacttccggtcccaggaagtgggtgattttaacagaagcacctgagacct

SEQ ID NO: 195712 - DNA, 437 bp, Homo sapiens
cataaaatagagtcccgaatctggtcttgaaggacctgacttcatttacaacagagtgtggagaattacaaagcccaagagttgcttcaaaaacggtggaggctgtggtaaaatgcacttggacggagatgggtgaatgcatgggagatccaggctaaactgcagggctgctggcctgcaggagagaaccaagaagaaagagagctgggaagagttctcctgggatcagtacaaatgtcaggcactgtttgttcaaaggcgcccatgtttgtttggttccatctgtagagcaacttagacctcagtgcattgttgaaaatataaacttccaactgcaagtagtggagctcaacatctggtcctggtcagggaagagacagagagagcccagcccaaaccaatgacatgygagggtgacagtgaaatccacaactgtg

SEQ ID NO: 195713 - DNA, 537 bp, Homo sapiens
tctctcaagcacttttacacyataaaaataactttttaatcatatatgctggatttgccatttctaggctcaaatactttggttactttttgtttctttagcataaatttaaaaatccctaacatggcctgtaaggtcctgcataatgctgaggtttaacagctttttaagcatcatctcacctttctacccctttgtttattatatgtttttgctctctctggtacattgttttaccattccctcttttgcagttaactttctctttatcttattcctgtcttaaacatccacactaaaaagctatctctgaacatcttttgccccacttttttcaaacctacctaggctagcttattctttattatatactctcatagtatcttatattttatagtcatagcgtatatggtttggatgttttgtcccctccaaatcttatgtgaaaacatgacctccaatgttggaggtgggcctagtgtgaagtgtctgagtcacgggagcaaatcccgtataaatgtcttggtgctgccctca

SEQ ID NO: 195714 - DNA, 627 bp, Homo sapiens
actaacctgtacattgtgcacatgtaccataaagcttaaagtataataataataataaaaaatttaatatattcctaagaattgaaatcatatgaatcatgtattttcaccaataaaaatagaatcaatctataaaatcggtaacagaccrataataccaaagacctgaaaattaaacatcacatttgaaaacaatctgtaagttaaaaaggaaatatcacagaaaattaaaatatatatttagctgagttaaatacaaattaaaaatatctgccaattgtagctaaagcagtgctttgagaaaaaatgatagagatagatgcttttattgaaaaataaaacgtactcaaattaatgatctaatttctcaatataacaaaccactaaaggagaagcaaactaaacccagaatgagcagaagtaaaaggaaaaaagaatagtaactattagaacagaactcaataaaattgaaaacagaaaaataacaaagttaattaaacaaaaagagtctctttgaaaagaccaataaaatcagtaaaagaccaacaaaatcaaagctttagaaaatggaaggataaaaaagaaaaaagaccaaatcaccattatccaaaatgaaagaatggtagc

SEQ ID NO: 195715 - DNA, 627 bp, Homo sapiens
actaacctgtacattgtgcacatgtaccataaagcttaaagtataataataataataaaaaatttaatatattcctaagaattgaaatcatatgaatcatgtattttcaccaataaaaatagaatcaatctataaaatcggtaacagaccaataataccaaagacctgaaaattaaacatcacatttgaaaacaatctgtaagttaaaaaggaaatatcacagaaaattaaaatatatatttagctgagttaaatacaaattaaaaatatctgccaattgtagctaaagcagtgctttgagaaaaaatgatagagatagatgcttttattgaaaaataaaaygtactcaaattaatgatctaatttctcaatataacaaaccactaaaggagaagcaaactaaacccagaatgagcagaagtaaaaggaaaaaagaatagtaactattagaacagaactcaataaaattgaaaacagaaaaataacaaagttaattaaacaaaaagagtctctttgaaaagaccaataaaatcagtaaaagaccaacaaaatcaaagctttagaaaatggaaggataaaaaagaaaaaagaccaaatcaccattatccaaaatgaaagaatggtagc

SEQ ID NO: 195716 - DNA, 627 bp, Homo sapiens
actaacctgtacattgtgcacatgtaccataaagcttaaagtataataataataataaaaaatttaatatattcctaagaattgaaatcatatgaatcatgtattttcaccaataaaaatagaatcaatctataaaatcggtaacagaccaataataccaaagacctgaaaattaaacatcacatttgaaaacaatctgtaagttaaaaaggaaatatcacagaaaattaaaatatatatttagctgagttaaatacaaattaaaaatatctgccaattgtagctaaagcagtgctttgagaaaaaatgatagagatagatgcttttattgaaaaataaaacgtactcaaattaatgatctaatttctcaatataacaaaccactaaaggagaagcaaactaaacccagaatgagsagaagtaaaaggaaaaaagaatagtaactattagaacagaactcaataaaattgaaaacagaaaaataacaaagttaattaaacaaaaagagtctctttgaaaagaccaataaaatcagtaaaagaccaacaaaatcaaagctttagaaaatggaaggataaaaaagaaaaaagaccaaatcaccattatccaaaatgaaagaatggtagc

SEQ ID NO: 195717 - DNA, 627 bp, Homo sapiens
actaacctgtacattgtgcacatgtaccataaagcttaaagtataataataataataaaaaatttaatatattcctaagaattgaaatcatatgaatcatgtattttcaccaataaaaatagaatcaatctataaaatcggtaacagaccaataataccaaagacctgaaaattaaacatcacatttgaaaacaatctgtaagttaaaaaggaaatatcacagaaaattaaaatatatatttagctgagttaaatacaaattaaaaatatctgccaattgtagctaaagcagtgctttgagaaaaaatgatagagatagatgcttttattgaaaaataaaacgtactcaaattaatgatctaatttctcaatataacaaaccactaaaggagaagcaaactaaacccagaatgagcagaagtaaaaggaaaaaagaatagtaactattagaacagaactcaataaaattgaaaacagaaaaataacaaagttaattaaacaaaaagagtctctttgaaaagaccaataaaatcartaaaagaccaacaaaatcaaagctttagaaaatggaaggataaaaaagaaaaaagaccaaatcaccattatccaaaatgaaagaatggtagc

SEQ ID NO: 195718 - DNA, 448 bp, Homo sapiens
attattaaccaatgacttaaaattgaaataaaaatcatttctccccaaaatgatctctaggctcaaagcaatttcacataaaatcattaaagttgggtttctgactagtttttattaaaactcacttggaaactcacaaataacaaggaacattttgatggaaaagaagaaarttactggatttatgctactagttatcaaagaacctgatataatattaattcatacattttgctattgtcattatgacatttaaactgatcaataaaacaaaatgaagaatgtggaaacagtacaacacatacaaattcagcaccagagcaggcccactcttcaaaagatttaggtattgaataacctaaagtcttagaggataagaggcatactgctgttttttataaatgaacaagtcccaagaacaagaaaagaagaatagaactaaactgaa

SEQ ID NO: 195719 - DNA, 575 bp, Homo sapiens
gggcttgagggtaagtggggagactttgctcagagtacgaagtttcagttaggcaggatgaataaattctgtagatctattgtatggtaactatagttaatgacactgtattgtatacttaaaaattgttagcaaagtagattttaatgctttcacaacacacatacaaacacagatacacrcaaaggataagcatgtgaggtgatggatatgttaattagtttgattgtggtaattattccacaaagtgtatacatatatcaaaatatcacattgtatgccataattacaatttgtgtttgtcaatcatacctcagtaaagctggaaaaattaatgtaaaatacatttttaaaaaaggaagataaaagagaagtccagagtgaggatcacattattctttgtttataagaaaaaattagcataaatcagaaaatgtttattgttaaattaaattcaatgaaagcaagattttttatgcatcttagtaataaatatgcatcatatgtataatgatcagagaaaataataaaaaaattgttcttgatgtgacattgtttttaaatcttatttatgc

SEQ ID NO: 195720 - DNA, 575 bp, Homo sapiens
gggcttgagggtaagtggggagactttgctcagagtacgaagtttcagttaggcaggatgaataaattctgtagatctattgtatggtaactatagttaatgacactgtattgtatacttaaaaattgttagcaaagtagattttaatgctttcacaacacacatacaaacacagatacacgcaaaggataagcatgtgaggtgatggatatgttaattagtttgattgtggtaattattccacaaagtgtatacatatatcaraatatcacattgtatgccataattacaatttgtgtttgtcaatcatacctcagtaaagctggaaaaattaatgtaaaatacatttttaaaaaaggaagataaaagagaagtccagagtgaggatcacattattctttgtttataagaaaaaattagcataaatcagaaaatgtttattgttaaattaaattcaatgaaagcaagattttttatgcatcttagtaataaatatgcatcatatgtataatgatcagagaaaataataaaaaaattgttcttgatgtgacattgtttttaaatcttatttatgc

SEQ ID NO: 195721 - DNA, 582 bp, Homo sapiens
ttaatttttaaagtttaatatataaacaaattttatatttggtaataccatttttctatgtttcaaatccagttaattgcatttgcctattcatcagtgaaattcaacagtaaattcaaagactgaaaactgatttttgagttttggttaaattttggttgcagataaaattttaataattactttcaaaaattaactttaagtcaaaacctcttacttcttacttagaaatatcaatcaacctaaaatcaatctccttaacattggttgtctacaaatcattactgcgtaatgttcccacgaattgttgagaataaacaaaaaatcaaagatggctgcatttttgttatactaacaatttgtagtatctagctaaaaatatgacttccctcttgactttacatatattgattcagctttcaaattrccgtattttgacaaatattaccttaatatttaaaacatattactttgattctgtaatgaaaatgtaaaaacaaacctcaatacataaggttgacacatttcaaagccagtaaaattgtacattaattttagtatgtactgtcaaatttaattagg

SEQ ID NO: 195722 - DNA, 320 bp, Homo sapiens
catataaactatgtctagttttcctatttctagctcttagctttatgtctggaaatcagatagaactaagcaaataatttaatgaatgaatgtattcatttattagggctgtcataaaaaggccccaaaactagatggtttaaaaataacagaaacttattgtctcacagttccagaatctggaagtctgaaagaaggtgtcagcagggccctgctctcttgaagtctctagggtagaatattyccttgcctcttgatagcttctggtagcacgagcaatccttggcattccttggtttatagatgcatcactccaatct

SEQ ID NO: 195723 - DNA, 506 bp, Homo sapiens
atattttcacccatagtacaaatctgtgctatatatttataatttctaattcataaaatgtttctgtagatttttggtttgtccttaagtgttttatggggaatgctatttcttatttcacacttgactttacattttccctatttgtagaatttttttattttttgatacttattgtctaagaaactttttttgacacacagactatacttacagcttgcacagtataagtgtyatttactgataatatatgtttttaattgattctatgggcttgttcagcacaattccttttttatctttttgtttttactaaaaattatttaatctgtgatcaaatatatgtgaatatgttttatattttgacaaaattattctattatttgaaaattaatggagcttgtcttaataatagaaccatgtccttactgtaaaccccgtcctccctgcaaaacctagaccaataagtgacatgaatagggcaggtatgtactctgtaaatgtgg

SEQ ID NO: 195724 - DNA, 563 bp, Homo sapiens
agatacaattgaaatacattttgggtgctgaaagcaggtggaaaacagagagttttagaagagaggtaacaagtgcagaatttaagaggtttttagatctgttacaataaaaacattagtctgttccaatcggcaagtttatcagatagttttaaagtggtgagtcaggattacatattgagagcttcacaaagaggttcagttgtctggtaagaaagacacattaaaactacagagctttggagaggatatctgtattctaaagagaattggtttaaaatattttgtcagaaagaaaatgtgactaggaggttttatttctttcaaaatattttttcttgtgactatttaaatctgcaattttctttcttttttatttttattttttgaagtgtggtattggagagttgttaagtgaatgggatcaggccagataaccagaattggaatccagactccactcawgaatcatctaagtttttccaagttgcttaacccttctgaactctagttttattgttacttaacccttctaaactctagtttcattaacagtaaagcaa

SEQ ID NO: 195725 - DNA, 547 bp, Homo sapiens
atcttccattcttttctttggaacacaaattaatgagagaaacattccttatatatttggagatgactgacatgattccttgtgcctggctatgtttgaactgcttcagaatttgctttaccagtgtgcattatagaaatctcactgaaagaatgtctggaaggcattttcactgattatgtgcctattaattcttcatctaaaacctcctatagtttccatatagactcagcctaaaccttacgtttctctaaatggttgatcatatttagaaaaaaggagcttaatatatgtgtccagataagtctgcaacttaagactcatagtgataccagtgtttctgtgtaccttcttgtttgcataattaattaccctagggtaaagctaatagattcccaaattaattaggttcacaaaatgtctrtgatagaaatgtgaatccacatgcttctacacttagtatacagttaccttataactgcacaagaacattaaaatatttttaatggtgagtaatacagtatacatggctatgcacactaacaga

SEQ ID NO: 195726 - DNA, 457 bp, Homo sapiens
attccaaaatctgccacagacaccacaaaaaaagaaaatgtcaggccaatatccttgatgaacacgatgccaaaatcctcaacgaaatactmgcaaactgaatttagcacatcaaaaagtgaatccaccacaatcaattaggctgtatttctggcatgcaaggttggatcaacatatgcaaatcaataaatgtgattcatcacaaacagaacaaaaaataaaaatgacatgattgtctcaacagatacagaaaaggcttttgataaaattcaacatccctttatgttaaaaactctcaaaaaactaggcattaaaagaatatacttcaaaataataagaaccatctaggaaagcccacactaaacctcatactgaatgggcaaaagctggaaacattccccttgaaaatcagaataagaaaaggatgccctctctcactactgctgttcaatatagt

SEQ ID NO: 195727 - DNA, 457 bp, Homo sapiens
attccaaaatctgccacagacaccacaaaaaaagaaaatgtcaggccaatatccttgatgaacacgatgccaaaatcctcaacgaaatactcgcaaactgaatttagcacatcaaaaagtgaatccaccacaatcaattaggctgtatttctggcatgcaaggttggatcaacatatgcaaatcaataaatgtgattcatcacaaacagaacaaaaaataaaaatgacatgattgtctcaacagatacagaaaaggcttttgataaaattcaacatccctttatgttaaaaactctcaaaaaactaggcattaaaagaatatacttcaaaataatragaaccatctaggaaagcccacactaaacctcatactgaatgggcaaaagctggaaacattccccttgaaaatcagaataagaaaaggatgccctctctcactactgctgttcaatatagt

SEQ ID NO: 195728 - DNA, 496 bp, Homo sapiens
acccacagcattttacccacaacagaacttctttcaaacattggaatcaatcctctcaaactctatcactgctttataaactaagtttttgtaatgttctaagtcttttgttttcatttcaacaatgttcatagcatttttattatgagtagtttccatgtcaagaaactattttctttgctcattgttagaagcaactcctcattcattaaggtttaatcatgagattgtagcaaccttgtcacatctttagctttagactacttctaatttgtttccttcctactcccatcaccttctaatsttacttcctccactgaggtctggaatccctcaaagtcatccatgagagttgaaataaacttcttccaaactcctgttaatgttgatatttttatctcctctcatgaaatacgaatgttcttaatggaatctacaatgggaattccttccatgtggtttttgatttactttgcccacatccattgagaggaat

SEQ ID NO: 195729 - DNA, 404 bp, Homo sapiens
ggctgttagggtgggctctaatccaaccttactggtctcctttaaagaagaggaaatttgaacacacagagacaatagggtatgtcaggcacagaggaaagaccacgtgaggacaaagaggagggcagccatctggaagccaagaaragaaggattagaagaaactgaacctatcttcatcataaacttggacttgtagccttcagaactgtaataaataaagttctgttgtttaagccacgcagcctgtggcgctgtgttaagtcagccttagcaaaggaatatgttgacaaagcaggtaagacactccctgcttcatttcaacattgtaaaagttgctgtatccaatgcaaaggagtatgtgttttaccatagaaaaaggctattcctgtatatccagacaa

SEQ ID NO: 195730 - DNA, 486 bp, Homo sapiens
accagttagagttgtgaggcctcttttccaggccctagctcccagacatttctagacaaaccctgggccagaagggaacccactgcattaaagggataacccagtcccctkgcaggattcatcacctgctaatggaagagaccttaaaccatgaataaccagcactaatagccaactacttcattgaggaccttagtggagacactgagacttggcattgtcaaacatgattgtaagtttcctgaagcctcaccagccatgcttcctgtacagcctgtggaacggtgagtaaattaaacctcttttctttataaattactcagtctcaggtatgtctttatagcagtgagagaatggacagatacaactttactattgaattctacaaaacatttaaagaagaactaacaacaatactactcaaagtaactcaaagtatccccaagaatagaagaagggatacttccaaacttattctacaaagcc

SEQ ID NO: 195731 - DNA, 486 bp, Homo sapiens
accagttagagttgtgaggcctcttttccaggccctagctcccagacatttctagacaaaccctgggccagaagggaacccactgcattaaagggataacccagtcccctggcaggattcatcacctgctaatggaagagaccttaaaccatgaataaccagcactaatagccaactacttcattraggaccttagtggagacactgagacttggcattgtcaaacatgattgtaagtttcctgaagcctcaccagccatgcttcctgtacagcctgtggaacggtgagtaaattaaacctcttttctttataaattactcagtctcaggtatgtctttatagcagtgagagaatggacagatacaactttactattgaattctacaaaacatttaaagaagaactaacaacaatactactcaaagtaactcaaagtatccccaagaatagaagaagggatacttccaaacttattctacaaagcc

SEQ ID NO: 195732 - DNA, 486 bp, Homo sapiens
accagttagagttgtgaggcctcttttccaggccctagctcccagacatttctagacaaaccctgggccagaagggaacccactgcattaaagggataacccagtcccctggcaggattcatcacctgctaatggaagagaccttaaaccatgaataaccagcactaatagccaactacttcattgaggaccttagtggagacactgagacttggcattgtcaaacatgattgtaagtttcctgaagcctcaccagccatgcttcctgtacagcctgtggaacggtgagtaaattaaacctcttttctttataaattactcagtctcaggwatgtctttatagcagtgagagaatggacagatacaactttactattgaattctacaaaacatttaaagaagaactaacaacaatactactcaaagtaactcaaagtatccccaagaatagaagaagggatacttccaaacttattctacaaagcc

SEQ ID NO: 195733 - DNA, 451 bp, Homo sapiens
acaatcctcgtttttaactcactcttaatcagaaatcccaagaaaaatggggcataaacaagatgagcaatctagtaaagatatcacaccttggagagaggtagtacaaaagggtggatatgtttttgatagacaaatggagtagcagtcttcagaaaatgtgacctgtaatagaatcttgtgtgacatggttcgcccagttttcacatgtgtagtagtacaagggaaagataatattttaattaatatagaatgatggtaccatattgattatgaggaaaaacacttctcatttaagaaggtagggtaaagaaatgaaactctcacaaggtcagctaaggtttcttagaatctctacattttggctagataaagaataattttaggtagaaaaacattatagctacrtatttaaattcttattgtttaaaaattagtttagaatagacca

SEQ ID NO: 195734 - DNA, 433 bp, Homo sapiens
atgattgaattaatgaatgcatgagttcacagaaagctattcctggctgggcacagttgctcaagcctgtcatttcagcactttgggaggccgaggcgggtggatcacctgaggtcaggagttcgagaccagccttgccaacatggtgaaaccccgtctctactgtaaacacaaaaaaaattagctgggcatggtgttgtgcacctgtaatcccacctacttgtgaggctgaggcaggagaatcgaggaggcggaggttgcagtgaaccaagatcgcgcctctgcactccarcctgggtgacagagtgagaccctataggaaaaaaattataaaataaaataaaataaaataaaaacatataaagctattccttacagtgaacatgcaacaaataaatgtagaagaaattatggaattataaaagtactgcta

SEQ ID NO: 195735 - DNA, 370 bp, Homo sapiens
ccccaaccacctcctccatcagggaggccagcccatgccaaactctgtgttgctaccctccctgctctgttcctaccctgtccgtccttcagggcatgaaacagacacaggaaaagtacattgaaaatgtgtcatgtggccaggtgcagtggctcatgcctgtaatcccagcactttgggaggmtaaggcgggagaatcatttgagtccaggagtttgagaccagcctgggcaatgcagtgagacccagtcttaaattaaaaattattttaattattttaaattttatttttaaaaagatataaaatattttaaatttttaaaaaaggaaatatgtcatgtatattgtaaagctgcaggacccaaaccat

SEQ ID NO: 195736 - DNA, 573 bp, Homo sapiens
agaggagttgactcagttttagttggccagaagctacagctttgaccttgcccactgacccaacataggcatatcctcaattatgctagtggacagagtgtgtctgtgcatctgtgtgtgtgtgtttctgtgtgtgtgtgtgtgtgttactaccccagaaacggcaactcaaagtacatgttccatgtttaagaaggttgccagcagctgttgaggattgattcaccccttatgcacaatttaacatcaaaccaaggtctgggacacatctttttccattagcatctcttaaaaatactatccaatcytaagaacgaataagtactatctggacagatgccacactaattggaaggctaccagaaggacatattctccctccattttgtccccagaaattagcacaatctggtaaaagtcaggaatatgagctccctggattccacagcatgtgactttattgatggtgggccttaccacattacaggtaatgtgagcttcagaaccctctttctctctgaatagccagcaatgtcagggcaaagctgaaatcacttcatcataacagtttga

SEQ ID NO: 195737 - DNA, 573 bp, Homo sapiens
agaggagttgactcagttttagttggccagaagctacagctttgaccttgcccactgacccaacataggcatatcctcaattatgctagtggacagagtgtgtctgtgcatctgtgtgtgtgtgtttctgtgtgtgtgtgtgtgtgttactaccccagaaacggcaactcaaagtacatgttccatgtttaagaaggttgccagcagctgttgaggattgattcaccccttatgcacaatttaacatcaaaccaaggtctgggacacatctttttccattagcatctcttaaaaatactatccaatcctaagaacgaataagtactatctggacagatgccacactaattggaaggctaccagaaggacatattctccctccattttgtccccagaaattagcacaatctggtaaaagkcaggaatatgagctccctggattccacagcatgtgactttattgatggtgggccttaccacattacaggtaatgtgagcttcagaaccctctttctctctgaatagccagcaatgtcagggcaaagctgaaatcacttcatcataacagtttga

SEQ ID NO: 195738 - DNA, 541 bp, Homo sapiens
taccctaagatagtcattcctttgactgaacacccttccggttaaaaagtatcttcagaagaatagaacattatcttgtccatcccaatgtgaattatttcataacattctcccaatttgacagctagctaagagccaactctagcctgcactcaaagtaatatgaaccataaaaggtcacaagatgggttcagagcatgagacaagcaagaaggcacagccaagctgagattctgaaaatggggcttargaaaacaagtgctgtggttgaatccagaaattcaaggtgcacagagctccagggaaaagaggagtgcaatcaaaactccagccaaaaagaggagagaggagtctcctgggatgttcttcccttctgggtttccagagtctacctcatggcactgccaactggttttcatctctgaagagctatgcctgcatccctgtgaagacggtggctgtcattaccagagaacacatgcacagtaggaattcctgccacaatgtgaggaggagcaagaggagaaagagtgaggcggta

SEQ ID NO: 195739 - DNA, 550 bp, Homo sapiens
agatagtcattcctttgactgaacacccttccggttaaaaagtatcttcagaagaatagaacattatcttgtccatcccaatgtgaattatttcataacattctcccaatttgacagctagctaagagccaactctagcctgcactcaaagtaatatgaaccataaaaggtcacaagatgggttcagagcatgagacaagcaagaaggcacagccaagctgagattctgaaaatggggcttaggaaaacaagtgctgtggttgaatccagaaattcaaggtgcacagagctccagggaaaagaggagtgcaatcaaaactccagccamaaagaggagagaggagtctcctgggatgttcttcccttctgggtttccagagtctacctcatggcactgccaactggttttcatctctgaagagctatgcctgcatccctgtgaagacggtggctgtcattaccagagaacacatgcacagtaggaattcctgccacaatgtgaggaggagcaagaggagaaagagtgaggcggtagccaatagcaggggag

SEQ ID NO: 195740 - DNA, 595 bp, Homo sapiens
tttaggtttctgtacagccaataataatctcctaatggcttcctgatgtttgataggtgttccctcggaagttaggaattccctttctctccatattgctgtgtaggcatggaggactagataagcatacttagagtctgtatatacatttacccttttttcttctaattttagtgcccgagtgaggcstattaattctgccagctgagcgctagtttctggagtaaggggattactttcaagtattccattatcactgaccactgcacaccccactttttgaagtcctttttctaccaaggaaccaaagagcttccatcagtgtacaagttgaggtcgggatcagtcaagggaacctctagaaggtcccctcaagcggcgtatgtttaagcaatcacctgttgacagttatgttctatcttttcttcattgtctggaagaaatgtggctgggttaagagttgcacaagtgtgcagttgcagcactggcccttcaagtaatagagcctgatatttaagcaaactgttgtctgacagccacaagtctcctttagcagtgagtatgctgtttacatcatgagaggtccacacagtaa

SEQ ID NO: 195741 - DNA, 587 bp, Homo sapiens
aagtttacctaggaccccagagcacttcatcccatggtgtgaggcttgatgaggaactcagtaccaactccctggtataggcaattcccctctggctagggctgatccaaatgctccctccatacatgagtgctggcatgactttcttcactgctgtgacagtgcagcactgaattccatgtaaagtcccccagtcactgtgctgtctctccytgatgcgcacagattttctctttgtgccactcagctgcttctggacggtgtgggagaggggtgacatacacaattcaagactgtctcccctgccatcctcattgtctcttttagcaatacgaagctaaaaccagatactgtgtttgctgaactgatttattgttcttatgacggtacttttctgtgtgcagatactttttaacatttggtgttccagtgggtggaggtggggatgaacagtgtagacttctgttgcaccatcttactccgccctctttccatgaactttttgaccatttatattagaattgcagcttgatatatttataatgttttggcagtttatcacttagtgtagttttcttactggtttt

SEQ ID NO: 195742 - DNA, 587 bp, Homo sapiens
aagtttacctaggaccccagagcacttcatcccatggtgtgaggcttgatgaggaactcagtaccaactccctggtataggcaattcccctctggctagggctgatccaaatgctccctccatacatgagtgctggcatgactttcttcactgctgtgacagtgcagcactgaattccatgtaaagtcccccagtcactgtgctgtctctccttgatgcgcacagattttctctttgtgccactcagctgcttctggacggtgtgggagaggggtgacatacacaattcaagactgtctcccctgccatcctcattgtctcttttagcaatacgaagctaaaaccagatactgtgtttgctgaactgatttattgttcttatgacggtacttttctgtgtgcagatactttttaacatttggtgttccagtgggtggaggtggggatgaacagtgtagacttctgttgcaccatcttactccgccctctttccatgaactttttgaycatttatattagaattgcagcttgatatatttataatgttttggcagtttatcacttagtgtagttttcttactggtttt

SEQ ID NO: 195743 - DNA, 478 bp, Homo sapiens
ttctattatgctttctgaaatatcatattctacccaacatatattctattctttcttccctagcatccttccctacctcctggccacagctaccatatcaaacttaaatttacatttcaaattaagattagtaatcaagcaagcccataaatttaaaccaacatttcagtagccaaggtaaacatttttggaacactgcagaaggaggatcgtggaatagttaaggcaaagataatgaaagctatttcccagaaaaagatgggagaaactaaatgatacattttagctttatcccaaaattaatttagaatttctcattttatagtccaatcattcaagtattaaaaaatccttctatamaaaatttgttatgaaatgtttcattcagcccaggagtgaaatttttcctgtgttcaagaaaaagtgaaaagaaaaacaacagatgttgaattataggaataaaaatttcagatggttt

SEQ ID NO: 195744 - DNA, 475 bp, Homo sapiens
ttaactagggtgagatgatattttattgtagtattgatttgcctttctctgacgatcaatgataataagcaccttcatacctgtttgccatttgtgtgctttcttgaaaaatgtttattcaaatcttttacccatttttaatcagattattaatttttatagagttgttgaarctccttatatagtctatttattactcctttgttagatggatagttcgcaaaagttttggcccattctgtgggttttctcctcactttattaacttttttttctgtgaagaagctttctaacttgatgtggttccatttgtccatttgtgctttggttgcctgtgcttgtagggtattactcaagacatttttgctgagactaatgtcctggagagttttctcaatgttttattttagtagtttcatactttgaggtcttagatttaagtcttgaattaagtttgatttgatttttggtgaaa

SEQ ID NO: 195745 - DNA, 475 bp, Homo sapiens
ttaactagggtgagatgatattttattgtagtattgatttgcctttctctgacgatcaatgataataagcaccttcatacctgtttgccatttgtgtgctttcttgaaaaatgtttattcaaatcttttacccatttttaatcagattattaatttttatagagttgttgaagctccttatatagtctatttattactcctttgttagatggatagttcgcaaaagttttggcccattctgtgggttttctcytcactttattaacttttttttctgtgaagaagctttctaacttgatgtggttccatttgtccatttgtgctttggttgcctgtgcttgtagggtattactcaagacatttttgctgagactaatgtcctggagagttttctcaatgttttattttagtagtttcatactttgaggtcttagatttaagtcttgaattaagtttgatttgatttttggtgaaa

SEQ ID NO: 195746 - DNA, 599 bp, Homo sapiens
ttaaaatttaccacataattggaagtaaaatactcctcagcaaatgcaaaagaacggaaatcataacagtttctcagaccacagtgcaatcaaactagaactcaggattaagaaattcactcaaaacctcagaactacatggaaactgaacaacctgctcctgaatgactaccgggtaaataacgaaattaaagcagaaataaataagttctttgaaaccaatgagaacaaaggtacaatgtaccagaatctctggracacagctaaagtagtgtttagagggaaatttataacactaagtgcccacagaagaaagcaggtacttctttttttaaagtgatttttccataggttactggggaacaggtggtgtttggttacatgagtaagttctttagcggtgagttgtgagatcttggtgcacccatcacctgagcagtatacactgcaccctatttgtagttgtgtgttctttgtcccccttccccctttccccccatgtccctgaaatccattgtatcattcttatgcctttgcattttcatagcttagctcccacatatcagtgataacatacaatgtttggttttctattcctc

SEQ ID NO: 195747 - DNA, 599 bp, Homo sapiens
ttaaaatttaccacataattggaagtaaaatactcctcagcaaatgcaaaagaacggaaatcataacagtttctcagaccacagtgcaatcaaactagaactcaggattaagaaattcactcaaaacctcagaactacatggaaactgaacaacctgctcctgaatgactaccgggtaaataacgaaattaaagcagaaataaataagttctttgaaaccaatgagaacaaaggtacaatgtaccagaatctctggaacacagctaaagtagtgtttagagggaaatttataacactaagtgcccacagaagaaagcaggtacttctttttttaaagtgatttttccataggttactggggaacwggtggtgtttggttacatgagtaagttctttagcggtgagttgtgagatcttggtgcacccatcacctgagcagtatacactgcaccctatttgtagttgtgtgttctttgtcccccttccccctttccccccatgtccctgaaatccattgtatcattcttatgcctttgcattttcatagcttagctcccacatatcagtgataacatacaatgtttggttttctattcctc

SEQ ID NO: 195748 - DNA, 584 bp, Homo sapiens
gcttatctttttattgccctgactgtgtctttcatagaggagaaaattttaatttgaatgaaatccaccttatccccttttttcatggactgtgcctttggtgttgcatctaagttgtcatcaccaaacccaaggtcatccagattttctcttatctgctatgagttatatatttttccgttttacatttagatctgtgattcattctgagctcatttttatgaaggttttaaggtctgtctgtggatttattttgtgtacatggatgcccagttatttcagcaccattaattgaaagactatgtttgctccattttatcgaccttattcctttgtcaaagatcagtcaactatatwtatcttggtctgtttctggtctctgtattctgtttcatttatctatttgtctatccatgttattgagatgagatcttgctatgttgcctaggctggacttaaacttctgggctcaagaaatactccccactgagcttctgaaataactggcactacagacatgcactgccatgacagtgccagacttatctgtctactcttcttgccaatatcacactgtcttgatt

SEQ ID NO: 195749 - DNA, 569 bp, Homo sapiens
tctcagccacacactagaggggcattctttgcatatctctattgttctgtctgtgcagctttctcctctgtggtaccctgtactgtgaattctagccccyttgttctccctggactttcagctcccttaccttatgtcagggatgctaaggattctccacctgaattattttattctgcattgcagcctggaaactcaaagaaacaatttggagcaagcacagtgctcagtttatttgtttccccttctctctgttgtcactttccctcgttgtttgatatctagtgtcctgaaagcaattgattcgcacatttttttttctgtttgggttttttatggttgttgtttcaggaggaaaggcaaatctggtccctgtcatcctttattattcaaaaacagaattctttattatttgattttaacataaatttgcataaataaagtaagtgattttggtaaaaaatcagctttatggtcagaaacacctgtgttagaatttcaatttgcaaccttaaacatcttcatgcccttgggcaatttatttaacctaagataatatctgagtttac

SEQ ID NO: 195750 - DNA, 380 bp, Homo sapiens
ttttatatttaagtctttaatccatctggtgttgatttcyttatatggtgtaaggaatgggtctggcttcaattttctccatatggctagtcagttatctcaggatcatttattgcatagggagttgtttccccattgatagcttttttcagctttgtcaaagataagatgattgtatgtttgctgccatacatctgggctttccattctgtttccttgatctatgtgcttatttttgtaccagtaccatgctgttttggttactgtagcccagtattatggttggaagtcaagtagcatgatgccttcagctttgttctttttgcttaggattgccttggctatttgggctctttttggttctatatcaattttaaaat

SEQ ID NO: 195751 - DNA, 652 bp, Homo sapiens
cagcaaatatggcagtctgcttctccctctggaagctctgtcccagggaggtatgcacctgttgctggcccaaactcatctataagaggtggctggagacctgggttgggagttctcccctggtgagggggaatgggattggtgatctgcttaaaaaaacagcctggccacatttttatagagcaactttgctgtggtggggatccgctgcagctcctgatcattttggactcttcaaagcctgaagggcagaacagctaaattgcccaaatagcaaagatgatggtccacccctccctctgggagctccatctcagagaggtttgaaagctttgtcagccagagaacaccagtgagagcagctggagtccccagttgggaggtcctgcaaagggctcagttttaatggtttaagtcagacttttgttcaattgayctgaaaattttctacttatacagatcaagtaagaatttactaagattcatatttatttcacttctaagaatgccatggttaactagccatcactgtgtatctccatgagtcaaactattctgattgttgatttgcttctgttttccactacaataactatgcccaccttgccttcaacatatgagtgccaccaattggcctctgtcaacctgggat

SEQ ID NO: 195752 - DNA, 652 bp, Homo sapiens
cagcaaatatggcagtctgcttctccctctggaagctctgtcccagggaggtatgcacctgttgctggcccaaactcatctataagaggtggctggagacctgggttgggagttctcccctggtgagggggaatgggattggtgatctgcttaaaaaaacagcctggccacatttttatagagcaactttgctgtggtggggatccgctgcagctcctgatcattttggactcttcaaagcctgaagggcagaacagctaaattgcccaaatagcaaagatgatggtccacccctccctctgggagctccatctcagagaggtttgaaagctttgtcagccagagaacaccagtgagagcagctggagtccccagttgggaggtcctgcaaagggctcagttttaatggtttaagtcagacttttgttcaattgacctgaaaattttctacttatacagatcaagtaagaatttactaagattcatatytatttcacttctaagaatgccatggttaactagccatcactgtgtatctccatgagtcaaactattctgattgttgatttgcttctgttttccactacaataactatgcccaccttgccttcaacatatgagtgccaccaattggcctctgtcaacctgggat

SEQ ID NO: 195753 - DNA, 577 bp, Homo sapiens
tttttgaacttattgtaagataatagagcaactaagccaccccaagccactgaaagggggtaaaatatctgagtgtcagcatctacccaaacctataagagaaaataatttaatattttaaaacatatactcaattttttatttgtataagtatctcacatatgcaaattaatatattatacgtaacagtgaaatgaacacccaaatgccactactcagcttaagaaataaaatattactgtcccttcttgattacatcaccctatcaccctccagtggtaattgctatcctgacttttgtgttcatcatttctttgttcttttttatactaggtttgaatgttttggaatttatagaaaagttattttaatgcatgtaaacatatacaatgtgcacttttctatttggtattgtgagatttatccatcagcaaattgaactatataaagtgtccactttatgattctaaaatgaaagaatataagcaaatktatttgtttaaattaaatatatatagttcttttaatcattctttattgccacaatgcatatgtcacaatttatcctttctcctgt

SEQ ID NO: 195754 - DNA, 621 bp, Homo sapiens
gttaggatttaaacatatcattttgggacatacaattcagtctgcaacacattccaagaaacatctaatcaaattttagaaaagcacttataaagagaaataacttaaaggcaaaagtattgggcacagcagcttgaggctaatgaattacagccaggacaagcaataaatgaaaaaaaagcctgagaagaaagacattgaaaaagtagatacatcggggggaggtgtaggcttgttaaacgtttctgcatatatcatgaaattgagaggagcaagaggatgcccaggggtgcaaccatgaacagaaaaggcctgagaagaccctaatcttttacttcaggctgatctccatgatctggcaagcataaagtgaagactaagacatagttgtaaatggcctggctaagtactgaaagagtactccagcacrgaagcaatctgcaataactgggaaagttttttttttttttaattttatctttattttattttctctttcactggctccaagaatttaaggaaaccttgtcaatattctatttgatcaatgtactaacagaacatagattgcaatggcacacaggacaaagaatacaaacttcaaaaatagtttagaaaagt

SEQ ID NO: 195755 - DNA, 529 bp, Homo sapiens
ttgctctttttgcttattcttgctttggctatgcagtctttcttttggttccatatgaattttagattttttttccaattctgtgataaatgatggtgatattttgattgaaattgcattaaatttggccgtaggtcattttcacaatattgattctactcatgcatgaacatggaatatatttcaatttgtttgttcatctattatttctttcagcagtgttttgtcattttccttgtrgaagcctttcacctccttggttatgtgtatttctaagtattttattttatttgcagctattgtaaaaaagattgagtttttgatttgattctcagcttgctcactgttgatgtatagaagagctactgatttgtgtacattaattttgcatctggaaactttgctaaattctcttaccagttctgggagctttccagatgagtcttcaaggtttttgaggtaaatgatcatatcataagcaaacagtgacagtttgacttcctctttactgatttggatgccctctctt

SEQ ID NO: 195756 - DNA, 570 bp, Homo sapiens
tttaagtggagcatttaggccatttacattcaaygttatgattgagatgtgaggcaccattccattcattgtgttatctttttttactgtgtaccttggttttttgtttttgtttttaatttttatttatttatttattttgagatggagttttgcttttgttgtccaggctggagtccaataatgtgatctgggctcactgcaacctctacctcctgggtttaagcgatactcctgcctcagccgcctgaatagctgggattacaggcatgcaccaccatgcctggctaattttgtatttttagtagagatggggtttctccatgttggtcaggctggtctcaaactcccgacctcaggtgatccacccaccttagcctcccaaagtgctgagattacaggcatgagccatcacacccagccttgttttttaagttgtatttttgttttataggtcctgtgagatttatgctttaaagaggttctgctttgatgtgtttccaggatttgtttcaagatttagagctccttttagcagtccttgtagtagtgccttggcagtggtgaatt

SEQ ID NO: 195757 - DNA, 583 bp, Homo sapiens
agaccttcattttctccagtgggggtttgtgtttgggggtggaagatctcactttcccacttctgcagtttgggcactgacattatttggtgtgtcgcctgggttctgaaggagcaatccccttctttcagaggggttgttgatcctcttgggcaacctggtttattcctgtagtcgttctggaattaaaattcataatgcaatcctccatacactgttctgtccatctaaatgagagctgcaatctcttcctgcctcctgtctgccttgatgggatcactttcttaacaaactgcttgcacattattctttaggactgagtgctgctgggtgagactaacctagggcagagattaaagaaaagttttacaaaattmaagaggatgtaagggacatttttttccttatgaagtgacaatttctaatagaagatatctttaaggaggattgcaaagagataatgagacacatttctaggacatttaaaattatacatatttggatcaaatttttcagggatatgggtagtgcttattcatttattaaaacataactatttaaatagaattagtttttaaaatat

SEQ ID NO: 195758 - DNA, 566 bp, Homo sapiens
gctaaagctttatcatcctatgtaatggggaggcacctatggatgcaagtagagattacccccttatatcaaccacattaaatccataaagtttccccaaagcctttcctgcctcagcatctaacttccttcttctgagtctctggagtcccagcgcggcaggaaaatggaaatcataatatagcgttcatagatacagaatggcagcgtcaggagcaactacagttcttagtaagagcatcacagaccctctcagccaygaattaacttgctctttttctacctccctttgtaactatagctacccttcttagggcctcccatcttttttctgaggccctagtttggtttctggctgaaactacatgggagttgcaggcacttctctcaccaccagatggtgataaagagcctatcaggataatgaattctgagatttcccaactccggcatagttaacatttagagccagataatttattgtgggaaactctctgtgcgttataagatgtctagtagcacctctggcctctatccattaaatgtgagtagcactattcacagtt

SEQ ID NO: 195759 - DNA, 567 bp, Homo sapiens
tggtagaaggaccacaggaatagggaggaactgcttttccagaaagcagctgttggcrttgtggtacccaatcccatggagaagccaaggagaaggacaagggcctaagattgacaggagtctatgtgcattgtgaaactggatagataaagccaactgtgaacgtgcagttaaagattttgaagtgaagcatcctttgtcaatcatttccccatatatggcatctatgttttcatatttcactggtttccactagcctcttatggggccattagtaccttaatggttaaaaggtataagaacatgcaatggacatatcatcactttttagatggccctttaggatattcatcatctgatagatgcaaaaatgcgttactgggagccagcagagcacacagggtctaaagacaagtattgcgatttccaccaggaagcagatacccatgcctgggctgtagcacagtccttattggttctcttttcgggttcagaaaattaagaatagacaaattggaacaggctatgaagcccaaacattatactagggaatctggcagaccgagt

SEQ ID NO: 195760 - DNA, 567 bp, Homo sapiens
tggtagaaggaccacaggaatagggaggaactgcttttccagaaagcagctgttggcattgtggtacccaatcccatggagaagccaaggagaaggacaagggcctaagattgacaggagtctatgtgcattgtgaaactggatagataaagccaactgtgaacrtgcagttaaagattttgaagtgaagcatcctttgtcaatcatttccccatatatggcatctatgttttcatatttcactggtttccactagcctcttatggggccattagtaccttaatggttaaaaggtataagaacatgcaatggacatatcatcactttttagatggccctttaggatattcatcatctgatagatgcaaaaatgcgttactgggagccagcagagcacacagggtctaaagacaagtattgcgatttccaccaggaagcagatacccatgcctgggctgtagcacagtccttattggttctcttttcgggttcagaaaattaagaatagacaaattggaacaggctatgaagcccaaacattatactagggaatctggcagaccgagt

SEQ ID NO: 195761 - DNA, 567 bp, Homo sapiens
tggtagaaggaccacaggaatagggaggaactgcttttccagaaagcagctgttggcattgtggtacccaatcccatggagaagccaaggagaaggacaagggcctaagattgacaggagtctatgtgcattgtgaaactggatagataaagccaactgtgaacgtgcagttaaagattttgaagtgaagcatcctttgtcaatcatttccccatatayggcatctatgttttcatatttcactggtttccactagcctcttatggggccattagtaccttaatggttaaaaggtataagaacatgcaatggacatatcatcactttttagatggccctttaggatattcatcatctgatagatgcaaaaatgcgttactgggagccagcagagcacacagggtctaaagacaagtattgcgatttccaccaggaagcagatacccatgcctgggctgtagcacagtccttattggttctcttttcgggttcagaaaattaagaatagacaaattggaacaggctatgaagcccaaacattatactagggaatctggcagaccgagt

SEQ ID NO: 195762 - DNA, 567 bp, Homo sapiens
tggtagaaggaccacaggaatagggaggaactgcttttccagaaagcagctgttggcattgtggtacccaatcccatggagaagccaaggagaaggacaagggcctaagattgacaggagtctatgtgcattgtgaaactggatagataaagccaactgtgaacgtgcagttaaagattttgaagtgaagcatcctttgtcaatcatttccccatatatggcatctatgttttcatatttcactggtttccactagcctcttatggggccattagtaccttaatggttaaaaggtataagaacatgcaatggacatatcatcactttttagatggccctttaggatattcatcatctgatagatgcaaaaatgcgttacygggagccagcagagcacacagggtctaaagacaagtattgcgatttccaccaggaagcagatacccatgcctgggctgtagcacagtccttattggttctcttttcgggttcagaaaattaagaatagacaaattggaacaggctatgaagcccaaacattatactagggaatctggcagaccgagt

SEQ ID NO: 195763 - DNA, 363 bp, Homo sapiens
agatctgatggttttataagtgcagtttcccctgttcttctctctcctgctgccacgtaagacctgcctgtttccccttctgccatgattgtaagtttcctgaggcttccccagccatgcagaactctgagtcgattaaaccctttttctgtataaattactgtgtcttgggtatttctttatagcagtgtaaaaacagactactataccccttatcagttctgagagtgtcatcccactatgaattacttgacctcyaaaatttcattatttaaattaagtccaggcatggattaaactcctaggtgtaatctgttaagtataccttctggggaagtgttggtctccatctacagactggtg

SEQ ID NO: 195764 - DNA, 363 bp, Homo sapiens
agatctgatggttttataagtgcagtttcccctgttcttctctctcctgctgccacgtaagacctgcctgtttccccttctgccatgattgtaagtttcctgaggcttccccagccatgcagaactctgagtcgattaaaccctttttctgtataaattactgtgtcttgggtatttctttatagcagtgtaaaaacagactactataccccttatcagttctgagagtgtcatcccactatgaattacttgacctctaaaatttcattatttaaattaagtccaggcatggattaaactcctaggtgtaatctgttaagtayaccttctggggaagtgttggtctccatctacagactggtg

SEQ ID NO: 195765 - DNA, 498 bp, Homo sapiens
aatgtttccacattcagatgatacaaacatggacttccctgtcttctcaatcaagaatctcttcctgagtaatttcatccacttacatagatttaagttctgtccatatgcttttgagtcccaaagacctcactacttgtataatccacagactcaaaaaattagccgggtgtgatggtggmtgcctgtaattccagctacacaggaggctgaggcaggagaatcgcttgaacctgggaggaggaggttgcagtgaggcaagatcgcgccattgcactccagcttgggcaacaagagcgaaaccccatctcagaaaacaaacaaacaaacaaaaaaacaaaaaacaacgagatatcacgtcttgcctgttagtattatttttgaaaaccaaaaaagtcaaagcaaaacaagtgttggtaggtatggggagaaaatggaacctgtgtacacaattcatgggaatgtaaaatggtacagccattatggaaaacagtatgg

SEQ ID NO: 195766 - DNA, 569 bp, Homo sapiens
actgttttcaaactgttcaatcaaaagaaaggttcaactctgtgagatgaagggacacatcacaaagaagtttctcagaatgcttctgtctagtttttaagtgaagatatttcctttttcaccataggccccaaagcacttcaaatatcactttgcacattgtgcaataagactatttccaaactactgaatcaaaagaaaagttgaactctgtgagatgaatgcaaatatcacaaagaagtttctcagaatgcttctgtctagtttttgtgtgaagatattccctttttcaccatatgccttaaacagctcacaagtaaccatttgcagtttctacaaaaagactgtttccaaactgctccatcagaagaaaggttcaactctgtgagatgaatacacacaygacaaacaagttttgcagaatgcttctgtctactttttatgtgaagatatttcctttttcaccataggcttcaaagcgctcaaaatatccatttgcatattcttccaaaagagtgtttccaaactgctcaatcaaaagagaggttcgactctgtgagatgaaagca

SEQ ID NO: 195767 - DNA, 553 bp, Homo sapiens
gaagaaaggcagtgcttccaaactactgaatctaaagaaagttttaactctgtgatatgaatgaacacatcacaaagcattttctcagaaagcttctttccagtatttacataaagatttttcctttttgaccataggcwtcaatgcactggcaaatatcttttcacaggttctccaaaaaccgtgtttccaaactgctgaatgaaagaaaagatttaactctgctagatgaataagacatcacaaagtgatttctcagatagctttcttctagttttattcctgggttattcccttttaagccattggcctcaatgagctcccaaacatccattcacagactggacaaaaacagtgttaccaaaccgctgaatcaaaagtcaggtttaactcactgcgatgaatgcacacaacccaaaccaggttcgcagaaagattctttctagtttttctatgaagatgtatcctttttcaccaaaggcctcagtgcggtaccaaatatctcttggcattttataagaaatcagtgtttccaaactgctaaatgaaaaga

SEQ ID NO: 195768 - DNA, 553 bp, Homo sapiens
gaagaaaggcagtgcttccaaactactgaatctaaagaaagttttaactctgtgatatgaatgaacacatcacaaagcattttctcagaaagcttctttccagtatttacataaagatttttcctttttgaccataggcttcaatgcactggcaaatatcttttcacaggttctccaaaaaccgtgtttccaaactgctgaatgaaagaaaagatttaactctgctagatgaataagacatcacaaagtgatttctcagatagctttcttctagttttattcctgggttattcccttttaagccattggcctcaatgagctcccaaacatccattcacagactggacaaaaacagtgttaccaaascgctgaatcaaaagtcaggtttaactcactgcgatgaatgcacacaacccaaaccaggttcgcagaaagattctttctagtttttctatgaagatgtatcctttttcaccaaaggcctcagtgcggtaccaaatatctcttggcattttataagaaatcagtgtttccaaactgctaaatgaaaaga

SEQ ID NO: 195769 - DNA, 560 bp, Homo sapiens
atttccttcacggttttttgctgggatattcmatttttccccactggccccattaagctctcaaatatcccttcacagattctacaacaacagtgtctccaaaatgctgaatccaaagaaaggcttaattctgggagatgaatgcacacatcacaaagcaatttctcagaaggtttctttctagtttttatcttaagatacttcctttttcacgttaggcctcaatacactcccacatatcccttcttggatactgccaaagcagtgtttccaggctgctgaatgaaaaagaaaggtttaattctgtaagatgaatgcacaggtcagaaagcggtttctcaaagagcttccttctagtttttatcctaagatagttgctttttccccattggccttattgagctccaaaatatctatttgcagaatgggaaataacatgggtctcataccgctgaatccacagtcatgtttaattttgtgagatgaatgcacacgtcactaagcactttctcagaaagctactttcaattttttctctgaagagatttccttttaaacag

SEQ ID NO: 195770 - DNA, 560 bp, Homo sapiens
atttccttcacggttttttgctgggatattcaatttttccccactggccccattaagctctcaaatatcccytcacagattctacaacaacagtgtctccaaaatgctgaatccaaagaaaggcttaattctgggagatgaatgcacacatcacaaagcaatttctcagaaggtttctttctagtttttatcttaagatacttcctttttcacgttaggcctcaatacactcccacatatcccttcttggatactgccaaagcagtgtttccaggctgctgaatgaaaaagaaaggtttaattctgtaagatgaatgcacaggtcagaaagcggtttctcaaagagcttccttctagtttttatcctaagatagttgctttttccccattggccttattgagctccaaaatatctatttgcagaatgggaaataacatgggtctcataccgctgaatccacagtcatgtttaattttgtgagatgaatgcacacgtcactaagcactttctcagaaagctactttcaattttttctctgaagagatttccttttaaacag

SEQ ID NO: 195771 - DNA, 560 bp, Homo sapiens
atttccttcacggttttttgctgggatattcaatttttccccactggccccattaagctctcaaatatcccttcacagattctacaacaacagtgtctccaaaatgctgaatccaaagaaaggcttaattctgggagatgaatgcacacatcacaaagcaatttctcagaaggtttctttctagtttttatcttaagatacttcctttttcacgttaggcctcaatacactcccacatatcccttcttggatactgccaaagcagtgtttccaggctgctgaatgaaaaagaaaggtttaattctgtaagatgaatgcacaggtcagaaagcggtttctcaaagagcttccttctagtttttatcctaagatagttgctttttccccattggccttattgagctccaaaatatctatttgcagaatgggaaayaacatgggtctcataccgctgaatccacagtcatgtttaattttgtgagatgaatgcacacgtcactaagcactttctcagaaagctactttcaattttttctctgaagagatttccttttaaacag

SEQ ID NO: 195772 - DNA, 520 bp, Homo sapiens
gaatgcacacatcacaaagcaggttctctgaaagcttgtttctagtttttatccaaagatattatctttttcaccataggcctcaatgcactcccagatatccctttgtggatacttccaaaacagtgtttgcagacgactgaatgaaccgaaaggtttattgctgtgaggcaaatgcacacatccaaagcagtttctcagatagcttccttccagtttttatcctgggatattcacttttttgccatgggsttcaatgaggtcccaaatgtccatttgcagaatggacaaaaacagtgtttgcaatctgctgaatccacagaaattttaactccataagatgaatgcgcacatcagaaagcagtttctcagttagcttctttcttgtttttatctgaagatatttcctttttcaccataggcctcaatgcactcccagatatcccttcgcagaccctacaaaaacagtgtttccaaactgcataatgaaaagaaagttttgactctgaaatgtgaattc

SEQ ID NO: 195773 - DNA, 571 bp, Homo sapiens
tgcttgggatgtgtgcattcatctcagagagtaagacctttctttggattcagcagtttggaaacactgttttaaccattctggaactggatatttgtgggctcattgaggccaatggtaaaaaaacaaatatcccaggataaaaacaagaaggaacaatctgagaaacagttttgttatgtgtgcatccatctagcagagttaaacatttcttttcrttcagcagtttggaaacactgtctttgtagaatctgcaaagagatatttggttgtgcattgaggcctatggtgaaaaaagaaatatcttcagaaaaaaattagaaagaagctttctgagaaactgctttgtgatgtgtgcattcatctcacagacttaaacgtttttttgattcagcagtttggtaacactgttttgtagaatacaaaaagggatattttggagctcattgaggccaaaggcaaaaaagtgaatattccaggataaaaaccagaaggaagctatctgagaaacagtcttgttacgtgtgcatccatctcacagagttaaacgtttcttttaattcagcagttt

SEQ ID NO: 195774 - DNA, 571 bp, Homo sapiens
tgcttgggatgtgtgcattcatctcagagagtaagacctttctttggattcagcagtttggaaacactgttttaaccattctggaactggatatttgtgggctcattgaggccaatggtaaaaaaacaaatatcccaggataaaaacaagaaggaacaatctgagaaacagttttgttatgtgtgcatccatctagcagagttaaacatttcttttcattcagcagtttggaaacactgtctttgtagaatctgcaaagagatatttggttgtgcattgaggcctatggtgaaaaaagaaatatcttcagaaaaaaattagraagaagctttctgagaaactgctttgtgatgtgtgcattcatctcacagacttaaacgtttttttgattcagcagtttggtaacactgttttgtagaatacaaaaagggatattttggagctcattgaggccaaaggcaaaaaagtgaatattccaggataaaaaccagaaggaagctatctgagaaacagtcttgttacgtgtgcatccatctcacagagttaaacgtttcttttaattcagcagttt

SEQ ID NO: 195775 - DNA, 648 bp, Homo sapiens
tgttgaaaaagtgattatcccaggataaaaacttgaaggaagctatctgagtaactgctctgtgatgtgtgcattcatctcacagagttaaaccttccttttaattcagcagtttgaaaacactgttttcatagaaactgcaaagggatattgagggggtgcattgaggcctatggtgaaaaagaaaatatcttcagttaaaaagtagaaagaagcattctgagaaactgctttgagatgtgtgccttcatctcacagactcaaatgtttctttggattcaggactatggaagcastgtttttgtcgaatctgtgaagaggtagttgggagcgcattgaggccaaaggtgaaaaagtgaataccctgggataaaaactagaaggaagctatctgagaaaccactgggttatgtgtgcattcatcctgaagagttaaacctttctttttattcagcagttaggaaacactgttttgtagagtctgcaaagggacatttgggagctcattgaggccaaatgcaaaaaagggaacagcctgggataaaaactagaaggaagctatatgtgaaaccacttagttatgtgtgcattcatctcacagttaaacctttcttttcattcagcagtttggaaacactgttttggtgg

SEQ ID NO: 195776 - DNA, 620 bp, Homo sapiens
gagagttaaaactttcttttcatgcagcagtttggaaacagtactttggcagaatccgtgaatgaacatttggaattgcatagaggactatggtgataaaggaaatatcttcagaaaaaacaagatagaagatttacgagaaagtgctttgtgatgtctgcattcatctctaagagttgaaccattctttggattcagcagtgtagaaacactgtttttgtccattctatgaatggacatttgggagctcattgaggccaaggtgaaaaagtgaatatccaaggataaaacttagaagaaaggtatctgagaaaccgctttgtgatgtgtgcatttaaatctcagaatcgtcttggtagaatggaaacatcatcttggtagaatctgtaaagggatatttgggagcgcatttaggtctatggtgaaaaaggaaatatcttcagataaaaagyagaaagaagttttatgagaaattgctttgtgatgtgtgcattcatctaccagagttaaacagtttttggattcagcagttttcaaacaatgtttttgtagaatccgcgaagggatattagagagctcattgaagccaaaggccaaaaagtaaatatgccatgaaaaaa

SEQ ID NO: 195777 - DNA, 620 bp, Homo sapiens
gagagttaaaactttcttttcatgcagcagtttggaaacagtactttggcagaatccgtgaatgaacatttggaattgcatagaggactatggtgataaaggaaatatcttcagaaaaaacaagatagaagatttacgagaaagtgctttgtgatgtctgcattcatctctaagagttgaaccattctttggattcagcagtgtagaaacactgtttttgtccattctatgaatggacatttgggagctcattgaggccaaggtgaaaaagtgaatatccaaggataaaacttagaagaaaggtatctgagaaaccgctttgtgatgtgtgcatttaaatctcagaatcgtcttggtagaatggaaacatcatcttggtagaatctgtaaagggatatttgggagcgcatttaggtctatggtgaaaaaggaaatatcttcagataaaaagcagaaagaagytttatgagaaattgctttgtgatgtgtgcattcatctaccagagttaaacagtttttggattcagcagttttcaaacaatgtttttgtagaatccgcgaagggatattagagagctcattgaagccaaaggccaaaaagtaaatatgccatgaaaaaa

SEQ ID NO: 195778 - DNA, 307 bp, Homo sapiens
acacaaaacagtttctcaaagagcttcattctagcttttatgtgaaaatatttcctttttcaccgtagtcctcaaagtgctcaaaaatatccctttgaagattctagaaggacagaatttccaaactgctcaatgaaaggaaatgtttatttctctgagatgaatggacacaatacaaaacagtttctcagaaagcttctttctagcttttatgtgaagatatttcccttttcaccataggcctcaaagctctcccaaatattcctatgamaattgtacaaaaggactgtttccaaattgctcaatc

SEQ ID NO: 195779 - DNA, 307 bp, Homo sapiens
acacaaaacagtttctcaaagagcttcattctagcttttatgtgaaaatatttcctttttcaccgtagtcctcaaagtgctcaaaaatatccctttgaagattctagaaggacagaatttccaaactgctcaatgaaaggaaatgtttatttctctgagatgaatggacacaatacaaaacagtttctcagaaagcttctttctagcttttatgtgaagatatttcccttttcaccataggcctcaaagctctcccaaatattcctatgacrattgtacaaaaggactgtttccaaattgctcaatc

SEQ ID NO: 195780 - DNA, 562 bp, Homo sapiens
tgtcattcagcaagttggaaacactgtttttgtagaacctgtgaagagatatctggagtgcattgaggcctatggtgaaaaaggaaatatcttctgataaaaactagaaagaagttttcacagaaactgctttgtgatgtgtgcattcatcttgcagagttaaacctttatttagattcagcagtttgaaaaccccgttgttgtagaatctgcaaacggatatttgggagctccttgagaccaatgatgaggaagacaacatcccaggatagaaactagaagaaagctatctgagatactactttgtkatgtgtgcattcatctcaaagagttaaaactgtcctttcattctgcaatctgtaaacactgttttggaagaattcatgaagggatattggggagcacattgaggtctgtggtgaaaaaaacttcagataaaaattaaaagaagtttctgagaaacagctttgagatgtgtgcgttcacctcacagagttaaacctttctttggattcagcagtttggaaacactgttgttgtagaatctgtgaagggaaatttg

SEQ ID NO: 195781 - DNA, 562 bp, Homo sapiens
tgtcattcagcaagttggaaacactgtttttgtagaacctgtgaagagatatctggagtgcattgaggcctatggtgaaaaaggaaatatcttctgataaaaactagaaagaagttttcacagaaactgctttgtgatgtgtgcattcatcttgcagagttaaacctttatttagattcagcagtttgaaaaccccgttgttgtagaatctgcaaacggatatttgggagctccttgagaccaatgatgaggaagacaacatcccaggatagaaactagaagaaagctatctgagatactactttgtgatgtgtgcattcatctcaaagagttaaaactgtcctttcattctgcaatctgtaaacactgttttggaagaattcatgaagggatattkgggagcacattgaggtctgtggtgaaaaaaacttcagataaaaattaaaagaagtttctgagaaacagctttgagatgtgtgcgttcacctcacagagttaaacctttctttggattcagcagtttggaaacactgttgttgtagaatctgtgaagggaaatttg

SEQ ID NO: 195782 - DNA, 258 bp, Homo sapiens
agtgctcattgaggccaatgatgaaaacacgaatatcccagaataaaaaccagaaggaacctatttgagaaactacttggttatgtgtgcattcatcctacagaattaaacttctcttttcattcagcagtatggaaacacttttttcatagaatmtgtgatgggatatctgggagcccattgaggcctatggcaaaagaggaaatctcttcagataaaaactagaaagaagctttctgagaaactgctttgtgttgc

SEQ ID NO: 195783 - DNA, 506 bp, Homo sapiens
tttttagaaactgggaagggatatttgggagcttaatgaggcaaatgcaaaaaayggatatcccaggataaaaactagaaggaagctctttgagaaaactctttctgatgtgtgcattactcttgcagatttaaacctttctttccattcagcaatttggaaacactgttttcatagtatctgcaaagtgatatcttggagtactttgagatctatggtgaaaaaggaaatgcattcaatttaaaactagaaagaagctgtatgagaaactgctcggtgttttgagcattcatctcacagagttaaacctttctgtggattcagcagtctgtaaacactgcttttgtttattccatgaatgcagatttgctgctagttggggccaaaggagaaaaagtgaatatcccaggataataactagaaggaagatatctgagaaaccactttgtgatgtgtgcattcatctcacagagttaaacctttcttttcattcagcagtttggaat

SEQ ID NO: 195784 - DNA, 506 bp, Homo sapiens
tttttagaaactgggaagggatatttgggagcttaatgaggcaaatgcaaaaaacggatatcccaggataaaaactagaaggaagctctttgagaaaactctttctgatgtgtrcattactcttgcagatttaaacctttctttccattcagcaatttggaaacactgttttcatagtatctgcaaagtgatatcttggagtactttgagatctatggtgaaaaaggaaatgcattcaatttaaaactagaaagaagctgtatgagaaactgctcggtgttttgagcattcatctcacagagttaaacctttctgtggattcagcagtctgtaaacactgcttttgtttattccatgaatgcagatttgctgctagttggggccaaaggagaaaaagtgaatatcccaggataataactagaaggaagatatctgagaaaccactttgtgatgtgtgcattcatctcacagagttaaacctttcttttcattcagcagtttggaat

SEQ ID NO: 195785 - DNA, 506 bp, Homo sapiens
tttttagaaactgggaagggatatttgggagcttaatgaggcaaatgcaaaaaacggatatcccaggataaaaactagaaggaagctctttgagaaaactctttctgatgtgtgcattactcttgcagatttaaacctttctttccattcagcaatttggaaacactgttttcatagtatctgcaaagtgatatcttggagyactttgagatctatggtgaaaaaggaaatgcattcaatttaaaactagaaagaagctgtatgagaaactgctcggtgttttgagcattcatctcacagagttaaacctttctgtggattcagcagtctgtaaacactgcttttgtttattccatgaatgcagatttgctgctagttggggccaaaggagaaaaagtgaatatcccaggataataactagaaggaagatatctgagaaaccactttgtgatgtgtgcattcatctcacagagttaaacctttcttttcattcagcagtttggaat

SEQ ID NO: 195786 - DNA, 583 bp, Homo sapiens
tctaatctcagctctgctgccgtctaatgggtgacctcgggcaaatcactgaatttccctgagtctgtttcctcctctgtataaacaggtcataatgctggccacatgctgatgttgtgagcatcagctgagagagctgggttaaagggcccaccagggcctggcacaaacaagagacttyggtgactttaattttggactctccttgctaaggagatcaccactgcaaatccagccctttgctggtgcacagtggtgcagctcttgcctgttcttggcagcaggtggggtacccaacaccttgagatgaactctccaaagtccttgctgacaatgtccacggtcccttcttagctggtgaccaggaacactccctaggggcctcccttctcaaccttccacttctcctacccataccccacaacggccccatttcctgttgtttctcatgaatagagtctggaagtagaaacactagttcgtgcagtgttcacggacatcacggggctctaggaagcctcacatcacatcactctgacactgactctcctgcttctcttttccatatttaaggatccctgtc

SEQ ID NO: 195787 - DNA, 406 bp, Homo sapiens
agaattcctccagcatctgctatatgccaagctttgtgtttctcattcaattcatttaccaaaaattgaaagagtgcttacactgttcctggcactggggacacamtaatgaacaggacagatatgatccctgccctcatagagcttccaggctagtgggaaggcacagggacaggcaataacaaggaatcaatcaaataagtccgtgtaaattcagatgcagacaaagaacggaatgtggcagtgatggggggtcatggaggaagaaatgaattagggttgtagcttcaagggcgacctctgaaagttactttggtattgtgagatttatttctattaatacttcctttcgctatgtactacagtattatctcctcaggaaagtgaggctcagagaggttaatta

SEQ ID NO: 195788 - DNA, 582 bp, Homo sapiens
cctctcctctccttcggagactggcttcattgggagtgagatgacactgtcgcagggctagctttttgtaggccactagttgtcgcaggctgctgatgaagccaagcagatcacccccatgtccacaagcacaccgggattagatacatttaagtcctagatcccaaacgcctttttcatttctggttttgcatttgtttccattctactatcttcatttggaaaaccctttcattcctcaagaaaacaagccacacaatcaaaaaaagatgtgtcttatcctctgggcgctgcctcattgcctgccccattattgaccaatgccaccggagtgccttgcacagcttggccagcgttcgctgtgcacatcgaccagtgagctggcatgctgacagcggcagrggcccccagcttcagacacttctgaacccagctgctttacggacacaatcggttgaatcggttgaatcatgacttgtctcccaaaccacaaatttgtaactagttcaccgtgagcctatgcagccagatgaattgtaacttgggcagtccctgcacctaaattttttttttacccaataa

SEQ ID NO: 195789 - DNA, 449 bp, Homo sapiens
tgctgtggccgagaagcccctcgtttcttgctgcccaggagtgacttggtacccagagaaacattggctgggcctccagggtgcacttccagtttggctgacatagggaggatggttcaacccgggccaggagggtcagacrggagagaacagatctgaagcatcttctggtgacaatgagcttcccccagcccccggcccttcaggctgacctgcactgctgtggacctgagaagttctaaactatccagatgtttttcctcatgtgcatgtgaatccggaaaccatcccggtcctttggctggaggagcacagatagattcacatctgggcagcaggcgagagattgacgaagaccagagctcagagtcagaaaaactggggtcaagtctcggccatgaccttttttcttggtgtgtctttggccagccctgtgaccttcctgggtc

SEQ ID NO: 195790 - DNA, 449 bp, Homo sapiens
tgctgtggccgagaagcccctcgtttcttgctgcccaggagtgacttggtacccagagaaacattggctgggcctccagggtgcacttccagtttggctgacatagggaggatggttcaacccgggccaggagggtcagacaggagagaacagatctgaagcatcttctggtgacaatgagcttcccccagcccccggcccttcaggctgacctgcactgctgtggacctgagaagttctaaaytatccagatgtttttcctcatgtgcatgtgaatccggaaaccatcccggtcctttggctggaggagcacagatagattcacatctgggcagcaggcgagagattgacgaagaccagagctcagagtcagaaaaactggggtcaagtctcggccatgaccttttttcttggtgtgtctttggccagccctgtgaccttcctgggtc

SEQ ID NO: 195791 - DNA, 449 bp, Homo sapiens
tgctgtggccgagaagcccctcgtttcttgctgcccaggagtgacttggtacccagagaaacattggctgggcctccagggtgcacttccagtttggctgacatagggaggatggttcaacccgggccaggagggtcagacaggagagaacagatctgaagcatcttctggtgacaatgagcttcccccagcccccggcccttcaggctgacctgcactgctgtggacctgagaagttctaaactatccagatgtttttcctcatgtgcatgtgaatcyggaaaccatcccggtcctttggctggaggagcacagatagattcacatctgggcagcaggcgagagattgacgaagaccagagctcagagtcagaaaaactggggtcaagtctcggccatgaccttttttcttggtgtgtctttggccagccctgtgaccttcctgggtc

SEQ ID NO: 195792 - DNA, 289 bp, Homo sapiens
cttcaacaccgaaaaggttggaaattaataactttaaatgcttataatttaaaaagtagagagaataaaaataatgagctaaatctccaacttgggaaatcagaaaaagaacagcagaataamcatgaggaaagtagtaggaagaaaaaaataacaataagtagagaaagtaatgaaactgaaaacggaggatcaacaaagccaaaattgattctttgaagttgaaagacttctggaaaaatttaagagacagagataaacagcatgtacagataagcaatactgaaaa

SEQ ID NO: 195793 - DNA, 450 bp, Homo sapiens
ccaaggtactctctaaaaaagaataaaatcagcaattacattcttgggcatttatcccagagatatgaaaagttatagtcacccaaaacctatgctcagatgtttatagccactttattcataacatctcaaaactgaaaatagcccaagtatacttcaatgggcgagtggttaagcaaactggtatatccataccatggactaggattcagtcataaaaaggaatgggctattaatacgtgtaacaatctagatgaatctcatgggaattatgctgagttraaaaaaaaaagcctatctcaaaaggctacatacagtattatttcatttatataacattacttaaataacaaaattatagagatggagaacacgttaattgttgtcaagaattaggaatgaggggaagggggactggttgtggctataaaggggtagcacaagggagcc

SEQ ID NO: 195794 - DNA, 449 bp, Homo sapiens
tgctgttgatgacaaaggtgatttcatttgttctctattgaaaacattgtacttaagaatattaattattctcttcattttaagtacagagaaattgatgtwttaggtgcttatatgaattggccaaagatgtggatccagtcttaagatttttatttattctgattttgtatgactaggtttcttcttttccatgattgtttattcacaaggaaattataaaaatttaagggggaaatcccccactatattaaaatcattacttcttcaatgctcttccttcttggcttttaataataaaaatagcttgtacatgctcagcgcttggaatttacttttgcgtacattttctatgtctcctaattcacaagattgttgttctaccactggcccctgctgaggtcggtcagtggtgacttggggccttccccccttgttcttttggattg

SEQ ID NO: 195795 - DNA, 458 bp, Homo sapiens
aatcagggtaggcaatacacaggtgttcactttattctcctttaacttggataaggatgtgtttatacactctttcatatgcctgctatactttatggttttaaaatttcttaataaagcagcatcctaaaaatgcagttttccctctggtccagtgtggctgactggcatagagagtgtatttgcatctgaggtcgctgggaggaatgacctgacaccagtgaagctggcagagctgcagggcacactggagcctctggccatctggagttcagaagacaagacgtccacacttcagttagaagcagacctttatctccagaggactttgatgttgaagatatgacagaagctcctacaaactgagaagggacaaaggagaaaacagtccctgcaagtttccatgaggaaaaagagccctgcttagyctgggattggagtcagctagaccagaattc

SEQ ID NO: 195796 - DNA, 414 bp, Homo sapiens
gttgcccaggctggagtgcaatggtgcaatctcrgctcactgcaacctccacctcccatgttcaggtgattctcctgcctcccaagtagctgggattacaggcatgagctaccatgcctggctaattttgtatttttttttttttttttttttttttttagtagaaatggggtttcaccatgttggtcaggctggtcttgaactcctgacctcatgtgattcacccacctcggccgcctacagtgctgggattacaggcatgagccaccgcaccggcctagaatttcaactactaatttacattaagcttttaattatgtttaaagtgcttttcctatcagagtttagcctcttagatgtagtatgtgctagacacttgaagttttgtttgttacagccctttcttagctatcc

SEQ ID NO: 195797 - DNA, 432 bp, Homo sapiens
tttttttttgagatgaggtttcgctcttgttgcccaggctggagtgcaatggtgcaatctcagctcactgcaacctccacctcccatgttcaggtgattctcctgcctcccaagtagctgggattacaggcatgagctaccatgcctggctaattttgtatttttttttttttttttttttttttttagtagaaatggggtttcaccatgttggtcaggctggtcttgaactcctgacctcatgtgattcacccacctcggccgcctacagtgctgggattacaggcatgagccaccgcaccggcctaraatttcaactactaatttacattaagcttttaattatgtttaaagtgcttttcctatcagagtttagcctcttagatgtagtatgtgctagacacttgaagttttgtttgttacagccctttc

SEQ ID NO: 195798 - DNA, 432 bp, Homo sapiens
tttttttttgagatgaggtttcgctcttgttgcccaggctggagtgcaatggtgcaatctcagctcactgcaacctccacctcccatgttcaggtgattctcctgcctcccaagtagctgggattacaggcatgagctaccatgcctggctaattttgtatttttttttttttttttttttttttttagtagaaatggggtttcaccatgttggtcaggctggtcttgaactcctgacctcatgtgattcacccacctcggccgcctacagtgctgggattacaggcatgagccaccgcaccggcctagaatttcaactactaatttacattaagcttttaattatgtttaaagkgcttttcctatcagagtttagcctcttagatgtagtatgtgctagacacttgaagttttgtttgttacagccctttc

SEQ ID NO: 195799 - DNA, 545 bp, Homo sapiens
gtaccttgcaaagtattttacctgcattatgtcatagaacccaattttaaaaaactgttactttttttttatyattaaacctgaggctcagagaggttaaatgatttactcaaagtcacaaacttaggcttgtgctcttaactactgttctgtcttactatgagtcacaaggaagaaaccaaacatcttcagagttagggagcgtccttgattccagaacacttctcattctaaagagaactatcctctttcggtgatgctagtagatgggtaggtcagagcagtgctggcagctgttcatctggatcctccacagacttctctctagtttctcagaatatcttggtagagtatatgtgaaaatgtgacctggataaaagagtgttcaacaatggttccatcccctgctggtgaggagagcctcaagggcattgtaggagtgctctagcctcagctctccaatgttggaaactggcttagatgaggatagagagggcctcctcttcaagatttcaggaagggtgagggaagaacatagcaaatac

SEQ ID NO: 195800 - DNA, 545 bp, Homo sapiens
gtaccttgcaaagtattttacctgcattatgtcatagaacccaattttaaaaaactgttactttttttttatcattaaacctgaggctcagagaggttaaatgatttactcaaagtcacaaacttaggcttgtgctcttaactactgttctgtcttactatgagtcacaaggaagaaaccaaacatcttcagagttagggagcgtccttgattccagaacacttctcattctaaagagaactatcctctttcggtgatgctagtagatgggtaggtcagagcagtgctggcagctgttcatctggatcctccacagacttctctctagtttctcagaatatcttggtagagtatatgtgaaaatgtgacctggataaaagagtgttcaacaayggttccatcccctgctggtgaggagagcctcaagggcattgtaggagtgctctagcctcagctctccaatgttggaaactggcttagatgaggatagagagggcctcctcttcaagatttcaggaagggtgagggaagaacatagcaaatac

SEQ ID NO: 195801 - DNA, 488 bp, Homo sapiens
gtaaacttctgcatcattttctctgcttagcactctattttctcaccaaactgatgccctgtcaggagttccagttcatttggctagagtgagaacatctgtttaagttatctgttgttgcctaacaaatgtcaaagaaaaaaattattcgtgacactcggtgaagcacagtaaggcagacatttttcagaacatcttggtaggtgaagggatggcacagtggggtcctgcagtaggggagagasattgtgctcaacctcaaacaacaaaaaggtggacatttctatctagaagaagcagggtgggctcagtgggtggaaaattactaactggaaacatcaggggtaagggaagattctggctgaactgacctaacaggattcttgctaaaggcaggcagtgctgatcagacatcacctgggtgccggtggagggggcggaaaatgatcaggtatcgaaggtgatcagatactgaggatggggaattc

SEQ ID NO: 195802 - DNA, 488 bp, Homo sapiens
gtaaacttctgcatcattttctctgcttagcactctattttctcaccaaactgatgccctgtcaggagttccagttcatttggctagagtgagaacatctgtttaagttatctgttgttgcctaacaaatgtcaaagaaaaaaattattcgtgacactcggtgaagcacagtaaggcagacatttttcagaacatcttggtaggtgaagggatggcacagtggggtcctgcagtaggggagagagattgtgctcaacctcaaacaacaaaaargtggacatttctatctagaagaagcagggtgggctcagtgggtggaaaattactaactggaaacatcaggggtaagggaagattctggctgaactgacctaacaggattcttgctaaaggcaggcagtgctgatcagacatcacctgggtgccggtggagggggcggaaaatgatcaggtatcgaaggtgatcagatactgaggatggggaattc

SEQ ID NO: 195803 - DNA, 488 bp, Homo sapiens
gtaaacttctgcatcattttctctgcttagcactctattttctcaccaaactgatgccctgtcaggagttccagttcatttggctagagtgagaacatctgtttaagttatctgttgttgcctaacaaatgtcaaagaaaaaaattattcgtgacactcggtgaagcacagtaaggcagacatttttcagaacatcttggtaggtgaagggatggcacagtggggtcctgcagtaggggagagagattgtgctcaacctcaaacaacaaaaaggtggacatttctatctagaagaagcagggtgggctcagtgggtggaaaattactaactggaaacatcaggggtaagggaagattctggctgaactgacctaacaggattcttgctaaaggcaggcagtgctgatcagacatcacctgggtgcyggtggagggggcggaaaatgatcaggtatcgaaggtgatcagatactgaggatggggaattc

SEQ ID NO: 195804 - DNA, 513 bp, Homo sapiens
tgcaagtaactatttttaaagcatataaagctttttaatggatatcatatttataaagaaataaattcctgaaaattgaggtaaatctcatataatagttagctataaaaacrcattacaaaagtatagaccatagtcaaggggaaatgtattatactctgatatcaaggttattaagtggtcaaggttcaaatataattggtaatactttatctagcgaacactctgtttatgtcaaagatcagtacaaactacccaaaaaatgttaatagaagttttaaagagtagtactatggaagaagtttcctaaaataggtcaaatctctgaaattaaaatatttaacaaatgaatatgcaaagcaaaaacagaatggcatttatggtactaaatcatgtatagcttggtcataatgataaaacttgaaatgattaaaaaaaatttttttttttttttgagatagtgtctcactctgtcacccaggctggagggtagtggtgcaatcacggctcact

SEQ ID NO: 195805 - DNA, 547 bp, Homo sapiens
ctccagtgggcctacgcagactttattattgatccttcaacagcaggaaagtaaaagcagcagaagtgttaaatgtatagaaaaattatctttcatgaattatgaagaatattcccgtaaataacatyacgatatgatctgccagaagaaaagcaagaaagtcagattttcttggagtgatttttctaagacaatcattagtttgatgtttaaatgttttgaatttctgatttccatttcttctgaatgcagtggaaattacagattattcctttactgccttttaaaatgtaaagtcagtctgtagtctataaattgggtttcctttgaatccacaactacactagagtgaaaggtatattaccactttgatttctgttcaagaaagaaatatattcagtattataaagagaaattgaagcaggctgctggatagtatatctgatctgtgactttcttggatttggtgacaacagagatgaatatttcactcttagttttttaaaaaagctgttgaagttgcattggctattatttctacgataat

SEQ ID NO: 195806 - DNA, 548 bp, Homo sapiens
ctccagtgggcctacgcagactttattattgatccttcaacagcaggaaagtaaaagcagcagaagtgttaaatgtatagaaaaattatctttcatgaattatgaagaatattcccgtaaataacatcacgatatgatctgccagaagaaaagcaagaaagtcagattttcttggagtgatttttctaagacaatcattagtttgatgtttaaatgttttgaatttctgatttccatttcttctgaatgcagtggaaattacagattattcctttactgccttttaaaatgtaaagtcagtctgtagtctataaattgggtttcctttgaatccacaactacactagagtgaaaggtatattaccactttgatttctgttcaagaargaaatatattcagtattataaagagaaattgaagcaggctgctggatagtatatctgatctgtgactttcttggatttggtgacaacagagatgaatatttcactcttagttttttaaaaaagctgttgaagttgcattggctattatttctacgataata

SEQ ID NO: 195807 - DNA, 458 bp, Homo sapiens
cagaacagatatcaggtatttgcagctttttttaagagaatcaggtcattacctgcaggcagggtattaatgttttggtcagtctgtgggagtgtrcaggctatccaatgagttgtctttttccatttagtaaattctctattccatgcaaggtgtaaatatcattttcttacctagaaaagtagatttgcctcgtgacagatctcatgtgtgtttgtctttctaaattacagatgtattaaatattcttaaacacaaattgatctttacagataatttaattcttgatctgtacattgacacagtgtttccagtctaatgagtgtttttccttacagggtcagcctttacaacatctgataatttgtctctcagctcctgggtatcatcttcttccagttttcctgggtttcagcacccacagtccctgactgctcttggcaccagcacagcatcca

SEQ ID NO: 195808 - DNA, 458 bp, Homo sapiens
cagaacagatatcaggtatttgcagctttttttaagagaatcaggtcattacctgcaggcagggtattaatgttttggtcagtctgtgggagtgtgcaggctatccaatgagttgtctttttccatttagtaaattctctattccatgcaaggtgtaaatatcatyttcttacctagaaaagtagatttgcctcgtgacagatctcatgtgtgtttgtctttctaaattacagatgtattaaatattcttaaacacaaattgatctttacagataatttaattcttgatctgtacattgacacagtgtttccagtctaatgagtgtttttccttacagggtcagcctttacaacatctgataatttgtctctcagctcctgggtatcatcttcttccagttttcctgggtttcagcacccacagtccctgactgctcttggcaccagcacagcatcca

SEQ ID NO: 195809 - DNA, 458 bp, Homo sapiens
cagaacagatatcaggtatttgcagctttttttaagagaatcaggtcattacctgcaggcagggtattaatgttttggtcagtctgtgggagtgtgcaggctatccaatgagttgtctttttccatttagtaaattctctattccatgcaaggtgtaaatatcattttcttacctagaaaagtagatttgcctcgtgacagatctcatrtgtgtttgtctttctaaattacagatgtattaaatattcttaaacacaaattgatctttacagataatttaattcttgatctgtacattgacacagtgtttccagtctaatgagtgtttttccttacagggtcagcctttacaacatctgataatttgtctctcagctcctgggtatcatcttcttccagttttcctgggtttcagcacccacagtccctgactgctcttggcaccagcacagcatcca

SEQ ID NO: 195810 - DNA, 458 bp, Homo sapiens
cagaacagatatcaggtatttgcagctttttttaagagaatcaggtcattacctgcaggcagggtattaatgttttggtcagtctgtgggagtgtgcaggctatccaatgagttgtctttttccatttagtaaattctctattccatgcaaggtgtaaatatcattttcttacctagaaaagtagatttgcctcgtgacagatctcatgtgtgtttgtctttctaaattacagaygtattaaatattcttaaacacaaattgatctttacagataatttaattcttgatctgtacattgacacagtgtttccagtctaatgagtgtttttccttacagggtcagcctttacaacatctgataatttgtctctcagctcctgggtatcatcttcttccagttttcctgggtttcagcacccacagtccctgactgctcttggcaccagcacagcatcca

SEQ ID NO: 195811 - DNA, 488 bp, Homo sapiens
ttaattcagtagtagtcttacctcaggtatgctccatacatgaagaacaatcccatcattagtccatttaaaataaagattacaccaacataaaagcaagcaggatctcccaatcctttgaaaagatacagataatcagtgtttaatgaatatatgactctaaggcaattgggcataattatctcagtgctttgcaatcaagagctcrtgaatttgctgaaagcatttgctttccagattgctgctgtgtttaattatttacccttataagagtttgtgtgtgtgtgtgcttgcagacacatatatatgtatgtgtgtatatatatgtgtgtgtatatatacacatacacgtatgtaagctcacccttaatgagtgattatatagttacacttatactttatactttttataattgcatttatactttcctccaatgaattactattatactgtaatgatttgttggggattcacatttatttaggtg

SEQ ID NO: 195812 - DNA, 216 bp, Homo sapiens
tttatctttgcatttggcaagagtatcttcaagataactaccacttttcaaagcactattgttgggtaggttttattaggggagaggacttagaaaacatgactttcctcayccaaaaccaaaaataaatgagggcttaaaaatatattatttaagaagatagtggccagaaataaagaccatgaccaacaagctttggggccatcaagatgaaaa

SEQ ID NO: 195813 - DNA, 597 bp, Homo sapiens
gttaatgaacatttgagatgttttgagtttttggtgaccatgaacaatgccactataaacattcatggacaaggctttttgtggacatatgttatcatttctcttagggaaacacctaggagtggaattgctgggttgcatggttatgtatgattaagtgtggatttatctttataagcaagttcaaaactsttttccagagtagatgcgccattttccatttccaccaacaatgcatgagagtttaagttgtatcagtttttgtaattttaatcattatagtatggttatggatgattcaaaatatcttctttggtgaaatttctattcaaatattgtgccaaattttgtgttgtttcttattgaggtgtgagagttctttgtatattatgggtaaaagtctgccagatttttttagcagatgtattaaggcgtaattgctcaataattactcaataagctgcacatatttagtatccacttggatacatattaacataggtatacacttgtaaaacagcagccacaataaaaatcatgaacatatccatctctcccaaaagtttacttctgcccttttgtaatcctaattattgc

SEQ ID NO: 195814 - DNA, 597 bp, Homo sapiens
gttaatgaacatttgagatgttttgagtttttggtgaccatgaacaatgccactataaacattcatggacaaggctttttgtggacatatgttatcatttctcttagggaaacacctaggagtggaattgctgggttgcatggttatgtatgattaagtgtggatttatctttataagcaagttcaaaactcttttccagagtagatgcgccattttccatttccaccaacaatgcatgagagtttaagttgtatcagtttttgtaattttaatcattatagtatggttatggatgattcaaaatatcttctttggtgaaatttctattcaaatattktgccaaattttgtgttgtttcttattgaggtgtgagagttctttgtatattatgggtaaaagtctgccagatttttttagcagatgtattaaggcgtaattgctcaataattactcaataagctgcacatatttagtatccacttggatacatattaacataggtatacacttgtaaaacagcagccacaataaaaatcatgaacatatccatctctcccaaaagtttacttctgcccttttgtaatcctaattattgc

SEQ ID NO: 195815 - DNA, 597 bp, Homo sapiens
gttaatgaacatttgagatgttttgagtttttggtgaccatgaacaatgccactataaacattcatggacaaggctttttgtggacatatgttatcatttctcttagggaaacacctaggagtggaattgctgggttgcatggttatgtatgattaagtgtggatttatctttataagcaagttcaaaactcttttccagagtagatgcgccattttccatttccaccaacaatgcatgagagtttaagttgtatcagtttttgtaattttaatcattatagtatggttatggatgattcaaaatatcttctttggtgaaatttctattcaaatattgtgccaaattttgtgttgtttcttattgaggtgtgagagttctttgtatattmtgggtaaaagtctgccagatttttttagcagatgtattaaggcgtaattgctcaataattactcaataagctgcacatatttagtatccacttggatacatattaacataggtatacacttgtaaaacagcagccacaataaaaatcatgaacatatccatctctcccaaaagtttacttctgcccttttgtaatcctaattattgc

SEQ ID NO: 195816 - DNA, 597 bp, Homo sapiens
gttaatgaacatttgagatgttttgagtttttggtgaccatgaacaatgccactataaacattcatggacaaggctttttgtggacatatgttatcatttctcttagggaaacacctaggagtggaattgctgggttgcatggttatgtatgattaagtgtggatttatctttataagcaagttcaaaactcttttccagagtagatgcgccattttccatttccaccaacaatgcatgagagtttaagttgtatcagtttttgtaattttaatcattatagtatggttatggatgattcaaaatatcttctttggtgaaatttctattcaaatattgtgccaaattttgtgttgtttcttattgaggtgtgagagttctttgtatattatgggtaaaagtctgccagatttttttagcagatgtattaaggcgtaattgctcaataattactcaataagctgcacatatttagtatccacttggatacatattaacataggtatayacttgtaaaacagcagccacaataaaaatcatgaacatatccatctctcccaaaagtttacttctgcccttttgtaatcctaattattgc

SEQ ID NO: 195817 - DNA, 416 bp, Homo sapiens
tctcttactcgtttgcctcctccttataaagactttgtgattacatttgtcctacctggataataaggataatctccacatctcatgagcattaayttaatcacatttgcaaatttcctttttccatgtgagtaacgtaattcacaatttctgggaattaggacatggccatcgtggggggctcattattcagcctaccacaagtccatttacacttaatgtgataattgatatggttagatttaagtctgtcatctcagtgttttctttgttccatctgatcttcatctcccttttccacttcttctgccttattttggattgagtgatttttataattccatgttaatcttgtttgttgccttttgggttctgtcaatttttgcttcatatattttgaaattctcttttaagtt

SEQ ID NO: 195818 - DNA, 416 bp, Homo sapiens
tctcttactcgtttgcctcctccttataaagactttgtgattacatttgtcctacctggataataaggataatctccacatctcatgagcattaatttaatcacatttgcaaatttcctttttccatgtgagtaacgtaattcacaatttctgggaattaggacatggccatcgtgggsggctcattattcagcctaccacaagtccatttacacttaatgtgataattgatatggttagatttaagtctgtcatctcagtgttttctttgttccatctgatcttcatctcccttttccacttcttctgccttattttggattgagtgatttttataattccatgttaatcttgtttgttgccttttgggttctgtcaatttttgcttcatatattttgaaattctcttttaagtt

SEQ ID NO: 195819 - DNA, 416 bp, Homo sapiens
tctcttactcgtttgcctcctccttataaagactttgtgattacatttgtcctacctggataataaggataatctccacatctcatgagcattaatttaatcacatttgcaaatttcctttttccatgtgagtaacgtaattcacaatttctgggaattaggacatggccatcgtggggggctcattattcagcctaccacaagtccatttacacttaatgtgataattgatatggttagatttaagtctgtcatctcagtgttttctttgttccatctgatcttcatctcccttttccacttcttctgccttattttggattgagtgatttttataattccatgttaatcttgtttgttgccttttgggttctgtcaatttttgcttcatatrttttgaaattctcttttaagtt

SEQ ID NO: 195820 - DNA, 583 bp, Homo sapiens
ggagctatgaattaagctagaagcactggattccttgctcatgatgcttatggtcattatattttatttcctaagagcatgggaaaaaaagtaattttctatatgcaaagttgtacagaggcatgaaagcatccctgtttatgatagaattaatcagatgtcaaccttcaagcatctcaaatgtgggggataaaaccagatttgggaaaatcaaacatatactgtctayacattttaagacattattagagaaactctttaaatctgctttgaccatccctccatctctttagtttgaaagcctatagaaaatttgaaagaatattacagtgatcacctgaaaatacgtgttctttaaaaaccaagaatgcaaaatagcgagaagtgattaggaagtcttattattaacctttttttttttcagaaaaaaagttctaaagaagtgataaaaataaatattttaaagttttaattacattgacaatatatgtctttttttaaaaaaagggactttattattcatacttcaagaccattattgaagcaccttcgtttttggaaggactgtggatgattatgaatg

SEQ ID NO: 195821 - DNA, 409 bp, Homo sapiens
ccaacttcaaactatatttcaaggctacaataaccaaaacagcatggtgctagcacaaaaacacacacatagaccaatggaacagaatagagagcccagaaataaagtcacacacctagaaccatctgattttcaacaaacctgacaacacaagtcaataggaaaaaggacttcttattcaataaatgatgctgggataactggctagccataagcagaagactgaaacttcacctttcttttccccatacacaaaaatcaackcaagatgaattaaagactgaaacgtaaaacctaaaacaatgaaaaccctagaagaaaacagaaaatatcattctggacatagaccctggcaaaaatttcatgatgaagatgccaaaagcaattgcaacaaaacaaagattgacaa

SEQ ID NO: 195822 - DNA, 487 bp, Homo sapiens
ttttttcccaaggaataaaaatagcaaaggaattcggagtcagcccttctctgtcctccagcccttctcctttcagaggaatttcatcactggagcagagcattgaattcattcgagttgcagggaaatgtgatgtatttcttaaatctgtgtcacctggcygtggaatcagcccagccaggctcgaaatgaggcattaactacatccaaagctgtgtgattaacttatttgtttgccgacagagctcaaatgaaaaagcaggaagctgggaggatctgcacgagccccgttttgaagtaggattgtgagaagacccgaagtgtgggttttagttcacattccctgggcttaccattattattacttttaatggaaaataacttttcacaatcttgcttcgttttaaatggagaatgtgcaatattgtctaatttagggtgtggagttgatttggtatgcatgatttttcttcccccgcccgccacc

SEQ ID NO: 195823 - DNA, 637 bp, Homo sapiens
gtcaggcaaacctcccctgcttcttgtgtggtctttttgtttgttccttttttatcctgccccacccctcaccccagtcgctctgtcctctgccacacagaagcacgcgtaatgctctccactcaagggagagatggaatacaaaacctctgggggtcataaaggatgcaattaaaatccagaatgcagaagtgaatggaatgataggaaagctcaaaacaaaacaaaaaaagaggatggaaatatttatgttgccctgtttaatttttaatcactcaaagagcatttgctctcattctgcatggagataaaattcccattttatttttccctgggccacagtacatgattttacattaccctctctctcagttgctcgtacttatgcaggttaggctactgtactcaagaaatggccacaatacttcatgtgatctcagaaaactgaaaaaattccaaggttgggggaaaggatttcagatgatccgatgcccctagttctagagcccatactycctgttttgaaacgtgatcaagaattgcttgatgtacatttctcactgggacttccagatttcacaaatttaaaaaatatgtaagacacagtcgttgaatttgaagttcaaataaaccacaa

SEQ ID NO: 195824 - DNA, 637 bp, Homo sapiens
gtcaggcaaacctcccctgcttcttgtgtggtctttttgtttgttccttttttatcctgccccacccctcaccccagtcgctctgtcctctgccacacagaagcacgcgtaatgctctccactcaagggagagatggaatacaaaacctctgggggtcataaaggatgcaattaaaatccagaatgcagaagtgaatggaatgataggaaagctcaaaacaaaacaaaaaaagaggatggaaatatttatgttgccctgtttaatttttaatcactcaaagagcatttgctctcattctgcatggagataaaattcccattttatttttccctgggccacagtacatgattttacattaccctctctctcagttgctcgtacttatgcaggttaggctactgtactcaagaaatggccacaatacttcatgtgatctcagaaaactgaaaaaattccaaggttgggggaaaggatttcagatgatccgatgcccctagttctagagcccatacttcctgttttgaaacgtgatcaagaattgcttgatgtacatttctcactgggayttccagatttcacaaatttaaaaaatatgtaagacacagtcgttgaatttgaagttcaaataaaccacaa

SEQ ID NO: 195825 - DNA, 492 bp, Homo sapiens
actggattcaatttccagccttaaaacaaatacacaaaaacattattatcacatttgattcaacatcttatataattgcaaatgaatcacaaatcaaatgggttaaagtatctcattttgtattttaaaatgtaaaggaggtgtcgtttgggcatgcataaaaatacttaaaaaccacacataagaaaatatatttatgcccttctttgattttctgccagtgcaagttaatggaatggaaactactgaccagccacaagtgaaccctttgaaaatgacatggtaattaattttctactccatcaatattttttagaactactataataatttyaattttttcttattttatatatcactgctagataatccatcacacccctctgcattaagttcacaaaaattagaaagcttgcataaacaaaattcttggcagcaatatattctaacaattgtcattccaaattataacctcgagatactagagaattc

SEQ ID NO: 195826 - DNA, 630 bp, Homo sapiens
ataagaattgtgaaatttcccgtttcaagtgccaaactaaaactccaattccgagatttattttaaaggtaattttgtatttaatgatttatagacaaatrgttttcaatcactcatgttttagtacaaactatcagtacaagctgttcttggtctaagtctaggtcgtgggcaaacaaagtgagattcattagagaaggaaatgactgaagttttgtttttaagacccaaggacatcttgcttttgctaaatgaggaatgctcaggcatattctaagggtttgatttaatgtttccttagggggcttcactggcttatttccattgcaaatattagagccatctgacaagtttcatcgtgactttgtcctcatttggtgctttgtgcttattcacacctgtatttattgtcatcagtttacccactcaggatgactaagcagtctctatctttatttttggttaggtccttcaaacacccaaatccatcctttctgtagctcatagagactgctagacaaaggactgatgtaagtgtttgaaggacctaattccctctgcatagctgattgccccattaagcaattttattttatttatttatttatgtgagagaggggtctcactcca

SEQ ID NO: 195827 - DNA, 537 bp, Homo sapiens
catcctgaccttgccaagggaagtaggaatcaggaaatggtggcttctaacgtgatttcatccaggcccttatgcttgggtccatctcaggaatagtrtttggaattaacgcaggagccagagactaagcaaaccccgcctccaccccagtgcagatttcagttgaatgcagactagagcctttgaaaattatgcattggaaaacaattctggataaattaatttccatcatacataatgcatgaggggaaatccgtggtatttttaaacaatggaaatgagagaatctgccttttgggcattgatcccaattaaatttatttcagcaaacatttatcaacacctactgtgtgccaggttcttactggaaaacagagatgagtcagacattgtctgtgcccggaaagagtgagaaatcaatggaggtacccgcagagtgatcagctctgggttagaccttgagactgggagacaaagagttgtgagtattgccctggagggacatacatcctagtagaggagaacgaggacctgcca

SEQ ID NO: 195828 - DNA, 532 bp, Homo sapiens
catcctgaccttgccaagggaagtaggaatcaggaaatggtggcttctaacgtgatttcatccaggcccttatgcttgggtccatctcaggaatagtgtttggaattaaygcaggagccagagactaagcaaaccccgcctccaccccagtgcagatttcagttgaatgcagactagagcctttgaaaattatgcattggaaaacaattctggataaattaatttccatcatacataatgcatgaggggaaatccgtggtatttttaaacaatggaaatgagagaatctgccttttgggcattgatcccaattaaatttatttcagcaaacatttatcaacacctactgtgtgccaggttcttactggaaaacagagatgagtcagacattgtctgtgcccggaaagagtgagaaatcaatggaggtacccgcagagtgatcagctctgggttagaccttgagactgggagacaaagagttgtgagtattgccctggagggacatacatcctagtagaggagaacgaggacc

SEQ ID NO: 195829 - DNA, 537 bp, Homo sapiens
catcctgaccttgccaagggaagtaggaatcaggaaatggtggcttctaacgtgatttcatccaggcccttatgcttgggtccatctcaggaatagtgtttggaattaacgcaggagcyagagactaagcaaaccccgcctccaccccagtgcagatttcagttgaatgcagactagagcctttgaaaattatgcattggaaaacaattctggataaattaatttccatcatacataatgcatgaggggaaatccgtggtatttttaaacaatggaaatgagagaatctgccttttgggcattgatcccaattaaatttatttcagcaaacatttatcaacacctactgtgtgccaggttcttactggaaaacagagatgagtcagacattgtctgtgcccggaaagagtgagaaatcaatggaggtacccgcagagtgatcagctctgggttagaccttgagactgggagacaaagagttgtgagtattgccctggagggacatacatcctagtagaggagaacgaggacctgcca

SEQ ID NO: 195830 - DNA, 532 bp, Homo sapiens
catcctgaccttgccaagggaagtaggaatcaggaaatggtggcttctaacgtgatttcatccaggcccttatgcttgggtccatctcaggaatagtgtttggaattaacgcaggagccagagactaagcaaaccccgcctccaccccagtgcagatttcagttgaawgcagactagagcctttgaaaattatgcattggaaaacaattctggataaattaatttccatcatacataatgcatgaggggaaatccgtggtatttttaaacaatggaaatgagagaatctgccttttgggcattgatcccaattaaatttatttcagcaaacatttatcaacacctactgtgtgccaggttcttactggaaaacagagatgagtcagacattgtctgtgcccggaaagagtgagaaatcaatggaggtacccgcagagtgatcagctctgggttagaccttgagactgggagacaaagagttgtgagtattgccctggagggacatacatcctagtagaggagaacgaggacc

SEQ ID NO: 195831 - DNA, 537 bp, Homo sapiens
catcctgaccttgccaagggaagtaggaatcaggaaatggtggcttctaacgtgatttcatccaggcccttatgcttgggtccatctcaggaatagtgtttggaattaacgcaggagccagagactaagcaaaccccgcctccaccccagtgcagatttcagttgaatgcagactagagcctttgaaaattatgcattggaaaacaattctggataaattaatttccatcatacataatgcatgaggggaaatccgtggtatttttaaacaatggaaatgagagaatctgccttttgggcattgatcccaattaaatttatttcagcaaacatttatcaacacctactgtgtgccaggttcttactggaaaacagagatgagtcagacattgtctgtgcccrgaaagagtgagaaatcaatggaggtacccgcagagtgatcagctctgggttagaccttgagactgggagacaaagagttgtgagtattgccctggagggacatacatcctagtagaggagaacgaggacctgcca

SEQ ID NO: 195832 - DNA, 584 bp, Homo sapiens
ccatgtcaagacgcacaaaggtaagaagtccaaggggcatcaaagacagattggactaataccagggacaccaaggattgccaggagctaccaggatctaggaaagaagcaaggacggactctccttgagagccttcagatggagcatggtttrggcaacaccttgattttgaacttctggcctctggaactgtgagagattacctttcttttattttagtcacctagctggtcataatatgttatggcagtcctaggaaagtaatagcacatgagatattttttcttgtttgttgttgttgtttttgtttttgttttttcctttatagcacttattgtaactagtaattttctttgtttgcttaccaattctggacatactggaatgtcagcaccatactgcattttgttcatcatccccgtatctgtgatgcttcactccaatagcagctcagttacgatgtgtgaacggaatgtatgaatgaatgaatgagtgaacagagctgttgtgaggactaagccgagcagtacagtgaaattgcatcaaacagtgtctactaagagcaagcatgcagaataaaagc

SEQ ID NO: 195833 - DNA, 584 bp, Homo sapiens
ccatgtcaagacgcacaaaggtaagaagtccaaggggcatcaaagacagattggactaataccagggacaccaaggattgccaggagctaccaggatctaggaaagaagcaaggacggactctccttgagagccttcagatggagcatggtttaggcaacaccttgattttgaacttctggcctctggaactgtgagagattacctttcttttattttagtcacctagctggtcataatatgttatggcagtcctaggaaagtaatagcacatgagatattttttcttgtttgttgttgttgtttttgtttttgttttttcctttatagcacttaytgtaactagtaattttctttgtttgcttaccaattctggacatactggaatgtcagcaccatactgcattttgttcatcatccccgtatctgtgatgcttcactccaatagcagctcagttacgatgtgtgaacggaatgtatgaatgaatgaatgagtgaacagagctgttgtgaggactaagccgagcagtacagtgaaattgcatcaaacagtgtctactaagagcaagcatgcagaataaaagc

SEQ ID NO: 195834 - DNA, 584 bp, Homo sapiens
ccatgtcaagacgcacaaaggtaagaagtccaaggggcatcaaagacagattggactaataccagggacaccaaggattgccaggagctaccaggatctaggaaagaagcaaggacggactctccttgagagccttcagatggagcatggtttaggcaacaccttgattttgaacttctggcctctggaactgtgagagattacctttcttttattttagtcacctagctggtcataatatgttatggcagtcctaggaaagtaatagcacatgagatattttttcttgtttgttgttgttgtttttgtttttgttttttcctttatagcacttattgtaactagtaattttctttgtttgcttaccaattctggacatactggaatgtcagcaccatactgcattttgttcatcatccccgtatctgtgatgcttcactccaatagcagctcagttacratgtgtgaacggaatgtatgaatgaatgaatgagtgaacagagctgttgtgaggactaagccgagcagtacagtgaaattgcatcaaacagtgtctactaagagcaagcatgcagaataaaagc

SEQ ID NO: 195835 - DNA, 606 bp, Homo sapiens
gcctcgtcactgaacacagagttaggaaaaaatatgcagaagtggaccatcacgcagtatttccaccatccagatactctaaacaaacaaacaaaaaacctcaagagcacagataatattcaagtatggtaaaataatttaatattcaaaactcattatttcttattamtttttaatatactttattgaggccaggcatggtagctcacgcctgtaattccagcacttttgggggccgaggtggtagatcactggaacccaggagttcaagatcaccctgggaaacatggcaaaactccatatccactaaaaatacaaaaattagctgggtatgttggtgcacacctgtagtcctaggtactcgagaggctgaggtgggaggatcacttgagcctgggaggtcgcggctgcagtgagccatgattgtgccattgcactctagcctgtgtgacaaagtgaggctctgtctcaaaataagacatacatatatatatacacgcgcacacactcacacacatatatatttatgctatatatgtataattatactgtatgtatatatcaatatgaatatatacatgtatagtacataaatacatgtgtaca

SEQ ID NO: 195836 - DNA, 607 bp, Homo sapiens
gcctcgtcactgaacacagagttaggaaaaaatatgcagaagtggaccatcacgcagtatttccaccatccagatactctaaacaaacaaacaaaaaacctcaagagcacagataatattcaagtatggtaaaataatttaatattcaaaactcattatttcttattactttttaatatactttattgaggccaggcatggtagctcacgcctgtaattccagcactttkgggggccgaggtggtagatcactggaacccaggagttcaagatcaccctgggaaacatggcaaaactccatatccactaaaaatacaaaaattagctgggtatgttggtgcacacctgtagtcctaggtactcgagaggctgaggtgggaggatcacttgagcctgggaggtcgcggctgcagtgagccatgattgtgccattgcactctagcctgtgtgacaaagtgaggctctgtctcaaaataagacatacatatatatatacacgcgcacacactcacacacatatatatttatgctatatatgtataattatactgtatgtatatatcaatatgaatatatacatgtatagtacataaatacatgtgtacac

SEQ ID NO: 195837 - DNA, 607 bp, Homo sapiens
gcctcgtcactgaacacagagttaggaaaaaatatgcagaagtggaccatcacgcagtatttccaccatccagatactctaaacaaacaaacaaaaaacctcaagagcacagataatattcaagtatggtaaaataatttaatattcaaaactcattatttcttattactttttaatatactttattgaggccaggcatggtagctcacgcctgtaattccagcacttttgggggccgaggtggtagatcactggaacccaggagttcaagatcaccctgggaaacatggcaaaactccatatccactaaaaatacaaaaattagctgggtatgttggtgcacacctgtagtcctaggtactcgagaggctgaggtgggaggatcacttgagcctgggaggtcgcggctgcagtgagccatgattgtgccattgcactctagcctgtgtgacaaagtgaggctctgtctcaaaataagacatacatatatatatacacgcgcacacactcacacacatatatatttatgctatatatgtataattatactgtatgtatatatcaayatgaatatatacatgtatagtacataaatacatgtgtacac

SEQ ID NO: 195838 - DNA, 588 bp, Homo sapiens
acgacctgtgatattttacgtgaattatcttataaagcttaactttaagcatggttacttaatcattctacatagyaaacaataaaatacaggtaatcatattattatcattacaaatgtcgcataatcttgaagagttttgcagacagggaaacttgcatttgaatctcatccacaacactggcaaatactgttttgtcatgcttaaccttggtttatctctgtccttaaataaagaataaaaacagtaacaaaaatcgtaggtcatgtgacatcgttatgaggttaaatcaacgaatacatgaaaagtgcctttaccacactgcctgacttaagaaaggaatttcccgttactgactgaacggaagtgtgattgagataattattttcaattgaacttgaaatatattgctggtacaagttttccaattcaaggatgtccaaatgtacaaaacatatttacatcaggattgtgatgctattcatgttatctgtaatcctatgcattaagatgattttggaaataattagatcaaatcaactaaagaaaaaaatactttttcatataatggttaattaagtctagag

SEQ ID NO: 195839 - DNA, 588 bp, Homo sapiens
acgacctgtgatattttacgtgaattatcttataaagcttaactttaagcatggttacttaatcattctacatagtaaacaataaaatacaggtaatcatattattatcattacaaatgtcgcataatcttgaagagttttgcagacagggaaacttgcatttgaatctcatccacaacactgrcaaatactgttttgtcatgcttaaccttggtttatctctgtccttaaataaagaataaaaacagtaacaaaaatcgtaggtcatgtgacatcgttatgaggttaaatcaacgaatacatgaaaagtgcctttaccacactgcctgacttaagaaaggaatttcccgttactgactgaacggaagtgtgattgagataattattttcaattgaacttgaaatatattgctggtacaagttttccaattcaaggatgtccaaatgtacaaaacatatttacatcaggattgtgatgctattcatgttatctgtaatcctatgcattaagatgattttggaaataattagatcaaatcaactaaagaaaaaaatactttttcatataatggttaattaagtctagag

SEQ ID NO: 195840 - DNA, 588 bp, Homo sapiens
acgacctgtgatattttacgtgaattatcttataaagcttaactttaagcatggttacttaatcattctacatagtaaacaataaaatacaggtaatcatattattatcattacaaatgtcgcataatcttgaagagttttgcagacagggaaacttgcatttgaatctcatccacaacactggcaaatactgttttgtcaygcttaaccttggtttatctctgtccttaaataaagaataaaaacagtaacaaaaatcgtaggtcatgtgacatcgttatgaggttaaatcaacgaatacatgaaaagtgcctttaccacactgcctgacttaagaaaggaatttcccgttactgactgaacggaagtgtgattgagataattattttcaattgaacttgaaatatattgctggtacaagttttccaattcaaggatgtccaaatgtacaaaacatatttacatcaggattgtgatgctattcatgttatctgtaatcctatgcattaagatgattttggaaataattagatcaaatcaactaaagaaaaaaatactttttcatataatggttaattaagtctagag

SEQ ID NO: 195841 - DNA, 588 bp, Homo sapiens
acgacctgtgatattttacgtgaattatcttataaagcttaactttaagcatggttacttaatcattctacatagtaaacaataaaatacaggtaatcatattattatcattacaaatgtcgcataatcttgaagagttttgcagacagggaaacttgcatttgaatctcatccacaacactggcaaatactgttttgtcatgcttaaccttggtttatctctgtccttaaataaagaataaaaacagtaacaaaaatcgtaggtcatgtgacatcgttatgaggttaaatcaacgaatacatgaaaagtgcctttaccacactgcctgacttaagaaaggaatttcccgttactgactgaacggaagtgtgattgagataattattttcaattgaacttgaaatatattgctggtacaagttttccaattcaaggatgtccaaatgtacaaaacatatttacatcaggattgtgatgctattcatgttatctgtaatcctatgcrttaagatgattttggaaataattagatcaaatcaactaaagaaaaaaatactttttcatataatggttaattaagtctagag

SEQ ID NO: 195842 - DNA, 585 bp, Homo sapiens
atatgccattaaatcttaattattcttcaaagagagcaagcacaaccagggggcagagaaggaaggaatattcagaatctcaccaatgcctggggctcggggcagtagcacagctactgtttcaatgcttgtatttacttaaaactgaatctctccttctgacttctgcgatgggccggggaatttggtttacataagcagccccgtttctcagaccctytgtatcttcttctggagtatatgaaggctgtggtaccaggccaaattttgcacacaaggtttgaattagaatgattgatatttttatgatgcaaagaaatagcacaccctccagtgttgaccacagataacactcgaattcagagtagtgttttcgtgcctttggaattaatagtctctgttctgtaattcacaggcatcaagtgtcatgctagtcacgtgtcatttccctgaggcacacaactgaggtgtccttgattagtgcatgaagccacagtatcctaaacttaacacgtggtcctggttaaatggaaggcttaaggaactcaaaaggtgttaattttgaatgctgattttcaatactgt

SEQ ID NO: 195843 - DNA, 588 bp, Homo sapiens
tgtttctcctgtcttctggtcacctgtaattcttttgtcctaggccaagtgtacatctgtcacctcaatgtttatgagtctatgtctggatacttggaatacaattccaacttcttttctaggttttcacagctttgaagaagctccatcctgtgtccctgggcctcattccctacatcttctaatctccttctctttgttcacttccttgagccatagtaacctcgttttgtttattgaatgcaatatatcagcctcagagccttttcctgactgctcttggtctgcagttctctccctgtgatgcatctgcagattttatcttcccattcttcagaccagggctcagaagtcactttctctgagaggcattgctgtggggcgatattcaaaattgtccaccctcttcatcacatkacttcactttcttgttctcttaatgtcaacctctgaaattatcttttgacatgtgtgtttaattgattttcacttttgttgctcttgctctggacggcaatctcagtgagtactttgttcatcactgtatccctggtagctccgacaatgcctttcaaataggaaatgctt

SEQ ID NO: 195844 - DNA, 373 bp, Homo sapiens
tgagtactactaattcacatggaggagtcaatggtggtcacaactactttttaaccacaagaagcaatagttactggttaggctaatatcagaagaagtgggaaaggtctagaaaaaataagctagasagaatgaaaaacaattgtgctatgttttgcaattttggacaaaagtagactcacgaaagtggttttacagacatcttctttgtcatttcctagagtactggccagatttaggatcccatagagggaaagttactgtgtcaaatcctatgtaaatcaaaaaaaggatttacccatggcttgtctaagttgcctcttgaatgaaactctagaaattgatgtagaaaaagctactgcctcccataatc

SEQ ID NO: 195845 - DNA, 321 bp, Homo sapiens
tggcatcaggccgggggcagctgaaaatccagggcatcacatttatcctccatggtgagaagcaagacattaatagattattatccacatacatctgacttcatgtctcagaagcagggttgggtaattaaaacacatgaaatccccgtttgtatatatcacaaacagatacaccttctttcccatatggaaacaatcccaatgactgtccctcattccaggcacttcccatgtatgtgtgcagttaatcctcacaacaatccattcaggaagktgctatttttatccctcagtcatggggaaactgaggcagggaatata

SEQ ID NO: 195846 - DNA, 370 bp, Homo sapiens
gatatattcattttgggaatctcaattaccagcatagggtctgagccacagctggtattcattagatacatggattagcagatcaatgaatcaataagtcaatcaattaattctgagagcctcactttcttatggctgaacttccatggactagaatttttgtctttaattagctatatgtccaagaacaagtccatttcctctatgtaggctgaatcatgagatcaccaagattctttctaccaccaatgttaaatamctctgtttgctaaattctttgtctttgtcaatgaaaataacagtgctgttttattagtacagttttgcccttttgtattttatttatgtaaataaattcatcattattaag

SEQ ID NO: 195847 - DNA, 567 bp, Homo sapiens
atggacacttaggtggattccataccttggctattgtgaatagtgctgcaataaacatgggagagcagatctcccttcgataggctgattccatttcctttagatatatactgaatcgtaggattgctggcttacatggtagttccatttttaattttttgaagaacctccatactgttctccactgtggcagtactaatttagattctcattaacagggtgcaggggttcttttttctctgtgccctcaccacccacttgttgtcttttgtctttttgataatagccattctaacaggtgtgacgtgatatctcattgcggttttgatttgcagttccctgataattagtgatgttcagcatttttaaatatatatgttggctatttgtatgtctttttttgagaaatatctatttagktcctttgcccatttttaaatcagattgttttttttactattgagttgtttgaattatttgtttattttggatatttaccctctattaaatgtatgttttgcacatatagtctcccattctggaggttatctcttctctcagttttaa

SEQ ID NO: 195848 - DNA, 486 bp, Homo sapiens
aagaacctgtggcagggtgaattttccacacttttctcaaaaatctgaaaaaagtctgcagagttgaaatcaggtgacttggcttcaccttggaaagcagtccattgtcatttttcctacttattttttaaacagatagaccatgaaagggtgcgatcgtgtcatcatcatgagaaaaatagggatttgattattctttagcatttttctagctctgctatgctgttgtatcgaccctagcgacaagtttgatgtgaatctaaaatagtagttaaaagtgactatggaaaatagtggctcaactcaactgaaccttttagattaaatgcctgattgatagatgatggttatttaygattaaaaaagaaaggcgtggtttcctggaataattggaggccctgcagccccactgacagaaaatctgccagaatgtttctttccaggcttggtcagacaactcagacactccccttttctatttgcctc

SEQ ID NO: 195849 - DNA, 627 bp, Homo sapiens
gaggtctcactatgttgccctggctgctctcaaactcctgggctcaagtaatcctcactcctcagcctcccaaactgctgggattacaggcgtgagccaccacgcccagcatcttcatcacatttggagggaaaatgtattcttcccatttcacagataaagaaacgaaggcttagagaacggaagcatcttgcccaatgcaacaaaacaggcattttcttcactgtgccactcagtcagtcaagctgctatkaaagtttaaagaggacccagtgccctactttaacctgatttcaattttagaccaatgcacaaggggagaagactagagccctagggaccctcctgtcttcagtgaattgcatcaaccaattagatgtttcagaatgtatgtgcaaggctacaggattctaaaaagtaagatacaaattatataatttggtgaagtttcaaatggtgtggttgttgactgctatatggatgacccaaagatagaaatgaacatggcgaatctttgctgaggaagagagagtggatactcacaaagatttatctatagaagagaagcaagtaagcaaataatttaaaaatagagagttctttaaatgaactatagtacagccactt

SEQ ID NO: 195850 - DNA, 532 bp, Homo sapiens
tgtggtgaaattacaagtgatctttgtcgattttattttatagtgtatttctgttttaacaatgtacaataaccaaaaggctcttttaaagaaataaaatgggccgagtgcggtggctcacacytgtaatcccagcaccttgaggggccaaggtgggcggatcatgaggtcaggagttcgagaccagtctggtcaacatagtgaaaccccgtctctactaaaaaatacaaaaaattagccaggcgtgctggcgggtgcctgtaatcccagctacttgggaggctgaggcaagagaatcacttaaactcaggagacggaggttgcaatgagctgagatcacgccattgcactccaacccaggcaacagtgcaagacgctgtctcaaaaaaaaaaaaaaaaaaaagaagaaaatgtttattttgtcagtattttatctttcaagatctagatatcaccttttccttcttccataaatactacaacctcacataggtattttctgtcctccagttgtgtagagtgctagtaattc

SEQ ID NO: 195851 - DNA, 532 bp, Homo sapiens
tgtggtgaaattacaagtgatctttgtcgattttattttatagtgtatttctgttttaacaatgtacaataaccaaaaggctcttttaaagaaataaaatgggccgagtgcggtggctcacacttgtaatcccagcaccttgaggggccaaggtgggcggatcatgaggtcaggagttcgagaccagtctggtcaacatagtgaaaccccgtctctactaaaaaatacaaaaaattagccaggcgtgctggcgggtgcctgtaatcccagctacttgggaggctgaggcaagagaatcacttaaactcaggagacggaggttgcaatgagctgagatcacgccattgcactccaacccaggcaacagtgcaagacgctgtctcaaaaaaaaaaaaaaaaaaaagaagaaaatgtttattttgtcagtattttatctttcaagatctagatatcaccttttccttcttccataaatactacaacctcacataggtattttctgtcctccarttgtgtagagtgctagtaattc

SEQ ID NO: 195852 - DNA, 397 bp, Homo sapiens
acactgggttgacctgaatagtccaggataatctccccatttcaagagccttaacttaatcacagttgtaaaatctcttttgccaaattaggcaacacatccactggttccaagcattagggcatggacacatttggtgagtccttctcstaccacatgtgaagaacatgcatgtgttaaccactgcggctatttctacactactcctactattacagagaaagaaagtttttttttctcctcctaaaaggaaaataagtagcagtcatgtctcagctatcaagagaaagggtaaaaacctataccctcattccttgaaattcctctaaaattacttaatatattgcttttcttccaccagtgggccacttgttggaagtcctaagcagtgagttat

SEQ ID NO: 195853 - DNA, 604 bp, Homo sapiens
caggcacccacaataaaggtatggtagatactattaccccattgcacagttgagaataatcaaggtgtggtgaggttaaaatgacttggccaaagagcattgcatcgaatgatttacttacaaacagcactctggctatgccctaagcagaatcaactggaagcaggctgcaaagcccaggtaagaacatgttgtaagggaaagctgatgacagcttgggcatgcgtgtgtggcagatggcatagaaagcctggatcaatcattcttttggagaagagtggacagagctggcccagactgattggactagggcagatagacaagagaggagggaaggttgactcccgggttattggtgggagcacttagatggatgatggaacccgtaactgagaaagacaaacctacttcagcaagttcaagttctcgaaagcatctgtgctttaggccttgtgccacacgcaggggatgcccagatgactaagctatggtacctgttctccagacattcgtwggttgtggaggaatagtgtggggagggcccggatagaaatatacacaaaatataggaggcatggaacaggaagaggagaccagctatgct

SEQ ID NO: 195854 - DNA, 560 bp, Homo sapiens
caaatatgaattagtttgctcatctataaaattaagtaagctgaactaggtgatcttcaaagttctgtggttatagggtctctgttttaaagacaatgaaaatgagcctcagagaaatgaagtgttttgctgctatgagtaagccaatgaatcagagccagttctscaacccaggccttctgagtcctagtgtagaattctttcccaatccacagtaaaagaagctggagaacgggttgcccctaaaacatcccaggggaaattaaactactttgtgaaaagaactcaagtcctaggtttgaaatggcgacacaaatctgaaacctgtgtgcttccctgtatcttctgggagatggtcaaaagtgatatcaatgtaaccaaatttcaattcagtatccattgtttgcagaaccctgatctacatactgtgaaaatagaataaaaatatatggttttcttttcactggaatacacacacacacacacacacacacacacacagacacacacagaggcacacacacagacacacacagaacgttaatcacagggcagaagac

SEQ ID NO: 195855 - DNA, 462 bp, Homo sapiens
gggcaagttaattttgctaagccttggttttctcttctataaattgggrgctgatttgtggggcattataaaaattagaagtgatacaggtgctgcttctggcacatagtagatcatcagtcattgcaagccatttgctgtcacgctcgctgactaccagacagagcagatgaatttgacatgcaactacacagaagaaacatgttttggttcccacctgtctgctgatgaggggaacctctgaatgttccgagagtctctgcagagcagcgtgggcctcctgaacagcaacagttctgtggaggtggggtgacatttctgaagtgtcttgattgacaccttcagccataaacataaagcaaaataaagtgacttctctcttattaaggaatacagagaactcccctccagatcgcccacttgaaacatggagagggttgggctctgagggaatgaaagttg

SEQ ID NO: 195856 - DNA, 409 bp, Homo sapiens
ggaagtttggggcagccaacctggcacagctaatcaaagactgacatggaagccactccctctcccctcccctgtatcactgacaccattttccrtcgtcttgtcatcgcagactttacagttgttgtcatgagtctaatctgaaaatgaaactggcacatgatggcaaccaacccaaagggaattttgaagcctgcagaaagagggatattttctttccactctccaaactcaagtaagaacaattgttgactttccctacaacccattaattctatatttaggaaactaaaaggaaagggggaaaaatcaaccacaacctcacacacaatggaaaagattgtagaatcccagtggctatattggcaaaatgcagcatgcgtggccttcattggggtgttactagtct

SEQ ID NO: 195857 - DNA, 482 bp, Homo sapiens
ccacagtgttaaggattgacttagacttggtgtcgggctcttgttgagtcactgccagctggcaaaggtggcgagtcsacacgcatttccccaaggcattgtggtggttagagatttcggttgcaagtcggtgtttagcgtactgggtcgtcccgcagcctgatttttcttgggagatcagtttccctgaagtaccaagaattagctgcacggactgtcatttactgcgtgtgtatttttaagacaaagtgatctttaaagcgtatttaagattccagggaataatttgataaaaatttaacataagttcctgtttaaaaattctgaatttgtgaggaattgaatgagattttaataacttaaataaaaacatgaatcttggccgggcagggtggtataagcctgtaatcccagcattttgggatgccgaggcgggtggaccacctgagatcaggagttcgagaccagcctggccaacacgg

SEQ ID NO: 195858 - DNA, 371 bp, Homo sapiens
acccctggagaagcgcgttaaggagctggctcaggtatggtggcacagtgcggctgggctttcctggaagcagtttgggcagattgctgttggttctgcactgcgtgaagcttgcccagagaaactcttagtgagttggcagttaaggtgtcagctttttccaaaccctmttctcatcctgagggagaaaacagtgtaagccttgcccgtcaggcatcattttaggcctttcttggtttcttcatttctggaaaatttgctttcttctggggagattgttctctttctgttttctgtcagtttgttttccacacggcatcttttccttcatgtgatagacggatgatgttggcagcaggcagctgaggcag

SEQ ID NO: 195859 - DNA, 633 bp, Homo sapiens
aattctatacccagaaaaaatatctttcaaaggaaggagaagtggcccaagttgagaatatgtagagattcctggacagaggccaatagcctggcttcctggtcagagtcctggaaggaaaaggatgaaaggattggagacaaggaggtctgaggttgagacatatggatggacatatggacattggtgtgaactctgaagattttttttatcacatattaactctgacaagaagctatccaccacagaagaggcactgaataagaagacaaaatgactcagccagttgactttaatcacccttcatcattggccaccccagaactggcagaatggacaaatgaatagaatggtcatgattgtagagayaaaggttagtatgggtctcattatgaatttccactaaggaaagacaatgtagctactgctgctactgaatacctaacttgccagcaccatggaccaatactgagcctctagatctggcactattcctcaaggagaacactgagccacttggtagcaagttgactacattgggccccttctattctagaaggaccagtggctcaaccttataggatagatacctgttacaggtatagttctgcctttctgcctgcagagtctcag

SEQ ID NO: 195860 - DNA, 545 bp, Homo sapiens
atgaagtagaaatagctgagtttccccggcaggaggaaaaaacctgagggaaagggacatgcagtatatgaggccagaaggcccatagaggatatgtttcattggaggacccagaggacacaccattcaccaataacattaggaatgcactggtgagaagcacaccagtctcccaagtaactcattgttggttctcctctgcagattaaggctgctgataggagagacagatgcagaactggaccattaggaagatgatgacttcctaatatatcagaagccagagggctacaattatcataaagactggcaaggtcagaagggctgcaatggtggcttgaactgagagcatggataacagagcctggygtccttagaggcaaaatatttaggcagccaataaggctgctgcctaacatttacaaacagaaggcaaatatggaggaacagaggtggagaacttctgctttcagccaagatggagtagcaagtttcagatttgctcttgttcctgaaacaaccaaaaatacacaaaataagtgaaa

SEQ ID NO: 195861 - DNA, 562 bp, Homo sapiens
agcttagttgagagtgacagatttgcaactcaggctgacctaagcagtaaagggagattactggtttatgttacgacaggggaagatggacttcagggattgctggatacaggtgctcaattatattagcattttctctctctctccctcagtcccttcatctctctgctctattttcctctggaccagctccattttcaggcaggttctccccttttggtgataagacagctgcaagtatctctggatacatatcatcacaacttttattgcttccctaatggctcaagaagtctcaggtaaatctacccataagtcaatcctagagctagggggaatggaatgtgccggtcaggtgggcttagagcatgcacccatccctggagctagtggaggtgggcttagctycaccaaactacatgaattgagaatagggagggatggtttggaaaggaaaaccagaatgcctttgccagaggaagaagaagaaggcatggccaatagtatggtagaaaccaccaaaatctactagatccatcatgaaaaatcaagtgacattaca

SEQ ID NO: 195862 - DNA, 449 bp, Homo sapiens
tacatgcatgaatgaggtgactcaatatgataaaaatgtcaatttccccaaaatttagtctaaaaattcagtacagtttaaaataaaatgccagtagaaacttttacacctttgacaagcatatttcaaaatatgtaagaaaagaatgctttgaagaatttcaacaaacattttaaaaatacatttggaaaaataagactgaattgccatgtaaattttgaaattttgaagaatacgatcgaaagtgggtgaggttggtgtatcatagcagatattaaaatatgttataaaaccataygtttatttattttttttttgagacagggtctcactctgtcacccaggctggagtgaagtggcatgatgtcggcttactgcaacttccacctcccaggttcaagcgattcttgtgcctcagccttctgagtagctggcattacaggcgtgca

SEQ ID NO: 195863 - DNA, 561 bp, Homo sapiens
gaaataataactgtgactttggagtgacgagtgtgttctaaagcaatacgcaaaaacataagctctaagacaaaaaaaaaaggagagatggatttgactgcayggaaactggagattcaacaaatgccaacataaataatatttacagacagatgaataattagggcatctaaaatgtatatgaaattaatatttagaatagataaggaacttctgtgtgtcaacaagaggaagaaaggtcaacccacagaaatacgtgtaaaacatctaagtcagcagcttacaagggaaaatctgagggggaaatatgtttatacagggaagctaaagctattgtagataaattataactaaatcacaaatgaatgacattttacaccccacagattagaaaaaaatcataatagggagtttttgtaaagagaaacaacatactggtagtagagtgaaattgatacagcctttctggaagccattacttaagtatgcctaattctccgacccagtcatcacattcctaattataaactccagataaatttttacagcaggactacatgg

SEQ ID NO: 195864 - DNA, 622 bp, Homo sapiens
tttcttgctaatttctttgagtttgttgtagattctgaatgagttcctttgtcggatgtgtagattgtgaagattttytcctactctgggggttgtctgttcactctgctgactgttgcttttggtgtacaaaagttctttagtttccacataaaactctactttggtggtaagaaatcaagctaaatgagttgattacattgtagagtgaggagaggaaattctgagaagttcacttaaaatattgagataccagaagttcaatatctctgggtccacattacacaaacccattctggagaaagttatttcccagtagcccaagagaagtttccattaaaacctgtgcaactgttaactgtcagtcaaagctgtaccacgaaaaaccacacatctcacataggcctctttccagtgactgtgttcacccctgccctccagggctgtggagttgctgccatggggccactatgctgattctctgcttgccctggactcaggacagttatttttgttgacttgaaagcctcagggcatactgctcacatgaatctagggctgagaagcccataaaatgccctcaggaaaaacatgtgattgctataaaaaaatgaagcttaaa

SEQ ID NO: 195865 - DNA, 188 bp, Homo sapiens
ttttattttaaggatgagtggatatgtgagtccactcatacccacatatctttttgaggtatacaattctacccataacagatatctcaaccacaacatgtctaaaatgaatctcttaattctatcccaaaacacttcttcacctatttttctccacttyagtaaatgtcaccacaatccatcacagg

SEQ ID NO: 195866 - DNA, 534 bp, Homo sapiens
attaacattgaacttatggccaacagcaaaattattcaagcctgaacaaagccgatgtaacacatgtattttctccgtgagacacatcacagccttccggtgcttgggaaccctagacagcacttcagcaccatgcatgggtgccattttaaaccgtgaaatcacacacgaaatataaaaaatgtggcatcaaatagatgaacggacacttgtttatggtatgagaagtaaaggaagagagcagagtgtcactttgtgccagctcagctgggaacatgggctttggggaactcaaattttttgcagtctgtgcatgcccaagaatgaccctgaaagcattttcagtattgatctgggattacagatacattttagcaggaatgtgaattcacacatacagaatctgtaaataatgaggattaactatatttaggctttagaatgtattctatrcaattcaacttaccctttaggatcaccaactagacagtccatttctggctgagaggggctacgtctggttttgcttgccgt

SEQ ID NO: 195867 - DNA, 581 bp, Homo sapiens
ccagtattctgataacacccaactttgtgtctctaagatttcttttctaaaccatagatccatttacacacacattgatctcaggatttcaaacacaaacctgtcaaacattttcccttccccttcctcctcttccctcttctgtaccaaatccgagcttcctcgtmccggccttacactgtttaaacggtatcttcatccactgagttagcttctgtctcccattcctcaacatggaattagacaataagcctcgctgattttactcccaaaatatttcttgaagcagtctccttttctaaaatcgctctgcaattgccttagtttggattctcattgtttttcacccaacagtctgtgaaagtcgatcatacaaattgggtcattcttgttatacccaactgaaacagctgagaagctgggggaaaaaaacactcagggcacacaacattgctccaaaaatataattctctgcaagtccaggtgctgaaactacctgctgtaacccgaaactggttttatctaatatttgctgcaaccacctgctgcaattctatgactaattttacccactgctgtca

SEQ ID NO: 195868 - DNA, 581 bp, Homo sapiens
ccagtattctgataacacccaactttgtgtctctaagatttcttttctaaaccatagatccatttacacacacattgatctcaggatttcaaacacaaacctgtcaaacattttcccttccccttcctcctcttccctcttctgtaccaaatccgagcttcctcgtcccggccttacactgtttaaacggtatcttcatccactgagttagcttctgtctcccattcctcaacatggaattagacaataagcctcgctgattttactcccaaaatatttcttgaagcagtctccttttctaaaatcgctctgcaattgccttagtttggattctcattgtttttcacccaacagtctgtgaaagtcgatcatacaaattgggtcattcttgttatacccaactgaaacagctgagaagctgggggaaaaaaacactcagggcacacaacattgctccaaaaatrtaattctctgcaagtccaggtgctgaaactacctgctgtaacccgaaactggttttatctaatatttgctgcaaccacctgctgcaattctatgactaattttacccactgctgtca

SEQ ID NO: 195869 - DNA, 448 bp, Homo sapiens
ctattacgggatgagataaaggtgatataaggtagggaaggaagctctgtgtatgggcagaatcaaaatcccaaatcaaagatgggagcatatctgcttttagagaaacataaatagggtttcacaagaaacagatctatgtttcaggtcagaaaagctctacattaatccacaatacggcaatttccaccgatgggaaggacagttaccagaacaaggaaagtcactgccccttgatgcttggcattaatcaggccctggagactccccatgaccagacactgatgctatctcaccactcagccatggaacattgaccaacaagcttggcaaacagcagaggataagggactcaagaggcatctgggaaaatactgatgtggcatcaaagycatcttgaaaattttgaaagactgctgtgtagagaatggattagactacctatgtg

SEQ ID NO: 195870 - DNA, 448 bp, Homo sapiens
ctattacgggatgagataaaggtgatataaggtagggaaggaagctctgtgtatgggcagaatcaaaatcccaaatcaaagatgggagcatatctgcttttagagaaacataaatagggtttcacaagaaacagatctatgtttcaggtcagaaaagctctacattaatccacaatacggcaatttccaccgatgggaaggacagttaccagaacaaggaaagtcactgccccttgatgcttggcattaatcaggccctggagactccccatgaccagacactgatgctatctcaccactcagccatggaacattgaccaacaagcttggcaaacagcagaggataagggactcaagaggcatctgggaaaatactgatgtggcatcaaagccatcttsaaaattttgaaagactgctgtgtagagaatggattagactacctatgtg

SEQ ID NO: 195871 - DNA, 354 bp, Homo sapiens
taacaggccccaatattggcttttataagcattataccacttaatcctcaaaacagtactatgcattacatgttatctccatttttcaaatgggaaacatgaagctcaaagagactgaataacttgcccatggcccagcagtgagtaggtgacacatccaggatttatattcatgcctgtccagccccagtgcacacaaaatagaaactgattatcaagtgagaatgttttacttttcctgtttaattgccagccagaattggactctaaataaaataatagatgacttacaggtacttaaygcataattcttagatataattttataagatacttccataaattaaaaaaaga

SEQ ID NO: 195872 - DNA, 545 bp, Homo sapiens
tttgggttttacacttaagtctttaatccatcttgagttgatttttgtgtatggtataatataaagaatgggcccagctgggcatggtggctcaygcctgtaatctcaacattttgcaaggcagaagcaggaggatcacttgagcccaggagttcaaaaccagcctgcacaacaaagttgaaaccccatctctactaaaaatacaaaaattagctgggtgtggtggcacacgcctgtagtcccatctactcaggaggctgaggcaggagaatcccttgaactcaaggaggaggaggttgcagtgagccgaggtagcggcactgcactccagcctggtgacagagcaagactccgtctaaaaaaaaagaaaaaagaaggggtcgagtttcaatcacctgcatatggctagccagttattccagcaccatttattgaatagggagagtcctttccccattgcttttgtcagctttgttgaagatcagatggttgtaggtgtgcacctttatttctggtttatttctctattctgttccattggtcta

SEQ ID NO: 195873 - DNA, 545 bp, Homo sapiens
tttgggttttacacttaagtctttaatccatcttgagttgatttttgtgtatggtataatataaagaatgggcccagctgggcatggtggctcatgcctgtaatcycaacattttgcaaggcagaagcaggaggatcacttgagcccaggagttcaaaaccagcctgcacaacaaagttgaaaccccatctctactaaaaatacaaaaattagctgggtgtggtggcacacgcctgtagtcccatctactcaggaggctgaggcaggagaatcccttgaactcaaggaggaggaggttgcagtgagccgaggtagcggcactgcactccagcctggtgacagagcaagactccgtctaaaaaaaaagaaaaaagaaggggtcgagtttcaatcacctgcatatggctagccagttattccagcaccatttattgaatagggagagtcctttccccattgcttttgtcagctttgttgaagatcagatggttgtaggtgtgcacctttatttctggtttatttctctattctgttccattggtcta

SEQ ID NO: 195874 - DNA, 559 bp, Homo sapiens
tctagattatgaagggattgtcctcagtgaaccataaaaagctttctttacctggggaaaatacattgtagcataataatctactgttataacatcagccctcttgcatgggaaagcttttatacaactagaaaacatgcattgaaaatgacarttgaatgaaatccctttataaatgtttaaatggcccatcagatagccaaatgtacctgacgctttaattttttccccaggaatatggaagtgaatattggttctaaactgtttccacaatttataagtcaccatatcaatatattcaatttggattattttatcttttccatgatgagtcatggaatgcagaacctttaataacaaaagcttaaggattcaggaaggacaaggtggctgtcctagttcttcatgagtccatgcttaacactggacttacgtcctcttgaataccagttgtttctccaatttaggtgcacagcactgataactaatggtttatcataggtaatttgacttagaccatgaagttcattcaaattgtatatttaaacaatttcagtat

SEQ ID NO: 195875 - DNA, 613 bp, Homo sapiens
tgccataggggtttatgaggatgacttcaactgctgtgttctgaattgacagcaatatttctggggagaagcagtcaggtttgcaacaggaagctattgcaaaattccaggtcagagataatggtggcgtgggccaggatgaaaacaayggaggtggttaaatgcatttggattcaggatatatttactaggtaggcctaataggtttcactaattggatacacagtgtgtgagaaagaaagaagtcaagcatgagcctaaggatttttggcctgagtaatgggaaggatggtattagtgaattgggaaagattgaagagaatagtgggagttgggaaggtgaagtacagcgactgagaatatgctaaatacctctgttcaatatctagtagacatgttaaaactttaatcttgggagttgccaaaggtaggtggaattttaaatcatgagtctaagtgtcattaagggtgaagcaataatcagcttcagtgaatcaagagactgaccaacaataactggactcagcagttataaaactcttccgaggagttctgctaaaaagagggcattataaggaggaaatctgaaggtcaggagaagttaggagaattc

SEQ ID NO: 195876 - DNA, 618 bp, Homo sapiens
gcaactaaagataggccagcagctattctttttttctattttaaaaagaatgcctacatatttaattaacaaatataggatatgaatggccttcgaaacatacaacttcaatcacaataggattgttgtttcattcaatatgtcccttatctctgcaggtctggctgtgcctggaaaatataaaatcactgcatataagctttgtaaacaaaaaaattactgtctgaaaactctatactgtatgaatattgttacaacaaaggcttcctttggttgacttaatatactattttagcctaataacattgggtgtgcatttcttccaactaataaaatttatttaaccaagtgattctcttcatttataatttatttgcattttattaattaactttttgaagagttggcagccaatctaccacaatattttttaaaaggctgagggctctctgcaggctttggtgttaacattaaatgagggagcctatcctcatcctttgtcccwgtctagttctagtatcttcagatttacacagtctatcctacactggaagaagctgggcccaggataaatctggagagttcattacagactggcaatgtctccaagagcactct

SEQ ID NO: 195877 - DNA, 595 bp, Homo sapiens
ggcccatgccaataatcccagtcctttgggaggccgagctgggaggattgcttgaggctacgagtttgggaccagcctgggaaacatggcaataccccatctctgtaaaaaattaaaaactagctgggcatggtggcacatgcttgtaatcccagctactccggaggctgagaccagaggattacttaagcccaggaagtctaggctgcagtgagctgtgatcgctccactgcaccctaggtgacagagtgagaccctatatcttaaagaraaaaggaggaaattgaggcacaggaaaggtttagtaatttgctcttagccatgtatatattaaataatggagcttggtttcaaacccaggcagtctaaatctacaatttattctctaaaccactagaccaggggtcagtaaccatatcttgggctttatgagccataaaactctatgtggggtagtgggaagaggctgggtttgacttataagctgtagtttgcaaaccctacactaggctgtatagcctcactggggcacatccattaatatcaatgtatcccacagctgcccatgaagagtgaagctctaattttgaaaagg

SEQ ID NO: 195878 - DNA, 595 bp, Homo sapiens
ggcccatgccaataatcccagtcctttgggaggccgagctgggaggattgcttgaggctacgagtttgggaccagcctgggaaacatggcaataccccatctctgtaaaaaattaaaaactagctgggcatggtggcacatgcttgtaatcccagctactccggaggctgagaccagaggattacttaagcccaggaagtctaggctgcagtgagctgtgatcgctccactgcaccctaggtgacagagtgagaccctatatcttaaagagaaaaggaggaaattgaggcacaggaaaggtttagtaatttgctcttagccatgtatatattaaataatggagcttggtttcaaacccaggcagtctaaatctacaatttattctctaaaccactagaccaggggtcagtaaccatatcttgggctttatgagccataaaactctaygtggggtagtgggaagaggctgggtttgacttataagctgtagtttgcaaaccctacactaggctgtatagcctcactggggcacatccattaatatcaatgtatcccacagctgcccatgaagagtgaagctctaattttgaaaagg

SEQ ID NO: 195879 - DNA, 521 bp, Homo sapiens
tctcttctaagtggacaggtttttattttccaatccagtaagacaaattctctagaaaacggcatagtacccacctcacaagttcactgtgagcattaaatgaattggtttatttaacacatgtcaaacattgtctggaaaattcagagcactatatattcagagtactatgtatatgagtcttggttatgagtattactgaaacttctatgtgccttgcttttcctgtatttcttgtcacctcgytccccttcctcatggctccttttgaagatagtatttaatttacatctccattactgtttggaagctatgtcctttgttatactattttaatagtcacccttaaaatttgaatgtgtgtataaaacgtaagtcctaaagttaatcaatgtctttactttcttcaccctcagattcaaggacctaagaatgatttatttctcatcattcctttcaaatcacatttgcagttgtatttttaaaatttctgccttgcttttataacccacaaattagac

SEQ ID NO: 195880 - DNA, 406 bp, Homo sapiens
ggagtcactttctctgcacggggtacagtgggattgactctgggcagcattcagaggatgaaatcgttattttactcctctactctttcacgcatttgttagctactacttgcttcctggacttgccatttacattcttcccagtgcctatgcattcatgttgccaattgcctatgaaaattgacccgggctcattctctggaagtgccccactgctccaaattcacatctgctttccactgaaaactccacttctttcctcttgacaaatcgcagctgagaaggaaggtttcttggaatgactaccatatcttgcttcaccttcygagaaatgctcgcccttaatagcctacatgaatgtcatcatgggtgcatctctggctgtgagacagagggaggagttgta

SEQ ID NO: 195881 - DNA, 623 bp, Homo sapiens
gctctgccttctagatagccgtagcaaaattagtgaaagtactaaaaacctctgatatgaagaaataatggcgtaggctgtgtcctctctctctctctgtctctccacctcggctgccaaacagggaagggccccctgtccagtggacacatgactcatgtgaccttgtcaatcattagagatgactcacactccttaccctgccccttttgccttgtatccaataaataacagcgcagccaggcattcagggccactaccggtctccgcatcttggtggtagtggtcccccaggcccagctgtcttttcttttatctctttgtcttgtgtctttatttctacaatgtctcatctccgcacayggggagaaaaaccctccgaccctgtggggctggtccctacaattgtaaaagcccagatgtctgtgtaaggagaaaaaaacaaattcttggtgccttcatttttcaatttcatgtaaactgtggagaaacacttaattgtaaagggtctgaggtttactctacttgcaatctaatgagttacattatcattgtttcatggatgttggcaaaagacacaagactcttaggttaaaaaagggaaaagttgtatactgagtgga

SEQ ID NO: 195882 - DNA, 522 bp, Homo sapiens
taggaattccagtacagtgttgaataagagtagtgaaaatgggcgttcttgtctggttccagctcctagaggaaaagtttttccccattcagtatgctgtcagctgtgggtttgttacatacggcctttattattttgaggtacactccttccatgcctaatttattgagaattttttgtcatgaagggatgttgagttttatcaggtgctttttctgtatctattgagatgatcctatggcttttgcccttaattccgttgatgtgrtgtatcacatttattgatttgggtataccaaaacatccttgcgtttttaggactaatcccatttgaacatgggtgtataatttttttgatgtgctgttagattcagtttgctggtattttgttcaggatttttgcatttaggtgcatcagggatactgatctgtagttttgtcactattgcttttgtgtcctggtctggtttgggtagcagagtaatgctggtctgctagaagaagtttggaaatgatcccttc

SEQ ID NO: 195883 - DNA, 397 bp, Homo sapiens
tactcattacatcatataaggcaattttcccaggttctaaggttctagagattaggaactggctatcctggggtgggtggtagagtccagcctaccacagggagttatgaaacataagcatggtcctcaagggggaactgagattagggttcgatcagaaataggagggrcgtatgaaagaagtcagtgctatagatttttatgtagttaccaatgagctgaaacccatttccccattttatctgttttgttcattgctgtgttctcagcttctacaacagtacttggaacatagttggcatttgataaatattttctaaataaataaatgaataaaaatggacgacatttctaatgtaaagaagttattggaaaatcacaatggaaagttggattt

SEQ ID NO: 195884 - DNA, 430 bp, Homo sapiens
aggggtactatttaaaaacaactggaaagaaagaagttggtgcttagagtgtttgcaggttgacatctagttgttagaggtgaaatcatcattggataggagccaaaggaggacatgaatctaggagccttggagatggggaagcaacttttaaatgttttggtctaagtcttgatgmgggaatgggaggtcttaccaggaacaagtgctgctctggagacatctctcaaatcaggggcaactggagctttgtgcacctcctttatagattcccacgaacagcaggatgggctgacttctcctgggattcagatctctgggattctcctcaacactatgctgaaatgaaggcatggtcaagtagaagtcattttgcaggagtctgtgtaccctaaagtctcacttcaaatcatttgttagttacttccag

SEQ ID NO: 195885 - DNA, 598 bp, Homo sapiens
aatgtctgctcatcaaataacacttaagaaaataaaaaggaaaaaactagacgaaagaaaatatatccaatacacatacttgaaaaatgacttttaaccagaaaaaaaaaaactcctacaaatcaataacaaaagaacagcaatccaacttaaaaagggggcaaaagacttgaacagacacttcacaaacacaaatgatctgtaagtatatgaaaaagtactcagcatcagtagttataagggaaatgcaaattaaaaacataatgagacacaattccatagccatccaaataactaaaaagaaaaagacaatactaaatgttgrcaatgatgtgaaacaactggaactcccacacactgctaatgggaaagcttctttgaccatttcttataaagttacccaaacccttacactatgacctagcaattccaatcatgggcatgacccaagatctataaaaacgtatgtccacaaaaagacttattcaacaatatttacagcaactttattcaaactgtacaattggaaacaattcaaatatccattcacagaagaacagataaacaaattatggtatagccagacaatggatattat

SEQ ID NO: 195886 - DNA, 529 bp, Homo sapiens
ttgtctgtttgtttgtttaaaggacactggctggagaaggtttgggatattggggatgttttctatcaagagtaatacaggcatctaggacagcactagagccctggccatggcaccagaaatgtaaacctctcattgaggtggatacttgaagcgcagtgagctcgaagaacctcagcacattctccttctgctggaccttggacaccctgtttcagacctgaacctcctgttccttgaaggcctttggatcacactccaatatggtttggatatttgttcccttcaaatctcatgtcaaaatttgatcctcaatgctgaagatgggacctagtggaaggtgtttaggttgaggggttggattcctcatgaatagattagtgccctccctcaggggtgagtgtgttcttaytctgtcagttctcattagatctgattgttaaaaagagcctggtgccttctccctctctcttgcttcctctcttgccatgtgatgctggctcgctttgccttctgccatgagtagaag

SEQ ID NO: 195887 - DNA, 538 bp, Homo sapiens
ctggggttttcttggttggtaggctatttattattttattttatttttttggtttgggggggggtaggctatttattactgattcaatttcagagctcattactggtctgttcagggaatcagtttctttctggttcagtcttgggaaattgtatgtgtccaggaattcattcacctcctctaggttttctagtttgtgtgcwtagatgtgttcctagcagtttctgatacttatttttatttctgtgggatccatggtaacatttcctttgtcatttctaattgtgtttatttggatcttttctcttttctttcttattagtctagccagtggcctctcttaattttttcaaaaaaccaactccaggatttgttgatcttttaaatggctttttgtgtcttggtttccttcaattcagcttagattttggttacttcttgtcttctgctagcattggggttgatttgttcttgcttctctaattctttcagttgtgatgttaggttgttaatttgagatctttctaaatttttgatg

SEQ ID NO: 195888 - DNA, 556 bp, Homo sapiens
aagcactaacaaaagcaaagccctatttgaaataaaagcaaaatattttacaggtaatttttagtatatttcttggcaattgtttttcagtgaaaaccactaggaaaatgaccaaatactgtgtgtgtgtttattttattttattttattttattttgagacaggatcttgctgtgtcgcccaggctggagtgtagtggcacaatcagggctcactgcagcctcaacctgttgggctcaagtgatcctcccgtctcggcctcccaagtagctgggactacaagcacatgccaccacacctggataattcttttattttttgtagagacagggtctccctccccatgttacccaggctggtctcaaactcctgacctcaagggatccttcaccttggcctcccaaagtgctagattacaggtgtgagccacttcacttgaccaaaatacagtacgttttgrtacctaaagcatgtacagaaaatctaaaaaggctttaagtgtttgccaaatcctaagtaggttatgatgtcatactagtaaattgaagataagctt

SEQ ID NO: 195889 - DNA, 609 bp, Homo sapiens
atttctaaggcagtaatatatgaaagctaaataactgttaaagaggttactaagaggttatataaccttttaaagaggttattaagtgtgaatttaaaatacataatatagaatgcaaagatgattcctcatggtattatttatcacaggaaaaaacaaacaactcaaatgttccctaatagaagaatgattaaattacggcaggtaactatacttttattatgtattcattaaaaacttttaataacaaggaaaaacactcatgttataatgttgcataaaaaaagcggaagacttatacagtatgatttcaactactaaaaatgtggtgaaatatctgaattatgcatagtttttactttataccttatactttccctgtattaaaaaaaatgcccataataataaaaaaaaaacctaagaatgtgtccatagctaaattatctggaacttcatcaaggtcttattaacatcatyatcacaatttgtaatatagtctaccattaacagattgactatctctggtttactttaatcctttcagctagccaaaactacaggaaaatcctttttatccttaatcatgtagcaagcaaaagtgtgacctgg

SEQ ID NO: 195890 - DNA, 645 bp, Homo sapiens
attgtttattgctagcacataggaaaatacttgaatattatacattgaccctataacctgtgactttgtaaactcacttatggttctagaacccctttccccattttattttcaattccataggattctctaagtagacaattatgtwgtttatgaaaagtgatcattttatttctttctttccaatctgtatgcctatttcttttccttgccttatctgtatcacgctgaataggaatggtgcaagtgaacatccttgcttttccccagttacagggggaacatctgatctttcaccattaactgtgatacttgctgcagcgttcaaaaaatgctacttatctggttagtgaaagtttcttttctgttcctagtttgctgaattttaaaaaatgtgaatggatgtggaatctttttaaatgctttctttctgcatcttttgaaagatcctgggtttttttcttgtttagtgtgtttatttgatgaattgtattgattttcaaatgttaagccagacttacatttctaagataaacccacttggttgtaaggtgttatctttttaatatattggtgtatattatttgttatattttgttgataacttttgtgtctgtgttcgtgagggatattggtttgtagttt

SEQ ID NO: 195891 - DNA, 589 bp, Homo sapiens
gactcctaattaactgtttttttggagatagtatagatgctaaaaaatgaacaaactaacaaatgaactaatgaactaatatatgtatattcctgtgttaatcctttttgcattgctataaaggaatacacaaggctgggcaatytataaagaaaataggtttatttggctcacagttctgaaggctgtacaagcatggcttcagcatctgcttggcttctggtaagggaattccatatgaatatagaatagctcatcctgcccaactgaaactaccataacagtgagaactatgttgtaatgtgaatagaatttatttgatgatttctaaaaacaaattgacttttgttttccagttattatcagaaaaagaaggacatgaaatatcactgactactagtaacttttacttaatacatgagattcatgaaggaaatgtatcttttccaggctgaaaatttcactatcactaccaatatgggtaaaattatcacaccttcccttaggtgtgaatatgcctagataatattctagagttaccatatattattgtaagatatacactgtaaaggaaaaagcatcatgccaa

SEQ ID NO: 195892 - DNA, 409 bp, Homo sapiens
gaggatccagtttcattcttctacatgtggcttttcaattatcccagcatcatttgttgaatagggtgtcctttccccccctttatatttttgtctgctttgtcaaagatcagttggctgtaagtatttggctttatttctgagttctcaattctgttccattggtctatgtgcctatttttataccagtattatgctgttttggtaaccatggcccatagccttgtagtatagtttgaagttgggtaatgtgatgcctccagatttgttctatttgcttagtcttgctttggctatgcagggtctattttgattccatatgtactttaggattgtttttttctagttttgtgaagagkgatgatggtactttgatgggaattgcattgaatctgtagattacttttga

SEQ ID NO: 195893 - DNA, 324 bp, Homo sapiens
gcctccaacttcatttttctctctcaagattgttttggctattcaagggcttttttggtttagtgcaaattttaggatttttttttctatttctgtgaaaaatatgattggaattttgataggaattgtgttgaatgtgtgtgttgctttggttgtatggacattttaacaacattcattctaycaatctataaacatacctttttatttatttgtgcccaccaatctcactactgggtatattcccaaaagaaattaaaacagcaccttctagaaatatctgcatttccatgtttatcgcagcactagtcacaatagccaagg

SEQ ID NO: 195894 - DNA, 488 bp, Homo sapiens
tggtgcaaaatttttaagcttacctaagtgaaaatttctgtatacttatcatcttattgagatagcaagccacttttcataaagtatactgaaagattatctgagctctgggtcttttactaatttggaaaacttgtcaaaggacagtaaaactcacattcacagaaaaaaatctgtgtagtagaataatccttcatatttatctttcatgtggttgtgttttatatatagatgagccttcatacagtatttaaactatttttaaaaaawttttttattgtattttttttcctaggcttcttttcagatggataaaccaattctgtattctcatatttaacatctctaatacctattgaacacactgagatgatctagaagcatatcatttgagttaaattctttgtagttctcatagctgctgaaggtctaatttggtgcaagctaacttccctgtgcttgttactgtcaacatttggctccattca

SEQ ID NO: 195895 - DNA, 392 bp, Homo sapiens
ctgcagccactaatagaaacttcattattacttaataatttacttttgttagtatttcctaaagtttttttgtcttaataataactgatgaccccagagctcttatttgattatatctattgaaattgctgtattaarattagaactgagaaacaaaaagtattataattagaccattacctgttaagataaataatattttcacaaaagagagctatatttttcaaaactaaaaacaaaataagaagagtggtattttcccccaatgccccatttttacaaatctgactaaagtttgacttaagacagctagattttcatatttgcctctgcattcaatctgttgagatatcacctgtcatgtagtcctggaaaactctactgtatactta

SEQ ID NO: 195896 - DNA, 454 bp, Homo sapiens
gggaattaagacttcaacatatgaattttggggagacccatttagtccatagcaggagctatttgttaaactaaaataaattaaatgcgggccttctattattatcaaataatacagacatttttataaaacagcattttagctcacctaatggaaaatagagaaacgttaaagaatacactttaaatagaaactggataaggaaggccaytgtatcacccctgttcagtgttgtaacagaaatctgaactgtataacaaaccatataaattataaattatgaatgaaagcatcaaaactacaaatgtattaataagactctctgtatacacagagagccccaatgagttcttgaaatgattattataattaaagagacaggcaaagtttctaaatataagaatatgcaaaaataaaatgtatttctctacatagaaaatagcaattagaaaca

SEQ ID NO: 195897 - DNA, 555 bp, Homo sapiens
gagagggaaagcaagaatttgcacttctgacaagctcccgggtgatacggatgttgctgtcaagggtcacactttgagagccactacattaagtaataaagaaaattcaaaaatatatgcaacctgatatcattgtggttatgtgtaaataaatgattaagatactggtggggcacagtgactcacacctgtaatcccagtactttgggaaactgaggcagatggatcacctgagatcaggaattaaagaccagcctggtcaacatggtgaaaccctgtctctactaaaaatataaaaattagctgggtgtggtggcacacgcctgtagtcccagctactctggaggctgaggcaggagaatygctttaaccagggaggtggaggtggcagtgagctgaggtcacaccactgcactccagcctgggcgacagagcaagacaatgtctcaaaaaaagaaaaaaaagatactatcagtcactgtctctgtgtaatgacatcgattcgaggctttttatcattttatttttttttctgaaaaaaagttgtctgcagta

SEQ ID NO: 195898 - DNA, 641 bp, Homo sapiens
ggcggttctctgaaataggccagtgtagacatggccttgagggtaggtacgtgtgtgaacagagaccacaggggcctcccgcacccactcacgagccctgtttttatcagtctctagacacacacctgagcagccgaagcacacttgctctgaggcacgtagagggctccgtggatggccacgtccgtggttggacaaggacaagggcgaaggcttagagcagctgaagggaaacctgtcctggggagaatcccagggctagtgacggcggcatgattttcagggcacagtgcaaaatgaaaatacaggatcccttgttcaaaaatcagtargaatttcaggacagcgaccacagaacacgaaaccaagcatgaggcccttctaagcaagggaccctgtgcaactgcccaggcctgaaaataagcctctgtctgcctttccttccttccctggacttgtgtgggcttccattctttatgaatccacagtgttaaaataataataagtgaagccttgggtgagagcatagcttgaagattttagaaccagtaagaacattagggaaaacatgactccaaccaacgtccccaccctgtctgcattttacgttgtagaacacctgaaggatctaagaaatttaa

SEQ ID NO: 195899 - DNA, 548 bp, Homo sapiens
cctggcccaggccgcgtggatgataggctgggtgaggtgggctgctggccttggctttcacacacatcacggggaatgaaaagctcacagaggccactgcagagtgcaggaggccaggtcacagttcagtcagtgatgaaggccagtgggggtcagtgacaacttggactagaaatcaagctgtggtcaaggttgggactcagtttgtggccgcttggggagtcaggttggggcctctctctgtctcgttcacatccgccaagtccttggtgtgggtgctgggcagggtctgagtcacaggaggtgctcagtaaatgctcctggaggaatgaataaatgagtggtctgctcacggggggcgrggcatggctggagtgcagccctggacgctggacgatttgcactttccatttagccagacttggattcaaatcttggctctgcttcttacaccctgagggggatatttaacctcctttttgctgtttcttcagccatacaatggggagaataacagtacctccctctcaggctgttagagaattcac

SEQ ID NO: 195900 - DNA, 538 bp, Homo sapiens
  misc_feature (1)...(538): n = A,T,C or G
ggtttggggattangatgtggacatctctgtggccattattctgcctaccacaggagaccagagaaggcctcttggaggaggcagcagggacctgaatgaagtgggtagctgagccaggcagacagaatgggaagggttttccaggtaaagggcagcacagacaaaggccctgtggtgggagtatgatgggcatatttgaaggcagggtggctggagcagggtgagggaggggcagagtggaagcagatgaggtcagagaggtggagggtggcaggtcatgtagaccccatcaagcctggctagaaggggagaatcagctctctcctgcccctcaacggcccccaagccctgcccctgaagtaccaccctgtcctgctaagctgacacccattccaggagtactcacrttttaataagaaactctgtaaggccccaagggctaagtcgctaatgtttaggcccagcgatggacagtaaagagatattttatggcagagaggggcacagtctcacctcccacaacaccagggaactggt

SEQ ID NO: 195901 - DNA, 568 bp, Homo sapiens
agacaagcttagggttgaccctaagcttgaaccagagggaaaactcagacctccaccgagtaggatgggcagtgggaggctggggtgcaatgatcctgaaggatgctgagggacccaccactgctcccgtgacctccacctgacgttcctcagggaagtgacaccccctccaaaatatgcaacgagagaggccctggggagacgcaggcttgggtttcagatgtgggcgattctcacacgggctgcagattctaggccttggtctgcagcccgctcactccacrccgctgagactcagttttctcatctgccaagtgagagttctggatttggagatgattattacagctaatatttgctgaacatttactgtgtgccaggcatcgcgccagacactttgcatcggtacctcgttcagccttcacatccgcccagtgaggtaagtgctattaatagcagaagcctcttatccaatgagagcaaaaccagtggttggttaatagaaaaaaaaattaatgcaggaaatcatatgatacataaagtaggcattttattgaacgtaacacgt

SEQ ID NO: 195902 - DNA, 564 bp, Homo sapiens
ctgtttgtgtttctccactccccacactgacccccgtcccattaaaaaactatctatcccaaacttaaattaattgtaagcattagaagttcttattctggctttgctacacgttagctaatgagactacaacacaccttctggactcagtgttctcatttgtctgctaaaactttggtatatgtttcatgacattgtttttgttctaaaatacatgtcttcaaggattaattagccttacttacagtctgtttccaatactactgttatatacagttattaacatttatcatttaaatgtagaggattgtcaacccaacgtaacagtcttttgttttgctccagttttggttaagcccgtcctggtaagaggtgattaaataatattttttctttgaagactatttctggttgataataatgacaccctatcattatacccaaatattatcaagaaaatatttaattttctatgagaaaacagakaaagaagtaaaaactaacatcaaattggcctgaaggtttataccatcaaagtgtattgaaaaccagaaagacccaaga

SEQ ID NO: 195903 - DNA, 638 bp, Homo sapiens
atgacatcattatctctgggttaggttactgggtgcatggtaatgtcttctgcaaatgaagaagtttccaaagaaaagaagattgagaggatatttcaaagatgatgaatttattctgtatgtgttcagttggatatgtagaacttgagcttaacgaaagcagtgactagaacaatagatttgggaggtrtctgaatatacaagtatgaaaaccagagaagggagtaagaacccccaggtaatatctgtggattcagagggacccttgaggaccaccatcattttaagactcagtatagaatagtagtgaagcaatgggctctgctgtctggattcaaatcctagttatacctcttattaggtcatgctatcaattctctctgtccttcagtttcctcatctgtaacatggagatgacacatattttagtcataggctagttgtgaaccaaatgagttaatatcttaaagtatatattataggactggcctgtagtaaaagttaaacagatttagcttagctttactgtattatttaaacgattacggtaaatttggccaaataaataaagaaacagtgaagaatacagaataagtgttgtcaaagggttagaggaggacaactatgaggagcgtcat

SEQ ID NO: 195904 - DNA, 456 bp, Homo sapiens
tttacaacgttaagtttgctaagatagatgctctaaaaaaaaaaaaggaggaaaatgtcttccatattttcaacagagataattaggcctcttatttttaatttatatttgttcttacacatgctttttccatagtatcactccctgagtgtgtctccattatatcaaatgagatacctgaaaattcaagtttaccattttatctccaatccagattccccacttttgatttttttatttctattcatattttttctttatttccaattactcaagcttgaaatttcasagtcatttttgaaacagctttctttcactctccatgttcaatctacactaaattatcaattgttcccttgcactttttcttctttctttcagcttactaccacagctaaagccttacttcttgcctagagtatataactgtgtactaacttggtattttatttacat

SEQ ID NO: 195905 - DNA, 606 bp, Homo sapiens
aatgaatggaggtatttcacatttaaaaaactgaattagatccattctattttaactctgatcgtgactgttgaaagttataaagccaagtcagctttcaaggtcaaaagaaatcaaggtgatgtgcatattctaacttgcccatgggcacagctgctcctggcagctgttaacagaaacttcaaaaaggctcatttctaacagatttgtgtgaattttttttttgaaattgaaaatgtacaaagggaagacccaaattttaaaaggcaaattgaatacgtgtcaaaatcagtcttggcagatmcaagaaagccagtgttttagtccattttgtgttgccataaaggaatattggaggctggataatttataaagaaaagaagtttatttggctcacggttctgcaggctatacaagaagcattgtgctagtgtctgcttctggtgagagcttcaaggagcttccactcattgtggaaggtgaaggggagcaggcatcacatggtgagagaggaagaaagcaagagaggaggaatgtgccaggctctttttctaacaaccagctggagagaactaatagagtgagaactcactcattgctgcaagt

SEQ ID NO: 195906 - DNA, 611 bp, Homo sapiens
gtaagaaagtctttaataatactcagttgaatgatgaccattttatacactgcatcaagatgccacctgtgaatgaaccaatataggaaagcatgagcttctctgggcccaattcatgtatttctagaagtactgctctagatttggaacatggtgatatataaaataaagtctctcctctcgtacagtttatacagaaaataagcaccaatatagtacctactgtgtgccaggcactattttagatgctttatgtattacaattcacttaattctcaccataaagacagctataaaataaactttttcagtttaagggaaattgagtgaaagaaaggtgaaaagtacaataatcttcccttttccttaggggatatctttcaagcctcccagtggaagcctggaattgcrgatagtaccgaaccatatatacactgtgtttttaaatttgataacaaagagggctactaagtgactaatagtgtggtagcatttgcaacatggatatgccggacacagaggtgattcatggcctggactggacagagcaggagggcgtgagatttcatcactactcggaatggcaagcaatttaaaacttatgaattgtt

SEQ ID NO: 195907 - DNA, 611 bp, Homo sapiens
gtaagaaagtctttaataatactcagttgaatgatgaccattttatacactgcatcaagatgccacctgtgaatgaaccaatataggaaagcatgagcttctctgggcccaattcatgtatttctagaagtactgctctagatttggaacatggtgatatataaaataaagtctctcctctcgtacagtttatacagaaaataagcaccaatatagtacctactgtgtgccaggcactattttagatgctttatgtattacaattcacttaattctcaccataaagacagctataaaataaactttttcagtttaagggaaattgagtgaaagaaaggtgaaaagtacaataatcttcccttttccttaggggatatctttcaagcctcccagtggaagcctggaattgcagatagtacygaaccatatatacactgtgtttttaaatttgataacaaagagggctactaagtgactaatagtgtggtagcatttgcaacatggatatgccggacacagaggtgattcatggcctggactggacagagcaggagggcgtgagatttcatcactactcggaatggcaagcaatttaaaacttatgaattgtt

SEQ ID NO: 195908 - DNA, 437 bp, Homo sapiens
ctagtctctactaaaaatacaaaaattagctgggcatggtggtgggtgcctgtaatcccagctactcaggaggctgaggtaggagaatcgcttgaatcccggaggtggaggttgcagtgacccaagttcgcaccactgtactccagcctgggcgacagagtgagactgtctcaaaaaaaaaaaaaaaaaaaaaaaaaagaatagattttagatgtctttattttcactttttattattgcattattggttggcctaaatatatttccaaacttcagaaacataatactttatcacagccattggtcttccccagagacctatgacattgctataaaataatgtagtttaacctttttaatctgsagcttaaaaaactgagtcatgggaatagatttgcctttttgtttattgcttatttcttcttttgccaaacatt

SEQ ID NO: 195909 - DNA, 329 bp, Homo sapiens
aaggcacagctccccttttatctaaccgattttagggaagtagtgtaatttttggtcttcactccaggttctgctatcctcacaaataatgaaagcctttttttttttcttttacttctcaggagctcaagtcttggcagcaaagggatttcctatagattcatttaatggggttattttatgtgttgaaatgtcctggcaaaaaaagcaacgtcctggcaaagaaaggaggggttggggtggggtcasgaatgtgaattcagatcgtcattattcatgaaaagccaaccattctttttcagtttgaacatatctttctttcttttctg

SEQ ID NO: 195910 - DNA, 566 bp, Homo sapiens
gctggtttttgagtatgtatagtgttcattatgcaggagtcatgataaaagattgcatatggcaatttcaagtataagtctgataaagttataatcatgaaaaagttgaacattctcaaatattttaaatcatatttagaactttcagataaatttaatattgaattccatatatttaaaaatttactttaaaaatattaattgtataatccaaagagaacctaatagccttttaaaatctgtgcctcattatgagtgctctcataatccctaaagtttacaccagtatacattatttgcatactctcattgtttacatgtgtcataatttgaaaacctgggaarcattgtgctacagtatgtatttagaaatagaaattctgggttaaacgacatgaacataatctttaaatgacaatgcctaattgttttccaatttacactccactccgagcagcaaagttcaaatgtacttgttccaaatccctgccagcacttggatggttttaaatttttataaatcttggaggtgtgcattttaaatttgtagttccctggttaccagt

SEQ ID NO: 195911 - DNA, 614 bp, Homo sapiens
gtgtacattaatttgaatgtttctatgtaccatgtgctgctagaaagcagagaataccaaatgaaaaaaaacaagatctctactctcatgtagytgacagtttaaaggacagaatataaaaaagaaccatgtacacaaatgaataaataagatcattttacatttctttgagaattgtttttagccacaaataacagaataccaaaacaacagtgacttaaaccataaggatggtttcagaataaagaatctagagaaatgcagcttcaggtatcttcaggcaatcaaacaatgatctcagagctcagctttgttgctgttttgtctctttccacatctgtccttggtataataccttttagtttttatgctttttattttcaggtgttaagatgaatgctacacctctagacatctcatctgagatcgagggagctctttgcttgtaagtttacttttagcagaaagttaaacgagccctcagcaccctcctacttactggacagaattgggtcacagggacatgtttagccgaaagggagtctggaaaaggtagtagtcaaccctcagtatccacggggaattggttctaagaccctggaggataccaaaac

SEQ ID NO: 195912 - DNA, 614 bp, Homo sapiens
gtgtacattaatttgaatgtttctatgtaccatgtgctgctagaaagcagagaataccaaatgaaaaaaaacaagatctctactctcatgtagctgacagtttaaaggacagaatataaaaaagaaccatgtacacaaatgaataaataagatcattttacatttctttgagaattgtttttagccacaaataacagaataccaaaacaacagtgacttaaaccataaggatggtttcagaataaagaatctagagaaatgcagcttcaggtatcttcaggcaatcaaacaatgatctcagagctcagctttgttgctgttttgtctctttccacatctgtccttsgtataataccttttagtttttatgctttttattttcaggtgttaagatgaatgctacacctctagacatctcatctgagatcgagggagctctttgcttgtaagtttacttttagcagaaagttaaacgagccctcagcaccctcctacttactggacagaattgggtcacagggacatgtttagccgaaagggagtctggaaaaggtagtagtcaaccctcagtatccacggggaattggttctaagaccctggaggataccaaaac

SEQ ID NO: 195913 - DNA, 614 bp, Homo sapiens
gtgtacattaatttgaatgtttctatgtaccatgtgctgctagaaagcagagaataccaaatgaaaaaaaacaagatctctactctcatgtagctgacagtttaaaggacagaatataaaaaagaaccatgtacacaaatgaataaataagatcattttacatttctttgagaattgtttttagccacaaataacagaataccaaaacaacagtgacttaaaccataaggatggtttcagaataaagaatctagagaaatgcagcttcaggtatcttcaggcaatcaaacaatgatctcagagctcagctttgttgctgttttgtctctttccacatctgtccttggtataataccttttagtttttatgctttttattttcargtgttaagatgaatgctacacctctagacatctcatctgagatcgagggagctctttgcttgtaagtttacttttagcagaaagttaaacgagccctcagcaccctcctacttactggacagaattgggtcacagggacatgtttagccgaaagggagtctggaaaaggtagtagtcaaccctcagtatccacggggaattggttctaagaccctggaggataccaaaac

SEQ ID NO: 195914 - DNA, 614 bp, Homo sapiens
gtgtacattaatttgaatgtttctatgtaccatgtgctgctagaaagcagagaataccaaatgaaaaaaaacaagatctctactctcatgtagctgacagtttaaaggacagaatataaaaaagaaccatgtacacaaatgaataaataagatcattttacatttctttgagaattgtttttagccacaaataacagaataccaaaacaacagtgacttaaaccataaggatggtttcagaataaagaatctagagaaatgcagcttcaggtatcttcaggcaatcaaacaatgatctcagagctcagctttgttgctgttttgtctctttccacatctgtccttggtataataccttttagtttttatgctttttattttcaggtgttaagatgaatgctacacctctagacatctcatctgagatcgagggagctctttgcttgtaagtttacttttagcagaaagttaaacgagccctcagcaccctcctacttactggacagaattgggtcacagggacatgtttagccraaagggagtctggaaaaggtagtagtcaaccctcagtatccacggggaattggttctaagaccctggaggataccaaaac

SEQ ID NO: 195915 - DNA, 440 bp, Homo sapiens
gccataaatgctagcatccaggtcacctctgtgaatcaaaccctctctctaattggcttctagtaaaatgcatgcaagttgatatggtgaagatgaggcgcctggagaaaaagtactcattagcacacacctygaccacacctttgaaaaaagagcagaagcttgagtgcacataatacagaagaactacaattggatgacctgtgcttggagtgccacttagggaaggcaagacagataaggcaaaaatgaggttggctattggcatgatagggaggaactaaaccattcagataaggccctggaaagagaactgcctaggaagttgactggagaattgtggccaactcgtataccacacgtctaaatcaagttctcacttctaaagggtgtaaagctcacccaggaatctcttaattagaatgcatgtaattgaattc

SEQ ID NO: 195916 - DNA, 440 bp, Homo sapiens
gccataaatgctagcatccaggtcacctctgtgaatcaaaccctctctctaattggcttctagtaaaatgcatgcaagttgatatggtgaagatgaggcgcctggagaaaaagtactcattagcacacacctcgaccacacctttgaaaaaagagcagaagcttgagtgcacataatacagaagaactacaattggatgacctgtgcttggagtgccacttagggaaggcaagacagataaggcaaaaatgaggttggctattggcatgatagggaggaactaaaccattcagataaggccctggaaagagaactgcctaggaagttgactggagaattgtggccaactcgtataccacacgtctaartcaagttctcacttctaaagggtgtaaagctcacccaggaatctcttaattagaatgcatgtaattgaattc

SEQ ID NO: 195917 - DNA, 438 bp, Homo sapiens
taagtacagaaccatgtgcaaattgttaatataatatttgtttgcttcactggaagagttactacaatacagctatgtttgctagttgacattcggtaggcaggacaatgagtgaagtgggcctcagtgcagattatagggagtggtgcagatggttgagagctggaaagcacttgcctgcctagtcctaaggcagaatccttcatacagtctcagcctatgtcggcacctggaattatgggctcaatattgctgcccttctgatttttcaagggaagcaagaaattaagatcttaatagtaaaagtattatttctccatttttgaaaaccaattcarattattttaaaatgctatgtaagcgaaagaaatcatgttggttggtcacatatgattggctcttttctgtcctttgtgaataatatgaaaaaaaatgcct

SEQ ID NO: 195918 - DNA, 486 bp, Homo sapiens
gaatttaagtcaattgtttgggacttaaagtgcattttcctcaagaaacacaattagaaaaatagttggtttctgaagctctattttaaatcctactaaaccaaagcagtctactggggaaattattagtgcacactcacatttaattcttctctctctctctcctgagcacataggaagactagataccttatatctcttgtwacagtgtgagaccatgtgacaagtttagatcaatggaatgtgagagaagtgatgtatgaagagtagtgggacctcatgtatggtacacttaccatttgtattacctggaagaaagggatctctctgataagaaatggagtgggcgcaataagacctgaaagccctgtagaaaaagtcttcttggtcaaaattaccaataacagctcttagagcttggatgataagatggtgcccacatagaggcagactggaactcaggaagcaagtaactcagacaggttg

SEQ ID NO: 195919 - DNA, 350 bp, Homo sapiens
tcccaggctggtctcaaactcctaggctcaggcaacctgcccacctcagcctcccaaggtgctgggattacaagcattagccagtgcatctggccaacagctcaatttaataatggacaaaacctcatttcaccaagaaggagagatggatggtagataaggagataagcacatgaaaatatattaattattattagccatcagaaaaatacaagtaaaatccacaatgagatgtcactacacacctattgaaacagctaaatttttttaaaatcktactttggttcttaccaggtattcagtaagcatcaagtgtttattagtatcaatatttattgacaggttttttt

SEQ ID NO: 195920 - DNA, 530 bp, Homo sapiens
gttttaattctgcttgtgttattaaagattatttgggccagtcatagcttagtaagtgttgaagagaccaagtttgcaaggccaggccctgtgtgaacctttgagctttcatagagagtttcacagcatggactgtgtccccatggtcatccagcgttgtcatgcattggttggtcaaaatggggagggattaggacagtttggaaagctcaacaaatacattctcactctgtggcrgtcctgctgacaaatcaagagcatcgcttttgtttttaagaaaacaaaatcttttttaaaaattacttttaaatattaactcaaaagttgagattttggggtggtggtgtgcaaagacattaatttttttaaacaatgaagtgaaaaagctttaaaatctctaggtttggctagttctcttaacacgggttaaattaacatttcataaacacttttcaagtctgatgcatatttaagattaatgctttaaaaataaatattaataaaataatcctattaatacacttaaaatg

SEQ ID NO: 195921 - DNA, 530 bp, Homo sapiens
gttttaattctgcttgtgttattaaagattatttgggccagtcatagcttagtaagtgttgaagagaccaagtttgcaaggccaggccctgtgtgaacctttgagctttcatagagagtttcacagcatggactgtgtccccatggtcatccagcgttgtcatgcattggttggtcaaaatggggagggattaggacagtttggaaagctcaacaaatacattctcactctgtggcagtcctgctgacaaatcaagagcatygcttttgtttttaagaaaacaaaatcttttttaaaaattacttttaaatattaactcaaaagttgagattttggggtggtggtgtgcaaagacattaatttttttaaacaatgaagtgaaaaagctttaaaatctctaggtttggctagttctcttaacacgggttaaattaacatttcataaacacttttcaagtctgatgcatatttaagattaatgctttaaaaataaatattaataaaataatcctattaatacacttaaaatg

SEQ ID NO: 195922 - DNA, 530 bp, Homo sapiens
gttttaattctgcttgtgttattaaagattatttgggccagtcatagcttagtaagtgttgaagagaccaagtttgcaaggccaggccctgtgtgaacctttgagctttcatagagagtttcacagcatggactgtgtccccatggtcatccagcgttgtcatgcattggttggtcaaaatggggagggattaggacagtttggaaagctcaacaaatacattctcactctgtggcagtcctgctgacaaatcaagagcatcgcttttgtttttaagaaaacaaaatcttttttaaaaattacttttaaatattaactcaaaagttgagattttggggtggtggtgtgcaaagacattaatttttttaaacaatgaagtgaaaaagctttaaaatctctaggtttggctagttctcttaacackggttaaattaacatttcataaacacttttcaagtctgatgcatatttaagattaatgctttaaaaataaatattaataaaataatcctattaatacacttaaaatg

SEQ ID NO: 195923 - DNA, 502 bp, Homo sapiens
tccatattaccttttctttattattattacttctacatrtgttacaaacccttttaaaacattattatgttttaaataatcacatttctgtgcagaagattagaaattatgatcaagcttatttaaatgaaagagaaaaattatgtatttacccatgtagttgctatttctgggctcttcattagtttatgtctgtatttctctctggtataattttccttctacctgaacaacttttaacatttattgtagcattactctgctgctgctgaattctctcagcttttgtgtgtctgagaaagcccttatgttttgctgggtatataattctaggttgagagactttctccatgtttagtactgtaaagaaatttcttcactgtggtctagcttgaattatttctgagaaatctgctgtcatttagatgattgttctacaaataatctctttctccccatctctggctgcgtttaagatttattttcattacttcctttaaca

SEQ ID NO: 195924 - DNA, 572 bp, Homo sapiens
cattttaaatcattttgataaagaatctaaattagacctttaaataagaaaggcaagttcccttaacatattatttatagatagtttgaaaataaaatctttgcaaactgacttcttcttctattctttacaaggcaaatatattatcaagttttaacagcacatgtggttagctggagaatgtcctcattaaagaaggaaggccatggctagctagttagtatttagtgagtgtttagtatgtgctgggtgctgtgtgagatgccatatgtatactgtctcatttattctcaggtgaagaaattaagcaagtagaccctggattcagaatgcctgtcatggttgagctgtgtgaccttgaacaaattacttaacctcactgtgcyttagttttctcacctatgaggccaatcataacatctgagtaataaggactattggaaggttacttaagtctggtccatagaagatgccaatgtgtcatatcatataatcatcctcatttttaactaggctcaggtgattaagagatttgcctataaataacagagctgatcaaagatagcacctgg

SEQ ID NO: 195925 - DNA, 520 bp, Homo sapiens
tggcaccatgttttgtggcactctgggaagcattgttacagaaagaaaacsctggttccttttcagattacaaaatcagctgcatatgtggagagcacgcatataaatctttcctttctaacaaatcagtccttataaataatctccaggtcagagcctattaaacctgggaaggcccatagtgaggccacaccatgttgactccagaatcagcactttggcttgggaatgtggcctgaggcgtactttcggagtgataagattgttctcaagaatcaaggaagaaacatcactatgatcaaaatcatccactcagagaaacagcggttgatgttactttaatggcatctatagagcttccaaatattaataataaaaatccagtattgattattttcttttcttttttttttttttttttacctgcagtacaatcacaggggcaggggaagagatagaatggcaacacgtcaggaacattctgttactaagctaattataacctttcagcacagaattc

SEQ ID NO: 195926 - DNA, 520 bp, Homo sapiens
tggcaccatgttttgtggcactctgggaagcattgttacagaaagaaaacgctggttccttttcagattacaaaatcagctgcatatgtggagagcacgcatataaatctttcctttctaacaaatcagtccttataaataatctccaggtcagagcctattaaacctgggaaggcccatagtgaggccacaccatgttgactccagaatcagcactttggcttgggaatgtggcctgaggcgtactttcggagtgrtaagattgttctcaagaatcaaggaagaaacatcactatgatcaaaatcatccactcagagaaacagcggttgatgttactttaatggcatctatagagcttccaaatattaataataaaaatccagtattgattattttcttttcttttttttttttttttttacctgcagtacaatcacaggggcaggggaagagatagaatggcaacacgtcaggaacattctgttactaagctaattataacctttcagcacagaattc

SEQ ID NO: 195927 - DNA, 520 bp, Homo sapiens
tggcaccatgttttgtggcactctgggaagcattgttacagaaagaaaacgctggttccttttcagattacaaaatcagctgcatatgtggagagcacgcatataaatctttcctttctaacaaatcagtccttataaataatctccaggtcagagcctattaaacctgggaaggcccatagtgaggccacaccatgttgactccagaatcagcactttggcttgggaatgtggcctgaggcgtactttcggagtgataagattgttctcaagaatcaaggaagaaacatcactatgatcaaaatcatccactcagagaaacagcggttgatgttactttaatggcatctatagagcttccaaatattaataataaaaatccagtattgattattttcttttctttyttttttttttttttacctgcagtacaatcacaggggcaggggaagagatagaatggcaacacgtcaggaacattctgttactaagctaattataacctttcagcacagaattc

SEQ ID NO: 195928 - DNA, 345 bp, Homo sapiens
actggaggcacaagcagatctaaaacaagacagagttgagagaacaaatgtagtctttttaaaagtttcatctaaatgtcttccctgtatttcagatgtgagtgtcagaggcccttccctaattacaacaaggcaagtgcatcttagaagaatttggattggcaaatgtcctgatgtgtgccaaacttttaaaatagtccttgggtgcaaacagaacrccaaaataggtctgcctgcttgaaaatggcatcaacccaatttccatttatatcccagctcaactagcctacctaactgcttagaagagttatccagcctctttttcactctggaaaataatattaa

SEQ ID NO: 195929 - DNA, 388 bp, Homo sapiens
tgcaaagggggaagacccccttataaaatcatcagatctcttgataactcacttattatcatgacgactgaaggggtggcctgcccctccacacctgtgggtatttctagtcaggtgggacgagagactgagaaaagaaataagacacagagacaaagtacagagaaacaacagtgggcccaggggaccggcgctcagcataccaaggacctgcactggcaccggtctctgagttccctcagtttttattgattattattttcattatttcagcaaaaaggaatgtagtaggagagcagggtgataataaggagaaggtcagcaacaaacatgtgagcaatagaatctaygtcataattaagttcaagggaaggtactatgactggac

SEQ ID NO: 195930 - DNA, 596 bp, Homo sapiens
agtaatgtcgagcttttttcatatctttgttggctgcatgaatgtcttctttggagaagtgtctgttcatctcctttgcccactttttaacggggtcgtttgtttttttcttgtaaatttgtttaagttctttgtaaactttggattttagacttttgtcagatggatagatggcacaaatgctctcccattctgtargttgtctgttcgctctgatgatcatgtcttttgctgtgcagaagccaagtcattcatcactgtgatcaccttcattggagaaactcaagttcactggtatttcctaaagtacaaagaacagaacccagcccaatgtatcaaacagacacagattattgcaaaatactagtgtatctgttccatcgttgtaagtactattacttccagttttaagtaatttaagagttcattagtaaatgcaagccctcatactatatgtaggtctataattaaagtcaagaaaaaatccctaatcaccctcataaaccacaagcaagcatagtacttaccgcagcaaaatctttctttataacccttctttttctcctcccaataatcattttaacagttcataacca

SEQ ID NO: 195931 - DNA, 362 bp, Homo sapiens
ttagttcctccaagactctccatcgcaggctaaagtgctctggggccctaacagtctaggccacaaggactgcaactcctaggtgagtcctagtgttgaactgggcccagagctagtggactgggggtgggaggaacacaacctatagacaccagctkgggtggctaagggaatgccaacatcatctgttccctaaccccaggctgcactgctcatggctccaaaaaagactcctcccttccacttgaggtgagggaaagagaaggattagtgggagaatattctcttacatcttggataccagctcaatgcacagcagtatagggtaccagtccgagtcatgaggccccctttccaggccc

SEQ ID NO: 195932 - DNA, 362 bp, Homo sapiens
ttagttcctccaagactctccatcgcaggctaaagtgctctggggccctaacagtctaggccacaaggactgcaactcctaggtgagtcctagtgttgaactgggcccagagctagtggactgggggtgggaggaacacaacctatagacaccagctggggtggctaagggaatgccaacatcatctgttccctaaccccaggctgcactgctcatggctccaaaaaagactcctcccttccacttgaggtgagggaaagagaaggattagtgggagaatattctcttacatcttggataccagctcaatgcacagcagtatagggtaccagtcmgagtcatgaggccccctttccaggccc

SEQ ID NO: 195933 - DNA, 553 bp, Homo sapiens
atcgtgccactgcactccagcytgagcaacagagcgagactccgactcaaaaacaaaacaaaacaaacaaaaaagacttaacaatcatctagccttgaagctgccgtccatttcctccccacctatctgagcttatcacatttgaaaaacctgatggcagtacctctggtgcatattgtgagcagtctggactcagaggatcggtacctgtcatggtgctggaaactgagaagttttcaaaaaattatctgttatctgaagctttctctctatcagtgaccctaattgcatcccctcatattgccatgagacataattaagagaaaggaggcatttgatcacatactacaagtatttgctgcattgcttgtgaaaaagctagttagagtgacaataagatctgcttaatatttttatatagtgctcgaaactagcagtccttaatttatttttttaagtctggaaattaaggatgaataatgatctcccaattgcccttcacaatcatcattcagcctcaagaattaataagccacctcaataccacccccac

SEQ ID NO: 195934 - DNA, 605 bp, Homo sapiens
ttttttggggattagaaaaaaggaaggtgttcagaaacgtaaatgtgacaacccagggagagcaggagcttggatgtcacgatggaactgtaaggcagagaatggttcagggaaaatcatcaatgccagattctggtaaggcaaatgagaaattaaatccttagcgggccaaacacaagagacaaaaatctctaggctgaatcatgatcaaagccactacaatctgaagaaggtaggagattcacagtgtctggggcastcacccagggatcattttctcaaatctgaaattgtttgcatccatctttctgaaagcccatcttaaaaatgtaagactctgagttcagcgccagaaactatgagccttattatgtgaatagcagtgactctgcactcaagagacatgtgatatatggaagaagaatgaatttaagggtcagaatgtgggcctgggaggcagcaggtccagccgctattcattgttctactgtgggcaacatgaaatgaccattcccggcaagttgtcattattaagtgattgaaatattatggctgagatatgacttggaacttgaagaaattagaggctgctaaaaataaatttc

SEQ ID NO: 195935 - DNA, 605 bp, Homo sapiens
ttttttggggattagaaaaaaggaaggtgttcagaaacgtaaatgtgacaacccagggagagcaggagcttggatgtcacgatggaactgtaaggcagagaatggttcagggaaaatcatcaatgccagattctggtaaggcaaatgagaaattaaatccttagcgggccaaacacaagagacaaaaatctctaggctgaatcatgatcaaagccactacaatctgaagaaggtaggagattcacagtgtctggggcagtcacccagggatcattttctcaaatctgaaattgtttgcatccatctttctgaaagcccatcttaaaaatgtaagactctgagttcagcgccagaaactatgagccttattatgtgaatagcagtgactctgcactcaagagacatgtgatatatggaagaagaatgaatttaagggtcagaaygtgggcctgggaggcagcaggtccagccgctattcattgttctactgtgggcaacatgaaatgaccattcccggcaagttgtcattattaagtgattgaaatattatggctgagatatgacttggaacttgaagaaattagaggctgctaaaaataaatttc

SEQ ID NO: 195936 - DNA, 420 bp, Homo sapiens
gtcaaataatgttattttctatatattaggttgaaccatatgaatctgacatttgtaaacaaaaatgattaaatatcacggatgtttttataactaaccctataggaaatcccaaataaaccactaattagttattagcattactaagcaaaattagcaagattatcagacacaaactatacatctacatatcagcaacaatcagtacaaggttatgattaaataaatgtacaaataaaaacaatacaagcatacataaaaacacactagacaaaaaaggaactgtttttgtggataaatgtactaaaatgtattggaaagcattaatgaattttaagataaatggaargaaataataaatataaagacatatataaattctttttataataatatattagatcaatgcaaactgactcc

SEQ ID NO: 195937 - DNA, 420 bp, Homo sapiens
gtcaaataatgttattttctatatattaggttgaaccatatgaatctgacatttgtaaacaaaaatgattaaatatcacggatgtttttataactaaccctataggaaatcccaaataaaccactaattagttattagcattactaagcaaaattagcaagattatcagacacaaactatacatctacatatcagcaacaatcagtacaaggttatgattaaataaatgtacaaataaaaacaatacaagcatacataaaaacacactagacaaaaaaggaactgtttttgtggataaatgtactaaaatgtattggaaagcattaatgaattttaagataaatggaaggaaataataaatataaagacatatataaattctttttataataatrtattagatcaatgcaaactgactcc

SEQ ID NO: 195938 - DNA, 584 bp, Homo sapiens
tcaataatttcgagaagagatataaaaaggagggggaagttctgggttggacattgtaaaaaagtggggaaaagtaggaaaaagtgtataaagttgatttgatatgaataatttttatccaagaggagggaggattaaatcaggcctagaggtgacacgggtaaaaataattcatgctcagaagtaagggtttagtcatgtttccagcaacaytatagccttgaccgtgtcctgttgtaagtattgtttatgctctagtgattgattttcattacggctgatttgcaccttctcagtatgttggaaaaagttagaaacattttgagcccacattttacctttttatagaagtatgtatttgtcagaatttcataattcttgaaaaactcaaaattaggatgcatgaagatatttgttagaagagttagacgaaaactaattggaaagtgatgtctaatatacaataaattctgtttatattatgtgtactatacatatagacatactagatatatggtatattttacatacatatatcaggctcgtctaacagatcatatataataaatgcagaaaaaattaca

SEQ ID NO: 195939 - DNA, 578 bp, Homo sapiens
gttttgttgcagaaacaatgcataaccaacaaatttaaattaatgttaracttcatttcacatacatcctattctctttttataattttacaaatataagctgagaaatcataacattgtttttagaaatataatttttttgtggagtctaaatgagatacatcataaaatataaatataatacttgggccgatatgtatagtgatattttcaattattgaggtagtgcttaaaaagatactcagatatgccaactaactataagtttatgatttccgatctttctttatgctgtggatcaaaaactcagtagccatagtttgaaattgtcctatgttgtttaaattgtcttcagactttatatgtatatggcatgaggatgggcatagtaacatacattgcactacttagaggtataaaaaaatagaaacagacagaaacaaataccatgaacctgtatagcgttctatacatgttagactgaggacactctgaacgtctggtacagatttatagaaatctttaaaagcactatttgaaaatattttaattttatgaatatctatgagtatatgtac

SEQ ID NO: 195940 - DNA, 469 bp, Homo sapiens
gtctttgtgaacagacaagatatcccaactattcaagttatgtaatatttattttaagaataattcaatgctccttgtaagtgagaaattatgatgttgcaacaaactaccacccaatggatagctggtctttctgaaaggtagtgtagtctcaaaagctcaacatcagtctctactggcagattgataatgtcagaagctagtccagacacggtgatggtctgtattgttggtgacaattattgctccatccctatccgctctacttgtgagtctgtgtttactctagggtaagctgaagaccaaagctggcaacacccacatgttgacaaatcctgtctatccagcttttgagagccttttctgtgttggaakatctccaattggcattataagtgaaacacgaagatctacatgtccagttacgtgcgttcagtcacgtaattcttgtccaaatcccaggtctcag

SEQ ID NO: 195941 - DNA, 469 bp, Homo sapiens
gtctttgtgaacagacaagatatcccaactattcaagttatgtaatatttattttaagaataattcaatgctccttgtaagtgagaaattatgatgttgcaacaaactaccacccaatggatagctggtctttctgaaaggtagtgtagtctcaaaagctcaacatcagtctctactggcagattgataatgtcagaagctagtccagacacggtgatggtctgtattgttggtgacaattattgctccatccctatccgctctacttgtgagtctgtgtttactctagggtaagctgaagaccaaagctggcaacacccacatgttgacaaatcctgtctatccagcttttgagagccttttctgtgttggaatatctccaattggcattataastgaaacacgaagatctacatgtccagttacgtgcgttcagtcacgtaattcttgtccaaatcccaggtctcag

SEQ ID NO: 195942 - DNA, 573 bp, Homo sapiens
ataaagatagagtataaaacagtggttatggtggtagaggtgacagaaaatggaaatatataggtgaaagtacagaaagtagcaaatatgtaggctgaacaagtcagaaggctaatgtacaacatgaggactatagttaataataaygtattggattcccaattattgctaaatgagtaggctatcgctgttcatgccagcggagtggtggttggggggaataatgggtaattacgtaagataacagatatgttaacttgttctactatagcaaccatttgactatatatatggtattgtatgacattgtatacttcaaatatacataataaaatgtatcaaaaataataaaataagatgaattgattgtacattcattgtctaagatatttgatagtggctctgccatttattagctgtgccatctgttatttgaaatgcttgtttttttcattattttatctattaaaccaggttaataatggagatagatgtgtagaatagatttctaaattttagaaagtgcttgtaatatggtaaatgctgcataagattttatgctattattatgca

SEQ ID NO: 195943 - DNA, 525 bp, Homo sapiens
acaaagaaaaggttatttctaccataatttgaatatctgaaaaatgataccaaaaattcagaaattagtatttataattgcctttttagagaaaattaatttggcaatattcaaattaatttaaaattctaattgtactttgccaaaatgtgtttgcctctayagcattaaacatccttctcttttaatttatgcacagggataaacgcagttgtaacaaatccctcaaagtatatattttattcctcagttctataggattagtaaattaaccagcaagccagttgcctgtttttgaaaataaagttttattgaaacaaggtcatgcccatttatatacctactttctgtggctgctttcctgctacaataacaaagtcgttgcaattgactccatatggtccacaaaacctaaaatatttactatctggccctttaagaaaaggttgcctagttaatgtgatgaaattcttgcttgaggacagtttctaaaataatttatcctaccatatatgttgatttttc

SEQ ID NO: 195944 - DNA, 555 bp, Homo sapiens
ggtccagaccactgcacctgctgagccagacactccgcggacctgacctccgttttacccatctgtaaaatggagcagctgggcgctggcaagccgtaagtccaagagctttggctccaccagcgtgtacgacgctcatttcctttctctctccccacaccctttccaaaaactgtaagccagaaaacctggccaggcctccgcgacggcgagaaacggtcttgaaggtcggtcggtcgccgtaatgcggtccggatcgtgcacgtgctgtttcgccactgccctccggctcctccttaacaaagatgtcaaccgtgctaaatcacaggtggtgcctttgtaagaccagctattgtcccctcrtaagtcaagatataaaacgctttgtactgaatggcccatgatctggagcgctcaacttgggagttgagctgttagatttttttttccccacccaccagagccactcttctcccaaatgacctcacttaataagcaaaatttaaatggggtggggggggactcaacatgctgtggatgaaaagaatagttact

SEQ ID NO: 195945 - DNA, 555 bp, Homo sapiens
ggtccagaccactgcacctgctgagccagacactccgcggacctgacctccgttttacccatctgtaaaatggagcagctgggcgctggcaagccgtaagtccaagagctttggctccaccagcgtgtacgacgctcatttcctttctctctccccacaccctttccaaaaactgtaagccagaaaacctggccaggcctccgcgacggcgagaaacggtcttgaaggtcggtcggtcgccgtaatgcggtccggatcgtgcacgtgctgtttcgccactgccctccggctcctccttaacaaagatgtcaaccgtgctaaatcacaggtggtgcctttgtaagaccagctattgtcccctcgtaagtcaagatataaaacgctttgtactgaatggcccatgatctggagcgctcaacttgggagttgagctgttagattttyttttccccacccaccagagccactcttctcccaaatgacctcacttaataagcaaaatttaaatggggtggggggggactcaacatgctgtggatgaaaagaatagttact

SEQ ID NO: 195946 - DNA, 638 bp, Homo sapiens
cacattaagtgaaggtcaccttaggacataccctattatgggctaggttatgtccccccaaaactcatattcatctacagccaaggagagaggccccagaagaaaccagccctgccaacaccttgaccttggacttcctgccctctcttgtttgaggctcccagactggtacttggttatggcagccctagcaaactcataaagtccccagacacaaagcggagctgagaggagctcagtggggcccagaggaggggtcaggcggcagagtctcctgcctccttccagagttacacagatgcacaccatgtagggtctgtccccagagaccacaggccccaggagggaaggaggcacatcctctgcttagctctctgtcaaggagagagaagaggagcccaagaaatgtcgagggacacctgatgttctggtgtaaaccctcctgggtggaatgtggtctgtctgtagttcccctacccccacatacacacacttctccctccacctccarcagactcaagcctagcactgctttggataggcttgggccagacacccagagtcaactttaacagaggccctgttgtgtgccaggtgccaggccacgtcccttacacacagcatctcgttaaagccat

SEQ ID NO: 195947 - DNA, 582 bp, Homo sapiens
caggctcccccatgcctcagcttatcaaagccctctccctgccccgcaggccctcagcatctcaccaggaaggcacagagcatgtagaagctgatgaagtagtagtatgcaaagttggtgccacatgtgtactcctcccctggggcatagtccgactctgggtcacacagcttcccatagctgcaggccagtaggatctcctgccaggcctcacctgttgcacacctagaggacagaagaggctcctgtcacctatctgctcctgcctggcccctcagaaggctggcagtcaggtggcagcagggtgtggacagatgagcaaactggggctgttgtccaatggtaaggaggtcagatcttcatgttcactgtgtagctcagtgtgagctgggcctcagtttcccctctgtgctgcagccctcatggggtgttacaagcaggagctaaactttagagaagagggcaaaatcaatctgattcaagttactagagggatgcactgttctgaccaaagcaaggcagggtcakatgtcacagaggcctcaaagagattaactgactccactctctgaggtaacccca

SEQ ID NO: 195948 - DNA, 496 bp, Homo sapiens
  misc_feature (1)...(496): n = A,T,C or G
nngaattcattcattcattcatctcaaccaatcttctcgagagcaccgtgaatgtgccaatcgttgtcaaaacactgtcaatgaccaaatgtggagatgatgtgaacagtgcccaccaagaggagtcaggggtgattttgaggtttgtgacctatgcagataaatggctagtagtgccacctactgagaaaatggttaatgaccaagtatttggggtagtgggggaggatgagcagtatccctgagctttgtcttgggcatggtgagtttgatgtgcctttgagacatcccaatggatatgtcaaggtagcagacrgaaaaataggtctggaactcagcagagcagtctcagctgaagaactaaatctgggacgcattggaggggatggtctgaagctgtggtcttagataacaccagatctccaggggagagtgtatactcaagggtatcactcaaatcaagcattcaatgactcgctgtttcatcctgctgaac

SEQ ID NO: 195949 - DNA, 468 bp, Homo sapiens
tgctgacacatctttgggcaaagcaagataagtgtactctcacattgctgggcatggtggctcatgcctgtaatcccagcactttgggaggctgaggtgggtggatcacctaargtcaggagttggagacaagcctggccaacatggtgaaaccctgtctctactaaaaagtaaaaacaattagccaggtatggtggcgtgtgcctgtaatcccagctactcagtacgttgaggcaggagaactgcttgaacctgggaggtagaggctgcagtgagccaagatcgtgccactgcactccagcccgggtgacagagcaagactctgtctcaaaaaaaaaaaaaaaaaaaaaagaaaataaaaagaaaaaaaacctctcgtgttatatattttcagttcaagttcacagagattttaatttttttcttagagactggatcttgttctgtcatcaagcctggaatggagtg

SEQ ID NO: 195950 - DNA, 648 bp, Homo sapiens
ttggaaaggaagaagtcaaaataaccttgtttggagatgatatcatcttatatttggaaaaacctaaagactctacaaaaatactatgagaaccaataatgcagtaaagttgcaggatacaaaatcaacatacaaaaatcagtagcatttctatatgccatcagtgaacaatccaggaaataaatcaaaaaagttatcccatttacaatagccacaaataaaattaaatacataggaattaaccgaagaagtaaaaaatctctgcaatgaaaactatgaaatactgatgaaagaaattgaagaggacacagaaaatggaaaaagattccatgttcatggattagaagaacgaatatttttaaaatatccacactacccaaagyaagctaaagattcaatgcaagctctatcaaaataccaaagacattcctcacagaaataaaaaaaacaatcctaacatttatatggaactacaaaaaaacaaacaaacaaaaacataatagcaaaagctatcctgagcaaaaacaacagaactggatgaatcaaattacttcacttcaaattttactacagggctgtagtgatgaaaacagcatggtactggcacaaaaacagacacatagaccaatgaaacagactagagaactc

SEQ ID NO: 195951 - DNA, 648 bp, Homo sapiens
ttggaaaggaagaagtcaaaataaccttgtttggagatgatatcatcttatatttggaaaaacctaaagactctacaaaaatactatgagaaccaataatgcagtaaagttgcaggatacaaaatcaacatacaaaaatcagtagcatttctatatgccatcagtgaacaatccaggaaataaatcaaaaaagttatcccatttacaatagccacaaataaaattaaatacataggaattaaccgaagaagtaaaaaatctctgcaatgaaaactatgaaatactgatgaaagaaattgaagaggacacagaaaatggaaaaagattccatgttcatggattagaagaacgaatatttttaaaatatccacactacccaaagtaagctaaagattcaatgcaagctctatcawaataccaaagacattcctcacagaaataaaaaaaacaatcctaacatttatatggaactacaaaaaaacaaacaaacaaaaacataatagcaaaagctatcctgagcaaaaacaacagaactggatgaatcaaattacttcacttcaaattttactacagggctgtagtgatgaaaacagcatggtactggcacaaaaacagacacatagaccaatgaaacagactagagaactc

SEQ ID NO: 195952 - DNA, 619 bp, Homo sapiens
taaagtaaaacttcaaaagagaattattcaagatcaagaaagacatggtgacacaacaaaattagttaaagataagtttgcaagcacacaaaaaaagagaaagaaaaataaagacgtcctggcaattaagcccacaaaaagtcatgaaataatgcagatacatagaaaacatgatttaaagtattttttaattgaagtgaaatagttaacaatcaaagagaaaatgataagtatggaagggaaaggaaattcaacatacacaaaattggagatactgagagagtggaaattaagggaatgaaaaatatttaaaatgccaatcatgaaaaagtcataggaacaaaataagacttgaatctaaaaactgaagaagcacattatgttcctggaaagataacagaatggtcaacaccaagacatattttagtaaatgtaccagtcaggttccatcaaggacagaatctgaaaatcctyggcaaaatactagcaaacagatccagcagcacaccaaagggctaatctaccatgattgagcaggctttatccctgggatgcaaggttggttcgatgtacacaaatcaataaatgtgattcatcacataaacagaaccaaaaccaa

SEQ ID NO: 195953 - DNA, 638 bp, Homo sapiens
ggtttgatcattgacagccagctcaggatctgagagttctttgccatttggggttattatagctgcatggccatggtgctgaaccttaggcaagggcaaggacacctccctagttcccagtcatggtgaggacctgtctgaaacattcaaactagactttactggaaacagagaagtctctgcattcagggcagctggcttgcaaggtaaggcctgcagtctccacccgcacgctaacccatgaggggatgccagagagagcccttcccccttggtcctcattcctggctcaattttctcccacaaagcgggcactttctaaagatgataggcaactgccatggaggaaggcagttttagatgcctagctggcacaaagtccagaggaagggagggagaagggctgagttttgtattactgttctacctttggagattttcctcatgccaagatagggtgtgtgtgtgtgtgtgtgtgtatgtgtgtgtgtatgtgtgcactataactttatgaaacactttttttttttttgagacagggtctcactctgttgcccaagctggagtgcagtggtgcaatcttggcttacygcagtctccacctcccaggctcaagtgatcctcccatctcagcctca

SEQ ID NO: 195954 - DNA, 475 bp, Homo sapiens
caaaaaaaaaaaaaaaaaaaaaaaaaaagtgggcatccttatcttgtttcagatctgagaagaaaggctttcaatttttccctgttcagtatgataccacctgtgggtctgtcacacatggctttcattatatgtgtcagtcggttttatgtgtctagaaatttattcatttatcattgtattgaggtatgttcctcatatacctagtttttttaggagttttattatgaagggatgttaaatgttatcacatgcttttttcagcataaatcgaaaagatcatatggtttttgcccttcattttgttgatgtgatgtgtcacattgattgatttgcatatgttgaaccatccttgcatccctggaatagatcccacttggtcatgaakaatggtctttttaatgtattgttgaattcagtttgctagtattttgttgaggatttttgtatcaatgttcttcagggatattgacct

SEQ ID NO: 195955 - DNA, 553 bp, Homo sapiens
agttccttggctgccctcgaaggaagtgtgacaggggcatggctctttatttggccaccatgagctcaaaccccttacaggagggggagcatgcagacaggcaggtgcagaaaccagggcaagcacttctgggctctggccscacagcagcatctaggggtgggtgcttgtgactcctgaagccccagtgtaacagtgttcttttagctctgctgtccacagacagcttaagttttaaccaggtcagcgccccattggtacctgggcccttgtctagcatccaggaagaatcaggttacacacggacttgaagagtggtaaatgcaagggttttattgagtgttggaggtggctttcagtgggataaatggggagttggaagggggatggagtgggaagatgatcttccctggagttcggctcttctgtggccaaactgctctcttaccatccccagctggactcctcttgatgttcagatgccccttttcttctctccttctctgctgtgcagttcttctgctcctcggctcttctgctcatcgcctcatgg

SEQ ID NO: 195956 - DNA, 553 bp, Homo sapiens
agttccttggctgccctcgaaggaagtgtgacaggggcatggctctttatttggccaccatgagctcaaaccccttacaggagggggagcatgcagacaggcaggtgcagaaaccagggcaagcacttctgggctctggccgcacagcakcatctaggggtgggtgcttgtgactcctgaagccccagtgtaacagtgttcttttagctctgctgtccacagacagcttaagttttaaccaggtcagcgccccattggtacctgggcccttgtctagcatccaggaagaatcaggttacacacggacttgaagagtggtaaatgcaagggttttattgagtgttggaggtggctttcagtgggataaatggggagttggaagggggatggagtgggaagatgatcttccctggagttcggctcttctgtggccaaactgctctcttaccatccccagctggactcctcttgatgttcagatgccccttttcttctctccttctctgctgtgcagttcttctgctcctcggctcttctgctcatcgcctcatgg

SEQ ID NO: 195957 - DNA, 633 bp, Homo sapiens
atatttctttgttctattttcaaactgaagccaattttctgacccagaagtcattgactgtgagagagactgggttcccataaagaaaggccctgaaataccaccacaagcaaatatggtaataattccctcagttctttctcaaagggacctatgacaatttatttgggtaaacttatataccagggaaaaacaaaacccatttgaatgatgcgaatatgggagttgagttaacattcatacgcagggacctaaagtgtcatcatggcctctgtgttagagtaggggcatagaggagccaagtaataaatggagtcctatcacaggtctggttcacacagtggaaccacatacctacccattggtaaattcatcagttcccaagtgtacaagtggagtggacacacaatgtaattgtaagaatcctaatattgaggccttggactcaatattgggtaagaagtatttaagctggaagactaagtagaagccactgaaactgcccayattcgacaatatcatgtcaaaaacaatgttgtggttcaagaagaaaggcagagattagtgctatcttaaagacataatgttatctgtggtagagagagataccacatgaaatttctggcaagccct

SEQ ID NO: 195958 - DNA, 523 bp, Homo sapiens
tgacagttctcttttgcagatctagttctggttatttaatacatataacctgataacgtacaggaacaactaaggggtctttttactgtaatttgttgcattcartgtatgaattaagcattttaacatcacactaaagattgctaaaggtaaagacaatttttaactggcttaactcccttatataagcaaattacattcaatttctactgagtaatttatggtgaattaagccaatagtttgttattatacatttgcaatggatataaaagtgaggcaataaacacaaaattgttataaagtaacaaatcatacctataatgtaatgaatgggaatgttttcttgagtattaattaaatttggtatggctattcttggactcatacattattagagctgagatcccctctgcaagtctagtaagagttgaaattcacatatcatgaaataaatttaaggtcccacactgacctactcaataggcagataggaaaatagaaatcaccatttgtggcaatatt

SEQ ID NO: 195959 - DNA, 543 bp, Homo sapiens
actaattgccttttagattatatgttcttaatttagtaattaggaatgaaaacaattatttattattatatcatacacatacactcatatttttaagaaacatttgtgtctgtcctactaaaaagaagtataattttatcacagtaggacttaattttcatcttttctcccctacccattgctgcttcctttgcctattacaagactttctttaggcatatgattaaaagtgagagggaaaatgagggcacaatgtgttccagtgggcaacaaaaggatgaatgaaattcctatagaagataaagtgggtggaagggcagaggtcatttaaactctggacagaaacggctattacttggggtcaggcagtgggggtggggatgaaggagggttagtgaaggaatgtggtttccttttaggaaaaaaaaaaaaaacttgaggacttaaataagcaattctgggttcaayctttacgtttccacgtatgcttttattttagtatgtttcatgttacctagtgcatagcatcctacccccagatgt

SEQ ID NO: 195960 - DNA, 511 bp, Homo sapiens
atcccattcagaagcacacattgcatttctttctcatgtgtctttaattttcttcaacttggaaattatttctcattcttgaattctttttaagtttataggccagatatattgtagaatttgggtttgaaaatattcctcattattagattcaaattatgcacctttggaaaaaaattcaatgaagcaagaagcaacattgtattcctcgtgtcagatggcacatgccttggatttgttgtccaatttgatagcttatttaagatgatgtcttttcttcttctccagcatgaatttatgttttctttctctagtattctttcaggaagtactttgaaactaagtaaatactctcttatcaaacttttaatttattcatatatttatatgtaccaatakgtactcatggttcttaatttccttcaaaggactatatgtgttactatcattaattcataattttgatgcttaatttctcccagtccagtgaaggaaaatgatagccagaaac

SEQ ID NO: 195961 - DNA, 527 bp, Homo sapiens
tactgtgttcttttgctacttttttttttttaatcccagaaaaaacttagcacagcaagcttgtatttattataagacatacagtctgaataacaagggggcacggtgggagttttactaatgtcatattaatattttgttaaggtgcctgagtcaattatttggtgcaactgaatatcttaatcaggaatggtcaggagcaagtaggagtgggattaggtggatgagcagggacaatagtaagggtccatctagatttgcttcttttcttttaaaagttgatctactatgtggttggcgaagaaaaatacagaaggcttcaattgcatttataatgctttatttctcaagtcagtttgtggatacagtggattatcttttttattattactcctctttgtatatcttaattatttagtaaacaagatactctatttatagcaagtgtattagaatttcacacactttttcttacacattttagttttagagtaatayctgttcatgatagaaaatacataacctca

SEQ ID NO: 195962 - DNA, 398 bp, Homo sapiens
tgaggaccagaggtccagtcaaagtaacgagccggtagccagctgcttcgggaaaaccattctcttgcctctgtgacacctagagaggatgatcagaatggtccctggggtgatgctggctcgcagtttgtcacatgctgactgaaggtttttgctgtggctcagcagcttttgagacacatcttcagtaggataatatctaggcattttgtgaagtttaaccacctaggttaccaccattcttctcaccaccaactggttttgtaacagttrcaagaactttctcctttttcttttcaaccttggatttattggctgagtacttcctcttgtacatggcacttctggaatatatagcagatgaggaatatctgccaattcctctaataaggatagga

SEQ ID NO: 195963 - DNA, 603 bp, Homo sapiens
aaacttgacccaaactggctttctagcctcatagaatttaattgaaaaagaataccatagaaaaacacagccagatgcacaaatgtttgttcatgggttagattgtcataagctttatgattctttgtggttattgatcattgaaacaattttagcagtcaagacttagcaagttggggtgaattaatgaattttcagttgcatcacggaaatgtaaccctaggctaaccataatgtatatcactgttatcatagtaagctttctccttgccactggtctatttagaatccttgatgattttaggaacatgtaatagatttgttttgtggaaaagttaataagtccattaggccactggtgtgtggaagtgatctgtaaagaaataaattccttcagttcccacatcagcatatcacaaaaaaccatattgtgggtcrtttggaattttacagatctcttcaaggagcagttcagaatggtttctaagagtgctaaatctgtatcttggtgcatgggtttggctggcatggatttggacagagtgggccaaacagagctaattgaggtagggaaaaaaacaggccataatggtgaatagagtt

SEQ ID NO: 195964 - DNA, 582 bp, Homo sapiens
gaattcaagagcgagccagttgtagaggaaaacagctttattgaggtggtgacaatagktacatctctgtgactgctcccgcagagcgggactactccatataggcagtgtgctgagagcagcagctcaggaacaggtctgcagtcatatttatacctgcttttaatgacatgctaattaaaagatgggtgattcacaatttgccagaaaatgtactggtgttgcttccaggtgttgccatggcaatggtaaactgtcttggtgcaagtgggtgtgtcttatggagaggtgctttccatgcctcttccctgtttcggtcagtcttcagtctggtccagagtccagtcctgtctgcctcctacctgattttcacctttgagaaatctgttgttttcaatggtgagagcaggaaacacaacgttaagggctgagtaaacagcaggtattgtcagggacggacgcagtaaaaagaaatggactaaagggataagaaggtcattagaaggtggttttacaatggggagagattgaaaacagaagaaaccagtggagaggtcacataacaacattggaagcaaggag

SEQ ID NO: 195965 - DNA, 577 bp, Homo sapiens
tagaggaaaacagctttattgaggtggtgacaataggtacatctctgtgactgctcccgcagagcgggactactccatataggcagtgtgctgagagcagcagctcaggaacaggtctgcagtcatatttatacctgcttttaatgacatgctaattaaaagatgggtgattcacaatttgccagaaaatgtactggtgttgcttccaggtgttgccatggcaatggtaaactgtcttggtgcaagtgggtgtgtcttatggagaggtgctttccatgcctcttccctgtttcggtcagtcttcagtctggyccagagtccagtcctgtctgcctcctacctgattttcacctttgagaaatctgttgttttcaatggtgagagcaggaaacacaacgttaagggctgagtaaacagcaggtattgtcagggacggacgcagtaaaaagaaatggactaaagggataagaaggtcattagaaggtggttttacaatggggagagattgaaaacagaagaaaccagtggagaggtcacataacaacattggaagcaaggagagtggaatttagaattc

SEQ ID NO: 195966 - DNA, 660 bp, Homo sapiens
gatttttgtgtttgtggaatatttaaaaatttttatttggcctccattttctgtttttcaaggtaaaatgatttataaccaattatcctcagatatatttcttaaatgtatttattttgatgaaaagtttatcctatgagtcaccatctgtgtgtgcgtctgtctttgatcagttctgggaacgtgcacatttacacacgaccagattcttgatctggaccagcctctgcctgtctcagctgcaaatggaaatcctgttgacagcgaggattgtgtgagtgcaggaaggggtcgaaataccttcagtaggaaaggttgaaggcactggacacgttcagaatactgtcatagcgttttaacatatgtaaaaaactagcaagtaaagctagtttttctaaactagctttctaaatrttttcagatgcagtaaagctgtgaaatattaaagcagggaaacacacacacacaatctctcacacatacacacatgtgcattagtcctgattggcattagtcctgatttttagatgtgaactagttgagggggtacctggcttctgatctgagtcataatagatttaaatttctattcgtgagcctgagaagttttggactggatttcaaaactgagtttgagcatttatttttttccttttggtg

SEQ ID NO: 195967 - DNA, 575 bp, Homo sapiens
atggctaatatggaccaaattacccttcagctcctgctttaaggtccatgaataccccgaaggaaaaatccactgtggtgtgctcagccctctcttgctgaggcgccccactgcactcttctgctgcttatgcagagtactttctatctaataaaacttttctttcaaacytatactgttgtcagtaaattattcttactccccacaagtctactactttctgatgccagggctctgacacctcacctggcccttacattgtggtgggagaagacaataaacatgttaatggtgggtaacatgcagcaggggtgtgctggggaccagcagtaggaggctgccactagttcagggaagagtagcttgggagtgccttcctgataagatcacattagtaaagagaactgaagaggcagccagctctgtggatttctgggaggaagaacattccatgcatcttcctgataaatgaagcggaaaacatctttcctcatccactattctttgggtcatttggagttacatttctgatgtgggtttcatcagtgcatggctacagaatggtccagatgaat

SEQ ID NO: 195968 - DNA, 575 bp, Homo sapiens
atggctaatatggaccaaattacccttcagctcctgctttaaggtccatgaataccccgaaggaaaaatccactgtggtgtgctcagccctctcttgctgaggcgccccactgcactcttctgctgcttatgcagagtactttctatctaataaaacttttctttcaaacctatactgttgtcagtaaattattcttactccccacaagtctactactttctgatgccagggctctgacacctcacctggcccttacattgtggtgggagaagacaataaacatgttaatggtgggtaacatgcagcaggggtgtgctggggaccagcagtaggaggctgccactagttcagggaagagtagcytgggagtgccttcctgataagatcacattagtaaagagaactgaagaggcagccagctctgtggatttctgggaggaagaacattccatgcatcttcctgataaatgaagcggaaaacatctttcctcatccactattctttgggtcatttggagttacatttctgatgtgggtttcatcagtgcatggctacagaatggtccagatgaat

SEQ ID NO: 195969 - DNA, 411 bp, Homo sapiens
catccatacattcaatcactcatttaacatgtattaaacctcagtttataacaatatggcaagataattagcttgcaatactcttctaatgaaaccctaagaaattattgctaaaatgtaacaaatattctttgaaatccattgttaggattataggaacataaagaaaatttccagagccaagctaaagaggaaactaaaaactgaatgaggctggagttgctgttacctgagctgccratgggttggtcctaagcaactgagaagcttggttttcacattttaagaaatacagcttgtcagatactcaagatttaagctggagttcagatttgtctctagcaatgggactacagaatagtgttaccacagtgaaatactgaatgaggaaaaactccttctatcatggaa

SEQ ID NO: 195970 - DNA, 688 bp, Homo sapiens
tatccatttgaacattttttttaaattttggtacatgtccttgggttggtttaatatacatttaccctgattcttcattctcattttattgacaagtgtaggtaccttgtaccttccttttccttgcctatttgcacagtcctcagagcagtgatctgtatcgagtatgtatcaggaaatattgtcaattgatttagaagctttgatagttttaaatggagagatgccaagtgcttattttcagcggaaaactgatcgggaaagtggtaacttttcagcacttaccgtgtgactagcagtaatttaaacacttttcatttatctttaatttattcctacccacaaccttattaggtgggtgtggttattattaccccatttttatagttaaggaatcaaggaacagagaggctaagcaagccatgtacatgtctgagagggtatcccagactcaaaaatgatccaccaaatggtggaaattgccacaggattgtggaaakattttattttattttagtatttcaaaacttgggagatttcagataagcatgtgagttttagcttttcttgaaaaatggagaaatctgccaacaatatgctagagctgagtagaatctgttcttttagaggggaaatgcactcctcccagcacatctcagttggctcatgtcacttaaaattttttgta

SEQ ID NO: 195971 - DNA, 424 bp, Homo sapiens
acaatcattcaaaacatgaagattctaaagtacaccagtttatacatttgtgagtttggaaaggatgtataagttgaaatcattctagtaagacctgaataragattttggcacttccaactccctcatggtgatgaggctgtctctctctctctcttgtgcacacacacatccctacctcttatatcccagttgcagcctccagacattgattaaccccatcgtgatttaacatccaaatattaacatagtgactatgcgttgccctcattttcataatctcaattgtgtatacctatttaggaggttaaatttagagagtcttctgaactgtacatattctatacaaccaaccattcacaaaattctttctagagatttaaatgtcagaattaacaatgaaagtaccaaatgtatgcctgta

SEQ ID NO: 195972 - DNA, 424 bp, Homo sapiens
acaatcattcaaaacatgaagattctaaagtacaccagtttatacatttgtgagtttggaaaggatgtataagttgaaatcattctagtaagacctgaatagagattttggcacttccaactccctcatggtgatgaggctgtctctctctctctcttgtgcacacacacatccctacctcttatatcccagttgcagcctccagacattgattaaccccatygtgatttaacatccaaatattaacatagtgactatgcgttgccctcattttcataatctcaattgtgtatacctatttaggaggttaaatttagagagtcttctgaactgtacatattctatacaaccaaccattcacaaaattctttctagagatttaaatgtcagaattaacaatgaaagtaccaaatgtatgcctgta

SEQ ID NO: 195973 - DNA, 497 bp, Homo sapiens
actttatatcatatatttagcaggaaaatttgaaacagttctaattaggctgaaaaaaacagctttcttcaatgtaaattacaaaggtcatatatcaatgttaaggaaacattaccactagtgtttgaaatccarcacatgcaaacataacagaccagttcattttaaatctctgtgtgtatatgtgtttgtataggaagaaggccgtattacatggatttaaaatgaaaaatacttaaaattccaagtttataactttgtatattaccgccttgccaatctcaatgtcagttcctttaaaacatactgttatctatgttcaaatgaattaagactcttaattataagtacaattaaaattttacaaaatggatgtttcattcattataaatacgattaaatacatcttataagtaaatgtatttcaagtcaggagggttaatcagtgattttcattttctcatttgaaacttacagctatggtattttgtatctca

SEQ ID NO: 195974 - DNA, 615 bp, Homo sapiens
atcatattattataatatgctatatgttagaagctcaattaaatcagatctctatgaaaatccctaatatttttgaacagataaaatatggattagggatctcagacattgaaagcaacctactagtaggcaacttatttctatctcttagattctacaaattaatcagttttatatacagttacagtttgaaaatgtgggcacaaagcacatgacaattactaattcccctctcacagtctgcccataaacatctatgtctccattgttttaaggccttgaccaagaattaccagtaaggcacctcaagaccaagatagactgtagggttggagcagaatattcccaaagttgacaggtatgtaaatacaccccaagagaaaatgaaaaatcaccatacatgttcattattttaaaataccatttgctttaatatagcctggaaaccatgccaattaaaggatgattctgatccaataattctttgwtggatttaggaatttgcatttttaaacagtatttaaatccaggtggccctaacattggttaaaaaaaaaaaaatgaaccttgtttttaaatttggatacatattggactcatctgaggtaaataaaa

SEQ ID NO: 195975 - DNA, 516 bp, Homo sapiens
tagttttaagggcctgttttcaagcataaagtgcttatgttaatgttctctgtcaataaatactctaagtgctttttttctcctcctaattttacttgccataatttgggggagtttgaaaaatgcatatatctagtatttgaaaaaaatacctatagtatgtaatgctttacctatttgatgaaggtataatttgataaaaaacccatagtataagatgctttaaaataccattatatactttgtttttattaacctagaaaaattaatctgsagatttatttactgctcaaaaatgtaatttattagtaaatatgccctaattatctacttagcaaaaaactccagtcacttaaagcatttaatttatttttgaatatctgctatgtaaaagatttctaggtagcattcattatacaaagaaaaaagtgtggtgtacagaagaaactcattgtgcaatatgagaatttgtattatgaaaattttattgtggtctttcagttcattccattaagt

SEQ ID NO: 195976 - DNA, 622 bp, Homo sapiens
ttcaattcaaaaataatgtttaatgaaattaagaaatgaaagaaaaacagtctgatgaaagattacatttgattatgaagaaagtaaatgacctactgtcattcactatgacctatccgataaaacggtctgctttttcttgttgctgttcttcacttagggtgtattgcctcttgtttccttttcttaaacaatttttcattttcactctayattcagtgtgctggagttgcaaatttgtcatgtagccatactgtttatttatttatttatttttttttgagacggagtctcgctctgtcacccaggctggagtgcagtggctcagtctcggctcactgcaagctccgcctcccgggttcacgccattctcctgcctcagcctcctgagtagctgggactacaggctcccgccaccacgcccggctaattttttgtatttttagtagagacggggtttcaccgtgttagccaggatggtcttgatctcctgacctcgtgatccgcccccctccgcctcccaaagtgctgggattacaggcgtgagccaccctgcctggctgccatactgtttattcttagttgaggaatgctaactgaatctactcacaaatcatgcagt

SEQ ID NO: 195977 - DNA, 622 bp, Homo sapiens
ttcaattcaaaaataatgtttaatgaaattaagaaatgaaagaaaaacagtctgatgaaagattacatttgattatgaagaaagtaaatgacctactgtcattcactatgacctatccgataaaacggtctgctttttcttgttgctgttcttcacttagggtgtattgcctcttgtttccttttcttaaacaatttttcattttcactctacattcagtgtgctggagttgcaaatttgtcatgtagccatactgtttatttatttatttatttwtttttgagacggagtctcgctctgtcacccaggctggagtgcagtggctcagtctcggctcactgcaagctccgcctcccgggttcacgccattctcctgcctcagcctcctgagtagctgggactacaggctcccgccaccacgcccggctaattttttgtatttttagtagagacggggtttcaccgtgttagccaggatggtcttgatctcctgacctcgtgatccgcccccctccgcctcccaaagtgctgggattacaggcgtgagccaccctgcctggctgccatactgtttattcttagttgaggaatgctaactgaatctactcacaaatcatgcagt

SEQ ID NO: 195978 - DNA, 442 bp, Homo sapiens
ctattaaacaatacagaattagttgtagcttaactaccacacacrttaattgagtcaattacagaccaaactgaactaataaaaatttttaaactcatagataaatgctgatacttcaaaataaaattagagaggaaaatgttactgttatttatggagcttatatcaaatatgtaaacaaattttaaaagtaattaaaatttaaccaaaaacaacagggttttatggagtactgtgctggagaaaggggagtccactaagagggaaggttgacactcaatacctctcagagagggacatgtaatcaggcaattaaaatggcatagtgtaaccatttgagatcacatatgtaagtagggccaagtttataatctgttatagatcctggtaaaaaaaaatgtcgatattattctaagactacaagtagcataaccagcacact

SEQ ID NO: 195979 - DNA, 644 bp, Homo sapiens
ttgcaggtgtcatgggactctagaaacatggtcacatcgaagtgaatatactaaaccactagttcatcatgctgcattgcacgaagacaagcattttaagtctattgcttttcatcatttagatgtgcagtcattgttggtggtattgtcaagagattagcaaaaataattatgagtgagatcattttaatttcttctttctttccattttcagcttttctttgtaaaaatgggttagctttgtgagaaaattagtaagaaccagtaatgtggatgctactacagatgttaccatttggcatgaaggttgaggagaggcatggccacaggattgataatgtgtggggttgccataacaaagtaccacagactgtgtagctcaggagggcataaatcccagatcaagttgtcagtggaggtggttctttcagaagcctctatccttggcttgcaagatgaccatcttttccatgtgccttcacacagtcttccctctgcgtgtgtctacatcctattstcctcttcttataaggaccccagtcatattggaggagggccctaacctaatgaccccattttagcttaattagctcttcagagggattggatttccacacatgaatttagggggaggcgggtagaca

SEQ ID NO: 195980 - DNA, 649 bp, Homo sapiens
tagaagataatgctagttgatgagtataagtcttaacatttagacattgtggtccaggaagcaaaataagtttcagctatgagagctgaaatgttagttgagaaatacacagaattaatagctccagaggaattattatattttacaaccaggttaaaaaatgtctttctcttatattaggctgttcttgccttgctatgaagaaatacctgagactgggaattttattttttaaaaagaggtttagttggctcagagttctgcaggctttacagcaagcatgctgctggcatatgctcagcttctagtgaagtcttggggagctttcagtcatggcagaaatcaaagcaggagcaggcacttcacatgctgaaaacaggsgcgagggagagagagagtgggagggtgccgcacacatttgaataactaacatctcatgagaacttactgttttgaagacagcaccaagccatgaaggatctgcccccatgcctcaaacacctcctaccaggacccacctccagcattggggattataattcaatatgagatttgagaagggacaaacatcaaaactgtgtcactgagactcctatttgttttccaaattttagatattcagccaagtcagagaataatgtacagtctc

SEQ ID NO: 195981 - DNA, 458 bp, Homo sapiens
agactagttatgtatgacacatcagagtttgcttatcttttttcagtgttgtatccctatagttccttcctgtagggtctccttaaatagttactttttatgttgtatctagagttggttattgttatcagctcagtacatattcaatacaagcatgtctggcatgatcagaactcctaaattatgtttcttaacttagagttcaaagaaaatgtgtatgcaaaatataaaataatgtatgtgtttaaaatatatctgccaaataaatattttagatttgcaaatttcagggkaactcattagctttctcattttctgctctaattaaaaaaaatgtgagatgtatattttgtcaccaaagtcttcaccatttgcttaccatgtatgatatgcatacatacctatggggaagaattaaatagcaataatcataatcataaaacaattgtgattacatg

SEQ ID NO: 195982 - DNA, 583 bp, Homo sapiens
gtttgcaataatgaggcagatattaaaatataattgaaattctggattttttaaattattcagaaattaataatacatttatttttactatatattttaatattgaatcttccttgaattaaatttattagtgatattaccacaatgcatttgatagttattggaataatttcccttttattcttatatctaccacatactcatgattatgatagtacactggggttactctcaaggaaagtaatatctggcgataatttagttgaatttgcaatactatcagtgagatacacgatttgatgaaaataagaggagagggatgttcccattgccctcgctctgtcagtttggtagttcttgcagagttagaccagctacagtattcaccagttttgctaccagtaaaaarttgcttgatttggaaaagagagtggaaaaaccagattcccctgggctttgtcagaaacagttgcattatcagtgtcaaatgaatttggaaggctaaagtctaagcacgcttgaggttgcaattttggttggggcaagcaataggctgacagactaatgagaattttagcaggaa

SEQ ID NO: 195983 - DNA, 621 bp, Homo sapiens
gtgtatgtattttgtgggtacatgagatgttttgatacagtcatgaaatatgaaataagaacatcatggagaatgggttatccgtctcctcaagcatttattctttgatttcagatggcaatattttaaagaattgaatcaagatttttttagagtaccgtatatttttcaaaatagcatttataactaatatagtctccacaaacattaacttatcacctttaaatgtatagcctctaattagctatcatgttagcataaatgtgattttcttctattttaatataaattgattttccttaaaacagaaccttatgttactactttattttaaaattaagaaatataaaaattgttcatgttttaataaaatttctgaatacttatgagtaayttaatttgatagtgattaaagttcgaaaaaagccatttcatatttgcactttatacatttatgaattcatacaaatttaaaatagtgttgttttattgctcttatagttttagatcactaaagatcatctacataaaaagaaatgtatatttattaaattacattttattgtcctacttaatttgtaaacagaaaatgaaacctgagagtatgtctcagtatatgat

SEQ ID NO: 195984 - DNA, 621 bp, Homo sapiens
gtgtatgtattttgtgggtacatgagatgttttgatacagtcatgaaatatgaaataagaacatcatggagaatgggttatccgtctcctcaagcatttattctttgatttcagatggcaatattttaaagaattgaatcaagatttttttagagtaccgtatatttttcaaaatagcatttataactaatatagtctccacaaacattaacttatcacctttaaatgtatagcctctaattagctatcatgttagcataaatgtgattttcttctattttaatataaattgattttccttaaaacagaaccttatgttactactttattttaaaattaagaaatataaaaattgttcatgttttaataaaatttctgaatacttatgagtaacttaatttgatagtgattaaagttygaaaaaagccatttcatatttgcactttatacatttatgaattcatacaaatttaaaatagtgttgttttattgctcttatagttttagatcactaaagatcatctacataaaaagaaatgtatatttattaaattacattttattgtcctacttaatttgtaaacagaaaatgaaacctgagagtatgtctcagtatatgat

SEQ ID NO: 195985 - DNA, 505 bp, Homo sapiens
gaatggtggaatggcctttcgaagtcacaattacaatacaaaataggtgacaatactttgcaggcctggggcaaagttctccagaaggctgtgtatgccctgaatcagtgtccaatatatggtactctttctcccatagccaggattcacaggtccaggaattaaggggcggaattggaagtggcaccactcaccatcacccctagtgacccactagcaaaatttttgcttcctattcctatgacattatattctgctggcctagaggtcttagttccaaaaggaggaatgctgccaccaggagatacaacaataattccattaaactggaagttaagattgccacctggctactttgtgctcctcctacctctaagtcaataggctaacaagggagctrtagtgttggctggggtgattggcccagagtatcaagatgaagtctactacttcatgatggaggtaaggcggaatatgagtgggacaggagatcccttagggtgtc

SEQ ID NO: 195986 - DNA, 543 bp, Homo sapiens
atgaatatagaaaaaatagaagaacatcctgtaaaacatagactgtaaaaatggtataatattttaccttatatttttaatataatttgatatttaatatcaactattccttgaatttaagcatatttttaatcatagaccaacagagatatatctaccatcctttcttgctactaatgtttttgctagggatgttcagaaaaagccacaataaaaatcaaatttgtaagaagaatcatggaaaccccatatagtcaacattgcagagtggagatagaaagtaatttttttawaaatttatacaatgttactaaaataaatgtggattttggaaagcaatagtcaagcagttctacagtatgatccaatttcaacaaaaccaaggaaattataagacagtgttggcataccattgtgctgagatactgttccacatggaattattcaatatgaacctacaggaaaatttaattttgatcttcctcacttttctggggggcatcagatgcccaaccactaattttatttgattttttttcttaa

SEQ ID NO: 195987 - DNA, 500 bp, Homo sapiens
ttttcatacttataaatattatttattttctttcatattcttatgtattttctgtaaaactctawatcacataaactcaacaaaagcagtaaaatgtgaatatttatctttacaaatttgtaataaaatgtcaatttattttcccacaagtatgttttagtcaataaaataagtgttcatgcttcatgcaaacaaaatgataaaaaatacattgaaagattatttgagacattaattttgtttctggttgttgaaactggcaatgtggcagctatttggatggaaagtgacaccagatcagcaagataattcatgtcatttttgctcaacaactaacaaacaattcatggccctaaaaggacgtgctctgaatcatgggaaaagctagtattttttatttgtcatctaggcttggcccgtatagttactaggaaaaaaaaatccacctaaaaacaacccatcagatattttcattataaacagtattacttgccaagcag

SEQ ID NO: 195988 - DNA, 596 bp, Homo sapiens
ttatttctggtagaaatacaaaatgtctgggacaatgccagaaatatattcagaactaaacatgtaatctaccatttttataaccacacatatattcaaatgttctctattgctcactaaaaacaatagytaatattttcttagtgtggcaggtgagaggcactctataaattgctttcatgtggtagcatatttagccttcacacagactgttagtgttggctgatgttctttaccttttctagcctcttgtgaagtaggtttggtgatatgactagttacacgaatggaactagtcaacggagtggaatatgagtgaagtgatgactgccttgttctttaccttttctagcctctcgtgcagtaggtttggtgatatgaccagttacatgaatggaaccagtcaacggaatggaatatgagtgaagtgatgactgccacctgtgaaagcagagtggttatatgtcagttgtacccttccctatggtcggtccctttccctctctcctaccacaatccactagcttacaaaagccaagtacagtgaagccacatgaaacaggtctacaaaatggaagcagcctgagtttctgagt

SEQ ID NO: 195989 - DNA, 498 bp, Homo sapiens
tggttggccaaagtttggtctctttaaataataagtacacgttccatatttctttcacaggtatagaagaagaccctatccacaaagataccactgcaaatgaaaaattagaamggaatagagaatatacataccaatggcttcacacacaggttggggttcatgaaacgactagttccagaaatatgaaatggtgaggtcatttcctctaaattagatttttgtattgtaaacacatcttgaaaattgtaacctaggttaattgtgctaaaacaaacatgactttattgccaaaggccaatacgctacgttgccgggtaatacaaaggcctttcatatagaatagatttaattactccttctatttttcaccctgaaatgtttgggaacaactctattctgtaatacttgaaaccaacagatgagccacaaaaataattctactctataaagtaaaaaatgtggtattcattaaatgtttttagatatcatgtatat

SEQ ID NO: 195990 - DNA, 592 bp, Homo sapiens
atggaggaaacttctcccatgattcagttatctccacctggcctgcccttgacgtgtggggattattacaattcaaggtgagatatgggtggggacacaaccaaaccatatcattgccatttagtacttttaccacaaatgcatggtaatactagtttcttggctttttcttttctgtttattatgctgttcttttctattttgagttaaatatttcatacaattatttttaaattttttcaatcgtattgacatacttaaatctatagattttcctctgagcaatgcttattctgtaacttgtgacatgtagatattttcatcattttcataattttagggtttttaaaaatgttttaccttagatttaaaatttccatatagaaaggtcattttttttggtgattcttttyagttttattgctttatagccagagaataatttttatgctatttctgtttttggaacttattttggctgtcttgctaatctaatatgtggtcaattttcatgaatgttttaggtgtacttgaaaaggaggcagggttttttattattgggataaagagtttattttgcatgtgtaagatc

SEQ ID NO: 195991 - DNA, 398 bp, Homo sapiens
taacaaaactaaaataaaatgactcttggttgtaagtgttcgtggttaatcacttgttaaatgaaatcacatttcagagaggcaacaaatcartctaaggaaatatttcatggacagttgatctaggcttttggatcctggctaatttatcatgataattttatatttactcctcttataaaaattataattaactgaaaacattctaatatatttctgatattccctaaacttagagctatgttttttctgtctatttacctatcctggcactaagcatggtgtctgccatattgtaagcattgttggcaggaaaggaaaaaataagtttgagaagattttatataattacataaggatatgtcttaaaaatccagaagttttaatcctaaaggcaa

SEQ ID NO: 195992 - DNA, 575 bp, Homo sapiens
acaacaacaacaacaactgaatttatactaaccacaatcaagaccatagcacaataaaaatagaaatcaatactaagaaaatcactcaaaatcacataattacatggaaacctgctcctgaatgacttttgggtaagtaataaaattaaggcagaaatcaattatttgaaatgaataagaacaaaaatacaacatactagaatatctgggacacagctaagacagtgttaggagggaagtttatagcactgagagcacacatcaaaaagtaagaaaaacctgaaattattataacaacctatccccataactagaggaactagagaaacaagagaaaaccaacttaaaagctagcagaagacaagaaatgaccaaaattaaagctgaactgaaggaaattamcaaacaaaaaaacatacaaacgattgataaatccaaaagtcattttatgaaaacattaataggaaagacaactagctagactaattttttttagtaaagagagaagatccacacaaacacaatcagtaatgacgaaggggacattaccactgaccctagagaaatacaaaaaa

SEQ ID NO: 195993 - DNA, 539 bp, Homo sapiens
aggtacatatctataggcagtaggatcttaagatttaactcctcctgacccagggttctttgtctttgggtttaggctctaagataagccaaaaaagaatagcagattcttttccttgccatttattttgtttttctggggaacattggaggaggagtgctgagtgtgtaacatggtgtaacgacatcaataaatcaccaagattttatttaacagaaagcaacgaaggacatctttttaagcacttttagactctatatagttaaatcgtctatttctgttcttttccaaaatcaaattttaaacacatttggcctatcgaatatayttaacattgtggtcagttactggaatatcaacaaaggacatattttctttttatccactcctgttgactttaaagatattgtttctctaggcactaacaaattcgtaactgtgtattttctttccagtctgagttataagagattatactgaacataaatcaaatttgtgctgcaccttatgtgagaaatttcagctctctcctcagtcat

SEQ ID NO: 195994 - DNA, 560 bp, Homo sapiens
ctcctgaatgatgattgggtcaatgaagatgttaagaataaaattgtaaaatttattggaaaaataaaaatgaaaacacaacacacaacaacctatgcaaaagctctaccaagagggaaatgtayggcaataaatgcctacatcataaaaggagaaaaattttaaataaacaaatgaattatgcatcttaaagaaatatacgagaaagagcaaaccaaacccaaaattaagtagaagaaagtgaaaatcacagtagaaatacataaaatttgagactaaaaattagaaaagattaatgaaagaaaaagttggtttcttacaaagataaagaaaattgacacaactttagccagactaataaaaaagagagatctaaataaataaaattagagatgaaaaaggagacattacaactgataccacagaaattaaacggattattagtggctactatgagtaactatatgccaataaattggaaaacacagaagaaatgtataaattcccagatatttacaacctatcttgattgatccaggaagaaatccaaaacctgaaca

SEQ ID NO: 195995 - DNA, 560 bp, Homo sapiens
ctcctgaatgatgattgggtcaatgaagatgttaagaataaaattgtaaaatttattggaaaaataaaaatgaaaacacaacacacaacaacctatgcaaaagctctaccaagagggaaatgtacggcaataaatgcctacatcataaaaggagaaaaattttaaataaacaaatgaattatgcatcttaaagaaatatacgagaaagagcaaaccaaacccaaaattaagtagaagaaagtgaaaatcacagtagaaatacataaaatttgagactaaaaattagaaaagattaatgaaagaaaaagttggtttcttacaaagataaagaaaattgacacaactttagccagactaataaaaaagagagatctaaataaataaaattagagatgaaaaaggagacattacaactgataccacagaaaytaaacggattattagtggctactatgagtaactatatgccaataaattggaaaacacagaagaaatgtataaattcccagatatttacaacctatcttgattgatccaggaagaaatccaaaacctgaaca

SEQ ID NO: 195996 - DNA, 585 bp, Homo sapiens
tttgatctgtgtgctatttagatgaatagataattgttttcaggggataatgacattttttgatgctttgcttttgttttgacatttgatattttgtggtctgaaaatatggcttataaaaatgtctctttaggtagaatgctttaatgttttgttgcgagttctatacaaatggatactccattagaggttaaaaactttcattcttacagacaatctctcttctcactctcttcttctgcctttttctctttctctctcagaaaaaaaaaaattatgtaatattatttaaatcccaaggaatcatattagtcttttgacttaaaatacyaaaatattttactgtgatgattctagtattttggtattgtctaggagttttgctatatgtattttcttgcttttttgtttggtgcataaaaaatatgagtttttaaattatccattggttattaattttattattatagaaatgttcattagtgttctattgatgctttcacaaattaccaaaaactcaggggctaaaaatgatgcacatttattatactatatttctgtagattagaaatcttacacaagtgt

SEQ ID NO: 195997 - DNA, 590 bp, Homo sapiens
tgctgtcagtgaaaattaggtcggcaaggatgagagtgacatccagtaagaccaggaaaactccaaatagtctaaaataaacaaataaataaataaataaataaatgcaaagataaargggcatttgtccctgtagctatactatatttaagccactgatcaggtaccaaaatgttattatttagtattaagctgcccagtggcaggaaaaactgtaatgccttagaatctcagaaaaatcactgttttcacccaatagaagcagttcttaataaacaaaattctcaccaaaccacttcacaagatattatagtaaacacatcagaccaacacctcaagagagaaaagtaaaactgaattaaaatcacctgtctgtttacaaactcttcttaaaatttgcgaatttcataagaagtttacaccaatttctcataaaaaataaaccctcattaatctggataattctaaagaatttattaataaaaaccaaatgaaagcatgagtaacataagctcttaaaagaccaagatttttcatcagtgacattttcaacaagtacatgatttcatatttatgggtgcttctagcag

SEQ ID NO: 195998 - DNA, 574 bp, Homo sapiens
atatgaaatttgtcctgtgctgtgcaagctaccacaaagtcaccttcctcaccagtggcgttatgaatagtgtgtgaaagttgtcagaatcaaaatggagccacttgtgttaaaaccctgacaaatggaactaggaatgaccatgaaggagggttcgcatgcacatactcctgataagaagaactaccataaattgactctgcttaatcacaaccttggatagaagccaccaacaccatataaaacttccttctacaaagatatgtgtccagcractgcctgttcagccttatactgatgccacccttggtattgattctacaagcacaggataattctttcaaaacagcttatgtaacccacctcattttcacttcataaacctatggattgacatcctgtagtcactgctgcatttcttattaatgttaataagccccctttacaatattcgaagcaatttttctctgatatctcttctaaaataaagaatttccaagttgacaccaataaagaagatacttaggaagatctatttggcatatttggaaggcatatttttatttatttattt

SEQ ID NO: 195999 - DNA, 574 bp, Homo sapiens
atatgaaatttgtcctgtgctgtgcaagctaccacaaagtcaccttcctcaccagtggcgttatgaatagtgtgtgaaagttgtcagaatcaaaatggagccacttgtgttaaaaccctgacaaatggaactaggaatgaccatgaaggagggttcgcatgcacatactcctgataagaagaactaccataaattgactctgcttaatcacaaccttggatagaagccaccaacaccatataaaacttccttctacaaagatatgtgtccagcaactgcctgttcagccttatactgatgccacccttggtattgattctacaagcacaggataattctttcaaaacagcttatgtaacccacctcattttcacttcataaacctatggattgacatcctgtagtcactgctgcatttcttattaatgttaataagccccctttacaatattcgaagcaatttttctctgatatctcttctaaaataaagaatttccaagttgacrccaataaagaagatacttaggaagatctatttggcatatttggaaggcatatttttatttatttattt

SEQ ID NO: 196000 - DNA, 602 bp, Homo sapiens
ttacaatattcgaagcaatttttctctgatatctcttctaaaataaagaatttccaagttgacaccaataaagaagatacttaggaagatctatttggcatatttggaaggcatatttttatttatttatttacttttgagatggagattcactcttgttgcccaggctggagtgcaatggcgggatctcagctcactgcaacctctgcctccctagttcaagtgattctcctgcctcagactcccgagtagctgggattacaggcatgcaccaacacgcccggctaattttttatttttagtagagaggagatttctccatgtgggtcaggctggtctcraactcctgacatcaggtgatcccccccgcctcagcctcccagagtgctgggtttacaggcatgagttgatgcgcctggccaggaagccatctttaacatcctgttgaatgattctgcatagcacatcaatcccttgaaatactttgctgtatcggcttgtgattaatcagtatataaaactgaaggtaaaatgggaaatacatgggcttttgatgaaccaagccatagggtgataatgtctgtgtccttgaggaagcagac

SEQ ID NO: 196001 - DNA, 602 bp, Homo sapiens
ttacaatattcgaagcaatttttctctgatatctcttctaaaataaagaatttccaagttgacaccaataaagaagatacttaggaagatctatttggcatatttggaaggcatatttttatttatttatttacttttgagatggagattcactcttgttgcccaggctggagtgcaatggcgggatctcagctcactgcaacctctgcctccctagttcaagtgattctcctgcctcagactcccgagtagctgggattacaggcatgcaccaacacgcccggctaattttttatttttagtagagaggagatttctccatgtgggtcaggctggtctcaaactcctgacatcaggtgatcccccccgcctcagcctcccagagtgctgggtttacaggcatgagttgatgcgcctggccaggaagccatctttaacatcctgttgaatgattctgcatagcacatcaatcccttraaatactttgctgtatcggcttgtgattaatcagtatataaaactgaaggtaaaatgggaaatacatgggcttttgatgaaccaagccatagggtgataatgtctgtgtccttgaggaagcagac

SEQ ID NO: 196002 - DNA, 597 bp, Homo sapiens
gtccatgaacagatgaatggataaataaaatgaggtaaatttacacaatgaaatattattcarccttaaaaatgaaattctgccatttgaagcaacatggttggaactggacacccttatggtgaatgaaagaagacagactagaaaaataaataccacattttctcaatttaatgtggaagcttaagaaagttgatcttctagaagtaaatagtagagtagtggttatgagatgctccaaatgggaggagactgagagacaagaagaggcttgttaacaaatgcacaattacaggtagacgggagggatatgctctagtgttctacagcgcagtaggatgactacagctaacaatatattatacgtttacaagtagccagaagagagcattttgtatgctaccaacacaaataaatgttaatgtctgagctgatgaattttctcattgttctgatttggtcaaaccacatggcagagatgtattgaaatatcacactgtatcccataaatataaacaatcattatctgccaacctaaaaaatcctttaattaaaaaggattgtattgccatacattacaagtgattcaacacagag

SEQ ID NO: 196003 - DNA, 597 bp, Homo sapiens
gtccatgaacagatgaatggataaataaaatgaggtaaatttacacaatgaaatattattcaaccttaaaaatgaaattctgccatttgaagcaacatggttggaactggacacccttatggtgaatgaaagaagacagactagaaaaataaataccacattttctcaatttaatgtggaagyttaagaaagttgatcttctagaagtaaatagtagagtagtggttatgagatgctccaaatgggaggagactgagagacaagaagaggcttgttaacaaatgcacaattacaggtagacgggagggatatgctctagtgttctacagcgcagtaggatgactacagctaacaatatattatacgtttacaagtagccagaagagagcattttgtatgctaccaacacaaataaatgttaatgtctgagctgatgaattttctcattgttctgatttggtcaaaccacatggcagagatgtattgaaatatcacactgtatcccataaatataaacaatcattatctgccaacctaaaaaatcctttaattaaaaaggattgtattgccatacattacaagtgattcaacacagag

SEQ ID NO: 196004 - DNA, 597 bp, Homo sapiens
gtccatgaacagatgaatggataaataaaatgaggtaaatttacacaatgaaatattattcaaccttaaaaatgaaattctgccatttgaagcaacatggttggaactggacacccttatggtgaatgaaagaagacagactagaaaaataaataccacattttctcaatttaatgtggaagcttaagaaagttgatcttctagaagtaaatagtagagtagtggttatgagatgctccaaatgggaggagactgagagacaagaagaggcttgttaacaaatgcacaattacaggtagacgggagggatatgctctagtgttctacagcgcagtaggatgactacagctaacaatatattrtacgtttacaagtagccagaagagagcattttgtatgctaccaacacaaataaatgttaatgtctgagctgatgaattttctcattgttctgatttggtcaaaccacatggcagagatgtattgaaatatcacactgtatcccataaatataaacaatcattatctgccaacctaaaaaatcctttaattaaaaaggattgtattgccatacattacaagtgattcaacacagag

SEQ ID NO: 196005 - DNA, 460 bp, Homo sapiens
caacagtgactaaaaaattcaatattgaagtatatttccttgtaattaatttgaattgaagtagccatatacagctagtatttactacattgaacaatgcaaatamgaggaaaaaattaataaccatctctaataccacatgccaaaatcctcatcaatttgttctagctaaaggagtttatcagaagcagcagttgaaagcaccaactaaaccagctggggttagttcactgtcattctctcagaaccatctcttctctgaacaaaacaagtacaagagttcatcgtgaatctgcattctccttgcctattttaaggttttgatgttgacactaatttgtgaaatccctcctgtggtgtgatatttcattttccttgctttctgttaggacaagaatgcttcagctcttaatttaaaattatgtttctccctcctaggttgagtgaacttagaatgcat

SEQ ID NO: 196006 - DNA, 460 bp, Homo sapiens
caacagtgactaaaaaattcaatattgaagtatatttccttgtaattaatttgaattgaagtagccatatacagctagtatttactacattgaacaatgcaaatacgaggaaaaaattaataaccatctctaataccacatgccaaaatcctcatcaatttrttctagctaaaggagtttatcagaagcagcagttgaaagcaccaactaaaccagctggggttagttcactgtcattctctcagaaccatctcttctctgaacaaaacaagtacaagagttcatcgtgaatctgcattctccttgcctattttaaggttttgatgttgacactaatttgtgaaatccctcctgtggtgtgatatttcattttccttgctttctgttaggacaagaatgcttcagctcttaatttaaaattatgtttctccctcctaggttgagtgaacttagaatgcat

SEQ ID NO: 196007 - DNA, 460 bp, Homo sapiens
caacagtgactaaaaaattcaatattgaagtatatttccttgtaattaatttgaattgaagtagccatatacagctagtatttactacattgaacaatgcaaatacgaggaaaaaattaataaccatctctaataccacatgccaaaatcctcatcaatttgttctagctaaaggagttkatcagaagcagcagttgaaagcaccaactaaaccagctggggttagttcactgtcattctctcagaaccatctcttctctgaacaaaacaagtacaagagttcatcgtgaatctgcattctccttgcctattttaaggttttgatgttgacactaatttgtgaaatccctcctgtggtgtgatatttcattttccttgctttctgttaggacaagaatgcttcagctcttaatttaaaattatgtttctccctcctaggttgagtgaacttagaatgcat

SEQ ID NO: 196008 - DNA, 529 bp, Homo sapiens
ccatatacagctagtatttactacattgaacaatgcaaatacgaggaaaaaattaataaccatctctaataccacatgccaaaatcctcatcaatttgttctagctaaaggagtttatcagaagcagcagtygaaagcaccaactaaaccagctggggttagttcactgtcattctctcagaaccatctcttctctgaacaaaacaagtacaagagttcatcgtgaatctgcattctccttgcctattttaaggttttgatgttgacactaatttgtgaaatccctcctgtggtgtgatatttcattttccttgctttctgttaggacaagaatgcttcagctcttaatttaaaattatgtttctccctcctaggttgagtgaacttagaatgcattctctgacatatccaagtttttgttcatatgaatttggggaaaaaagcatacttaattagctaagacttcttattctaggcttgaccctgtgttcaacatctattgaatttgtagttgcatgggctgctctct

SEQ ID NO: 196009 - DNA, 529 bp, Homo sapiens
ccatatacagctagtatttactacattgaacaatgcaaatacgaggaaaaaattaataaccatctctaataccacatgccaaaatcctcatcaatttgttctagctaaaggagtttatcagaagcagcagttgaaagcaccaactaaaccagctggggttagttcactgtcattctctcagaaccatctcttctctgaacaaaacaagtacaagagttcatcgtgaatctgcattctccttgcctattttaaggttttgatgttgacactaatttgtgaaatccctcctgtggtgtgatatttcrttttccttgctttctgttaggacaagaatgcttcagctcttaatttaaaattatgtttctccctcctaggttgagtgaacttagaatgcattctctgacatatccaagtttttgttcatatgaatttggggaaaaaagcatacttaattagctaagacttcttattctaggcttgaccctgtgttcaacatctattgaatttgtagttgcatgggctgctctct

SEQ ID NO: 196010 - DNA, 631 bp, Homo sapiens
tgactggcgccagctgaaatactgttgcagcaatgtgatgactacatgaggatatagtgtatgattctctggacttttgtatatgattaaaattttccataacaaaatgtttctaaaagraaaaacagagtaacagtgtatatttcatataggtgttatgggtattaaatgagatatgtaaaagtgcaatactgtctgggatacagaaggggttttgaaaagattattttcccttttattttctcttttaaaatacacctcccccacaacacacagaaaagacacacacacacacacacacacacacacacacacacacacaccaggagtcatccaaaaacagtctttgtgatgttctgcaagggttgaattgtcctagtaagggtttgtgaaagacttggatcttttttacattgaaatcaaaggctggtgtttttagacacacttcagagtcctggagccttgggtactggaccttcctactttgggaaaataatcaactcctgagctctgtaaacaataaccagtatagaatagaaagcaggattctctgaagagaaaccagagtccccagcatgtgggcagcacctgaagcgtgaccctcagactcagggagggaataaggcctgtt

SEQ ID NO: 196011 - DNA, 594 bp, Homo sapiens
atgattctctggacttttgtatatgattaaaattttccataacaaaatgtttctaaaaggaaaaacagagtaacagtgtatatttcatayaggtgttatgggtattaaatgagatatgtaaaagtgcaatactgtctgggatacagaaggggttttgaaaagattattttcccttttattttctcttttaaaatacacctcccccacaacacacagaaaagacacacacacacacacacacacacacacacacacacacacaccaggagtcatccaaaaacagtctttgtgatgttctgcaagggttgaattgtcctagtaagggtttgtgaaagacttggatcttttttacattgaaatcaaaggctggtgtttttagacacacttcagagtcctggagccttgggtactggaccttcctactttgggaaaataatcaactcctgagctctgtaaacaataaccagtatagaatagaaagcaggattctctgaagagaaaccagagtccccagcatgtgggcagcacctgaagcgtgaccctcagactcagggagggaataaggcctgttgcagggcacccaactgctgctgc

SEQ ID NO: 196012 - DNA, 594 bp, Homo sapiens
atgattctctggacttttgtatatgattaaaattttccataacaaaatgtttctaaaaggaaaaacagagtaacagtgtatatttcatataggtgttatgggtattaaatgagatatgtaaaagtgcaatactgtctgggatacagaaggggttttgaaaagwttattttcccttttattttctcttttaaaatacacctcccccacaacacacagaaaagacacacacacacacacacacacacacacacacacacacacaccaggagtcatccaaaaacagtctttgtgatgttctgcaagggttgaattgtcctagtaagggtttgtgaaagacttggatcttttttacattgaaatcaaaggctggtgtttttagacacacttcagagtcctggagccttgggtactggaccttcctactttgggaaaataatcaactcctgagctctgtaaacaataaccagtatagaatagaaagcaggattctctgaagagaaaccagagtccccagcatgtgggcagcacctgaagcgtgaccctcagactcagggagggaataaggcctgttgcagggcacccaactgctgctgc

SEQ ID NO: 196013 - DNA, 631 bp, Homo sapiens
tgactggcgccagctgaaatactgttgcagcaatgtgatgactacatgaggatatagtgtatgattctctggacttttgtatatgattaaaattttccataacaaaatgtttctaaaaggaaaaacagagtaacagtgtatatttcatataggtgttatgggtattaaatgagatatgtaaaagtgcaatactgtctgggatacagaaggggttttgaaaagattattttcccttttattttctcttttaaaatacacctcccccacaacacacagaaaagacacacacacacacacacacacacacacacacacacacacaccaggagtcatccaaaaacagtctttgtgatgttctgcaagggttgaattgtcctagtaagggtttgtgaaagacttggatcttttttacattgaaatcaaaggctggtgwttttagacacacttcagagtcctggagccttgggtactggaccttcctactttgggaaaataatcaactcctgagctctgtaaacaataaccagtatagaatagaaagcaggattctctgaagagaaaccagagtccccagcatgtgggcagcacctgaagcgtgaccctcagactcagggagggaataaggcctgtt

SEQ ID NO: 196014 - DNA, 432 bp, Homo sapiens
ttaatcctgccccatcaggtcttgtctttatttaacatgttgatattgtatacwtcatcgattttttgcattaatttttattaaaatattgcgttaaaattatttattttaattattacaatttttagcattcccttaaattttgcacctcattgacctcactctagtcctggcccaaagagattctgaagtcagctactaactagtgcacattaaacaagaaagtatcaaaaacagactttctaaagactgcttctctaattacaattttactaagcaccatgactaaaataatcatcttaatgtcctgccagtgatgtttcagaactagcaaactcaatcatcctaagacaaagtttgtagaacatctttcatacctttgcagttgaacatatttcagaggcaataaggaaggcacaaaccatagttcct

SEQ ID NO: 196015 - DNA, 537 bp, Homo sapiens
gaaaaactaactattgggtcttgtgctcagtacctgggtgatgcgatcaatcataccccaaacctcagcatcacacaatattaccaataaacctgtatatgcacttccaaatctaaaagctaatttataccaaaaatctaagctcaaaaagaaaaagaaagtcttttgcctattaaaaaacaaayaataacaaatgcaagaatcatcctacatcagaaatctatattaatgcaatttatcatattcattgattaaagaagacacaccttacaattatctcaattaatgcaggaaaaagcattcactaaaattcagcctgcacctgtgactttaaaaattaacaactaggaaacttccttaactcaacaaagagaatctaccaaaatacctaccaggaacatcatattaatgatataatattgaaagcattttctttaaagcctggaattaaacaaaaatgccctctcttcactgcttccatttaacagtatactacagagcctaaccagtgtagaaagtcagtgtagtaagtaaatc

SEQ ID NO: 196016 - DNA, 537 bp, Homo sapiens
gaaaaactaactattgggtcttgtgctcagtacctgggtgatgcgatcaatcataccccaaacctcagcatcacacaatattaccaataaacctgtatatgcacttccaaatctaaaagctaatttataccaaaaatctaagctcaaaaagaaaaagaaagtcttttgcctattaaaaaacaaataataacaaatgcaagaatcatcctacatcagaaatctatattaatgcaatttatcatattcattgattaaagaagacacaccttacaattatctcaattaatgcaggaaaaagcattcactaaaattcagcctgcacctgtgactttaaaaattaacaactaggaaacttccttaactcaacaaagagaatctaccaaaatacctaccaggaacatcatattaatgatataatattgaaagcattttctttaaagcctggaattaaacaaaaatgccctctmttcactgcttccatttaacagtatactacagagcctaaccagtgtagaaagtcagtgtagtaagtaaatc

SEQ ID NO: 196017 - DNA, 412 bp, Homo sapiens
tgggacgaaactaaagcaattcttagaggaaaacttgtagccttaaatggtaaatagaaaagatagtggttgacactctaagaattatccatgtcaagaagtcaggaaaagaacaaattaacccaaggagtacagaagaaagtactaaatataatagtaattgatgaaataaaaaataagtaaaaaatagagaccacaaataggccaaaaacttggttcttttaaaagactagtaaaattgataaatccstggtaagactactcagaagaaaaaaggggagaaggcaccaagaaagcaatgtcaggaataaaaaagggaacatctctgcagacactaaaatggtaaaatgatattgtgaacaatttgatgtcaagacaatttgcaaagttagattaaatggacaaatgctgg

SEQ ID NO: 196018 - DNA, 554 bp, Homo sapiens
gatgaggacatattagaaagctacagtaagatagttgtgctattggcacacagatgaaaaatcaatgaacagaagagaaatgtcagaaacagattcatgttcctcagggtagtaaagaaatgaaaatcttctgaaccagtgtgctggaataactggatagccatacatgaaaaaagatgaaacctgacgccttcctcacaccacacacatagatcaattttaaaaggaatgaaccttctcgaagaaaatacagtagtaaaatgtcctttaaactcaaggaaaattttcttaatcaggacacaaaaacacaaactttataaagggaaagcatgatacatatgacggtaatacaactaagaacttctgttaaccaaaagctactcctgagagacagaaaaggcaaatcacagagcagaaaagctttcttgaaatacatttrtgaccaataacagaattgaaatcagaatacacaaagaactacaatcgggagaaaaaaagatgaataatccaggagaaaaatggttaagaaaattaaaaagttactttacaaaaaa

SEQ ID NO: 196019 - DNA, 619 bp, Homo sapiens
gacacagcgagatcatgtctcaaaacaaaacaaaaatttacaaacttttgtacaacaaaataaatcacgatcaaatttaaaaggcaacatgtgsggagaatataattacaatactaagaaaaattggcattcagattctttaaagaacttctataaatcaatgtaaaatatttttactatcacgatactactggtaacctgcaagcagcaaccaaccagaagacagcaagactaatatgaatgaacacataaaaaagaggctgctctcgtacataccagctgaatattagccctctaaacaacctttaacaaaatcaacaaaatattatgtgaacacagaataatgtaaaccccctctcagcacaaaagaaaaaaagtcagatttgaaatgattgttttccttcaagcaaggaattagcattagttaatagaaaactgatgctaacttctttaataataacattttaggttggacaatgtgaaatggccatttttaaagcaaaagatggttaaaaactggcaatttcaaatgattcaacctctatattcttaagtatggtactgtaaattgccagtatatatacaatattccaacctgtagagctaaacacagaacctg

SEQ ID NO: 196020 - DNA, 500 bp, Homo sapiens
accatccaacttggtgtcattgggtttggatgcaaaccagagataaattaacctgtttgttcaaaacagttttttcagggtgctttccagaatttatttctggtcagtgttgctttccctttcacacttccacaaacactgagcgtgttcccaggaatgtattaaggattttaatttacattatctggtcatttttaaccatattctcttcttctccgtcatttgatcttttgttatatagcactgattctaaaagtttagtgtgcatgaaaactactgaggagcttgtaaagatttacattcctaggttgtacccccaaagtatgattcaggaaatctggaatggggcccaggaatctatagacttagcaatgtcccaagtgatyctaagtcagaggttctgtgggatgaccctgtgagaaacaatgcaagagtgaatgaacgggggaggaacctctttatccaaagcaaaagggacctggtagtcaatgttttgcttc

SEQ ID NO: 196021 - DNA, 603 bp, Homo sapiens
tgagaccaaaagtacttgataaatacaggaagtcatgataagtgaaaaggaacttcattgttatcattatctaggtttatagttctcaattccatgtgttcattcataggtacttgataacattacaacagacaaaatattaattgatgtattcgacggtccacctctgtatgatgatgtgaaagtgcagtttttctcttcggtgagtaatcacaaaatagcctctgccattgttcttgtctggtctaatgatttmatgtaagatttgctttactacaattcccaacaagggaggggtagggggaagaaaacaataaatcagatctataacaaatttttttaaaagagcgtatgtaatttaaataatttttgttcatttgtttttttctaaattgtaaattttctaaatttttctaaatttatatgtattctcaaatacaaaaaatacaaaataaacacacacacaaagtcaagatgctaaaaaaaaaaaccccaaaggtatgttttactgcatagcaatgattacattttgttttgcatcttttttaaaaaattaagaaattgagacagggtctcactgtgtcacccaggctggagtgcagt

SEQ ID NO: 196022 - DNA, 584 bp, Homo sapiens
gacaagtgtcactgctaaaacacgataaactcattcctgaaaaacctagcactctacagaaaggactgaaaaaagaagcagttcatgaaaatacagggtttgagagtccagggcaaacctgtccggcatagcaactttctaaccaacacactaaccgctgggaccacccacakcagcagctcaatgtcgggagtttgccatagagctttttaatttttgagtggaaatagaaaaacacttgctataaggtctgtgggtaccaagtggcacagatgagagtagagccctgagccatggtgggcacggaaggcagcaacctgccaggagccaagagccccactaggttggtgaaccgcctcgctgcaggtgacttcttctcctctaaatagtccaaaaaaggttccaactgcccgtgcagcagcccaactaaaggtctttttcctttactccccctgatctggctccttctttgaggaaaagatcgtagaacatgctttcaaattactttcatgttaatattataccctgccattcatacgacagaaacgtgtaggcacaacataggttatgctatttcctttaaa

SEQ ID NO: 196023 - DNA, 527 bp, Homo sapiens
ctgccaggagccaagagccccactaggttggtgarccgcctcgctgcaggtgacttcttctcctctaaatagtccaaaaaaggttccaactgcccgtgcagcagcccaactaaaggtctttttcctttactccccctgatctggctccttctttgaggaaaagatcgtagaacatgctttcaaattactttcatgttaatattataccctgccattcatacgacagaaacgtgtaggcacaacataggttatgctatttcctttaaaattcacacagcgataatctacagagggcagattatgtcctgggtttaggtgaatagggaggaaaatacttagctggctcagtgaagattaagatctgtctttttcagtactagaaacacaggaaggaaggaaactcccttttttattttaaggatttccctttttgaaataaggagattaccattaaggtttctcttccccagacctccaagacccatcaaaatttctggaaattgtgagttgtcacactattctgcttt

SEQ ID NO: 196024 - DNA, 606 bp, Homo sapiens
tgttacttgccaggaattgggtcaagatttgatttaacaagcttggttttgggaactaaaaaaatgaaaaaaggaaaagccataatcttgaaaggcaacaagagagaaaactgctaacaggatcttgattaaatttctccctcttagagaatgttggaccgacgacacaagacctcagacttgtgttattctagcagctgaacacaccccaggctcttctgmccggcagtggctctggaagcagtctggtgtataggtaagcatgtccagggcttatagggagaaactcccagaaatccagctctgccttgggttgccctggttcacgtccaaagatgtgcttgggccacatctctggagcacaaggtggtagactgagagctttgatatttctactcctactgcagatgagctggtataactctgaaggtatggaatttgctgttgtctgtgacccagcaaataaaaatagaaaaataattcgatagaaaaataatagaaatagaaaaaatttaaaaaacaaaccaagcctcattctatgacattttaggcagtgtgataatatgcatatactggtcactttaatctttcctacaggggcagctg

SEQ ID NO: 196025 - DNA, 591 bp, Homo sapiens
aaggtgtatgagggtggcctgtagtgtatatttagagacgacacccaaggcttgatcctcatatggtcctatctccaggaasgtttaggaagattttggcctctgaaacattaggaatctgttgagaatgaagctttcatgcttggagtacctaaagtgcggaaagcttacagaagcttatatactgtgtctgcttgctactgaatgttttgttaaatgaatatctgtatgtgtggcagatttggtcggagacctacttttcattataacctggtagcatgattataaaggtgtagctaaccttcagctaactcaaacttctgtggttgctcctatctaccaaaaagcatttaagaattctgcatgaccacttcagtttaggacggtttgcaattctcaccttccttagggggcaatttagctagttacttattcatgtcccatgagggaagtcattctgtgccccaaagcagcttatcaaagtattatttcagacttcatgcagtactctccctggagttcaggtaacatctatggatgtctcgtgccctttttggagattagtttcccaaggaacttgcttagaaatcc

SEQ ID NO: 196026 - DNA, 591 bp, Homo sapiens
aaggtgtatgagggtggcctgtagtgtatatttagagacgacacccaaggcttgatcctcatatggtcctatctccaggaacgtttaggaagattttggcctctgaaacattaggaatctgttgagaatgaagctttcatgcttggagtacctaaagtgcggaaagcttacagaagcttatatactgtgtctgcttgctactgaatgttttgttaaatgaatatctgtatgtgtggcagatttggtcggagacctacttttcattataacctggtagcatgattataaaggtgtagctaacyttcagctaactcaaacttctgtggttgctcctatctaccaaaaagcatttaagaattctgcatgaccacttcagtttaggacggtttgcaattctcaccttccttagggggcaatttagctagttacttattcatgtcccatgagggaagtcattctgtgccccaaagcagcttatcaaagtattatttcagacttcatgcagtactctccctggagttcaggtaacatctatggatgtctcgtgccctttttggagattagtttcccaaggaacttgcttagaaatcc

SEQ ID NO: 196027 - DNA, 489 bp, Homo sapiens
tgcactgcagcctcgatgacagagcaaaactctgtctcaaaaaaaaaaaaaaaaaagtgtttcctgtgcagattatctgttcaccacttgcagatttgaagtttactaagcatgtgtgatatctaaaagttcatttgaagrataagtttcaatgccaaaaatgtttaaaagtgggatataggaagatgatgcaaagatggaatatccaaacatttccattttcaccaggaggacttaatagaatgtctaacagctacttttagatatttttgaaatgtgagaggggtgagttaacacaaaagtagactgtgagattaaaatgtctgttcactctaaaatctcagcattcactttcttattgttaagttattcatcagactcttttcagagacaacctaaatgcaagctcttagaatattacaacatcttttatatgagatgacaggaaataatttcatggccttttaaaggatagatgagggaattgaa

SEQ ID NO: 196028 - DNA, 521 bp, Homo sapiens
tttaatatgtttaatacacagtatatacatttatatgtgttctgtaaactatgtattattgttttgcctatatgtttttaaatttacttaaatggtattaagttgtatctcattttgttagttttttgcwtagtaacataagattattcttcttgtgcataccttttgttgttgcttttaactggtatgaaaaattgcacagcatgcatcccctagtgaggaacacatatattgcttcctaccatttgccttcacaaagagtgccgctaaataattatccttatgccagacccctatagacctgtttgagtatttctgtaggaatatgaaacaggacttgatgggccatgggattgcatattttgaatttgactgaatactgcctattgctctcacaatggttataccagtctgcatctcctgaataatgcatgatggttcctacacatacacattcacaacaacacttgacattatcaaactttccaatttatataatcagtctaatagatggtaacata

SEQ ID NO: 196029 - DNA, 521 bp, Homo sapiens
tttaatatgtttaatacacagtatatacatttatatgtgttctgtaaactatgtattattgttttgcctatatgtttttaaatttacttaaatggtattaagttgtatctcattttgttagttttttgcatagtaacataagattattcttcttgtgcataccttttgttgttgcttttaactggtatgaaaaattgcacagcatgcatcccctagtgaggaacacatatattgcttcctaccatttgccttcacaaagagtgccgctaaatrattatccttatgccagacccctatagacctgtttgagtatttctgtaggaatatgaaacaggacttgatgggccatgggattgcatattttgaatttgactgaatactgcctattgctctcacaatggttataccagtctgcatctcctgaataatgcatgatggttcctacacatacacattcacaacaacacttgacattatcaaactttccaatttatataatcagtctaatagatggtaacata

SEQ ID NO: 196030 - DNA, 521 bp, Homo sapiens
tttaatatgtttaatacacagtatatacatttatatgtgttctgtaaactatgtattattgttttgcctatatgtttttaaatttacttaaatggtattaagttgtatctcattttgttagttttttgcatagtaacataagattattcttcttgtgcataccttttgttgttgcttttaactggtatgaaaaattgcacagcatgcatcccctagtgaggaacacatatattgcttcctaccatttgccttcacaaagagtgccgctaaataattatccttatgccagacccctatagacctgtttgagtatttctgtaggaatatgaaacaggacttgatgggccatgggattgcatattttgaatttgactgaatactgcctattgctctcacaatggttataccagtctgcatctcctgaayaatgcatgatggttcctacacatacacattcacaacaacacttgacattatcaaactttccaatttatataatcagtctaatagatggtaacata

SEQ ID NO: 196031 - DNA, 446 bp, Homo sapiens
tggcccacattggaagaagcattgtcttgggccacaygtaaaatacacgaatgatagctggtgagcttttttttaaaaaaaaaaaacctcataaaaagtctcataatgttttatgaaagtttatgaatttgtgttgggctgcatttaaagcatcttggctgcaggttggacaagcttgttatagaccattgtcagataatctttatggtacatgcatgattaaaagtgaagaactaaagatggagactggatagatagtatttttatttttaaaaaaggaattaagtagttgattagaaagctttgagtatgtggcggtgcttgtcgatttgtaagtttagtggggtgatttgtgctgaccatttggtgaaccctctggtttcagtatctttagatgttcttcttgaactgatcaggttccccacaacagtcttttcaaacctcat

SEQ ID NO: 196032 - DNA, 446 bp, Homo sapiens
tggcccacattggaagaagcattgtcttgggccacacgtaaaatacackaatgatagctggtgagcttttttttaaaaaaaaaaaacctcataaaaagtctcataatgttttatgaaagtttatgaatttgtgttgggctgcatttaaagcatcttggctgcaggttggacaagcttgttatagaccattgtcagataatctttatggtacatgcatgattaaaagtgaagaactaaagatggagactggatagatagtatttttatttttaaaaaaggaattaagtagttgattagaaagctttgagtatgtggcggtgcttgtcgatttgtaagtttagtggggtgatttgtgctgaccatttggtgaaccctctggtttcagtatctttagatgttcttcttgaactgatcaggttccccacaacagtcttttcaaacctcat

SEQ ID NO: 196033 - DNA, 568 bp, Homo sapiens
gcatgcagtcaacaaaaatatgaaaaaaaaaaactcaacatcactgatcattaaagaaatgcaaacaaaaccacaatgagataccatctcatgccagtcagaatggctactattaaaaagccaaaaaataacatgctgggaaggttgcagagacaaagaaatgctgttggtgggtgtgtaaattagttcaacccatgtggaagacagtgtggcaattcctcaaagacctagaggcagaaataccatcagacccagcaatcccattatggggtatatacccaaaggaatataaatcattgtcttataaaaatacatgcatgcacacatatgttcattgcagcagtattcacaagagcaaagacatggaatcaacctaaatgccagtcratgatagattagataaagaaaatatggtacatagagcgggacatctggcttctgagcgggaacctttgtagtgccagtgatgaaagagagaattaaatatgggtgatgctgagaaaggcaagaaaatttttgttcagaagtgtgcccagtgccacaccgcggaaaagggaagcaagcacaa

SEQ ID NO: 196034 - DNA, 372 bp, Homo sapiens
tatcgagtctacaatctatgcagtatgtacattactctatattgtgctactgtagatagaaaacagattactgcacgtaagaagatgattttgttttttagattgcatttaatcataagtatttggtagtggcaaggaatgaatttaaaaatccccatcttggactggccccatttagtagaaggagttagccyagcagcacaaagtaccgtatgaaggatgtggctttggcaggaccaatgaagctggagtggaagaaaaccattttagggaagatctgttctagcgatattaggtttaggaaaatctttctgtttttcttgccagattgtgttatgaggacatagacaatttaacaaatgagtcttctga

SEQ ID NO: 196035 - DNA, 528 bp, Homo sapiens
ggagtggaagaaaaccattttagggaagatctgttctagcgatattaggtttaggaaaatctttctgtttttcttgccagattgtgttatgaggacatagacaatttaacaaatgagtcttctgacccatcagcagtggcatgtgatgggagcaaggctctagatgggaaaaaagcaaaaaactgtagaaaataggttgtaacccagtttaataccctgtctctcttgattttttcctctacctgtatactcaatagacattttcagggggcaaacattttggtcagctacatttgccttgtgtggtttctaactaccctgaaataatataatgaatagtctgctagaaagttaaaaattatacctattaaacaaaaataagttgagtttaggttatatgagatggataaaccactaccatccttacatttttgaaacrcttgcgtttattttagagtggcaggagcaacttggaaagctctttttgaagatagataaggaattctaataagatatgttaacttattc

SEQ ID NO: 196036 - DNA, 609 bp, Homo sapiens
ggcatggataggaataaccttacccactttccctctaatatcattcctagaaaccctctgaaaatacctctggtgctccaagataatttatgtttgttacaccacgggatcaccaggaaaagaaagaaccaaagtgtccatgtaggttcatcatttgtaacttgctgatatgactctrgtgcaggatgcagatagtggagaaggctgtgcctgtgttggacggggattcatgggagctctggtactttctgttcaagttcactgttatcctaagaccactctaaaataaaatttatgcaacaacagtagcagagacattcttggaagacattttggacatttttcagaatcatacttagtcttaccatgtgatcaaataatcttgctcaaattattcatccatctaatttgaaaacttgttcacaataatatactcattgatatgattttattgatatggtttgactgtatccccacccaaatctcatcttgagttttaataattccaatgtgttaagggtggggtcaggtggatgtaattgaatcatgggggcggtttcccccatactgttctcgtggtagtgaatatgtctcatgagatctgacagt

SEQ ID NO: 196037 - DNA, 609 bp, Homo sapiens
ggcatggataggaataaccttacccactttccctctaatatcattcctagaaaccctctgaaaatacctctggtgctccaagataatttatgtttgttacaccacgggatcaccaggaaaagaaagaaccaaagtgtccatgtaggttcatcatttgtaacttgctgatatgactctagtgcaggatgcagatagtggagaaggctgtgcctgtgttggacggggattcatgggagctctggtactttctgttcaagttcactgttatcctaaraccactctaaaataaaatttatgcaacaacagtagcagagacattcttggaagacattttggacatttttcagaatcatacttagtcttaccatgtgatcaaataatcttgctcaaattattcatccatctaatttgaaaacttgttcacaataatatactcattgatatgattttattgatatggtttgactgtatccccacccaaatctcatcttgagttttaataattccaatgtgttaagggtggggtcaggtggatgtaattgaatcatgggggcggtttcccccatactgttctcgtggtagtgaatatgtctcatgagatctgacagt

SEQ ID NO: 196038 - DNA, 609 bp, Homo sapiens
ggcatggataggaataaccttacccactttccctctaatatcattcctagaaaccctctgaaaatacctctggtgctccaagataatttatgtttgttacaccacgggatcaccaggaaaagaaagaaccaaagtgtccatgtaggttcatcatttgtaacttgctgatatgactctagtgcaggatgcagatagtggagaaggctgtgcctgtgttggacggggattcatgggagctctggtactttctgttcaagttcactgttatcctaagaccactctaaaataaaatttatgcaacaacagtagcagagacattcttggaagacattttggacatttttcagaatcatacttagtcttaccatgtgatcaaataatcttgctcaaattattcatccatctaatttgaaaacttgttcacaataatatactcattgatatgattttattgatatggtttgactgtatccccacccaaatctcwtcttgagttttaataattccaatgtgttaagggtggggtcaggtggatgtaattgaatcatgggggcggtttcccccatactgttctcgtggtagtgaatatgtctcatgagatctgacagt

SEQ ID NO: 196039 - DNA, 671 bp, Homo sapiens
ttgctctgctcgccaggctggagtgcagtggcgtgatctcagctcactgcaacctctgcctccagggttcaagcgattctcctgcctcagcctcctgagtatttgggactactggtgtgtgccaccatgcccagctaatttttgtatttttagtagagatgggatttcaccatgttggccaggatggtcttgatctcttgacctcgtaatctgcccgccttggcctcccagagtgctgggattacaggcatgagccaccccacctcgccagagattcatctcttgacctcagtgtcacatgtctgaaaatatcaagtatgtttgagtgtcagaacctgagaaagaagcgttgcctataataaaaccttcataaaataaacaactgatttctcaccaaattcatgaaggcaaaaactcattgaggtgacrtatcaaaagactgaaatacactgtcaatcaagaattatacactttcaaagaaaccttcaaaagtgaaggagaaattaaggtgaatataaagaaacaaacgctgatggagttcatggaacctagacagtccttatgagaaatgctatatggagtcccacagactgaactgaaaggagagtggagaggagcagaaaatcttacacctaaaaagaacaacagcaacaaggaaggtgtcccagaaa

SEQ ID NO: 196040 - DNA, 663 bp, Homo sapiens
tgatttctcaccaaattcatgaaggcaaaaactcattgaggtgacatatcaaaagactgaaatacactgtcaatcaagaattatacactttcaaagaaaccttcaaaagtgaaggagaaattaaggtgaatataaagaaacaaacgctgatggagttcatggaacctagacagtccttatgagaaatgctatatggagtcccacagacwgaactgaaaggagagtggagaggagcagaaaatcttacacctaaaaagaacaacagcaacaaggaaggtgtcccagaaatgtcattacatttgtgtatgtgagcgccaatagtgttttattctgccctgagtctcatgtttcattcctccattattttgaaaatcaagtaccataatattaattatacatgtaaataatatacatataatttgtaaaatactaatatatagtaataacacagtaagggaagatggatagagctgtagagacacagatttgtatgcactatcgatgctaaggtaatcataattcaatctattttgttataaatttgaattaccaattttagtgtccatgttagctataaatatgtaactaaaattttaaaaaaaaatcagcatgacagctgaatagatgtgcctgacattcgtcaatcccatatgacggaatgac

SEQ ID NO: 196041 - DNA, 434 bp, Homo sapiens
aagtaccataatattaattatacatgtaaataatatacatataatttgtaaaatactaatatatagtaataacacagtaagggaagatggatagagctgtagagacacagatttgtatgcactatcgatgctaaggtaatcataattcaatctattttgttataaatttgaattaccaattttagtgtccatgttagctataaatatgtaactaaaatttwaaaaaaaaatcagcatgacagctgaatagatgtgcctgacattcgtcaatcccatatgacggaatgacagaattgaataaacagctaagactagactggactgatgaaagggagaagtagaggatagcaggggagaggagaggtccctgtggttattagaagcccaatagtgcttctaatagtgaaagcaccctgtgtctgcagcttcatact

SEQ ID NO: 196042 - DNA, 506 bp, Homo sapiens
tcattcctctcctggaagaaatgaacagtaatgatgggatcacagagatcatacatataagggcccaatacaggttcaaaacatgcccaccggcaactgccttacatacctggctcccaaccatactgttacaatttctatctttcaaactcactgtaaattacaaatgtggtacccaaatacctgtatgcacataaataggaaaaggtaaayttttttttttttttttaggtagattttcgctctgtcacccaggctggagcgtaatagcacaatcttcgctcacttcaacctctgccttctgggttcgagcaattctcctgcctcagactcccgagtaactgggattacaggcgtgtaccaccacgtctggctaatttttgtatttttagtagggacggggttttaccatattggccaggctggtcttgaactcctgacctcaagtgaaccacccgcctcagcctcccaaagtgctgagattacaggcttgagcaaccttgccc

SEQ ID NO: 196043 - DNA, 360 bp, Homo sapiens
cctgttttcatactcccagcatcaggagtattctaagtgtggcagtttttgttgccttcccctgcatattaagtggaatatcttggtctatttggactcttataacaaaataacatawactgggtgactaaaaaacaacagatatttctcttttcacacttcttgaggctgtaagatctcaggtcaagatgctcacaaattcagtgttgatgagagcccatttcatggttcatagatggtgccttctttctatgtcctcacacagtggaaggcacacaagaactccattgagcttcttttataaaggcactaatcccattcataagggctcggcccccaagacctggtcacctcccaagt

SEQ ID NO: 196044 - DNA, 360 bp, Homo sapiens
cctgttttcatactcccagcatcaggagtattctaagtgtggcagtttttgttgccttcccctgcatattaagtggaatatcttggtctatttggactcttataacaaaataacatatactgggtgactaaaaaacaacagatatttctyttttcacacttcttgaggctgtaagatctcaggtcaagatgctcacaaattcagtgttgatgagagcccatttcatggttcatagatggtgccttctttctatgtcctcacacagtggaaggcacacaagaactccattgagcttcttttataaaggcactaatcccattcataagggctcggcccccaagacctggtcacctcccaagt

SEQ ID NO: 196045 - DNA, 360 bp, Homo sapiens
cctgttttcatactcccagcatcaggagtattctaagtgtggcagtttttgttgccttcccctgcatattaagtggaatatcttggtctatttggactcttataacaaaataacatatactgggtgactaaaaaacaacagatatttctcttttcacacttcttgaggctgtaagatctcaggtcaagatgctcacaaattcagtgttgatgagagcccatttcatggttcatagatggtgccttctttctatgtcctcasacagtggaaggcacacaagaactccattgagcttcttttataaaggcactaatcccattcataagggctcggcccccaagacctggtcacctcccaagt

SEQ ID NO: 196046 - DNA, 360 bp, Homo sapiens
cctgttttcatactcccagcatcaggagtattctaagtgtggcagtttttgttgccttcccctgcatattaagtggaatatcttggtctatttggactcttataacaaaataacatatactgggtgactaaaaaacaacagatatttctcttttcacacttcttgaggctgtaagatctcaggtcaagatgctcacaaattcagtgttgatgagagcccatttcatggttcatagatggtgccttctttctatgtcctcacacagtggaaggcacacaagaactccattgagcttcttttataaaggcactaatcccattcatawgggctcggcccccaagacctggtcacctcccaagt

SEQ ID NO: 196047 - DNA, 440 bp, Homo sapiens
gtattcaaatagtttagttctttaatttatgtgcacatwtttttgtttagacagttcttaatcctgaatatttaattttaattgaagtcttcagtattgtatttttctttaattaaccaagtgttgatgatattgaaatgtctacctcaggcactatacctggtctgtatggtttcctttttctctttttgacaccatctgttccttccactcccttagtttcatcattcacagcttcccgctcaggactagattctgattttccatcacaatccataagttctccttctggaaaaaagtaaatgtatacacaaaactggaaaaacctatcaaatatataatccctacatcatggggaataaaaagtagggttgttgctgagccattttaattgtacatccctgttggtagggaaagtatgaaaggagatagaagcagcc

SEQ ID NO: 196048 - DNA, 439 bp, Homo sapiens
tattcaaatagtttagttctttaatttatgtgcacatttttttgtttagacagttcttaatcctgaatatttaattttaattgaagtcttcagtattgtatttttctttaattaacmaagtgttgatgatattgaaatgtctacctcaggcactatacctggtctgtatggtttcctttttctctttttgacaccatctgttccttccactcccttagtttcatcattcacagcttcccgctcaggactagattctgattttccatcacaatccataagttctccttctggaaaaaagtaaatgtatacacaaaactggaaaaacctatcaaatatataatccctacatcatggggaataaaaagtagggttgttgctgagccattttaattgtacatccctgttggtagggaaagtatgaaaggagatagaagcagcc

SEQ ID NO: 196049 - DNA, 567 bp, Homo sapiens
agtttagttctttaatttatgtgcacatttttttgtttagacagttcttaatcctgaatatttaattttaattgaagtcttcagtattgtatttttctttaattaaccaagtgttgatgatattgaaatgtctacctcaggcactatacctggtctgtatggtttcctttttctctttttgacaccatctgttccttccactcccttagtttcatcatycacagcttcccgctcaggactagattctgattttccatcacaatccataagttctccttctggaaaaaagtaaatgtatacacaaaactggaaaaacctatcaaatatataatccctacatcatggggaataaaaagtagggttgttgctgagccattttaattgtacatccctgttggtagggaaagtatgaaaggagatagaagcagccccaaatggttctagaaattgtgctgcttagtgcagtgttcccatgaaataaaacataatcagagaaggggaacacagaactcagagttctgttaagtgcaacccatttgcacttaacaaattcacttgcttttaatt

SEQ ID NO: 196050 - DNA, 567 bp, Homo sapiens
agtttagttctttaatttatgtgcacatttttttgtttagacagttcttaatcctgaatatttaattttaattgaagtcttcagtattgtatttttctttaattaaccaagtgttgatgatattgaaatgtctacctcaggcactatacctggtctgtatggtttcctttttctctttttgacaccatctgttccttccactcccttagtttcatcattcacagcttcccgctcaggactagattctgattttccatcacaatccataagttctccttctggaaaaaagtaaatgtatacacaaaactggaaaaacctatcaaatatataatccctacatmatggggaataaaaagtagggttgttgctgagccattttaattgtacatccctgttggtagggaaagtatgaaaggagatagaagcagccccaaatggttctagaaattgtgctgcttagtgcagtgttcccatgaaataaaacataatcagagaaggggaacacagaactcagagttctgttaagtgcaacccatttgcacttaacaaattcacttgcttttaatt

SEQ ID NO: 196051 - DNA, 567 bp, Homo sapiens
agtttagttctttaatttatgtgcacatttttttgtttagacagttcttaatcctgaatatttaattttaattgaagtcttcagtattgtatttttctttaattaaccaagtgttgatgatattgaaatgtctacctcaggcactatacctggtctgtatggtttcctttttctctttttgacaccatctgttccttccactcccttagtttcatcattcacagcttcccgctcaggactagattctgattttccatcacaatccataagttctccttctggaaaaaagtaaatgtatacacaaaactggaaaaacctatcaaatatataatccctacatcatggggaataaaaagtagggttgttgctgagccattttaattgtacatccctgttggtagggaaagtatgaaaggagatagaagmagccccaaatggttctagaaattgtgctgcttagtgcagtgttcccatgaaataaaacataatcagagaaggggaacacagaactcagagttctgttaagtgcaacccatttgcacttaacaaattcacttgcttttaatt

SEQ ID NO: 196052 - DNA, 521 bp, Homo sapiens
aggaaccctagtccatggtccaaaggaacaagagaagatcttaccctcaaattactatgtgtctgttctgactggtctgggggatacctaaaggactcatgaaagacttttttttttctgtgttgctagaatacagaacagataaggaatggacattatcaagaaastctgcaaggagacctaacaagccacagatgcttagggaaaaattagagtttacacatatagtagatcaccttgagcacaggaagaaaagttggagaagagtatttggaaaactaagacattcaaaatcattctcgtacatgggagggtctagaaagtcacatgtatgcataggttaagccacatgctgacaaatgtcataagaagaccctacacttttaccttggccgatccctcccctcagtgcaagctctgtgcaagagtgaacttgaacttcactcagtgcaagagtgaacacacactttgtgccggctttaaagaaccgagtacaaagctagtctgcatggcctagagac

SEQ ID NO: 196053 - DNA, 521 bp, Homo sapiens
aggaaccctagtccatggtccaaaggaacaagagaagatcttaccctcaaattactatgtgtctgttctgactggtctgggggatacctaaaggactcatgaaagacttttttttttctgtgttgctagaatacagaacagataaggaatggacattatcaagaaagtctgcaaggagacctaacaagccacagatgcttagggaaaaattagagtttacacatatagtagatcaccttgagcacaggaagaaaagttggagaagagtatttggaaaactaagacattcaaaatcattcwcgtacatgggagggtctagaaagtcacatgtatgcataggttaagccacatgctgacaaatgtcataagaagaccctacacttttaccttggccgatccctcccctcagtgcaagctctgtgcaagagtgaacttgaacttcactcagtgcaagagtgaacacacactttgtgccggctttaaagaaccgagtacaaagctagtctgcatggcctagagac

SEQ ID NO: 196054 - DNA, 567 bp, Homo sapiens
agtttagttctttaatttatgtgcacatttttttgtttagacagttcttaatcctgaatatttaattttaattgaagtcttcagtattgtatttttctttaattaaccaagtgttgatgatattgaaatgtctacctcaggcactatacctggtctgtatggtttcctttttctctttttgacaccatctgttccttccactcccttagtttcatcattcacagcttcccgctcaggactagattctgattttccatcacaatccataagttctccttctggaaaaaagtaaatgtatacacaaaactggaaaaacctatcaaatatataatccctacatcatggggaataaaaagtagggttgttgctgagccattttaattgtacatccctgttggtagggaaagtatgaaaggagatagaagcagccccaaatggttstagaaattgtgctgcttagtgcagtgttcccatgaaataaaacataatcagagaaggggaacacagaactcagagttctgttaagtgcaacccatttgcacttaacaaattcacttgcttttaatt

SEQ ID NO: 196055 - DNA, 264 bp, Homo sapiens
ttactgtaacatctttctgattttaggagaggaacaattccctttttagcctaaatgctatttttttttaaagctcagccaagagactccattataattttcaaatgtgtgtaacttaaattctcatatgaaataccactatgcktaaattagtcaaaacattttctccatctacaactctatcttgtcattgcaatcattttcacaaaagtgactgcagctcacagaccctaaaaggagaaaatccagggtaggttatctgat

SEQ ID NO: 196056 - DNA, 264 bp, Homo sapiens
ttactgtaacatctttctgattttaggagaggaacaattccctttttagcctaaatgctatttttttttaaagctcagccaagagactccattataattttcaaatgtgtgtaacttaaattctcatatgaaataccactatgcgtaaattagtcaaaacattttcyccatctacaactctatcttgtcattgcaatcattttcacaaaagtgactgcagctcacagaccctaaaaggagaaaatccagggtaggttatctgat

SEQ ID NO: 196057 - DNA, 604 bp, Homo sapiens
aaacttgtgtcagggaggttgtttttttttattttttacatattatttcatcatccaggtattaagctcagtacccaaatagttatcttttctgctcctctctctcctcctgccctccccacttaagtagaccccagtgtctatttccttctttgtgttcataagtccttatgatttagctaccactgataggtgagaacattcagtatttggttttctgtttctgcactagtttgctaaggataagagcctccggctccatygatgttcccacaaaatacatgatctcattctttttttatggctgtatagtattccatggtatatatgtaccacattttctttatccaatctgtcattgatgggtacctaggttgattccatgtctttgctattgtaaatagtgctgcagtgaacattcatatgcatgtatctttatagtagaatgatttatattcctctgggtatctactcagtattgggattgctcagtcaaatagttctgcttttagctcttcaaggtattgccatagtactttttacagtgattgaactaatttacactcccaccaacaatgtatatgtgttcccttttctctgcaac

SEQ ID NO: 196058 - DNA, 578 bp, Homo sapiens
cttgtgattaaggaaaagctattttcctttttttttttttttttgctacatttcaaagagaaaagctttaaaaagatgaaaaaayagcacaatacctatcacattgtctacattgcagaataagatcttcttctctatagtttcaatagcagactggacaggaagataagcttgcacaaggagcgcactgtgtgtaattgttctgccattcacatcttagacctgcagatgttgctccacagtgtctgcaccaaacacacctgaaatccaaatccccccgaaaagtctccattttattttcttagttattcagtaactgtaattcaggaagctacatacgaacataatggggcaaatgatttaatgtgtatgtgaaaatttttctgcttagtggtatgtatcatagaatatgtgtattattcaattaaataggtatggctaatttttaaaaactaaagtggtatgagaaagctctgaacttgaaagactaacaaggcaaacaaaccctagagaaccatttgcacttcacttccagcctcctttgggaactgtctgcaatggagggtctaggcagtagg

SEQ ID NO: 196059 - DNA, 578 bp, Homo sapiens
cttgtgattaaggaaaagctattttcctttttttttttttttttgctacatttcaaagagaaaagctttaaaaagatgaaaaaacagcacaatayctatcacattgtctacattgcagaataagatcttcttctctatagtttcaatagcagactggacaggaagataagcttgcacaaggagcgcactgtgtgtaattgttctgccattcacatcttagacctgcagatgttgctccacagtgtctgcaccaaacacacctgaaatccaaatccccccgaaaagtctccattttattttcttagttattcagtaactgtaattcaggaagctacatacgaacataatggggcaaatgatttaatgtgtatgtgaaaatttttctgcttagtggtatgtatcatagaatatgtgtattattcaattaaataggtatggctaatttttaaaaactaaagtggtatgagaaagctctgaacttgaaagactaacaaggcaaacaaaccctagagaaccatttgcacttcacttccagcctcctttgggaactgtctgcaatggagggtctaggcagtagg

SEQ ID NO: 196060 - DNA, 558 bp, Homo sapiens
gagatctattttctctttctcatgctggatcaagtgtaaggctatgaagtagtagttctcgtgaatatgcaaatcacctgagatgaacactacagatatgtctgtgccctgagagcattacccaataaccagccatgtcctctagagaagcycctgagagcacagctcctcaccatggactggaattggaggatcctgtttttggtggtcatagctgcgggtaggataattctcagtccccaggactaaggtgactgggtccagtaaaagagggttttatccactcctgtgtcctctccacaggtgcccagtcccaggtacagctggtgcagtctggggctgaggtgaagaagcctggggcctcagtgaaggtctcctgcaaggcttctggatacaccttcaccagctactgtatgcactgggtgcaccaggtccatgcacaagggcttgagtggatgggattggtgtgccctagtgatggcagcacaagctatgcacagaagttccaggccagagtcaccataaccagggacacatccatgagcacagcctacatgg

SEQ ID NO: 196061 - DNA, 534 bp, Homo sapiens
tctctttctcatgctggatcaagtgtaaggctatgaagtagtagttctcgtgaatatgcaaatcacctgagatgaacactacagatatgtctgtgccctgagagcattacccaataaccagccatgtcctctagagaagcccctgagagcacagctcctcaccatggactggaattggaggatcctgtttttggtggtcatagctgcgggtaggataattctcagtccccaggactaaggtgactgggtccagtaaaaragggttttatccactcctgtgtcctctccacaggtgcccagtcccaggtacagctggtgcagtctggggctgaggtgaagaagcctggggcctcagtgaaggtctcctgcaaggcttctggatacaccttcaccagctactgtatgcactgggtgcaccaggtccatgcacaagggcttgagtggatgggattggtgtgccctagtgatggcagcacaagctatgcacagaagttccaggccagagtcaccataaccagggacacatccatgagc

SEQ ID NO: 196062 - DNA, 527 bp, Homo sapiens
ctggatcaagtgtaaggctatgaagtagtagttctcgtgaatatgcaaatcacctgagatgaacactacagatatgtctgtgccctgagagcattacccaataaccagccatgtcctctagagaagcccctgagagcacagctcctcaccatggactggaattggaggatcctgtttttggtggtcatagctgcgggtaggataattctcagtccccaggactaaggtgactgggtccagtaaaagagggttttatccactcctgtgtcctctccacaggtgcccagtcccaggtacagctggtgcagtctggggctgaggtgaagaagcctggggcctcagtgaaggtctcctgcaaggcttctggatacaccttcaccarctactgtatgcactgggtgcaccaggtccatgcacaagggcttgagtggatgggattggtgtgccctagtgatggcagcacaagctatgcacagaagttccaggccagagtcaccataaccagggacacatccatgagcacagcc

SEQ ID NO: 196063 - DNA, 533 bp, Homo sapiens
aaggctatgaagtagtagttctcgtgaatatgcaaatcacctgagatgaacactacagatatgtctgtgccctgagagcattacccaataaccagccatgtcctctagagaagcccctgagagcacagctcctcaccatggactggaattggaggatcctgtttttggtggtcatagctgcgggtaggataattctcagtccccaggactaaggtgactgggtccagtaaaagagggttttatccactcctgtgtcctctccacaggtgcccagtcccaggtacagctggtgcagtctggggctgaggtgaagaagcctggggcctcagtgaaggtctcctgcaaggcttctggatacaccttcaccagctactgtatgcactgggtgcaccaggtccatgcacaagggcttgagtggatgggattggtgtgccctagtgatggcagcacaagctatgcacaraagttccaggccagagtcaccataaccagggacacatccatgagcacagcctacatggagctaagcagtc

SEQ ID NO: 196064 - DNA, 604 bp, Homo sapiens
cagattagttctcaggccttaggcatatgcatgctagctgcagtggctttgctagttrtggggtattgccaacagcagggcgggcaccaggcaggccagtcctcagtgccttagaagtgcatgaggcaaatggtggctctgctggtgaagggggtggggctgttggcagcagtgggtgccagatgggatgggccttgggccttggggggtgcatttagcatgcagtggctctttcagtcgagggtagccaagtcattttagactaaaccagtcctcagatgacccagtagctgcccacagatacatgaatgagcttagttgagacaggaaatcctttctgcaagcacctaaattggacagttaagcccataccaaattcacataccacagtatcatgagccaaataaatagttgctgttataagccagtaagttttggggtggtttgtaaccactggcacaactgtaactggtatcaatctattatgatttttttccttgaaagagtacatttttaaaagaatactgccatatctgggtcagtattaaacttatgactacacagtctacattcactaagaaatgagtatttgtcagataaagac

SEQ ID NO: 196065 - DNA, 604 bp, Homo sapiens
cagattagttctcaggccttaggcatatgcatgctagctgcagtggctttgctagttgtggggtattgccaacagcagggcgggcaccaggcaggccagtcctcagtgccttagaagtgcatgaggcaaatggtggctctgctggtgaagggggtggggctgttggcagcagtgggtgccagatgggatgggccttgggccttggggggtgcatttagcatgcagtggctctttcagtcgagggtagccaagtcattttagactaaaccagtcctcagatgacccagtagctgcccacagatacatgaatgagcttagttgagacaggaaatcctttctgcaagcacctaaattggacagttaagcccataccaaattcacataccacagtatcatgagccaaataaatagttgctgttataagccagtaagttttggggtggtttgtaaccactggcacaactgtaactggtatcaatcyattatgatttttttccttgaaagagtacatttttaaaagaatactgccatatctgggtcagtattaaacttatgactacacagtctacattcactaagaaatgagtatttgtcagataaagac

SEQ ID NO: 196066 - DNA, 218 bp, Homo sapiens
cctctccccaattacctacctgggggatatttggcaatgtctggaggcatttaggttttcacmactggcgtgcgtgcatgtgtgtgtgtgtctgtgtgttacttacatctagtgaatagaggccaggaattttgctaaacaccctacaattaatataactgctcaccaccctcttatgacaatgatctggcccaaaatgtcagtaatgctgaggctga

SEQ ID NO: 196067 - DNA, 218 bp, Homo sapiens
cctctccccaattacctacctgggggatatttggcaatgtctggaggcatttaggttttcaccactkgcgtgcgtgcatgtgtgtgtgtgtctgtgtgttacttacatctagtgaatagaggccaggaattttgctaaacaccctacaattaatataactgctcaccaccctcttatgacaatgatctggcccaaaatgtcagtaatgctgaggctga

SEQ ID NO: 196068 - DNA, 218 bp, Homo sapiens
cctctccccaattacctacctgggggatatttggcaatgtctggaggcatttaggttttcaccactggcgtgygtgcatgtgtgtgtgtgtctgtgtgttacttacatctagtgaatagaggccaggaattttgctaaacaccctacaattaatataactgctcaccaccctcttatgacaatgatctggcccaaaatgtcagtaatgctgaggctga

SEQ ID NO: 196069 - DNA, 218 bp, Homo sapiens
cctctccccaattacctacctgggggatatttggcaatgtctggaggcatttaggttttcaccactggcgtgcgtgcatgtgtgtktgtgtctgtgtgttacttacatctagtgaatagaggccaggaattttgctaaacaccctacaattaatataactgctcaccaccctcttatgacaatgatctggcccaaaatgtcagtaatgctgaggctga

SEQ ID NO: 196070 - DNA, 445 bp, Homo sapiens
gaattctgtgaagaaagtcattcatagcttgatggggatggcattgagtctataaattaccttgggcagtatggtcattttcacgatattgattcttcctacccatgagcatggartgttcttccatttgtttgtgtcgtcttttatttcattgagcactggtttgtagttctccttgaagaggtccttcacatcccgtgtaagttggattcctaggtattttattctttttgtagcaattgtgaatgggagttcactcatgatttggctctctgtttgtctgttatgggtctataggaatgcttgggagttttgcacattgattttgtatcctgagattttgctgaagttgcttataaacttaaggagattttgggctgagacgatggggttttctaaatatacaatcatgtcatctgcaaagagggataaattgacttcctct

SEQ ID NO: 196071 - DNA, 445 bp, Homo sapiens
gaattctgtgaagaaagtcattcatagcttgatggggatggcattgagtctataaattaccttgggcagtatggtcattttcacgatattgattcttcctacccatgagcatggaatrttcttccatttgtttgtgtcgtcttttatttcattgagcactggtttgtagttctccttgaagaggtccttcacatcccgtgtaagttggattcctaggtattttattctttttgtagcaattgtgaatgggagttcactcatgatttggctctctgtttgtctgttatgggtctataggaatgcttgggagttttgcacattgattttgtatcctgagattttgctgaagttgcttataaacttaaggagattttgggctgagacgatggggttttctaaatatacaatcatgtcatctgcaaagagggataaattgacttcctct

SEQ ID NO: 196072 - DNA, 445 bp, Homo sapiens
gaattctgtgaagaaagtcattcatagcttgatggggatggcattgagtctataaattaccttgggcagtatggtcattttcacgatattgattcttcctacccatgagcatggaatgttcttccatttgtttgtgtcgtcttttatttcattgagcastggtttgtagttctccttgaagaggtccttcacatcccgtgtaagttggattcctaggtattttattctttttgtagcaattgtgaatgggagttcactcatgatttggctctctgtttgtctgttatgggtctataggaatgcttgggagttttgcacattgattttgtatcctgagattttgctgaagttgcttataaacttaaggagattttgggctgagacgatggggttttctaaatatacaatcatgtcatctgcaaagagggataaattgacttcctct

SEQ ID NO: 196073 - DNA, 611 bp, Homo sapiens
ctttagcatgttatttgaaactctttgcaacacgggcctgtcctatgtcttaccagccttgcctcccatcactcctctccatatatatcctattctccagtcatgcttgtttgcttctcattcctcagtcacaccactgacttgggcaccagtttgcttctgctcaaactcttctctgcctagaacgcacttcccatactttctcttgtcagtcattcccatccttcagcaatcactcaaatcacctctttgaagaactctccagcttcccaggctaactttaattattcttgctctgttgyatctatagtactttaccagagaattcaccatgttgtatttatagtgacttgcttatgtgtctttgtctttaacatcaaaggcaaggacctactttacattcacagcacccagaatagagcttagtctgtgggttagatataaagaaatgtttgctgaatcaattaacacatagatagaatagtcactttttatttatattacttgcccatcatctcacctccttcccaccacctcccaccaattatagtattcaatatctaaagtacaagaagccaataagatacctttacaaagacagcattcatcat

SEQ ID NO: 196074 - DNA, 611 bp, Homo sapiens
ctttagcatgttatttgaaactctttgcaacacgggcctgtcctatgtcttaccagccttgcctcccatcactcctctccatatatatcctattctccagtcatgcttgtttgcttctcattcctcagtcacaccactgacttgggcaccagtttgcttctgctcaaactcttctctgcctagaacgcacttcccatactttctcttgtcagtcattcccatccttcagcaatcactcaaatcacctctttgaagaactctccagcttcccaggctaactttaattattcttgctctgttgtatctatagtactttaccagagaattcaccatgttgtatttatagtgacttgcttatgtgtcttygtctttaacatcaaaggcaaggacctactttacattcacagcacccagaatagagcttagtctgtgggttagatataaagaaatgtttgctgaatcaattaacacatagatagaatagtcactttttatttatattacttgcccatcatctcacctccttcccaccacctcccaccaattatagtattcaatatctaaagtacaagaagccaataagatacctttacaaagacagcattcatcat

SEQ ID NO: 196075 - DNA, 611 bp, Homo sapiens
ctttagcatgttatttgaaactctttgcaacacgggcctgtcctatgtcttaccagccttgcctcccatcactcctctccatatatatcctattctccagtcatgcttgtttgcttctcattcctcagtcacaccactgacttgggcaccagtttgcttctgctcaaactcttctctgcctagaacgcacttcccatactttctcttgtcagtcattcccatccttcagcaatcactcaaatcacctctttgaagaactctccagcttcccaggctaactttaattattcttgctctgttgtatctatagtactttaccagagaattcaccatgttgtatttatagtgacttgcttatgtgtctttgtctttaacatcaaaggcaaggacctactttacattcacagcacccagaatagagcttagtctgtgggttagatataaagaaatgtttgctgaatcaattaacacatagatagaatagtcactttttatttatattacttgcccatcatctcacctccktcccaccacctcccaccaattatagtattcaatatctaaagtacaagaagccaataagatacctttacaaagacagcattcatcat

SEQ ID NO: 196076 - DNA, 553 bp, Homo sapiens
gatcagatttctgttttactgtccctaattaatttgattacagcagggagggataattctctgattagaatctcacaaaccattacctctgtgggaaatttgacaaggttccaggtttgccactcaaaaccacaaaccacttttgaccataatgacccattggtacatcctgtgctaaatttcacctgtattcctcctgattgcactcacgatgcaactcagggtcatatcaagcaaaacctgtttatctaatctgtctgactcaccctaaccttcctgccgcacgtctcagtttaacccatcrtaatcgtattgtcaaaataactgcctgtaatcccagcactttgggaggccaaggcagaaggatcacttgagcacaggggtttgagactagcctgggcaaaatggtgaaacactgactctataaaatatatacaaattagctgggtgtggtggtgcccacctgtagtcccagctactcaggagcatgaggtgagaggatgacttgagctaaggagttcaagcctgcagcgaaccctgatgacgccactgc

SEQ ID NO: 196077 - DNA, 503 bp, Homo sapiens
  misc_feature (1)...(503): n = A,T,C or G
gggggtctaggcgaaggggcagtgcgtggtatttccagccccgcgtagtgcccgaagcctgcaagcacgcctcctgggttccagcagcggcggcagagcggggttggttggacccgccaggtttgcgtaatgggctgagccgccggcngcccgggaatgggagcctgctgcgctgcgctcctaagctgcgcccggcgccgaggacccccggggggcagcgctcggcccatctcccggccccttcggctccatctagtcccctccgactggcaaagagaagggattcctcggattcccaaggcacccagcgcccctgcctgggggggtcgcctttcgtccattttgctccccygggagagagatcggattttgctttcgctgccgcgagcccggcggggctgcttccggcctccccgaccgggaaattcccgccgttgccatggcacccggcacttgctgccgggggcggcctgccgctgcacccagtcgggggcgcgccgcat

SEQ ID NO: 196078 - DNA, 503 bp, Homo sapiens
  misc_feature (1)...(503): n = A,T,C or G
gggggtctaggcgaaggggcagtgcgtggtatttccagccccgcgtagtgcccgaagcctgcaagcacgcctcctgggttccagcagcggcggcagagcggggttggttggacccgccaggtttgcgtaatgggctgagccgccggcngcccgggaatgggagcctgctgcgctgcgctcctaagctgcgcccggcgccgaggacccccggggggcagcgctcggcccatctcccggccccttcggctccatctagtcccctccgactggcaaagagaagggattcctcggattcccaaggcacccagcgcccctgcctgggggggtcgcctttcgtccattttgctcccctgggagagagatcggattttgckttcgctgccgcgagcccggcggggctgcttccggcctccccgaccgggaaattcccgccgttgccatggcacccggcacttgctgccgggggcggcctgccgctgcacccagtcgggggcgcgccgcat

SEQ ID NO: 196079 - DNA, 577 bp, Homo sapiens
ctcagactccacctttacttttacctatgttggcggccccagaaggtatttatgggtgtagagttgcttcatttcctgttcacactcttgtgtttcctttgttcttagcgtgttccgtgttcgggtattttggttgcttgtttgattactgtggcttttctttacctacaacccaagcctgacgtccctcggttttaaatagcagggrgaggggaatcaatgtttgattcaggtgtttcgaagaccacgccacaggcgatgagcagaactcttcatgttgaaacggttctgctacagtactagattgctctcaggcgatttggggttgatacaggcaagccggtgcaaaactggaatactggatatgaagtgaaatgtataaaagacataaaatgtcacaaaatagtttgatcacaagtgttgattttcctggtgagttggggctgcgtgtttccatgttttctgaaggttcacataaacatgcagcctgccaattctctgtacatttttttttttcaatgagcggtatttcggttttcacgtttagttgtaagacagaaattggagacttatatgt

SEQ ID NO: 196080 - DNA, 353 bp, Homo sapiens
catgtatgatctgcactgcgatgcacacatgggccccctggagatgtggagcaggtgatggatcttcagtctccattagaaccttattattggacatttagaaaaaggcagaaaaagttagcagctccagaactgctggatcgtgattgtgcttctgttttgtawatatctccattgacttcaagttactgcccactcggacctatgattccaatccccctccccattcacctacagaataatgagactgtgatttaaactagaaagccagtagcttttcttctttattttctttgagtgatagccacaaaggggagagtttaagaaataagtcgttgcttgcataaagactg

SEQ ID NO: 196081 - DNA, 353 bp, Homo sapiens
catgtatgatctgcactgcgatgcacacatgggccccctggagatgtggagcaggtgatggatcttcagtctccattagaaccttattattggacatttagaaaaaggcagaaaaagttagcagctccagaactgctggatcgtgattgtgcttctgttttgtatatatctccattgacttcaagttactgcccactcggacctaygattccaatccccctccccattcacctacagaataatgagactgtgatttaaactagaaagccagtagcttttcttctttattttctttgagtgatagccacaaaggggagagtttaagaaataagtcgttgcttgcataaagactg

SEQ ID NO: 196082 - DNA, 565 bp, Homo sapiens
catttcaaacctcattctttctcttagaagcagacaaacttgtcccacagtcctctatgcatcagaagatttcaagcctccaagtggcttctgctgtgttcttcagggacattctatccatggggagtgctccagtctgaagcacttcctaccacaaaacgcccccacataaagtgccttctccaacatcacacggcgagggccttcatctcattttggaaagcagttgtaagtgttcccacatttgaatgcttcagacccttgcaagagacaatttgtctgccacggagagagasaaactcaggaaggacaagtcattcactctctgacagtaactaagaacattgccgaaaagacagcctgggaaccttcattcttagtccagagctcttttcactctaacaagcctgctcccatcgcagcctccttcctgtcctttaaaactagacagatgctgcctcttgctccaaagaccaccttccatcaagggaggagggacacttgcaataatgtgacctccaaccccatgggtttcccatctccgttcttacccaagaagtccttg

SEQ ID NO: 196083 - DNA, 565 bp, Homo sapiens
catttcaaacctcattctttctcttagaagcagacaaacttgtcccacagtcctctatgcatcagaagatttcaagcctccaagtggcttctgctgtgttcttcagggacattctatccatggggagtgctccagtctgaagcacttcctaccacaaaacgcccccacataaagtgccttctccaacatcacacggcgagggccttcatctcattttggaaagcagttgtaagtgttcccacatttgaatgcttcagacccttgcaagagacaatttgtctgccacggagagagacaaactcaggaaggacaagtcattcactctctgacagtwactaagaacattgccgaaaagacagcctgggaaccttcattcttagtccagagctcttttcactctaacaagcctgctcccatcgcagcctccttcctgtcctttaaaactagacagatgctgcctcttgctccaaagaccaccttccatcaagggaggagggacacttgcaataatgtgacctccaaccccatgggtttcccatctccgttcttacccaagaagtccttg

SEQ ID NO: 196084 - DNA, 541 bp, Homo sapiens
tttccacatctttactcttcagtctcctgactttctggcatctgatcctccaaaatttaragacgaagaaagagaacctcaagggcacatcaaggaagttgacaagatgattcaaccacaacgaagtggagtcagaattcacagtccctgaggtctgactctgaatgcggggccactttcccaagctttgcagcctctcctctaaaacactgcactggggcatgaagtagtgatttcttgtacagtcgggaaggcccctaggactatgggactgatggtttcccttttactgggaatttcaaggacaagtatgcgaaagatttttaaaatctttgatttttaaatcatatcttcagttatgattttaagaatcatatctgaagcataaaatgtgacacataagaccataaggccatgaaggaaatatgcccaaatgctaataaagtttgtgttaatttagaaacagcagaatgaagaactaatagatagtgtttactctgtgccaataaatgttctaggagactgacaagaaacagctcat

SEQ ID NO: 196085 - DNA, 541 bp, Homo sapiens
tttccacatctttactcttcagtctcctgactttctggcatctgatcctccaaaatttaaagacgaagaaagagaacctcaagggcacatcaaggaagttgacaagatgattcaaccacaacgaagtggagtcagaattcacagtccctgaggtctgactctgaatgcggggccactttcccaagcyttgcagcctctcctctaaaacactgcactggggcatgaagtagtgatttcttgtacagtcgggaaggcccctaggactatgggactgatggtttcccttttactgggaatttcaaggacaagtatgcgaaagatttttaaaatctttgatttttaaatcatatcttcagttatgattttaagaatcatatctgaagcataaaatgtgacacataagaccataaggccatgaaggaaatatgcccaaatgctaataaagtttgtgttaatttagaaacagcagaatgaagaactaatagatagtgtttactctgtgccaataaatgttctaggagactgacaagaaacagctcat

SEQ ID NO: 196086 - DNA, 573 bp, Homo sapiens
tgcaagtcctagtcctgacctgggctcagagacagaggactttgggggcatgtggcttacttatacaccagctgagaaatctaagggagtgcttgcaccacccctcccccgaccccaaacagcaccactaacagctcatggatcacatggatcattctcaatgatagagcatatgttaggtcacaaaacaagtcttaaaatatccaaaaaacttgtaataatawcagccatcttctccaatcacaatggaatagaactagaaagcaataacaagaggaatttggaaaactatacagacacatggaaatgaaacaatatcctcctgaatgaccagtaggttaatgaagaaattaagaaaaaattaaaaaatttattgaaagaaatgataatggaaacaagacataccaaaacctgtgggttacagcaaaaacagtacttggagggaaatttatagctataagcacctacatcaaaaaattagaaaaacttcacataaagaacctaatgattcatcttaaaaatagaaaagcaagagcaaaccaaaaacaaaacagtataagcaaataaataata

SEQ ID NO: 196087 - DNA, 573 bp, Homo sapiens
tgcaagtcctagtcctgacctgggctcagagacagaggactttgggggcatgtggcttacttatacaccagctgagaaatctaagggagtgcttgcaccacccctcccccgaccccaaacagcaccactaacagctcatggatcacatggatcattctcaatgatagagcatatgttaggtcacaaaacaagtcttaaaatatccaaaaaacttgtaataataacagccatcttctccaatcacaatggaatagaactagaaagcaataacaagaggaatttggaaaactatacagacacatggaaatgaaacaatatcctcctgaatgaccagtaggttaatgaagaaattaagaaaaaattaaaaaawttattgaaagaaatgataatggaaacaagacataccaaaacctgtgggttacagcaaaaacagtacttggagggaaatttatagctataagcacctacatcaaaaaattagaaaaacttcacataaagaacctaatgattcatcttaaaaatagaaaagcaagagcaaaccaaaaacaaaacagtataagcaaataaataata

SEQ ID NO: 196088 - DNA, 588 bp, Homo sapiens
tgcaacaataaactgggaaatctagaagaaatgaataaattcctagatacatacaacctaccaagagacaaccatgaagaaatccaaaacctgaacagatcaaaaagtaacaagatcgaagctttaatacaaaatctcccaacaacaacaataagcctgggacccagtggttttcctgttgaattctaccaaattcattaaagaaaagctaatgtcaatcctatgcaaactattctaaaataaaggaaggaatacttccaaactcattctatgaggccagtattaccctgataccaaaaccagacaaagayatatcaaaataaggaaactaccagcaaatatctctgataaatattgatgcaaaaatactcaacaaaatacaggcaaattgaattcaacaacacattaaaaagattattcattatgacttagtggggtacatccaagggttggttataaatgcaaatcaaacaatatgatacatcatatcaaaggaaggaagtacaaatccctatttatcatttcaattgatgcttaaaaggcatttgacaaaattcaatatactttcatgataaaaaccctgacaaa

SEQ ID NO: 196089 - DNA, 630 bp, Homo sapiens
ccaagggttggttataaatgcaaatcaaacaatatgatacatcatatcaaaggaaggaagtacaaatccctatttatcatttcaattgatgcttaaaaggcatttgacaaaattcaatatactttcatgataaaaaccctgacaaactgagtatagaggaacatatctcaacataataaaagccatatatgacagacacatagctagtatcattctaaatggagaaaaattgaaagctttccctctaagatagggaacatgacaaggatgctcactttcaccactgttattcaacacagtactgcaggactagctagagcaatcagccaagaaaaataaagggcatccaaatccagtatacaaaatcaacatacaaaaatcagtggcatttctatatgccaacagcaaacaaacwgaaaaagaaatcaagaaagaattccatttaaaatagggataaaaaattaaataactagaaataatttaaccaaagaagtaaaagatctgtacaatgaaaactataaaacactgatgaaaaaaattgaagaggggacaaaaaattggagagatattccatgtacatggattggacgaatcaatattgttaaaatgtccatagtatccaaagcaatc

SEQ ID NO: 196090 - DNA, 475 bp, Homo sapiens
acagtaaaatgatcggtgcttactagagattggggraagggaggaatgaataggcagagtgtaaaggatttggggagcaattaaatgactgattgatacaacaattgtggtcactataaatttgtctaaacctaccaaatatacaacactgagagtaaaccatggtgcaaactatggtctcttagtgatagtgatgtgtcagctatggtaataaatgtaccattctggtaggagatgttgacaatgggataggttatgcatttaaggattagggggtgtacacacatgtatcctggaacttaaagtaaaatttaaaaaaaatctctgccccttccattcaattttactatgaacctaaaactaaaaaatcaaagcttattaaaaataacaatttgtgtgttggaggaaattaggaaacatatcattcataaaaaatatataatacaaaaaacgctatgtctatgaaagttcagcc

SEQ ID NO: 196091 - DNA, 471 bp, Homo sapiens
gcaaaacaatggagacagtaaaatgatcggtgcttactagagattgggggaagggaggaatgaataggcagagtgtaaaggatttggggagcaattaaatgactgattgatacaacaattgtggtcaytataaatttgtctaaacctaccaaatatacaacactgagagtaaaccatggtgcaaactatggtctcttagtgatagtgatgtgtcagctatggtaataaatgtaccattctggtaggagatgttgacaatgggataggttatgcatttaaggattagggggtgtacacacatgtatcctggaacttaaagtaaaatttaaaaaaaatctctgccccttccattcaattttactatgaacctaaaactaaaaaatcaaagcttattaaaaataacaatttgtgtgttggaggaaattaggaaacatatcattcataaaaaatatataatacaaaaaacgctat

SEQ ID NO: 196092 - DNA, 470 bp, Homo sapiens
caaaacaatggagacagtaaaatgatcggtgcttactagagattgggggaagggaggaatgaataggcagagtgtaaaggatttggggagcaattaaatgactgattgatacaacaattgtggtcactataaatttgtctaaacctaccaaatatacaacactgagagtaaaccatggtgcaaactatggtctctkagtgatagtgatgtgtcagctatggtaataaatgtaccattctggtaggagatgttgacaatgggataggttatgcatttaaggattagggggtgtacacacatgtatcctggaacttaaagtaaaatttaaaaaaaatctctgccccttccattcaattttactatgaacctaaaactaaaaaatcaaagcttattaaaaataacaatttgtgtgttggaggaaattaggaaacatatcattcataaaaaatatataatacaaaaaacgctat

SEQ ID NO: 196093 - DNA, 470 bp, Homo sapiens
caaaacaatggagacagtaaaatgatcggtgcttactagagattgggggaagggaggaatgaataggcagagtgtaaaggatttggggagcaattaaatgactgattgatacaacaattgtggtcactataaatttgtctaaacctaccaaatatacaacactgagagtaaaccatggtgcaaactatggtctcttagtgatagtgatgtgtcagctatggtaataaatgtaccattctggtaggagatgttgacaatsggataggttatgcatttaaggattagggggtgtacacacatgtatcctggaacttaaagtaaaatttaaaaaaaatctctgccccttccattcaattttactatgaacctaaaactaaaaaatcaaagcttattaaaaataacaatttgtgtgttggaggaaattaggaaacatatcattcataaaaaatatataatacaaaaaacgctat

SEQ ID NO: 196094 - DNA, 581 bp, Homo sapiens
cagtactcaacaaatccagacaaagagataacacataggttgaaaatttcagacaaggattttagagyaaccatgaataatatgttaatggaactggtagaaaacagataaaaagtatataaagtttcagcagagagatggaaactatgaaaaatgtttcaaataaaaatgcttaaattcagaattaaatattagagaagaaaaattcttcaatcagcgcactggaagtgacagaaggaaaaaaaacagagaactctaagataggtcaatagaaatttcccaaacagaaacagaaacataaaatagaggttaaaacatttgaacaaaaagcaaagcatattgaagaactgtgaggcaatattaagggttctaatatttgtgtaagttggaattccacaagtgagctgttggagtggggcagaataaatattttttaaaaaataatggccaaacattttctgaacttgatgaaaattatgaacacagagatccaaacatacaaaatgtgatgaaaattatatcaagtacataacagttaactgcttaaaacagttgataaaatgggtcttaagtcagaaaaa

SEQ ID NO: 196095 - DNA, 581 bp, Homo sapiens
cagtactcaacaaatccagacaaagagataacacataggttgaaaatttcagacaaggattttagagcaaccatgaataatatgttaatggaactggtagaaaacagataaaaagtatataaagtttcagcagagagatggaaactatgaaaaatgtttcaaataaaamtgcttaaattcagaattaaatattagagaagaaaaattcttcaatcagcgcactggaagtgacagaaggaaaaaaaacagagaactctaagataggtcaatagaaatttcccaaacagaaacagaaacataaaatagaggttaaaacatttgaacaaaaagcaaagcatattgaagaactgtgaggcaatattaagggttctaatatttgtgtaagttggaattccacaagtgagctgttggagtggggcagaataaatattttttaaaaaataatggccaaacattttctgaacttgatgaaaattatgaacacagagatccaaacatacaaaatgtgatgaaaattatatcaagtacataacagttaactgcttaaaacagttgataaaatgggtcttaagtcagaaaaa

SEQ ID NO: 196096 - DNA, 483 bp, Homo sapiens
taacaacagcaaatctttgttagtacttactgagccaagctctgtgccaaatactttgcatttgtgatatttatatttagaacatacttacggggttggcatttgtattactcttattttggatgaactcgctgatgcttttgaaaataaagttgcctattaagtggcagagctgggattagaacccaggtcattggaatccaacacccatattctgaattactacaatacacttgccctttttactttgtggaagcaactaaattatgtttatgcatcctccagatatgtacattgttttagataacacattcctatattttaattactggatcatacagaccatataggtcataatttttaatatgttggtggtaaatatatgtttaaacactgaaaatctctgccaaaatacatttaattcttttacacwctctataggtattttgatttcaaccaaattcaacaaacatacagtgatac

SEQ ID NO: 196097 - DNA, 581 bp, Homo sapiens
cagtactcaacaaatccagacaaagagataacacataggttgaaaatttcagacaaggattttagagcaaccatgaataatatgttaatggaactggtagaaaacagataaaaagtatataaagtttcagcagagagatggaaactatgaaaaatgtttcaaataaaaatgcttaaattcagaattaaatattagagaagaaaaattcttcaatcagcgcactggaagtgacagaaggaaaaaaawcagagaactctaagataggtcaatagaaatttcccaaacagaaacagaaacataaaatagaggttaaaacatttgaacaaaaagcaaagcatattgaagaactgtgaggcaatattaagggttctaatatttgtgtaagttggaattccacaagtgagctgttggagtggggcagaataaatattttttaaaaaataatggccaaacattttctgaacttgatgaaaattatgaacacagagatccaaacatacaaaatgtgatgaaaattatatcaagtacataacagttaactgcttaaaacagttgataaaatgggtcttaagtcagaaaaa

SEQ ID NO: 196098 - DNA, 470 bp, Homo sapiens
agaaataatatcgctattttagttattgaatttaaatcttactcttaattaaaattctaaaattcctgatgaaaacatgtaaagatctacacaatgaaatgtatttgttccaaccatgaatggacatacgtttgagggttacatctaaggctgatctttatttgtataataaggattatataagttgmtataaataaggataacataaatcatacaagttgctcataataccttaagtgtaatgaaagtatattaaaatttgtatgtattccaaactcaaacttgtttctattgattccagtgcttacaggtagagggacacagagacagagagagagagagaggcagggagagaggaaaggagagaggaagaaagcaaaatttaaaacacaataattaagatattcactattatagaagaagcatttaattttagtaagtttcaaggactgttataaattcataaaaca

SEQ ID NO: 196099 - DNA, 555 bp, Homo sapiens
taagaattccaatctgacagagtagagagaatatgctgaataccccaggttttcagctgagattccaaaagttcatgctataaaaggagaactacttgagaaattcattaagacctaacctatacttatccttacaaagctttaaatcaatccctaattagtagcatattattccacaattaaattaattgcttcttagaatgaaactcaattctttttaaagaaagacaacaaaatccagactttgaacactatagcattgaaattatttttaaaaacataaaaaatgctaagcacataaagaatcagagaagttttgcctgtaattaaraaaaacaaaaacaatatgaataaagctacacataaaatctgtatttatctgttctcacgctactaataaagacatatctgagactgggtaacttgtaaaggagaaaggttttatggactcacagttccacatggctggggaggcctcacaatcatggcaaaaggtgaatgagaaacaaaatcacgtcttatggggtggcaggcaaagagaggatgagagccaag

SEQ ID NO: 196100 - DNA, 581 bp, Homo sapiens
cagtactcaacaaatccagacaaagagataacacataggttgaaaatttcagacaaggattttagagcaaccatgaataatatgttaatggaactggtagaaaacagataaaaagtatataaagtttcagcagagagatggaaactatgaaaaatgtttcaaataaaaatgcttaaattcagaattaaatattagagaagaaaaattcttcaatcagcgcactggaagtgacagaaggaaaaaaaacagagaactctaagataggtcaatagaaatttcccaaacagaaacagaaacataaaatagaggttaaaacatttgaacaaaaagcaaagcayattgaagaactgtgaggcaatattaagggttctaatatttgtgtaagttggaattccacaagtgagctgttggagtggggcagaataaatattttttaaaaaataatggccaaacattttctgaacttgatgaaaattatgaacacagagatccaaacatacaaaatgtgatgaaaattatatcaagtacataacagttaactgcttaaaacagttgataaaatgggtcttaagtcagaaaaa

SEQ ID NO: 196101 - DNA, 625 bp, Homo sapiens
atctggaaagccttcccaagagggacatctacaaataggccaagacagtgaagactaccataaatacataactcttcaatgctcagaaactgaagaacaactactagcatcattaacatctaggaaaacatggccttaccaaaggaactgaataaggcatcaggaaacaatccttgagaaacagagatatgtgaccattcagacagagaattcaaaatagctgtgttgaggaaacccaaagaaatttaggataacaaaaatagagaaggaattcataattctatcagaaaaatttaacaaaaagatkaaaataagtaaaaagaatcaagcagaaattctggagctgaaaaataatgtaattggcatactgaagaatgcctcagagatctttaacaacagaatggatcaagcagaagaaagaattaatgagttggaagacagactacttggaaatacacagtgagaggaaattaaaaaaagagtaaaaatcaattcagcatgcctacaggatctagccaatagcctcaaaatggcaaatctaagggttattggtcttaaaaaggaggtagagaaataaataggggtagaaagtttattcaaagtgataataacagagaccttacca

SEQ ID NO: 196102 - DNA, 597 bp, Homo sapiens
gaccaacctcaaatgaaattcaaaatcattcaaaatacatttcaaaaagtgcttttgaaagtacatttcaaagtcaccaagagtaaagttcaaatgttatcatctaaggaagagaagtatttgaggkgattaatatattaattagctttatttatttcatattatattcataaatcataatatcagtttgtgtctcctaaatatactagctatactttatcaatttaaaatttaaaaatacatttttttttttttgagatggagtcttgctctgtggcccaggctggagcgatctgggctcactgcaagctccccctcccaggttcacgccattctcctgcctcagcctcccggagtagctgggactgcaagcggccgccactacgcccagctaattttttgtatttttagtagagatgggatttcactgtgttagccaggatggtctcgatctcctgacctcatgattcgccagcctcagcctcccaaagtgctgggattacaggcgtaagccaccacgcccggtctaaaaatataaattaaacaaaaagaattgcaacccaacttgggtgtctctttgttcacctaacactgcta

SEQ ID NO: 196103 - DNA, 597 bp, Homo sapiens
gaccaacctcaaatgaaattcaaaatcattcaaaatacatttcaaaaagtgcttttgaaagtacatttcaaagtcaccaagagtaaagttcaaatgttatcatctaaggaagagaagtatttgaggggattaatatattaattagctttatttatttcatattatattcataaatcataatatcagtttgtgtctcctaaatatactagctatactttatcaatttaaaatttaaaaatacatttttttttttttgagatggagtcttgctctgtggcccaggctggagcgatctgggctcactgcaagctccccctcccaggttcacgccattctcctgcctcagcctcccggagtagctgggactgcaagcggccgccactacgcccagctaattttttgtatttttagtagagatgggatttcactgtgttagccaggatggtctcgatctcctgacctcrtgattcgccagcctcagcctcccaaagtgctgggattacaggcgtaagccaccacgcccggtctaaaaatataaattaaacaaaaagaattgcaacccaacttgggtgtctctttgttcacctaacactgcta

SEQ ID NO: 196104 - DNA, 597 bp, Homo sapiens
gaccaacctcaaatgaaattcaaaatcattcaaaatacatttcaaaaagtgcttttgaaagtacatttcaaagtcaccaagagtaaagttcaaatgttatcatctaaggaagagaagtatttgaggggattaatatattaattagctttatttatttcatattatattcataaatcataatatcagtttgtgtctcctaaatatactagctatactttatcaatttaaaatttaaaaatacatttttttttttttgagatggagtcttgctctgtggcccaggctggagcgatctgggctcactgcaagctccccctcccaggttcacgccattctcctgcctcagcctcccggagtagctgggactgcaagcggccgccactacgcccagctaattttttgtatttttagtagagatgggatttcactgtgttagccaggatggtctcgatctcctgacctcatgattcgccagcctcagcctcccaaagtgytgggattacaggcgtaagccaccacgcccggtctaaaaatataaattaaacaaaaagaattgcaacccaacttgggtgtctctttgttcacctaacactgcta

SEQ ID NO: 196105 - DNA, 570 bp, Homo sapiens
aattatgcttgtatgttgttctggagctttggcctaaagccacctagccattaaaaaaaaaaatgaaacaacatacatctgtttactgtccatctcagttctgcttttgtcagaatgcctggactggycaacaaatgttttgaatacatgatggcatgttcaaatctgagactgcatatgtcccgtccattctagatcaactgtttagtttaacaaaggacttacatgtggcttagaaaagacactctaagcagcattccctgaaagaaagcttggtctttccttctccatgtttggttgattgcatgagaatgtacttagcccagggtttaagcatcttattaagcccactgaccaccacaaatgtacttaaagcacaaatggagaaagaaaaggagtatggtaatctcataaacagagacctaatttcaaaccaagtacaggttagttgcaggatcttaaacaaacgtgatttctctaaattaaatgtcctcatctataagatattggaaacaatactttccctattgctttcactcacctgaaaacaaatactctttaaaactgagt

SEQ ID NO: 196106 - DNA, 570 bp, Homo sapiens
aattatgcttgtatgttgttctggagctttggcctaaagccacctagccattaaaaaaaaaaatgaaacaacatacatctgtttactgtccatctcagttctgcttttgtcagaatgcctggactggccaacaaatgttttgaatacatgatggcatgttcaaatctgagactgcatatgtcccgtccattctagatcaactgtttagtttaacaaaggacttacatgtggcttagaaaagacactctaagcagcattccctgaaagaaagcttggtctttccttctccatgtttggttgattgcatgagaatgtacttagcccagggtttaagcatcttattaagcccactgaccaccacaaatgtacttaaagcacaaatggagaaagaaaaggagtatggtaatctcataaacagagacctaatttcaaaccaagtacaggttagttgcrggatcttaaacaaacgtgatttctctaaattaaatgtcctcatctataagatattggaaacaatactttccctattgctttcactcacctgaaaacaaatactctttaaaactgagt

SEQ ID NO: 196107 - DNA, 567 bp, Homo sapiens
gatcttttaactgctcacatcgtgtgagttaagtttcaaagacagcattacccaattttattctttgattgttgatacattataatttttcagtttgtatagattttattgaatcagccyaacagaaagcaaggccttgtgaggaaacagaatgttagccaagtgagtttttattgtactcatcaatcctgtgtgcctgtgtgtgtttgttgaggaacggctgtgtatggttttgaaatgaaagaaagaataatgaaagcaggctggaaaagcataaaagaccaacatgaatcacaatgttagtttgcataggagaaactcttactttgaatcttgtttgtgaggtttcttttgataaaatctccaataattatatcaacactctcagcattatctatatctgtttgtcttttctgctattattaccctgtccctaccacaaacctcaagtcatccttccatccagtgtttatcttataaacatggttgaaatccatttattaaaaaaaaaacaagaataagaacaaaatgaacagccctccccactgctttccaacttaatgccag

SEQ ID NO: 196108 - DNA, 506 bp, Homo sapiens
gaagactgataaaaagagagatggctgccttcacaaaaataactgaattgaggttagaactcacgtctcaatgtttttccagtttctccattttatagcggggcttgccctatactattaaaaggacaaccccaggtatttagttagctttctaattgtgtgcaaaattatttaaaataaagcgttttatgtaatataaatttttaaaaaatgtaccaatgccaattcaatagaaatattctatwattttgctttcaggtataaggactgcactactattaatctaattcatatgaaatgttttataaattgcacttataatctaaatgtattctatttaatactttatctattatatgctgttgataaactgtagagaactaatgaaaagtgcactgaagttttatattatttcatcacaattctctaatccttaaatatatgccacttagtctaatttgagagcattaaagcaaaataagttacttgtggaatcagaatgttat

SEQ ID NO: 196109 - DNA, 430 bp, Homo sapiens
tgtgagtcgttaaataattttttttcctctggcaaaatgccagacatctagcaaaaattcctttatagartccaattattttcttgaaataaagataaaaatgaattcatagcaaaagtctctgcttaagagacagcaattaacacaatggataatctatggtttcctaaaagacagaaattttcaaatgcatgcatctactatcgaatctttataaaggagaaggcatattactaaatcacagctcagtgagaagctgagataattatgtgttaggctctgttgcattctagtgatctaaattataaggatagtgacttaagagagaccctcatggatacacagtctctctatccagctattcttcctctcaaatatcatatgtcttaggcaagcatttggcaggtgtcaaattgcagtaaatctatga

SEQ ID NO: 196110 - DNA, 547 bp, Homo sapiens
tgaccttcctgaagtctctaaaccacctagcagtcccaagaaatataactaatgtaataactgattgtctatwtttcttttagagactattaatactgactgattccttgattaccaagtcaccactagaagcctgatttttgtttgtttgtttgttttgtttttttttttttagctatcccatatcacagaggtttccatatccattagagtgtactaaccattgctggacccatggtcttattctttacactgtgctctccagagcacactgtttattatcagcaaaacctcttatacccactgcctctctgaagttccccttcattttatttttgctctgaatgtaatgttggtgttggctgaagatactactacatccccaataggcctctcatggtgctgcttgtgtttcctcagcaacacaactatagtggatctgtagagaactttttttctcatttctcattgcctcatccctaaaacaaaaaaataataaaaaaattaaattatctgtcatcagatacttcatctatgttcctttgaa

SEQ ID NO: 196111 - DNA, 547 bp, Homo sapiens
tgaccttcctgaagtctctaaaccacctagcagtcccaagaaatataactaatgtaataactgattgtctatatttcttttagagactattaatactgactgattccttgattaccaagtcaccactagaagcctgatttttgtttgtttgtttgttttgtttttttttttttagctatcccatatcacagaggtttccatatccattagagtgtactaaccattgctggacycatggtcttattctttacactgtgctctccagagcacactgtttattatcagcaaaacctcttatacccactgcctctctgaagttccccttcattttatttttgctctgaatgtaatgttggtgttggctgaagatactactacatccccaataggcctctcatggtgctgcttgtgtttcctcagcaacacaactatagtggatctgtagagaactttttttctcatttctcattgcctcatccctaaaacaaaaaaataataaaaaaattaaattatctgtcatcagatacttcatctatgttcctttgaa

SEQ ID NO: 196112 - DNA, 501 bp, Homo sapiens
aatccaaccattcaataatgtgtaatattttctacatattttcattaaaatacatttaatatagcatggtcaataatttgtacgtcatcyctcctatcaaattgtgctcttccaaaataagaaggattttttattcggttcatcattatgattttgctcttagtatggcaattggaacatagtgtgcactcagtatatgtttaaagatgtgttttttgtaagatgaaagttctaggactttttaaaaaataacaaaactgggtttgtagttttgaaactcacattttgttacttaaataaaattaagaaatcatcacttagcctaatgttttctaacattttcctttttttatattcattgatgtttaccagctgtgttttgaaattatttctactaactgttcaaaaccaaggcatacaagtagaattaaaaaattaatatttcactggattatttgtgggaaaagggccattagagatttaatataaatctttaagatt

SEQ ID NO: 196113 - DNA, 638 bp, Homo sapiens
tctaaatttaatctggcttggatatgtaccctgccttttccccatactatatgtataaattcatgaaactactttatcttctttagcctctatattctcatctttataatggggattttaaaaatcaactaatcaagaagggttattgtccaattaaattggataagatatctaaatagcttcatatggtgacagacaaaatcagcacaatcatattataaaacaaagttaaaatgtattgtcatagaaacttctgaagtggttgctgtattcaaagtatttgctctactactttttaaaatcttacattgaagataagaaatcttatgtcaacctatttacattttagatatatatagcttttcagatatttagtctctatagaaatcccaaaatcttgcmattatcttctgaatatatcatatcttcactaatttctctcttaagtgtccaccttttgattctatttttctctagttttgtttttcagtgctgtgggtttttcttttcataatccttcacttagtacttttcagcaggctccgttctcttcttcaggggttactcgtatctcagatattcacattcctcagattacattcattacatttattttttacccataaacaaacgttttt

SEQ ID NO: 196114 - DNA, 522 bp, Homo sapiens
catctcaattttaagaaaagctacatattgaaattgaagatttgtaaattgaaaatgttgaaacaatcaatgcttatatgcccctyacaacacgttagtgtttccctaagggctaacatcccaatgtttgaagacaactgctgaagatatatctttattcagtaaaggagctatacgtaagttatgctcaacaatatgaatacacatgtgtacatagccccatgttggtattagtagtgttcaaattcatagaccctaaaaaatgacatgtcctctttctgatttttgtataattagttaaatattttaatattttatcaatatttatttacatataaataaatgtaaaagataatcttgtctattttctcctgttctttctcagcttgacatgcactgatcttaactaagatttgtctgtaacactaagtctgatagtctgcaaactacattgcccattctcaccttacagctagttaccagactttgccagtaggaaaaaacacagtagaccagaaaata

SEQ ID NO: 196115 - DNA, 522 bp, Homo sapiens
catctcaattttaagaaaagctacatattgaaattgaagatttgtaaattgaaaatgttgaaacaatcaatgcttatatgcccctcacaacacgttagtgtttccctaagggctaacatcccaatgtttgaagacaactgctgaagatatatctttattcagtaaaggagctatacgtaagttatgctcaacaatatgaatacacatgtgtacatagccccatgttggtattagtagtgttcaaattcatagaccctaaaaratgacatgtcctctttctgatttttgtataattagttaaatattttaatattttatcaatatttatttacatataaataaatgtaaaagataatcttgtctattttctcctgttctttctcagcttgacatgcactgatcttaactaagatttgtctgtaacactaagtctgatagtctgcaaactacattgcccattctcaccttacagctagttaccagactttgccagtaggaaaaaacacagtagaccagaaaata

SEQ ID NO: 196116 - DNA, 571 bp, Homo sapiens
atagttgataaatggaagtttcttattatagaaagagctactaaataaagaatgctagaattaaaaatcactactttggcattcctgatgaaaacattgaaaaacaacagtttactaaatccaaaggccttgattcaatctttgaagaatagctgaatgaggttaagtgtcaggaatatgatcagagaggtagtaggagccaattctattggtaaagattttggttgtatttgtgccacgttttcttaatccagtctatcattgttggacatttgggttggttccaagtctttgctattgtgaatagtgccgcaataaacatacgtgtgcatgtgtctttatagcagcatgatttataatcctttgggtatagtgcacatgtaccctaaaacttaaagtataataataataaaatttwaaaaaaaagattttggtcggattttattctgattgtgttgaatattcattgaagagttctaagcaggcaaataacatcatccagtaatattctaggatacttctggctgtcatgtggagaatagtttggggtgggagacaggtggaaacaggg

SEQ ID NO: 196117 - DNA, 410 bp, Homo sapiens
acaaggtaagaattattccattatgtaggtaagaaaattaaaaggtaaaataaatgtaactgaattggaaaatatcctacaactatctggactctatgtaacttcagagctcttccttctcttccctactatctggtgaccaaatcttggatgctctgtgctacttaatgacctcagtgtctgttcataagttagggagctggccctgtgccttctaccctctaagtataactaggatatctcaaaaagcactgtgtgcttttgggtgaaaggttttgtgtttgttttaaaatgcaagtraaaacaacttcaaaaatgtgaacaaaagcaatcgcataagaatgaatttgaatgaacactctcataatttgacattttggaatatagcacacaagatcagtttgttataa

SEQ ID NO: 196118 - DNA, 517 bp, Homo sapiens
tgctctgtcacctaggctagagagcagtggcaagatctcggctaactgcaacctctgcctcccaggttcaagtgattctcatgcctcagcctcccgggtagctgagactacaggtgtgtgccaccacrcctggctaatttttatatttttagtagagacaaagttttaccatgttggccaggctggtcttgaacttctgacctcaagtgatctgcctgccttggcctcccaaagtgctgggattacagacgtgaaccaccgcacccagtctggaaaacatagtcttaatgagggaagagatagaatatctcagcagagaactaaaagctatttttttaaaaaaagcaaatggaaaatatatagtggaaaattacaattaaaatttaaaagtcactgtatgtgcttagtaataaactgtagatagcagaaaaaagagttggtgatcttgaagaaagatccaagcgtcttccaatctgaagaacagagaaaaagaattgaaggtaaactttcgaaactg

SEQ ID NO: 196119 - DNA, 610 bp, Homo sapiens
aaacattttagaattcccatcaccatctagatttcactaattcttattctttcaactgaacaaaatgtttgagtgctaagaaagtgcttgacaccttattttaccaactccttatgcctttccagaatatttataacattaaaatggtggtgtggtggtggtaatgttaagatgagacacagaaatggaaatttccacaacagaatccagaaaagttcctggcttttgtgtagattctgactcttagcatcatataagactgaaatttgtcataaagaccagcaggggatctacaaacttggttgtctggcaaattttggtctttaagagaaaggtcaaatcaaattttacttgaaaacttcagacaggaaaactgaattttaaagatcctttttgagacagttattaatgcatttaaatcccaccccaaaattgtcagctctcygttgttatactattattaaggtttccttgagcttactctgtgattccctgatgcctttcaattgataattgaattgcatttcgggtaatgccttccataattattttaatgcacattctaagtgcaaggaactgtcaggaagctaaaaatctgccatatgatatt

SEQ ID NO: 196120 - DNA, 411 bp, Homo sapiens
taccagacagaaggaacaataaaaagctcagaagtgagacagcacagtgcatttgagggcctgaaaraaatgaagttggttggagtacacattctagggaagcagtgactggagctggagctggagagataaacagagaccagatttggaaaggcctttaaaccatgtttaacaagcagaggttggggagacttgacttttcttgattttgggatgagtgtataggtagaagatgctagataagttatgtatttgttgaaactcaagaccacctgatactttcattgactgaagattatctgattcattagttcacttgaaaatctttatctaacactagtatgtgccaggaactttactaagctaggcaatagtttaacattctctgtggtattactaggacagactagt

SEQ ID NO: 196121 - DNA, 438 bp, Homo sapiens
atgaaatttaccagacagaaggaacaataaaaagctcagaagtgagacagcacagtgcatttgagggcctgaaagaaatgaagttggttggagtacacattctarggaagcagtgactggagctggagctggagagataaacagagaccagatttggaaaggcctttaaaccatgtttaacaagcagaggttggggagacttgacttttcttgattttgggatgagtgtataggtagaagatgctagataagttatgtatttgttgaaactcaagaccacctgatactttcattgactgaagattatctgattcattagttcacttgaaaatctttatctaacactagtatgtgccaggaactttactaagctaggcaatagtttaacattctctgtggtattactaggacagactagtttagatgtatttttcttcc

SEQ ID NO: 196122 - DNA, 424 bp, Homo sapiens
tgctctccatttctcactatagattgaagttgtgtatggtattatttccatttagcctgaagaataayttttagcatttcttatagtgcaggtcttcgctataagaattttgaaggatatttcaaaaatccttcaaaaactggattgacagttctaaaatttttatttcagcactttaaaaatacaattctattgtcttttgcccctcgttgattctgatgagaagttagtcatttttttgtatcattgttgtcttgtatttaatgtgtcttttttgtcctcagcttttcagattttctctctttggttttctatatttaattattatgtacctacataaattgttttctttatgttaatactgcttaaatcttggatctaagtcaatgtaatcaaatttagggaactttcagttagtatattt

SEQ ID NO: 196123 - DNA, 424 bp, Homo sapiens
tgctctccatttctcactatagattgaagttgtgtatggtattatttccatttagcctgaagaataacttttagcatttcttatagtgcaggtcttcrctataagaattttgaaggatatttcaaaaatccttcaaaaactggattgacagttctaaaatttttatttcagcactttaaaaatacaattctattgtcttttgcccctcgttgattctgatgagaagttagtcatttttttgtatcattgttgtcttgtatttaatgtgtcttttttgtcctcagcttttcagattttctctctttggttttctatatttaattattatgtacctacataaattgttttctttatgttaatactgcttaaatcttggatctaagtcaatgtaatcaaatttagggaactttcagttagtatattt

SEQ ID NO: 196124 - DNA, 607 bp, Homo sapiens
tttttttcacccgattgtctgaaaaaaaagaccactaaggtcttagaaaagagtatctatgcccagaagtccctcagcactggtaaatgtttcaagtttgaggagattagaagcaaacatccagttcatagcactgttattaaccaggatttcctcaagagtaacaagcagcygtgtatgaaattgttaggaacaccagaggaggatatttacataacagtagtgctgaatttgcatatgtccactcaaattatatcagctgttctaagacagctttagaagttaaaacttctaaagcatacttcattttattgtattttgctttgttgcccttcacaaataattaatttttttttttttttgcaaattgaagttttgtggcaactctgtattgagcaagtcagagaaagtattttaggcccttggtgagtaagaaagtataaatcatcatcttgttgatatttgtgtattgactaaatgaacttgttgaaatgattttaagcttagggatagttctaaatatgaatatagatcacattcaaacaggtagtatgcacgaatgttgcatgaaatagagagctatcactaggcttaaaatgctgattcc

SEQ ID NO: 196125 - DNA, 602 bp, Homo sapiens
aagccagtctcaccctgaattagtctatattaaactgtatcacagagccctcttgcctctggagctgcctccgcattggccttccatgactttctaatctacctctcttgcactgcctggactatgttttcagcccttatgctcaggaggtacaaatgccttttgtataaaaagctgtaaaaaggcagctcgggtgtcacttgtcattattttcacaaggagaattctggccctcattgaagctgtgggtttgacagtttcccaggatttctcacaatcactttttctttttcttccacagcttaacactactctgctcccttttcggccttgctgttacattcattaggaactgtgttgccacagttgctttttctatttttgatatttgcttaggctaaaatatcagacttgttctggcatgatgctggcccaaattagagagaaaggcaacagagtagtcaggaatagaatctcaaatctttaaaattctgcgaatccgccaagtttaacatttctgtgagwgtgaatgagcaggttccacatttgtaagtttgggaagaaagtaaaattttcccctctggatccatgatcagatttca

SEQ ID NO: 196126 - DNA, 423 bp, Homo sapiens
ctgcaacctctgcctcctaggttcaactgatcctcctgcttcagcctcctgagtagccgggactacaagcatgcgccactatgccaggctcatttttgtatttttagtagagacggggtttcgccatgttgkccaagctggtctcgaacttccggcttcaaatgatccacccacctcagcctcccaaagtgctgggattacaggcttgagctgctgcgtgcccagctattaagccccttttcaagtgtttattaggcatacatctatccttgaagaaatagctattcaaatattttccccatttttaagttgtttttatttttatttttttagttgtaggagttatttatatatttttgccatcctaatgggtgtgtgtgttggatcttttatgccatcaaatacactaagcttattctttca

SEQ ID NO: 196127 - DNA, 423 bp, Homo sapiens
ctgcaacctctgcctcctaggttcaactgatcctcctgcttcagcctcctgagtagccgggactacaagcatgcgccactatgccaggctcatttttgtatttttagtagagacggggtttcgccatgttggycaagctggtctcgaacttccggcttcaaatgatccacccacctcagcctcccaaagtgctgggattacaggcttgagctgctgcgtgcccagctattaagccccttttcaagtgtttattaggcatacatctatccttgaagaaatagctattcaaatattttccccatttttaagttgtttttatttttatttttttagttgtaggagttatttatatatttttgccatcctaatgggtgtgtgtgttggatcttttatgccatcaaatacactaagcttattctttca

SEQ ID NO: 196128 - DNA, 554 bp, Homo sapiens
tgaactggcaaggagcaacctgctttcaccacaggcctctggaatcccagcaggaggagacccctcaaccaccacagccacttcattgacagggagagcggcttagataagtggtaggagcagcactcagccagtgtggagcccaaagggtgtgttacaggagcatatgtggtggagcatggccaggaatgccaatccccctaggctgcacttgctcccataggagactgttcccctaggggaactttagcccagatgtaaactctgcagggtggtcttccctatcacctggggctggtctgatctgagctttccttgatctgctggcctttcccagggcacccaatgctggactgcaaacagatgcagcyagactggggccctgggggcccgcatcataactcctgcactgttggactgtgcctgaccagcagagcggccctctggacacgcaacagctgacctgttccttccctcactgcagcatccccaggttccatggccactccccgtattgctttgctaacgcatgtgtgtgcaggcagatcttgcct

SEQ ID NO: 196129 - DNA, 518 bp, Homo sapiens
agggactggtctagagggagggaaagccttttatgaggctagggtcgcgctactggtaagtgacagaggcagggttccagcccaggtccctctgtccgcagagcttaccttatgctgtgggtccctccctgaggccagcactgtgtctccactcctctcctgtaatgtgaggcagggctgtaaaggggaccagcccgtgggcagctgctcactcacccctcggaacctgatctcaggtgggtgttgtgaggagggagtgtgcggatcccggagaggagcaagcgttcaggaaccrtagtagtggtagtaggcagtggtagtagcagttgttgttgttatttcaggggctgggcttctgaggccttcttgtctcagacctgggctcccacgaaaacaggtccagtgactgtgtccaagagtgacctcaaggctgggtccagctttacatgggttgtgggcaggtggcctgatgctctggcctcaggcgagctgcaacttggatccctactgactcagct

SEQ ID NO: 196130 - DNA, 458 bp, Homo sapiens
ttctcagttttttctgtccttagcaacctgctctgaatggtggtcattggaggtcaccttgtccagtcttctgcctcagatctggagcccctccctcatcctactggtgggcaggtcgctctttcaacatccccagtggcagaagcgcagtatcacatagtggttaagcctgtgggctctgagtcgagacagccagagttggaatcctggctctgtcccctcttggcgccctggcctggacagggacccctcttagccctgctctgagccacatgctcctcatctgaaacatggggtcggtgtcagcagggggtgttgacagcattgcctwcctcgtgaggtcatataagttaacacacggtaagtgctgagaagagtacctggcacatggtagatgctcagtgtatgttagctgttaccactgttcttgcaagagcccccagcctttggaggtaaaa

SEQ ID NO: 196131 - DNA, 236 bp, Homo sapiens
tccaccaggcccggaaggacacctccaatgcctgtccagggccccctggccctgctcagagatgcctcctccaggcagaggcagctgctaccctcaagctccaggtgactgctgccaggcttcagaagctactcagggtaggtggtgagccygctgcctccagggctgcttctcagaaaagctcagagaagacatcttagcggctaagtggcactcattttatttgaggcagaatt

SEQ ID NO: 196132 - DNA, 554 bp, Homo sapiens
tcctgtgaaaggaggagagggaggggtcctggattcaagcccccatcactagcgatgcagccctgggcaacccacttccctctcagagcctcagcttcctgcctcttcagaggcagcttccctcygagagggggacagggatggaatgtgactcctgcatgctggaaaagatcaaattctggggagctgccccagttgctctttcctcctcttgttttcctggttccaggagccagaagctgatgaggaaaccagtaagtatgcaaattctggcactattgggaaatgatcctggggagctcacagaggacagcctcccacctgccctcccccacccccccacaggccccccaaccttgcccttgggctctcaccagcaggggccgaaccctgagttttattgcgagttctgtctcgcacacatgggttaacccctcttggagtgaagccagggtgactatggccaatctgtcctcagaaaacctccagcctccctagcagagagcaaacgagcccacaatgggatgaaagatccctgctctggatgtctcagc

SEQ ID NO: 196133 - DNA, 572 bp, Homo sapiens
aaaggaggagagggaggggtcctggattcaagcccccatcactagcgatgcagccctgggcaacccacttccctctcagagcctcagcttcctgcctcttcagaggcagcttccctccgagagggggacagggatggaatgtgactcctgcatgctggaaaagatcaaattctggggagctgccccagttgctctttcctcctcttgttttcctggttccaggagccagaagctgatgaggaaaccagtaagtatgcaaattctggcactattgggaaatgatcctggggagctcacagaggacagcctcccacctgccctcccccacccccccacaggccccccaaccttgcccttgrgctctcaccagcaggggccgaaccctgagttttattgcgagttctgtctcgcacacatgggttaacccctcttggagtgaagccagggtgactatggccaatctgtcctcagaaaacctccagcctccctagcagagagcaaacgagcccacaatgggatgaaagatccctgctctggatgtctcagcccagtccccatcccacttctctaga

SEQ ID NO: 196134 - DNA, 523 bp, Homo sapiens
tattacaatatataatttgttgctatatttatctatagatacaatgcaatcccagtgaaaattacagtcgttgttttakaggaaatataaagctgattaaaatttatatcaaaaggcaaataattgagaataggcaaagtaactttgaagaacaaagttagaagacttaaattactagatttctggtctcatttaaatatataattatcaagtgtatagtactggcataaggatagacaaataagtcaatggaacagaatgtgtaattcagcaacagatccacacatatttggtcacctaattataatccaaatattaccacaacagatggccttgtctataatagtgctagaacaacaggctattcctattgtgaaatgaagaacattgatctttacttcatatcagccataaaaatgaaattcagggaagatggccgaataggaacagctctggtctgcagctcccactaagattgacgcagaaggcaggtgatttatgcatttccaatggaggtacctgg

SEQ ID NO: 196135 - DNA, 556 bp, Homo sapiens
aatgagacaagaagtcgttaaagagtaaacatttataaacctcacatacatacaaagaaagcattttgagtggtctaaatctcctcttttaaagtagagcattgagaaacatcttaaagttgaataaacaagaaatagcaatgaatgtatgttattgaaaacctggaggtaactagcagaataaatacatagaactgcttaaaactggtctattttgagacaccccagaaggtaactagatcctgactaaagattctgatgaagaagasttggggctctattctgatatttcaaggcagctcaaccaggttctaaatagagaagtgcctaggagacgctaaccttcaagggggaaatctagactacccttctagaaaaggtcctgaagtttgcagaatgctcaagaagacatatcccacactaagagagctcctctatccctaaatagttaaggagcctttaaacttccagagctctataacggggtaactctgagcataactttagtgttcattaaaggaacatgtacaaaaatatatcaataaaagtctaggcc

SEQ ID NO: 196136 - DNA, 587 bp, Homo sapiens
aaaagaaaatgaaagatgagctggcatggcccagaawaaaataataaaaccatgacaaaaagtaccaaattgaatgtgacaaatacaataacatattaatttgttcatgctacagtgaacaaattaatatgttactttaatgttaatttaattgtttgtctcaatgaatgaacaattgagaaacttccatgtgacaggccctggggatatggcaatgacctaaagagtcaaaaatgcttgtcctcaaggagtttgtattctagtagggggagacagacaatagacaaatacacatgtgcacagatgcacactcatatatagtttgtcatatgctgattagtgctatgaagaaaataaaactgtgaaggggtttagggaattctggatgtcgagatgtatgtaattttatatagggcagttgggtccttcttgggtggatgattttagaacaaaaacctaaaggaggtgtaggataaggcatgcaggcatcaggatgaagagcttacctggcagaagcaacagaaagtttgaggagctgcagtgttccagtgtgactgcagaggggagagcaagacaaggcagagagg

SEQ ID NO: 196137 - DNA, 587 bp, Homo sapiens
aaaagaaaatgaaagatgagctggcatggcccagaataaaataataaaaccatgacaaaaagtaccaaattgaatgtgacaaatacaataacatattaatttgttcatgctacagtgaacaaattaatatgttactttaatgttaatttarttgtttgtctcaatgaatgaacaattgagaaacttccatgtgacaggccctggggatatggcaatgacctaaagagtcaaaaatgcttgtcctcaaggagtttgtattctagtagggggagacagacaatagacaaatacacatgtgcacagatgcacactcatatatagtttgtcatatgctgattagtgctatgaagaaaataaaactgtgaaggggtttagggaattctggatgtcgagatgtatgtaattttatatagggcagttgggtccttcttgggtggatgattttagaacaaaaacctaaaggaggtgtaggataaggcatgcaggcatcaggatgaagagcttacctggcagaagcaacagaaagtttgaggagctgcagtgttccagtgtgactgcagaggggagagcaagacaaggcagagagg

SEQ ID NO: 196138 - DNA, 499 bp, Homo sapiens
tgacaggccctggggatatggcaatgacctaaagagtcaaaaatgcttgtcctcaaggagtttgtattctagtagggggagacagacaatagacaaatacacatgtgcacagatgcacactcatatatagtttgtcatatgctgattagtgctatgaagaaaataaaactgtgaaggggtttagggaattctggatgtcgagatgtatgtaattttrtatagggcagttgggtccttcttgggtggatgattttagaacaaaaacctaaaggaggtgtaggataaggcatgcaggcatcaggatgaagagcttacctggcagaagcaacagaaagtttgaggagctgcagtgttccagtgtgactgcagaggggagagcaagacaaggcagagaggtgttggagatgaaatgagagaagtagcagagacttgatatttttagggccttgtgagccaacattggactttagttttaattctgggtgcaatgggcagtcat

SEQ ID NO: 196139 - DNA, 440 bp, Homo sapiens
ctactttttaaaaggtgtttttaaaagggctagtaacaaagacttgaagggcaccctgtaaccagcacgttttgacagaaaactgytacaataccaccagcagctcccttcctactctccacatattactggccacaaagactatgctacactgtggcttcaaactctgtataagactctaagagagccaacttcagcctggtgtttcctcatggagtccctcactaggttccacacatacatttgggcaagttccttaaagttgctatattacagtataaagtgagacgcagtcaacaaacctcacaatctttgcaagcctcactcttcaactagtcacagctgataactattctcctgaagtcttgtttttcagagaccatttaccccaggccactacaagccacagattctgagtatctcattttgtttcatcatgg

SEQ ID NO: 196140 - DNA, 440 bp, Homo sapiens
ctactttttaaaaggtgtttttaaaagggctagtaacaaagacttgaagggcaccctgtaaccagcacgttttgacagaaaactgttacaataccaccagcagctcccttcctactctccacatattactggccacaaagactatgctacactgtggcttcaaactctgtataagactctaagagagccaacttcagcctggtgtttcctcatggagtccctcactaggttccacacatacatttgggcaagttccttaaagttgctatattacagtataaagtgagacgcagtcaacaaacctcacaatctttgcaagcctcactcttcaactagtcacagctgataactattctcctgaagtcttgttttwcagagaccatttaccccaggccactacaagccacagattctgagtatctcattttgtttcatcatgg

SEQ ID NO: 196141 - DNA, 608 bp, Homo sapiens
gttgtgtttccatctggttccaaaaaattttttaatttccttcttaatttctttattgaaccaatggttgtttaatttccatgtatttgtattttctcaagtttttcttgttactagtttctagtttattacattgtgatctgagaaggtacttgataggatgttgattgtttttaattttttgagacttggtttgttgcataacatgtggtctattctgggaattttccatgtgctgatgggaaaagtgtgtgttctataactgttggattaaatgtctgtaaatatctgtttggattatttggtctattgtgcagattaaatctgatgttcatttgttgattttctgtctaaatgatctgcccactgcagaargtggagtgttaaagtccccaattataattgtattttgtctctctcttcacctctaatgatatttgttttgtaaatgtggatgctctggtgttgggtgcatacatatttacaattgctatattctcttaatgaactgatccctttatcattatataataatcttctttgtctctttttatgttttttgacttacaggggttttttgtataagtatagatacttctgcatgtctt

SEQ ID NO: 196142 - DNA, 559 bp, Homo sapiens
acaatcaatctaagcaataatcaaaatgattttaaatgattagttgaaaatgtggtaaagaatttttatagtagagtgattagactgatagcactttactcattggtgaatgtttacattaataaaaatagaacaaccagacattctgtgtttagtaatttaacacaatagaaataacacagaagcattattatttttgttctacaaaagttgaatataactctaatcaaacttctggttgtaattactcttctacaggaaatatgatgaattgcgaaaaaaagtaaacaacatcagaaaaagaccacttgccacacaccaaatgtgtgtcaatctattagacaaataacctggtcttttcaactagtcaatgccaaaaaataaaaacatctctaaargagtttttttctgtaactttttgtaacatgtttaaagagttcctgcgaaagcttttgctgcttcacaaaccttatctaccaaatccaagcattatgaaaaaaatctgatctctgcatgttaaatccagatatgcttttagcagccacactcataagaaaag

SEQ ID NO: 196143 - DNA, 613 bp, Homo sapiens
taattacagagctatggactattgagagccaagccattatgaggccaggattccaacctgaggcagaacaaaaataaagatacaagagggtcacaggaaggaaaaaaaaagggrggggggagaaatggaaatttatctttaggtcaaatctggaactgcatcttatctattttaataaatattgcctttaaccacttgtttgtttcttctttcctttgtgcccaagtgttcttcatttaaactttcaattaacaagtaataattttatacatttatgggctacaatatgatttttgatatatgcatacattgtgaaatgattacatcaaactactttacatatctatcacttcataaccttatcatttcttagttttgagaacatttaaaatctaatatttttgcaattttaaaatatgttattattaacaatggtctttctgctctgcaagagattactaaaacctattcctctttattaaaaccttgcatcttttcaccaacatctcccctttccctatccaccctccaacctacccttcctctaggagcttgcattcttttttaagttgtttttctttatttcttctaaaatcccaaattaaaacaaaaa

SEQ ID NO: 196144 - DNA, 613 bp, Homo sapiens
taattacagagctatggactattgagagccaagccattatgaggccaggattccaacctgaggcagaacaaaaataaagatacaagagggtcacaggaaggaaaaaaaaagggaggggggagaaatggaaatttatctttaggtcaaatctggaactgcatcttatctattttaataaatattgcctttaaccacttgtttgtttcttctttcctttgtkcccaagtgttcttcatttaaactttcaattaacaagtaataattttatacatttatgggctacaatatgatttttgatatatgcatacattgtgaaatgattacatcaaactactttacatatctatcacttcataaccttatcatttcttagttttgagaacatttaaaatctaatatttttgcaattttaaaatatgttattattaacaatggtctttctgctctgcaagagattactaaaacctattcctctttattaaaaccttgcatcttttcaccaacatctcccctttccctatccaccctccaacctacccttcctctaggagcttgcattcttttttaagttgtttttctttatttcttctaaaatcccaaattaaaacaaaaa

SEQ ID NO: 196145 - DNA, 620 bp, Homo sapiens
tgttcttcatttaaactttcaattaacaagtaataattttatacatttatgggctacaatatgatttttgatatatgcatacattgtgaaatgattacatcaaactactttacatatctatcacttcataaccttatcatttcttagttttgagaacatttaaaatctaatatttttgcaattttraaatatgttattattaacaatggtctttctgctctgcaagagattactaaaacctattcctctttattaaaaccttgcatcttttcaccaacatctcccctttccctatccaccctccaacctacccttcctctaggagcttgcattcttttttaagttgtttttctttatttcttctaaaatcccaaattaaaacaaaaaagcaaaaaggatatatgtgcagaatgtgcaggttttttacctagatatacgtgtgacatggtggtttgctgcatctactgactcaacctctaattccttcccatcatcccccacccctcaaaggccctggtgtgtgttgttcccctctctgtgtccatgtcttctcattgttcaacactcccttatgagtgagaacatgtgatgtttggttttctcttcctgtgttagtttgc

SEQ ID NO: 196146 - DNA, 620 bp, Homo sapiens
tgttcttcatttaaactttcaattaacaagtaataattttatacatttatgggctacaatatgatttttgatatatgcatacattgtgaaatgattacatcaaactactttacatatctatcacttcataaccttatcatttcttagttttgagaacatttaaaatctaatatttttgcaattttaaaatatgttattattaacaatggtctttctgctctgcaagagattactaaaacctattcctcttwattaaaaccttgcatcttttcaccaacatctcccctttccctatccaccctccaacctacccttcctctaggagcttgcattcttttttaagttgtttttctttatttcttctaaaatcccaaattaaaacaaaaaagcaaaaaggatatatgtgcagaatgtgcaggttttttacctagatatacgtgtgacatggtggtttgctgcatctactgactcaacctctaattccttcccatcatcccccacccctcaaaggccctggtgtgtgttgttcccctctctgtgtccatgtcttctcattgttcaacactcccttatgagtgagaacatgtgatgtttggttttctcttcctgtgttagtttgc

SEQ ID NO: 196147 - DNA, 632 bp, Homo sapiens
ataccttgcaacctagtttattgtcaatttgtttttacagagcatgagttagaaattaaatrctaatcatattacagagttgaataaataataaatcccatattgtagacagtgaaagccagatttctcactgttgaaaaatgaaggtgagttataaggaaaagagataactagaataaaaagtatgatgttggaagatagttgcagaaatcaatatcaaaattctccagtataaaaaagccagactccttggataacttgttgagtgatggactgaaataggggaattaaaagatgatcttgggggagctttagtgccaaaaagtaagagagcacaaaataaaaatagaaaataaataaagagagtatatcaaaagggcatataatccacctgaacattcccccagcagccaaagttagaataacttgaactaactaaataaatacaatattggattataatccccacaaaaataagtaacccttagtccacatgtatatacataagtgaatacataggttaaaggagaaagtgtcaactttttcttacaaaaaaaccaattaatacatatggaagaattaagggaaataaaatttcacaactaagttaaaataataattttcacaagcaa

SEQ ID NO: 196148 - DNA, 632 bp, Homo sapiens
ataccttgcaacctagtttattgtcaatttgtttttacagagcatgagttagaaattaaatgctaatcatattacagagttgaataaataataaatcccatattgtagacagtgaaagccagatttctcactgttgaaaaatgaaggtgagttataaggaaaagagataactagaataaaaagtatgatgttggaagatagttgcagaaatcaatatcaaaattctccagtataaaaaagccagactccttggataacttgttgagtgatggactgaaataggggaattaaaagatgatcttgggggagctttagtgccaraaagtaagagagcacaaaataaaaatagaaaataaataaagagagtatatcaaaagggcatataatccacctgaacattcccccagcagccaaagttagaataacttgaactaactaaataaatacaatattggattataatccccacaaaaataagtaacccttagtccacatgtatatacataagtgaatacataggttaaaggagaaagtgtcaactttttcttacaaaaaaaccaattaatacatatggaagaattaagggaaataaaatttcacaactaagttaaaataataattttcacaagcaa

SEQ ID NO: 196149 - DNA, 548 bp, Homo sapiens
aggaaaacattagacaaacccaaatagaaagcattctataaaataactcagtggtactctataaaattgtcaaagttataaaggacaagaacatattggggaattgtcacagattggaagaaaattaaactcagtgggaactccgggaagagagtgagagagaaaagcattagcgcaaaaacttggaaattcaaataccttttgaaaacttgttaaaaatatcagactaaggttaatttcttagctttaatgcaatgctgtggttatgtaagatgacttaaagaaaaccatgttatgtgcaagttctgtgcttttgttgttttgagcagctttactgagatataattcatatgccatacaattcactgatttaaagtattaattcaatgtattgtagtatgtctgcaagttctgaaaatgatggcacaatctgatttgacataatttcatgctctctaaayggaaacttacatctattactttccctcccctcaatattccctattcccatcttcaagccaccacttattaactttgtatctctaaaa

SEQ ID NO: 196150 - DNA, 548 bp, Homo sapiens
aggaaaacattagacaaacccaaatagaaagcattctataaaataactcagtggtactctataaaattgtcaaagttataaaggacaagaacatattggggaattgtcacagattggaagaaaattaaactcagtgggaactccgggaagagagtgagagagaaaagcattagcgcaaaaacttggaaattcaaataccttttgaaaacttgttaaaaatatcagactaaggttaatttcttagctttaatgcaatgctgtggttatgtaagatgacttaaagaaaaccatgttatgtgcaagttctgtgcttttgttgttttgagcagctttactgagatataattcatatgccatacaattcactgatttaaagtattaattcaatgtattgtagtatgtctgcaagttctgaaaatgatggcacaatctgatttgacataatttcatgctctctaaacggaaacttacatctattacyttccctcccctcaatattccctattcccatcttcaagccaccacttattaactttgtatctctaaaa

SEQ ID NO: 196151 - DNA, 404 bp, Homo sapiens
ataatagctaattaataataatagtcattttaatagtatttaacttaatcttaggtatcaactgtactaaatgtattctttgactatcatamctataatactttattatatttaaactttataaactcaattattaaatgctagtgagtttttaatatgcgtcagcttccagaaatgaagatgactgtctcatacttccacctcacgtctgctacttttctcttacaggagagctatctgaggcctttctttttttttttctttttgagatggagtctcactctgtcacccaggctagagtgcagtggcaccatcttggctcactgcaacttctgcctcccgggttcaagcaattctctttcctcagcctcccgagtagatggggttacaggcgcatgctgtca

SEQ ID NO: 196152 - DNA, 562 bp, Homo sapiens
ttaccactattactatcccacagctatattatgattgcaccgtaagctacatcaggacaagaagtgaatcttgttgaacatggatattctgatgtttattttactatacttgtaatttaaattaattaactataaaaataaagtgtctgatgtttattttactatacttgcaatttaagttaattgactataagaataaagagatataaatacatttattgaataaatgatatgtgatgaatatgttatctatataggcatgcctagataaaaatacattgtttcttgctccaaaagtaattatttttaatgtgccagtcatgttcaataaaatctatagtaattcagtttagttgttcgggggccatgccacactttactgtgatgtattgtcttttagataagactagattcagtttgctaaaattctgactatgtgtacataaragggagaatgtctgtctctgtgtgtgtgtgtgtgtgtgtgtgtatgtatgtgtatatatacacatatgtagagaaggagagcaaagttatcttgagcacatatatgattacaaat

SEQ ID NO: 196153 - DNA, 550 bp, Homo sapiens
tatatagttgtaattatataattatgtagtaattatataacatctatataattatatatgtataatatataatayacatataaattatatatatttataataatgttgtgtgtgcgtttgcatatatatataaaattagaaattggctcatacaattaccgaggctgagaattctcatgatttgccttctggaagctacagatccaggaaagccaatggtgtagttccagtccaagtctgaaggcctgagaactaggagccacaatgacataagtctcagtccaagagtaggagaaatgggtaattcattgtaaacagtcagtcacaaacagagaaaattctcccttgctccttctctttgttctagtcaggtcttcaacagactggataatctggatgatgtcctttttttttttttttttccttgagatagagtcttgctctgtcacccaggttggagtgcagcggcacaatctcggctcactgcaacagccgcctccagggttcaaggggggggccggcctcagcctcctgagtagctggggttaca

SEQ ID NO: 196154 - DNA, 550 bp, Homo sapiens
tatatagttgtaattatataattatgtagtaattatataacatctatataattatatatgtataatatataatacacatataaattatatatatttataataatgttgtgtgtgcgtttgyatatatatataaaattagaaattggctcatacaattaccgaggctgagaattctcatgatttgccttctggaagctacagatccaggaaagccaatggtgtagttccagtccaagtctgaaggcctgagaactaggagccacaatgacataagtctcagtccaagagtaggagaaatgggtaattcattgtaaacagtcagtcacaaacagagaaaattctcccttgctccttctctttgttctagtcaggtcttcaacagactggataatctggatgatgtcctttttttttttttttttccttgagatagagtcttgctctgtcacccaggttggagtgcagcggcacaatctcggctcactgcaacagccgcctccagggttcaaggggggggccggcctcagcctcctgagtagctggggttaca

SEQ ID NO: 196155 - DNA, 570 bp, Homo sapiens
caggcctggctggctttgccacttgctggttgttggggcccatgactcatggatctgttgcctacaagagacacacttcacctataaagacacacaggctgaaaataaagggatagaaaaagaaattccaggccamtggaaaccaaaaaagtgcaagagtcgctatacttacttcagtcaaaatagatttcaagacaaaactataagaagagagaaaaagtagtgaccttctgtataatgatggtttaattcagcaagaggatataacaattatataatataaaaaatatatacatattacatgcacccaacactgcggcacctagatatataaagcaaatattattggagctaaagagagagataggccctgatacaataatagatggaaacttcaacaccccactctcagcactggacagatcttccaacacatttcatctgacagttgtagaatacatattcttttcctgaaaacatggaacattctcaggatagaccatatgttaggtcacaaaacaagtcttaaaacattcaaaaaaattgaaataatatcaagcatcttctctg

SEQ ID NO: 196156 - DNA, 584 bp, Homo sapiens
atctgacagttgtagaatacatattcttttcctgaaaacatggaacattctcaggatagaccatatgttaggtcacaaaacaagtcttaaaacattcaaaaaaattgaaataatatcaagcatcttctctgaccatactgaaataaaactagaaatttataacaagatgaattttggaaactatataaatagatgaaaattaaacaatatgtcctgaatgrccagtgagtcaacgaagaaattaagaaggaaattgaaaagtttcttgaagcaaatgataatggaaacataacatatccaaaacccatgggatacagcaaaagcagtgctaagagagatgtttatagcaataagtgcttacataaaaaagacctgtaatcccagcacttcgggaggctgaggtggcagatcatttgaggtcaggggctcaagaccagcctggccaacatggtgaaaccctgtctctaataaaaatacaaaaaattagctaggtatggtggtgtgcacttgtaatcccagctactcaggaggctgaggcaggagaatcgcttgaacccgggaagcaggggttgcagtgagccaac

SEQ ID NO: 196157 - DNA, 584 bp, Homo sapiens
atctgacagttgtagaatacatattcttttcctgaaaacatggaacattctcaggatagaccatatgttaggtcacaaaacaagtcttaaaacattcaaaaaaattgaaataatatcaagcatcttctctgaccatactgaaataaaactagaaatttataacaagatgaattttggaaactatataaatagatgaaaattaaacaatatgtcctgaatgaccagtgagtcaacgaagaaattaagaaggaaattgaaaagtttcttgaagcaaatgataatggaaacataacatatccaaaacccatgggatacagcaaaagcagtgctaagagagatgtttatagcaataagtgcttacataaaaaagacctgtaatcccagcacttcgggaggctgaggtggcagatcrtttgaggtcaggggctcaagaccagcctggccaacatggtgaaaccctgtctctaataaaaatacaaaaaattagctaggtatggtggtgtgcacttgtaatcccagctactcaggaggctgaggcaggagaatcgcttgaacccgggaagcaggggttgcagtgagccaac

SEQ ID NO: 196158 - DNA, 584 bp, Homo sapiens
atctgacagttgtagaatacatattcttttcctgaaaacatggaacattctcaggatagaccatatgttaggtcacaaaacaagtcttaaaacattcaaaaaaattgaaataatatcaagcatcttctctgaccatactgaaataaaactagaaatttataacaagatgaattttggaaactatataaatagatgaaaattaaacaatatgtcctgaatgaccagtgagtcaacgaagaaattaagaaggaaattgaaaagtttcttgaagcaaatgataatggaaacataacatatccaaaacccatgggatacagcaaaagcagtgctaagagagatgtttatagcaataagtgcttacataaaaaagacctgtaatcccagcacttcgggaggctgaggtggcagatcatttgaggtcaggggytcaagaccagcctggccaacatggtgaaaccctgtctctaataaaaatacaaaaaattagctaggtatggtggtgtgcacttgtaatcccagctactcaggaggctgaggcaggagaatcgcttgaacccgggaagcaggggttgcagtgagccaac

SEQ ID NO: 196159 - DNA, 509 bp, Homo sapiens
ctaacagctgctatttatggactaaaaatgtggacctatccataaaagcacaaaatgagttaatggaaaaacatactaaaaccaacaaatacaaatattcctcattttaaaagtttgcattatattatttcttttgttcttattgttatgcttctgcataaagaatcattaatctgtttattaatgcatgcattctacaatcatttactgagtttctactttatgtgagacatggaagcactaagaatataatagtgagcaagcaaaaatgaatctgcttataatcaagtgcagagcccacataagygagacaagtttgcccagagaaacacagtattttgggatgggaaaagaaaatattagaattttgatttgcatatatttttgatgattacctttttaaaaatctttcttgctcttgctatgcttcataagtgtgtgtgtatatgtatatatacacacacacctatataaacactggtgtatgtataaatatatgtaaatatata

SEQ ID NO: 196160 - DNA, 586 bp, Homo sapiens
atgtgattgaccattgctagcattacaataactctatacattttgtcatggggataataaattttccttggattaaatagaatgaagttttatggttatttattaacaacgtgactatcacagtgtatgccatgttctaagtattcagcagaagttatttttcttatcatagcccatttaaccctagaagtgttacaaaaattytatctgaaattattctgcatggttctaacataaatgctattatatatagaaaaaacatcacgtttgatcaactgcctagcctgaggaatttgcaggagaaattgataaccagtgctaattatgtgccaattccattttcattttaaaaataaaattagcattattttgctagatatctcagattatggaagacagatgagaaaccactttttcttgccctgtaacatataactttttatgttatctatttattttgcaaaaatgtttttaaaagttgatattagttcaaactggaaattaaacatttcattactaaaatcaataaaatatgtaaaatgaaatctagcatactgaaggattacaaaaatgcatgtatcattct

SEQ ID NO: 196161 - DNA, 640 bp, Homo sapiens
tacaaaacagcactgtaattaaggaataaaaaatgatttggatgaattgatgaccgttaagaactttatcctcatttgaattcttttaacaacwactgtctgaaccatatttatggcatttatttttaactgtgttcttttgcatttttgtgtacctcttctgtcaatcctagtgcactgtaattttaaatagctcaaatatagcctctatctttgcctttcctgttttttgttggcatggaggaaaggttcacaaatagtagccttttgataaatttcttagataaatgaagggtaaaatagaactataatttataattttggttactgttaatacaattttttataacttctttcttttgtgcttatgttgacatgttttataagaagaaatattataactgtaaaatcatcccaatggcttataaatatcatgttataccataaatatacactcaaatcacaaggttactaaaaagtcaccacctggtagtattgcaacctatttgctggtaaatcatttccaacttcatgactgccccaaatcaataacagggacctaattatgttccaatattatgttgttattcctttcccaggacaatatgaatctctatgaaaacaagcagctgttaaatca

SEQ ID NO: 196162 - DNA, 520 bp, Homo sapiens
atgagtaacaagtgttacagaccacagttgttcttggaaataacaccaacatatcccaaggtattcaggggattgacatgggtattaagcctgctcttgaatctttttgctaggtatrtattctttcatagatacatattctctttgtaactgttagcacactgtctgtcagctccacaatataaaatgttgaaacttccaacctctaactcccagcaaagtctactctagccattagaccttccagaattgacattgaaaaccccactatattttctggagatcttaataattaacctctgacatcctgttctctgttttatttattgatatctctccaattttgttctgatattcccttactgtttttaaagacagttatatggtttggctgtgtccccacccaaatctcatcttgaattgtagctcccataatcctcaggtgtcatggaagggacccagtgggaggtaactgtatcatggaggtgggattttttgtgctgttcttttgaaagtgaaa

SEQ ID NO: 196163 - DNA, 520 bp, Homo sapiens
atgagtaacaagtgttacagaccacagttgttcttggaaataacaccaacatatcccaaggtattcaggggattgacatgggtattaagcctgctcttgaatctttttgctaggtatgtattctttcatagatacatattctctttgtaactgttagcacactktctgtcagctccacaatataaaatgttgaaacttccaacctctaactcccagcaaagtctactctagccattagaccttccagaattgacattgaaaaccccactatattttctggagatcttaataattaacctctgacatcctgttctctgttttatttattgatatctctccaattttgttctgatattcccttactgtttttaaagacagttatatggtttggctgtgtccccacccaaatctcatcttgaattgtagctcccataatcctcaggtgtcatggaagggacccagtgggaggtaactgtatcatggaggtgggattttttgtgctgttcttttgaaagtgaaa

SEQ ID NO: 196164 - DNA, 661 bp, Homo sapiens
cacttctgtgttcccaagttacgtgggttgttacctactagcacgtattttgttttgtttttttatttgtatatgtgtttcttttgccttggaacttctttggccatctggtttaacctatggactctctcaaaataaatgttttaaataaaaaatgtttttaaaatgttctaaataatatatattattatagaagaaatccaattataatgaaatatatatagaatattagatgcatgctatagataatatatatatttttgattaatgtattaaatgtaaaaattattggttgatcttataaatgtcataatttcaaaataatggtgagaataaatatattaggaaatatttacarttagtgtcatgcattatgaaaatatctgcacattctcttggcgaaaaagttacaagcaccactaatagtatcgtgatttattgctttacatacataattgaagaaaatgtaaattttagttataggttagtgggggacaaatacaatttttttaatccaaaacgaggggctgcagaattctctgttatctatggtcaccaggtttagtatctctaactaacaggaaagtttttggtattgctgtgtttgcatcaaagttttaaggaagtaggtattgttgttgttattatttgtttgtaatgt

SEQ ID NO: 196165 - DNA, 291 bp, Homo sapiens
ataagctacgagtgggtcagtatttttggcaggtgaggtttatatttcatgtgcatgagagttgcctgtacattatctattcttctcttattcttgttggtttttgttttttttctaatgcagttctgatttgttcaggttaccaatgtgtacaatcttctttcccactcccttgaagctagaagcaatcatatactgaattctggatcaygaagacacggtttagattggacttccaagataggattttcataataaaaagggttatgttcagttgtcgtgtgtcatttt

SEQ ID NO: 196166 - DNA, 617 bp, Homo sapiens
tattcttctcttattcttgttggtttttgttttttttctaatgcagttctgatttgttcaggttaccaatgtgtacaatcttctttcccactcccttgaagctagaagcaatcatatactgaattctggatcacgaagacacggtttagattggacttccaagataggattttcataataaaaagggttatgttcagttgtcgtgtgtcattttcatgttatactttcctgttcttttttgatgaaaacataaaagaattttctggaaatgcattcaccatattttgacactgaagagaagggcaaggaggaagagcctaagccctggatggcttcttcactgtgctgctgttcttggggggatccatggattatgaatcagttaagggataaaacaaaagataatgagacaagattgggggaattattattattgatagattttaggttagactatgtggctcaacatgagaaccaaaggattttgctaactaaacctcacagttagctaaattttccacccaattacaagcwatgctacaccagggaaggtgtctctgtgtggtaggagaagaatctgctcttagaggagcaatgaagactgcctacttcacatg

SEQ ID NO: 196167 - DNA, 617 bp, Homo sapiens
cttgtctaccctatacccaaagaatgataaaataaaatatacatatcttaatgccttcctgaagccataagcttgttctagttcactagggatccatctctgcctgtatgatctatggtgttatggacagaggggagcagaatgcagccaattataaccatggagcaaatcctgggaagaagagatgtaatacaggctcaaggaatgatttgctgctgagagggttccattagccccggaaagggttagagggaaaaggttcacagcagaagagtgcagatatgtgcctgagaatgtcaggaagggctgccaagggtgaaacaaaggggaacttcccacctggaaaatgttcctcctgacagcagtctgttccaagcgaaatcaaatggtttgcaaaaatgtgttgggaatcacaaatgtttggtgtgcttgggatgtgaaattgttcaaygatcaggccttatgcatagcctttggatagcttatgggtattgatctttggatcttcatagagcccaccgggtttgttctcatgcccacacatcaaaactgagatattctctctgagcctgttcaaataaatgaagcaggaccctcccaccaatagctattaccct

SEQ ID NO: 196168 - DNA, 567 bp, Homo sapiens
tttgtaagcctttcagcaatagcgggtgatatatttgctgcctccctccttcctctcctctgtgagcagggatcactttgccttcttttatcctttgctgtcatctgaggtggctgtagattctctgttttgtttactttttttaggttttcccttggctcccgccttctggaacccttttgcactctgggcagaaccaatctaggaaatggcagccagacctctgggtgggatttagaccctagaggaggaggagcaaagaaataccattcccggattggtcgtgggtggagagactgcaatgtcttctccttgttttgggctcttcctccgtgcccaacttttcttcccagacaggtgaagaaaggtccagggaaacaaaaacaaaatctggcacttggccctcattcaagaaatcgagaattcaagaaacaagtcccttgatttctcagtttcactggycctcccctggccttgcagcctgaagctggcgtctggaggtcatctaggcagaggcctagatgtccttggcaaatccttttcctcttagaacttgtcctaggaagt

SEQ ID NO: 196169 - DNA, 390 bp, Homo sapiens
attcaattggttatattccactaggcttcagcagttcagatagaattatttattttgcatttaaaggtaaggactacagtataaaataatgcccaaaaaacctgttgaactcttagatttttatcttggttttggaaccttccatctgygtgcagaattcattttattctagaaatgtgttacctttctactcctcaccatgtgatctgtgtatggcactctaggtaacaggagctgacatttattgttaaacctgcttcttgaatccctctgagggagaccataaatgtctctgatgttattccatatagagacttaaaatggcaatgttatctatatgtgcaattatgattcgtctatttctctcaaaagattacaagtgctggaaag

SEQ ID NO: 196170 - DNA, 457 bp, Homo sapiens
tctttttgcatccatttcttcaaaaaataattttacmaaacaaaatttgtcaatgaattatctccacattggaaggctacctcaacatagttctattccagtacagaatataagattatccaatagtaaaaaagggaaccccatcacaagattcttcccagaggtcaacatattccaaaatgtaattatagaatttcaaaactaaatgttttatgcctttcatctcctatcatctagtttgttcagttcttcctttgcttttgtgggattaaatttcatcgtttttctggtgtcaaccttttctttcaatagttacaatttgatatccatttcaaaagttgaaattatttggtgttcccttacattttttttaatgaaagcggttttattttattttattttttaacttttattttaggtgtaggggtacatgtgcagatttgttatataggtaaac

SEQ ID NO: 196171 - DNA, 457 bp, Homo sapiens
tctttttgcatccatttcttcaaaaaataattttaccaaacaaaatttgtcaatgaattatctccacattggaaggctacctcaacatagttctattccagtacagaatataagattatccaatagtaaaaaagggarccccatcacaagattcttcccagaggtcaacatattccaaaatgtaattatagaatttcaaaactaaatgttttatgcctttcatctcctatcatctagtttgttcagttcttcctttgcttttgtgggattaaatttcatcgtttttctggtgtcaaccttttctttcaatagttacaatttgatatccatttcaaaagttgaaattatttggtgttcccttacattttttttaatgaaagcggttttattttattttattttttaacttttattttaggtgtaggggtacatgtgcagatttgttatataggtaaac

SEQ ID NO: 196172 - DNA, 499 bp, Homo sapiens
tcctgctgttttgccccagcccaaatagatcacattctcagttgtggaatgagtccctaacagaaagtcaggagactgggatgattatgcagtccagatgcttactagctggacattgccactcaacttccctgagtctcagttttgctgtctataacctggggataacaatacttccctcacagtgttccagcagaggttaaataagtttatagtgacaaacttgccctatggagtgtctggcacatgtggcagatgttgcagttactcagtggcaataattcagcaccctgtatmtgagctccgtcctgtgatcttgggtgtgggggtggcaatgaaaagagaggagaatgcccacaacggtctaccctcagagttttgactcaccatgcaatcaagagacttcaacttgctttcaaagagtttctaagtgcagatatgacctaaggaaatggggtgaagagagtggggtgctggtaccctcccctgcactcacctg

SEQ ID NO: 196173 - DNA, 611 bp, Homo sapiens
cttctctgtggtcactgaaataatgatactgtcacttaataacatttactgagagcttactatgtatactttgctagtattttatttgtattatttacattctcttgaaatasataccatattatccccatcttatggatgacaaaactgagacatagaaaggtcatgccacatgttcaaggtcacatagtgagtggcaagctcaaatttaaactctagcagtctggctctcctgagagaccttagagtgggagctcattttaaatggaaccccagaagaaacacttaaaatgtctatcttccttaacccaaggcttcttaagaacctaaattgtattttgtattcatctgaagaacctctaattgtactctcaatttaaggttcttaagcatgtaattgtactcttaaagttttctttaaaactgcatttgccccttagaccacaactaaaatctgccacctggctgctcatcctgccagaaaaacaagatggatggcattttagagttcatcttaaactttgcaattccctgggctcttccgaaagaccaaaagtctcactctgtccatccttatgtgaactcatgctatctaggaccctgcttgtgca

SEQ ID NO: 196174 - DNA, 457 bp, Homo sapiens
gatagaacttcctcttctctgtggtcactgaaataatgatactgtcacttaataacatttactgagagcttactatgtatactttgctagtattttatttgtattatttacattctcttgaaatagataccatattatccccatcttatggatgacaaaactgagacatagaaaggtcatgccacatgttcaaggtcacatagtgagtggcaagctcwaatttaaactctagcagtctggctctcctgagagaccttagagtgggagctcattttaaatggaaccccagaagaaacacttaaaatgtctatcttccttaacccaaggcttcttaagaacctaaattgtattttgtattcatctgaagaacctctaattgtactctcaatttaaggttcttaagcatgtaattgtactcttaaagttttctttaaaactgcatttgccccttagacca

SEQ ID NO: 196175 - DNA, 466 bp, Homo sapiens
atgtactttgggtgtggttggccccactccaggcttcaggggtgaacaactggctaaggcatgatccataaagacatcctattcccctggccacagtaattagttcagagaaggaacatggctcaaattgatccaatgggagcccacctggaacttttcctggtactagtgagatggagtttgagtctggaaatgctgggggctctcttgccacyacaagcaaaagtgtgtctgaaactgaagctaatacagagaagagcaaagatgtgtcattccaggtggcattggaacaccaggtggcattggagcctccagtgtgcctgcagtcagtgtaatcctgggctttttaatgagatcaaccaataaacttccttttcacttaagcttggtcaagataggtttctaccccttgtaatcaggaaaatcctgactaattcagattttccttcattctcagttctccggt

SEQ ID NO: 196176 - DNA, 537 bp, Homo sapiens
ctctctgtcacacacacacgcatgygcacacacacagatacttccttagttgtatcactctggttttcatacacataattcctctttccctgctttataagctctgattctcaagtgatgttactaggtgagctatttgatgaccattactcagtggaggctagaaagggcattcctggatcctgatattcttccggtttccttgcctttgcttagacatacaagctcctttgtgcttggcagtttgggttaagggtttattgactcctatcttgagacatactctgatgagagtaatacttgtatgcttgacatagaaaactctggctaaccttattaaattacctagcttggcaatgctaaaaggtagaggtgttacagattttgtggggcctgaaggtaatacaagacaaataatataaaattacaaataaaaattatatttagagccttaaaagggagacatgcacgtgaaaggccctgaagctttaggttcactaatttcatgataaatttaattcttttagagtggggtcc

SEQ ID NO: 196177 - DNA, 537 bp, Homo sapiens
ctctctgtcacacacacacgcatgcgcacacacacagatacttccttagttgtatcactctggttttcatacacataattcctytttccctgctttataagctctgattctcaagtgatgttactaggtgagctatttgatgaccattactcagtggaggctagaaagggcattcctggatcctgatattcttccggtttccttgcctttgcttagacatacaagctcctttgtgcttggcagtttgggttaagggtttattgactcctatcttgagacatactctgatgagagtaatacttgtatgcttgacatagaaaactctggctaaccttattaaattacctagcttggcaatgctaaaaggtagaggtgttacagattttgtggggcctgaaggtaatacaagacaaataatataaaattacaaataaaaattatatttagagccttaaaagggagacatgcacgtgaaaggccctgaagctttaggttcactaatttcatgataaatttaattcttttagagtggggtcc

SEQ ID NO: 196178 - DNA, 537 bp, Homo sapiens
ctctctgtcacacacacacgcatgcgcacacacacagatacttccttagttgtatcactctggttttcatacacataattcctctttccctgctttataagctctgattctcaagtgatgttactaggtgagctatttgatgaccattactcagtggaggctagaaagggcattcctggatcctgatattcttccggtttccttgcctttgcttagacatacaagctcctttgtgcttggcagtttkggttaagggtttattgactcctatcttgagacatactctgatgagagtaatacttgtatgcttgacatagaaaactctggctaaccttattaaattacctagcttggcaatgctaaaaggtagaggtgttacagattttgtggggcctgaaggtaatacaagacaaataatataaaattacaaataaaaattatatttagagccttaaaagggagacatgcacgtgaaaggccctgaagctttaggttcactaatttcatgataaatttaattcttttagagtggggtcc

SEQ ID NO: 196179 - DNA, 522 bp, Homo sapiens
ttttataaggaattccattttctagaaagagaaaacagcaattctgcttaaagtaaaggtacagggggacccttggtttcctccttgtctttcaagtgatctcctgaaataccttatcagaacttcccaggaaaacacagtgtgaaaggcactgagaaagatgatctctatggtctctctagctttgacagtctccatcttcttgctactcaaagtgtggtcctcagcyagcagcaagcatttgggagcttgttagggatgcatcatatcagaccctacctaagacccactgaatcagaatcagccttttcacaagatccccaggcaattcatccaagtttgagaagtactggtctgtacagttctgtgatccagagagctaagtgacaagaagaccacgggagcatcgtgactttcatcgtagaatgtgggcatggtcagttggtgtaggaagtgtggaccacatctctttcttgcctcggtgcactagttgtatccctgatggggaaccagtcatggtaa

SEQ ID NO: 196180 - DNA, 540 bp, Homo sapiens
cttccccccacccaccaagttatccttaaaaactctgctccctgaatgcttggagagactgatttgagtaataataaaactctggtctcccgcacagctggctctgcatgaattactctttctctattgcaattcccctgtcttgatgaagtggctctgtctatgcagcaggcaagatgaaccccttgggtggctataaatttggtttgcccttgtggctacctccccagcgttcagtctcccctcctccctcagcgatggatctggaagccagcccaagtggctgcctagttgtcttggactgggggctgactctggtactctctctctagcagggcactgctgacccaatgtgcatggatttaattgcaatggagaaatagtcctggggagacgtcttttaactatagccctatsacagggtgtctgtctgtagccccactgtggggtgtctggattggtgagtatcctaagcgctgccaacacctccttccttctcctaactggttatgtatccctatggtggggtgtctgtggccc

SEQ ID NO: 196181 - DNA, 570 bp, Homo sapiens
aagatgagctaattgtggaagagaatctctttgcctatccttaccggaaataggcccatgtcttttggactggaagcaagactgtggatgcaagtggggagagagccacacctctcaccttcatatattatagcaatagcaggaaaaatcctgatgatatgcagtgttggtggtggttgtatttgtggtgtaggcaaggggttttagtcactgtaatgaagtttgtgactaaatgctggagttagctccagctgtatgctcaaaggagaggaaagtttaagctacaaatgtcttatgtccggagtagcctcccaaatagttttcttgcctccggggcactgaagcctgctttaatggytcataacagctaattgtgcatgcctcttcatagtgttcagtgacatcaaatttgcaagcttgaaattagccatggtggaaatatttacactacagaaattggcaagcaccatgagtcaaggcgtttgggttttccctgaagatctgatttgtcagcacagtacttcaccatgtgcactcccatccccctacattttactccacagctgccgt

SEQ ID NO: 196182 - DNA, 498 bp, Homo sapiens
agcatgacaggtgagagagaagggggaactgccacacacttttaagccatcagctctcctgagaactcactcactatcatgagaacagcaagggggaaatctaccgccaygatccaatcacctcctgccaggcccctccaccagcactggagatgacaatttgacatgagatttgggtggggacacaagagccaaaccatatcagacaggtagtaaatcaaataccgtcttcccatttgtttcttctgccaggtgatgtttttgcctttagtattgcttgaagacagatggggttcctggagagccagtgcccagctggtggtcaggaaacggggcccagagaatgtgggccaaagggtagaagccccggcctggagaaaggctgtgggtgacactgtgcccaaacaggagaaggccctcagaaaaattctgttggaaatccaatgcttcaaagggctagaggagcacaagggaatcctttcatcacagaaggctatc

SEQ ID NO: 196183 - DNA, 498 bp, Homo sapiens
agcatgacaggtgagagagaagggggaactgccacacacttttaagccatcagctctcctgagaactcactcactatcatgagaacagcaagggggaaatctaccgccacgatccaatcacctccygccaggcccctccaccagcactggagatgacaatttgacatgagatttgggtggggacacaagagccaaaccatatcagacaggtagtaaatcaaataccgtcttcccatttgtttcttctgccaggtgatgtttttgcctttagtattgcttgaagacagatggggttcctggagagccagtgcccagctggtggtcaggaaacggggcccagagaatgtgggccaaagggtagaagccccggcctggagaaaggctgtgggtgacactgtgcccaaacaggagaaggccctcagaaaaattctgttggaaatccaatgcttcaaagggctagaggagcacaagggaatcctttcatcacagaaggctatc

SEQ ID NO: 196184 - DNA, 498 bp, Homo sapiens
agcatgacaggtgagagagaagggggaactgccacacacttttaagccatcagctctcctgagaactcactcactatcatgagaacagcaagggggaaatctaccgccacgatccaatcacctcctrccaggcccctccaccagcactggagatgacaatttgacatgagatttgggtggggacacaagagccaaaccatatcagacaggtagtaaatcaaataccgtcttcccatttgtttcttctgccaggtgatgtttttgcctttagtattgcttgaagacagatggggttcctggagagccagtgcccagctggtggtcaggaaacggggcccagagaatgtgggccaaagggtagaagccccggcctggagaaaggctgtgggtgacactgtgcccaaacaggagaaggccctcagaaaaattctgttggaaatccaatgcttcaaagggctagaggagcacaagggaatcctttcatcacagaaggctatc

SEQ ID NO: 196185 - DNA, 498 bp, Homo sapiens
agcatgacaggtgagagagaagggggaactgccacacacttttaagccatcagctctcctgagaactcactcactatcatgagaacagcaagggggaaatctaccgccacgatccaatcacctcctgccaggcccctccaccagcactggagatgacaatttgacatgagatttgggtggggacacaagagccaaaccatatcagacaggtagtaaatcaaataccgtcttcccatttgtttcttctgccaggtgatgtttttgcctttagtattgcttgaagacagatggggttcctggagagccagtgcccagctggtggtcaggaaacggggcccagagaatgtgggccaaagggtagaagccccggsctggagaaaggctgtgggtgacactgtgcccaaacaggagaaggccctcagaaaaattctgttggaaatccaatgcttcaaagggctagaggagcacaagggaatcctttcatcacagaaggctatc

SEQ ID NO: 196186 - DNA, 298 bp, Homo sapiens
caaaatagttggaaatatgagtctgtcagaaataggagtggttcatgagagatctgacatggaaataaaaatttgggatttagcatttaagtggtaattgaaaccctaggacccttggtagtagatgagatgtctaaggagagtatatggagtaggaaaacacctcaggcagtcttgagcaatttcaacatgtaacagtcgaggtgaaggacaccacaaaggagactgggaagaacttaagagagaaactgcagagaaacggggagagtgytgtgccgcagaagtcaaaggaacacag

SEQ ID NO: 196187 - DNA, 352 bp, Homo sapiens
ttacaaaggaaagggctcaataatatcccattgaatgtatataccatgctttctttattcatccatcagtggacatttaggttgcttccacctcytggctgttgtgaataatgacacgggagtgcaggttattcagccttaaaaaagaaagaaatccagtcgtgggcgacaacatggatgaaccttgaggatattatgctaaggaaataagccagtcacaggacaaatactgcatgattccatatataggaggtacttgcagtagtcaagctcatacaagcagaaagcagaatggtggttgccaggagctggggagggagaaaggggagttactgttcaatgggttcagagt

SEQ ID NO: 196188 - DNA, 457 bp, Homo sapiens
ctttcccatcctggctcaamtcaaaccccttctacatctgctccttttaggggaaagaacacagctctccaacccactcagacctagcttcaggtcctgcaaggtctcagcaaagtcacttgacctttctgagtttctcttctgcctctgcaaaatgaagacgatatggataagaaagtctcaggtttggctgctcgtcagaatcacatcagggagctttgaaaaaacacccagggcctgggccaaaccacccaagaagttctgattcacttgctctggggtgtagcttggacacgggaatctttttagaagctccccaggttgttgcaagagtagccaaggttgagaaccagtcatatagataatgtctaagaccccatccagcttctacaattcctccctgtgtccggggactgtggggtcatgtgcctttattgctggatgctgaagacaagat

SEQ ID NO: 196189 - DNA, 535 bp, Homo sapiens
acctctccaggtatgagtcactagtccatgagaggacaataataaatgatggaagcactagacactcattagcagagtggtttattaagaactgatgaaggttctctgctcccaggcagatattattgcaaaaaaacacgtaggcacagggtctaactccatcatgcctaaattcccattatttcatgcttatcccgtgcataaagttctgtgagcagcagacagttgtggcatttgctagaaggccagtctttattgacaggaggagaacatctrtctcaagcaaatgaaggtcatcattaataatttatgggacagtgggggttaggcatcctcacatactaatttttctagaggaacatggccttttcccctgcagggattgtttgggtattctgagtttctgtgtattttagtcccaaattcaggtgcatggaaaccattgacaaaatagaccctttaaatcagactccaagttgggacttcctttcttatttttcttccttttttaacttaaatttttgagataattgta

SEQ ID NO: 196190 - DNA, 401 bp, Homo sapiens
gctttcttcgacttttgacacttatcttttcctgctatatagcttcarggttttatgtcacgcactcatagtttaactttctaagttcaaaactttaagctagagcattctcctggcaggtacttgcaaattttctggactttgatgttccataagcacctcaagaccaatacattaagaaatgaattccaccttctcaacttctcttcttactgcacttatgtgccgtaaaatgaaatagtaatgaaagtattatagtatgcattgatggtaaattaggtaccaagtaatttcagagtatatattttgatgaaaggacacatacatcctcataaattacacaccaacaacgtacccataaaaaataacaatttaaaaaacttttaaaaaaggacgaatat

SEQ ID NO: 196191 - DNA, 488 bp, Homo sapiens
agagcatggtcctgccaccttcattttgggcttctgatctgtagaactgtgagaaaatatrtttctgttatttaaatcacctagtaagtggtactttgatacaacagccctaagaaactaatacagttacatagtattcgtatgacttattgatgttgatgttaaccttaatccctagtctcttgtagtgtttgtcaaacataatgatgcagtattaaatcttagctacataaaattaactgtagtaataagggatcactgcaataattttgtagccaccttctattactattgtggtgagctcactgttgcaagtacctgcttaaagcatcatgtaatgccaatcatctccacacgagcagttctccacagtaaatttcatatctcagtaaaaactgttctctcatggttctcaagtattttttgttgtgtttagtgcaatactgtaaaccgtgaataaccatgaaaccaaaaggaagtgccagtag

SEQ ID NO: 196192 - DNA, 488 bp, Homo sapiens
agagcatggtcctgccaccttcattttgggcttctgatctgtagaactgtgagaaaatatatttctgttatttaaatcacctagtaagtggtactttgatacaacagccctaagaaactaatacagttacatagtattcgtatgacttattgatgttgatgttaaccttaatccctagtctcttgtagtgtttgtcaaacataatgatgcagtattaaatcttagctacataaaattaactgtagtaataagggatcactgcaataattttgtagccaccttctattactattgtggtgagctcastgttgcaagtacctgcttaaagcatcatgtaatgccaatcatctccacacgagcagttctccacagtaaatttcatatctcagtaaaaactgttctctcatggttctcaagtattttttgttgtgtttagtgcaatactgtaaaccgtgaataaccatgaaaccaaaaggaagtgccagtag

SEQ ID NO: 196193 - DNA, 555 bp, Homo sapiens
ggctaacaccaagttaaccaagctagtcttgaactcctgacctcaggcaatccgcccacctcagcatcccaaagtgctgggattataggtgtgagccactgcgcctagcccacttctccatattttttatccaaatacctaagtatttttctagaagcatattcttttgcagtgattcttccttcaaggacaatgatygctagttttctacaaggtcatttttgacaagttacccagataaatcacatatgcaacagtatttgcattgagcacttgatgtctgtctggtgtgttctacacacttttgatactactatcctaataaggcattgttataccctcattatttgaacctcccaattgaatgggaagaatataagcaagtaaatacatagctttttagatactgtgaaattgtaataattctaaataatgtgagataatacataacagtgtagccgaaggctggaagggcagtgtgtttgtgtgtatatgtatgtgtttgtgtgtatgtgtatgtgtgtgtaattagaaaggtcaagaaaggtgtctttt

SEQ ID NO: 196194 - DNA, 508 bp, Homo sapiens
tactacacttccacctttgctaaaattatatacaaataaaattagaccatatgtagtcttttgtggctagtttatttaacttaatagtttggatatttattcttgttgttttctgttttgatagttccattttattgtagaatgtaattctattatatgaatatatcacaatttgtttatacatttatctgctgatgaacatttgtttggttttagctattgcaaataaaactgctttgaacattcactttcaamgctttgagtatacatatatatatattctttaatttctctcagataaaagcttatacatggaatgtgggctttctaggttgtatggtaagtaaatgtttatcctttattttaaaaatgctaatttccaaaatgtctaccattttgtattactaactgcagtatataaaatttcaagttgctttatattctcatttgttattgtcaatctctcattttagccattctaataggtgtgtagggatattgtggtttt

SEQ ID NO: 196195 - DNA, 508 bp, Homo sapiens
tactacacttccacctttgctaaaattatatacaaataaaattagaccatatgtagtcttttgtggctagtttatttaacttaatagtttggatatttattcttgttgttttctgttttgatagttccattttattgtagaatgtaattctattatatgaatatatcacaatttgtttatacatttatctgctgatgaacatttgtttggttttagctattgcaaataaaactgctttgaacattcactttcaaagctttgagtatacatatatatatattctttaatttctctcagataaaagcttatacatggaatgtgggctttctaggttgtatggtaagtaaatgtttatcctttattttaaaaatgctaatttccaaaatgtctaccattttgtattactaactgcagtatataaaatttcragttgctttatattctcatttgttattgtcaatctctcattttagccattctaataggtgtgtagggatattgtggtttt

SEQ ID NO: 196196 - DNA, 606 bp, Homo sapiens
tcttgctctattttgggtacctactggccatcactgagaggtctgccaatcaccaggcaagatttgttctgtatccacatggtgttgctagaagtattatatcttttggtaagagaggttcttcccttattatactgaaaagattgtgtccagttctctacttgatgctgtgtgtgtactgtaacaaaatttaagattattgtttgtgatggtaaataccgagtgtcaacttgattggatagaaggatgcaaggtattgatcccgggaatgtctgtgagggtgttgacaaaggagatgaacatttgagtcagtgggctgcaaaaggcagacccacccttaatctgggtgggcaccatcaaatcagctgccagcatggcaagaatataaagcaggcagaaaarcatgaaaagattggcctagcctcccagcctacatctttctcccatgctggatgcttgctgccctcgaatatcggactccaagttcttcagtttagggacctggactggctctccctcctcctcagcttgctgaaggcctattgtgggtccttgtgattgtgtgagttaatacttaagaaactcccctttgtatatatatatctc

SEQ ID NO: 196197 - DNA, 451 bp, Homo sapiens
ctctacttgatgctgtgtgtgtactgtaacaaaatttaagattattgtttgtgatggtaaataccgagtgtcaacttgattggatagaaggatgcaaggtattgatcccgggaatgtctgtgagggtgttgacaaaggagatgaacatttgagtcagtgggctgcaaaaggcagacccacccttaatctgggtgggcaccatcaaatcagctgccagcatggcaagaatataaagcaggcagaaaagcatgaaaagattggcctagcctcccagcctacatctttctcccatgctggatgcttgctgccctcgaatatcggactccaagttcttcagtttagggacctggactggctctccctcctcctcagcttgctgawggcctattgtgggtccttgtgattgtgtgagttaatacttaagaaactcccctttgtatatatatatctc

SEQ ID NO: 196198 - DNA, 606 bp, Homo sapiens
tcttgctctattttgggtacctactggccatcactgagaggtctgccaatcaccaggcaagatttgttctgtatccacatggtgttgctagaagtattatatcttttggtaagagaggttcttcccttattatactgaaaagattgtgtccagttctctacttgatgctgtgtgtgtactgtaacaaaatttaagattattgtttgtgatggtaaataccgagtgtcaacttgattggatagaaggatgcaaggtattgatcccgggaatgtctgtgagggtgttgacaaaggagatgaacatttgagtcagtgggctgcaaaaggcagacccacccttaatctgggtgggcaccatcaaatcagctgccagcatggcaagaatataaagcaggcagaaaagcatgaaaagattggcctagcctcccagcctacatctttctcccatgctggatgcttgctgccctcgaatatcggactccaagttcttcagtttagggacctggactggctctccctcctcctcagcttgctgaaggcctattgtgggwccttgtgattgtgtgagttaatacttaagaaactcccctttgtatatatatatctc

SEQ ID NO: 196199 - DNA, 372 bp, Homo sapiens
accagaagtggttctggggaaaccaaatattaaggatggagttcttttattggttttggggtttctggagttggctgcttaatatgattgacccaaaactgctaaggactctacttctaatagtatggagaacactgatagtctttggcatgaactctttagacaattatgcaaaataaatgcatttkacactcctcattcaccacttttgagaggtaaggagtttagtgaccctatacataatacctttgaccatatatggagaatcaaggaacataataaggctggttggttgctcctaagttcaggggacaaagtaatgaaagaaaatgatgaactcagagattctgtcttctggcttcagaagcagat

SEQ ID NO: 196200 - DNA, 476 bp, Homo sapiens
atttgtaggtctaaggcaaagttctccagaaggccgtgtatgctctgaatcagcatccaatatatggtactgtttctcccatagccaggattcatgggtccaggaatyaaggggtggaagtggaagtggaaatggcaccactcaccatcacccctagtgatccaatagcaacatttttgcttcctgttgccacgacattaccttctgctggcctagaggtcttagttccagagggaggaatgctgccaccaggagacacaacaacaattgcattaaactggaagttaagattgctacctggaccctttgggctcctacttttaagtcaacaggctaagaagggagttacagttttggctggggtgattgacccagagtatcaagacgaaatcagtctactattccacaatggaggtaaggaagagtatgcatggaacacaggagatccattaggacgtcacttagtattatcatgc

SEQ ID NO: 196201 - DNA, 599 bp, Homo sapiens
tctctctcacttctcaagcctgcctaattcctgagacacaaaagtactaaaattaggtcaataaggctacaatggactataagtgttcaaacgaaagaaaaagttacacatctctaactttaaataaacaactagaaataattaagtgaggaagctatgttgaaagccgatatagttttaaatctaggcctcttgttacatagagttaaccaagttctgaatgcaaaggaaaagttcttgaagaaaattaaaagtgctactccagtgaacaagtgaatgataagaatgtgaaatagcctcattgctgatatggagacagctttaggggtctggatagaagaccaaaccagccacaacattcccttaagccaaaacctaagacagagaagggccctaactctcttcaactctatgaggactgacagagttgagcaagctgcaaaagaaaagttgaaaggtaacaaaggttggttcgtgaagtttacraagccatcttcataacatagaaatacaaagtgaagcatcaagtgtgggtgtggaggctgcagcaaattattcagatctgagataattgatgaagagggctaccctaaacaata

SEQ ID NO: 196202 - DNA, 624 bp, Homo sapiens
ggttcttatttgcctttctataatgatcaaagattttgaacattttttcataggtttgttggccacatgtatgtcatcttttgagaagtgttagttcacagttttgctcagtttttaatgagggtgttcggtttttgctggttaatttgtttgagtttctaatagtttctggatgttagacctttgtcagatacatagtttgcaaatattttcttccattctgtagggtgtctgtttacactgttgatagtttctcttgctatgtaaaagatctttcatttaattaggtacaacttgtctatttttttgtctttggccaggcacagtagttcacgcctgtaatcccagagtttaggaggtcgaggtctgaggatcacttgaacccaggagttcaagaccagcytgaagaacacagagataccctgtccctattaaaaaattttaaaaatagccaggcattgtagcacacacagaaaataaaaattagccaggcattgtggcatatgccttcagcctacttagaaggctgaagtggggggattgcttgagcccaggagatagaggctacagaggctgcagtgggcaattattacaccacctcaccccagcctgagtgacagagtg

SEQ ID NO: 196203 - DNA, 565 bp, Homo sapiens
atgctggcctcatagaatgattatagaggagagttccttctcctgaactttttttgggggaatagtttcagattccccaaatagatttgtatcagatttttacaatatatctggtagaatttggctgtgaatccttctggcctaggccttttcctggttgacagctatttgttactgatttaatttccaaacttcatattgttctgctcagtgttttattttctgtttcaagattgggaggttgaatattttcaggaacttatctatttcttttaggttttctagtttgtgtgcatagaggtgtctgcaatactctttgagaggtttctcaatttctgatgggttagtggtaatgtcccctttgtcatttctgattgtgttgatttggaatgtttccttttttttaattattagtctacctagggrtgtattattcttatttattttttcagatagaaaacttttggttttgttgatttgttgtatatttttggtcccttaattttattccattcaggttttattttgattatttattttcttctgctagctttagagttggttt

SEQ ID NO: 196204 - DNA, 532 bp, Homo sapiens
caaaacatatttctctgttttggtaayttcaagaaaatataaactagttatcaaaaatccaaataattccgtcatgaaactatatagatttttgcacatttttaattaaaaatataagtacagaaatgtataacatatacatatttctgttgatactcataattatatgcatcttgtttaagcgttatgtttcaaaattatttctccctttaaagacttgataactttctagccaccaagatttagtattttgtatctacttccttgttctcatcatgttcaaatgcctgacacttttctcagaattctttcattccctcatcaacttattaaagcaattctgagatattttctctgttgagcccaacagctttagtataacaacatttacatttgcattcatatcttacattaatctatacttgaattttttttgcatgttcttttactatgctttcttgttgcgtagatactcctttaagacaggtctcatatgcctttctttattttccatcctctaggtaaaaatatt

SEQ ID NO: 196205 - DNA, 621 bp, Homo sapiens
tgattctctttttttcgttttgttttcttctttggaaaaattgtgcatttctgtgatttcaatttttaaaatttatcatcaggcttcaagtgagctgactagaatcatttcatactcrcccctccagtagaaagaagtaaaatagtgagtagataatcacactttgaatagctcacccaaggtaaacacagtaattcaatagaaaagtgacaggaaatgcctaaagcaatgtaggagaggaaaggaggcagcatggtcatccaagactggctgcagctgagactgactccccaatgtggacaaagggtaagtgagagaacctcagtagtccacattccaactgtgcactcctgtaatcttagccacaggagagcccctcaatccttgcaggttgtgaatttaacatcggaacatgctaagagattgtgcaatggcactgtgccaggaagagatctcatgctgggttctatacacttgttaaaacctaagcagctaacataaggtgccattttacagccgtgtcctcaacagagtccacacaatcctagggcccagtggcactggggctgaggctcaagagaagcaagggctgctgcccctggagctgaggcatgagcaagg

SEQ ID NO: 196206 - DNA, 621 bp, Homo sapiens
tgattctctttttttcgttttgttttcttctttggaaaaattgtgcatttctgtgatttcaatttttaaaatttatcatcaggcttcaagtgagctgactagaatcatttcatactcgcccctccagtagaaagaagtaaaatagtgagtagataatcacactttgaatagctcacccaaggtaaacacagtaattcaatagaaaagtgacaggaaatgcctaaagcaatgtaggagaggaaaggaggcagcatggtcatccaagactggctgcagctgagactgactccccaatgtggacaaagggtaagtgagagaacctcagtagtccacattccaactgtgcactcctgyaatcttagccacaggagagcccctcaatccttgcaggttgtgaatttaacatcggaacatgctaagagattgtgcaatggcactgtgccaggaagagatctcatgctgggttctatacacttgttaaaacctaagcagctaacataaggtgccattttacagccgtgtcctcaacagagtccacacaatcctagggcccagtggcactggggctgaggctcaagagaagcaagggctgctgcccctggagctgaggcatgagcaagg

SEQ ID NO: 196207 - DNA, 539 bp, Homo sapiens
tttgcgactacttcttaatgccacattgtgttgtgctgaaaatcaactaaacattggtcatctggtttccctgatttaaagatctcttgctggtgtcatcctagtcaggcctcattgttattcaagagcacagccattctgtcagtgctgaggtctaacttagatcttcgatatggcagccattaaattacaattttagactcagttatctttcttctttctgcctgctaggattagttccagcaacttctacttgagagactcttaaaaatactcccccacattttttctcatttataaacagaagtagtcaaactgcttgtctgtcttaattttacccyctttctccaaatactcatcctgtgcagggggaaacatttagtgatttctgtgaacctgaacgttccttactgtgatagctttcatccagtaacttgagtagatctgctgccattttctcttctaatggaggccaatcttggtgtgatggttaattttagatgtcaacttgactggtcaaaaagatgcccatatagcta

SEQ ID NO: 196208 - DNA, 559 bp, Homo sapiens
gtgacaccaaatgctggtgaggatatatgtcaacaggaactctcattaatttctggtgggaatgcaaagtcttacaaccactttggaaaatagtttggcaatttcttataaaataacctatcatctccaaattatccagtgattgtactcattgatatttaccaaaatgagtccatacaaaaacattcaagagatgtttatggcagctttactcatattgtcaaaaattggagacaaccaagatgtccttcaataggtgaaagaacaaaccgtggaatagccatacagtgtaatatcattcagtgattttttaagtgatttaccaatccacaaaaacacatggatgagccttaaatgctcattagtaaaagaaactagtctgaaaaggctatgtaccacatgattccaactacgtaacattccacaaaagtaaaaatacccaacaargagatcaatggttgccaagatttcagggaagaaggaaagaagagatgaatagacgtaacagagaagattttttttagggcagtaagactattctatatgatcctgtaatggt

SEQ ID NO: 196209 - DNA, 560 bp, Homo sapiens
atttttctactacataaactagctttacttattaatttagtcctatagtaaatgggcatgaaaaaggaagagtgtataaatcttgcaatggcctatgaaaattcaactacaacctttcaaggtagacatgaacaaaatatacatacctgtgactcatttaatataatcttttaaaaatactgattattatgaatttttgaattttccaaatgatttgacaaagtcagaatgyagagaaaaggtatacctgaacataaccatactcagtgaatgtgtcaaaaattttaatataaaatgtttagattttttaaaacttctagtttttctttttttcttgatgatttatatagtatatacccataaacttataacaaatatatatgtggctatataaattatttttaatactattattgatagtaactaccttcaaaatagaaattcttattaatatatctgaatgaaaaatatgcaaataaaacatacgtaatagtatatatataaataccaatagatcatttcatatatttctagattgttttgttatgaatgttgtttca

SEQ ID NO: 196210 - DNA, 560 bp, Homo sapiens
atttttctactacataaactagctttacttattaatttagtcctatagtaaatgggcatgaaaaaggaagagtgtataaatcttgcaatggcctatgaaaattcaactacaacctttcaaggtagacatgaacaaaatatacatacctgtgactcatttaatataatcttttaaaaatactgattattatgaatttttgaattttccaaatgatttgacaaagtcagaatgtagagaaaaggtatacctgaacataaccatactcagtgaatgtgtcaaaaattttaatataaaatgtttagattttttaaaacttctagtttttctttttttcttgatgatttatatagtatatacccataaacttataacaaatatatatgyggctatataaattatttttaatactattattgatagtaactaccttcaaaatagaaattcttattaatatatctgaatgaaaaatatgcaaataaaacatacgtaatagtatatatataaataccaatagatcatttcatatatttctagattgttttgttatgaatgttgtttca

SEQ ID NO: 196211 - DNA, 184 bp, Homo sapiens
ttttgattgtgtttagaaatgcaaggcatatgtatgatggtaatcaatgtattatcccaaacactcaagcaaaccaataaacaaaaaacacaagcctctgaatgtctatacactaagggcaaaattacttttsttggcttggtgttatttatgagttcctttttaaactcccttactttgaaaa

SEQ ID NO: 196212 - DNA, 528 bp, Homo sapiens
tcattctgtcacccaggctggagtgcrgtggtaatgatcatagctcataagctcatgcagctttgaactcctgggctcaggcaatcctaccacttcagccttccaaatagctaggactataggtgcacaccaccacacctgtctaattttttttttttttacaccttttgtggagatgaggtctcactaagttgcccaagctggtctcaaactcctggccttaaacagtcttcctgccttggcctcccaaagtgttgggattacaggtttgagccactgtgcctggcctggcactgggaatttaaaggaatgaggcagcacatctgatgggggaaatcagaaaaaataccaagaaggaagatgcatctgcagtgcatcttgaataagtgagccaagccagtgtccagaaagcactggcacatttgtggaatggcagtttgattctggtagagaaaagagtatgaggtgatggtgggtacagcagtcaaggccatgaagaggagatggagtcaaaaccaggccatttgg

SEQ ID NO: 196213 - DNA, 649 bp, Homo sapiens
gcaaattcacatatattatttaattatatcttcacacgaggtcttcggaagttgatatgtcttagagagttacactgcctgccaaaatgaacaaaactggacagttgtagatcaaacatctaaaagcaagtctgtagaaaaccgaagttcttttcaaggcagtttatatgtttagctagccatctatttgtatgcttgttaactgtttggttatttgctttgttatttgaacataatctaaagaaagttaggaaagagaattactgaactctcattcctttgaaatatatggtagttgagctaaaattaatttttatgttactaatacttgtaaacaatgaatacacatattgtgttcaggatgtacagatgcattagtttgacaaatattagaaaagaatatcasaagactctcgggaaaaaattatgaaattatatatgctaattttatggttcattttctaaaatgaatactattctgtagcagtcagctcttgtaacaatattcctgcatgactagctattcaaaaactcagaggatttgaataataaacatttaattttacacacaggactctgtgagttggtttcaactgttattatctaggcttgactagctcagctccaagctgtcagttggcctcatgtc

SEQ ID NO: 196214 - DNA, 485 bp, Homo sapiens
catcttcacagctccatactgcttatccaaataacaaattcattgtcttcacgttttttttttttttttaagattttctaatcctgattggcagtccagtttcacctacctgtcgcctttttgctttcggttgtcacactggtttttaatcctctttcagtactgaccctgggaccagtagactctaatttgctactgagctttagcyttaccgtaatttgtctatgtcttcattttccttggattaattttctcacaagactaacacaggtctggtttttccagacatacctcattctccccagatgaggctcctgactctacatctgtgaagttgcaacccagggggacaattctaattgttgtattctaatataattctactctaaaatgaatttaccctgacagtaatagagtattattgaaaaaggaattgttcaaagccatgtacctaattatattccataatttcatattccttttct

SEQ ID NO: 196215 - DNA, 552 bp, Homo sapiens
ggaaaaaatagaacagaccaaatttttggaactgattaaatgtgatwtaatgtaagagtctctttgcttccttcaaatttcaatggtaagaatattaaaccactaagttttaatttcagagataagaaaaacagagactcaagtaaagaatgccctggtccccattttcaatgtattcaatccagttcataaatatttggagcacttctccttgtttccctatcaaatgcaatgctggaacaagaagcaagaggaacagcgactcaagcctgcattaaaaggaaagaagacagtatgatgatactaaaaaaataattattgactatttttaaatatgtacccatcttcattgccacagaggcaaagcagactgcctctacaccttttcatccctgcagccacaatatcctgctttttctttctccagtcttgttagttctgatattcattcaaaatgattacattcatgaaacaaagtgtgtgataataaactgaggagataaaaaagaggatgaatgaaaatcaagaactcacagaatagggaccctgcat

SEQ ID NO: 196216 - DNA, 289 bp, Homo sapiens
tgcaaacatctttggagggctagtggctatttactacagttattaaccaccacattgcatcaatactataatgtccattggctgaaaaatcttaataaatctactaacattttcctactaggccrtaaatatgaatactttgtactcaagatacagatgagtcaagatatagagttagggcaatgttttcagctctaaaacaacaacaaaagagctatctagtagcaattttaaaaaactaatatatttatacaatttcaaaaaatgaagaggaaaagaaactagttca

SEQ ID NO: 196217 - DNA, 517 bp, Homo sapiens
tatttgtgtacttatatgtataaatgtttttatatttgtgcgtattatctttatatttttataatgtgttttattcatctaatttatatttcttataatcaatttgtgtagtgggtataagtttttcartgtcatatagagcacaggaatggtctctatttttttttaaattatactttaagttctagggtacatgtgcacaacgtgcaggttttttacatatgtatacatgtgccatgttggtatgctgcacccattaactcgtcatttacattaggtatatctcctaatgctagttttatcttttgctgtctatattcctattgatagaacagtgcctgcaacataataggtgcgtaataactatttgttgactcttgtgtcatatgaaggcagaagtagggctctattatcagattagtcttaacctccctgactacaatggactgagtgtttatgtcccttcaaaattcatatgttgatatcttaacccccaaggcaatggtatccagagatg

SEQ ID NO: 196218 - DNA, 275 bp, Homo sapiens
agacaagaccatctcagcacagatgaaactctcataaamcttaaaataaagctcacacaatagtttaaactcctttagtaaaggaaacacctggtaacaacagtaaagtttgccacattgattgtcctttcacaaaatatttctctgcagcatgtgatgcgttggatagcattttatgcagggttgaactcctttcaaaattgaagtcaatcctttcaaactctgccactgctttttgaactaagttcatgttatattctaaatcctatttatga

SEQ ID NO: 196219 - DNA, 646 bp, Homo sapiens
tagcccactactttctaataagcagctttgtgaattaaacattagtttatcctaatttgagtgtgccatctccttcttgtatcccaagtgatatgcttatgtaggaaattgtcatttttataataacacagaccatatcttgtgcctctcytcatctttgtatctagagcggagtcccttcaatgtagtagatgcttaatcaatatgtaaacaattgcattggataacaacttgagatcaaagtattactgggaatgccatgcattaaatgtaattttaagagagctactgatttagtcttcatttaagcaactgtgcaaacatgtgaagagtttattttgacaatgcaatgccacaaaactgacaaaataaggcaaagctacctgacactttaaagagttcctttcgtaacaatacaaacacaaactattgaaatattgtttcttaatacattatcttttccagctttttagaggtataattaacaaataattatataaatttaaggtgtaaaatgtgatgttttgaaatgtatatacattatgaaatgattaccaccagaaagccaattaacacatccttcacctcacattgttaactccatgtgtgtatgatgagaatacttgacatctattatctttgtaaa

SEQ ID NO: 196220 - DNA, 646 bp, Homo sapiens
tagcccactactttctaataagcagctttgtgaattaaacattagtttatcctaatttgagtgtgccatctccttcttgtatcccaagtgatatgcttatgtaggaaattgtcatttttataataacacagaccatatcttgtgcctctcctcatctttgtatctagagcrgagtcccttcaatgtagtagatgcttaatcaatatgtaaacaattgcattggataacaacttgagatcaaagtattactgggaatgccatgcattaaatgtaattttaagagagctactgatttagtcttcatttaagcaactgtgcaaacatgtgaagagtttattttgacaatgcaatgccacaaaactgacaaaataaggcaaagctacctgacactttaaagagttcctttcgtaacaatacaaacacaaactattgaaatattgtttcttaatacattatcttttccagctttttagaggtataattaacaaataattatataaatttaaggtgtaaaatgtgatgttttgaaatgtatatacattatgaaatgattaccaccagaaagccaattaacacatccttcacctcacattgttaactccatgtgtgtatgatgagaatacttgacatctattatctttgtaaa

SEQ ID NO: 196221 - DNA, 519 bp, Homo sapiens
tgatctgaacttgctgcaaatctcatcactgtgggctacagtgctctgtgtccctgaaggaactttaaaggcagtctaggtcataaggactctaactcttaaatgagtcccagtgctgaactaggctgaaagacagtggactgtaggggcaggtgacataatgagacaccaaccagggcagctaagagagtgctggcatcacctctcccctaacctaaggctgtacagctcacagctccaaaaaagaccccttcctcccacttgaggagaggagaaggaagagtggggtggactctttcttgcatcttggatccccgctcagccacagcagaatacggcagtggcaaaagttgtgatgcccccattccaggccctagcccccagatgacattcctagacacaccctgggccagaagggaatccactgccttaaagaaaaaractcagtcctggcagcattcatcacctactaactgaagagtcttgtgcgtatgaatagctagcagctatatgcaaata

SEQ ID NO: 196222 - DNA, 523 bp, Homo sapiens
tctatttttctgctaattaaaagttttataatgaaaagtttataaagcatagcaaaaggagagggcattcatgaacgagataaaatgagcaacaagtcatgagtgggactattcacgtcctagccacagattcataaaacctttactgaagctgaggatttgagaaaaagattcacgagagctaaactggaaaaggtagacatgrgctatcattactgaagacctacatctgtgaggattacatttccaaaaaagacgatgggggaaggtgaatcatcatggaattttgagcagtgagatttttcatttgttgggttggcttggtttaattttcttaaaaagattaaatagcttatgggttagtgaaatgaatcatgaagaaaaaatacaaagtaggagaagaattaagagattgctcaaaggacctagtatgtatttattgaagcagaggctagggaaatatgaatcaagagaagaatggaaagacatcaaagataaattaatggggctcagacatgagaag

SEQ ID NO: 196223 - DNA, 463 bp, Homo sapiens
ttggggagaggaaactattcataagggattggcagggactttatgcacactttaatggtatctactaagcaggctggctctacatgaagcataatatttgagaaattcctttgacattaatttgtgactcttttaaaaattaaatatcatcattccactataaaatgtggttcccagctgactttaaaagcacattgtataaagacatacatcatagttgattgccatttcagagaacaataatgtttcaatttttgtgaattcttggcagaataaagataacatycttggcttagaaaaggctcagcagccatggactgtcaaaggaaagggtgcaatcagaggataaatgtaattgcatgagatgcaatttgaagaatacttgaagctatagagatttgtttatggcatttgaaactcagaaactcatacatgtacagtgaatataaatgcaactacattt

SEQ ID NO: 196224 - DNA, 463 bp, Homo sapiens
ttggggagaggaaactattcataagggattggcagggactttatgcacactttaatggtatctactaagcaggctggctctacatgaagcataatatttgagaaattcctttgacattaatttgtgactcttttaaaaattaaatatcatcattccactataaaatgtggttcccagctgactttaaaagcacattgtataaagacatacatcatagttgattgccatttcagagaacaataatgtttcaatttttgtgaattcttggcagaataaagataacattcttggcttagaaaaggctcagcagccatggactgtcaaaggaaagrgtgcaatcagaggataaatgtaattgcatgagatgcaatttgaagaatacttgaagctatagagatttgtttatggcatttgaaactcagaaactcatacatgtacagtgaatataaatgcaactacattt

SEQ ID NO: 196225 - DNA, 547 bp, Homo sapiens
atagtacctcccttctcatcactttattctgttgcacatacattacatttcttgatacttagttgcatttttggctctagatagctgtaactttttctctaaatcctatattatggctgtttcttttaactctgaaaaaatatactcttgaactcatcctatgcctggtggctgcatagacagcacttccaagtgtcagtcccatgtggccacagagagtccatcaaatttaagtatgtttctgtgaaccttttatcaaggtcaatatctgctacctcaggtaatactttcttcttgaagacacaagtctgacccaaaatacaagctgaaaaatayagacttcagtttgccagccgtgctcaagttaagcaaagctgttctttattcactctacttattatttatcagtcgacattgataaaaatataaagcaaaaatatcttctaatctgttagtgactaatgttaacatttggagtttctacaactaataaaatactcatacaaaattactttgttaatggctattatagtatgaagttggctaa

SEQ ID NO: 196226 - DNA, 554 bp, Homo sapiens
gttatgtctcattaaaaaatagtttctttaaaatggaagattcaaaatgaaggatatagtaacaagcattcatttattttaggagatatgcacaagaaggcttcggaaaattaaattttttctttgttatgtgacagacagcaggcaatgcataacccaacatataaatgataggtacttaatttagtattgagaattactcagcacaacataaattcttcccctasaagcaaaggaggaaactgaaatttattaaaaagcttacttttctaaaacaattgagctttgaattggcaaagaaacctctctagaaattgtaagaaaaatatctcccaaagaatttaattgttagctttcatgcaaactgaaacaaaaactattggtaagaaattttaaatattaaatgattgacataaacaccaggtttctcttctggattaaatgtgtttattaggtgaacagagaaaaaagctccatcataaaagtcatcaaggcagatgatgtgacaccatcattctgatgaaaggagaactgacaggtgaattttaccttat

SEQ ID NO: 196227 - DNA, 598 bp, Homo sapiens
agtcttgtagcatagtttgaagtcaggcataatgcctctggctttgttctttttgtttagaattgccttggttccatatgaaktttttaatagtttttttctaattttgtgaagagtatcattggtagtttaataggaatagcattgaatccgtaaatttctctgaacagtatggccatttaaacaacattgaatcttcctatccatgagaatggaatgtttttccatttgcttgtgtcatctctgattactttgagcagtgttttgtaatttttgacatagagcactttcacctccctgattagctgtattcctagaataaccttgatttcaaaaccaaagtcttgacgcaaaggaagattgcagatcaatcttcctcctcaagatacatccaaaatattaagcaacttcttaggaaattatcaaattaactcaaatttgattgtatgtaaaacaatgatatctttttccactcataaattatgtaaaaagtaggcagtgaggtaagtattaggaaagtttagagaaatatcgagatctcatacactgttgttgtgtatatggataacacttctaggtgatgatttgacagtactta

SEQ ID NO: 196228 - DNA, 587 bp, Homo sapiens
tcaccttcacccatcttatcaaggcccccttgctctctggtttcccattatgttcaattaattggaaagaccagcaggagaactggagagtctgagtacttatgtccctggttctctctctgcaaggactctgttagttggtggttgcatttctctacctaaggaaacagcatttggggtgtccactcatcttcactgacagatctcactagattctggagacyactcccttcccttggaacctcagacataggcatggtggagacttcctacagttcctagccctgagtgcttaatcatagtttatgggtttctgctgtgatctgaatatgtgtcctccaaaattcatatattaaaatttaattgacaatgtgatcatcttaagaggtggggcctttcagaggtgattagctcatgagggcttcatttttgtgaaccagattaatgctcttatttttaaaaaacaagagcaggtcacacagagtttgtccatttttgcccttccaccgtccaccatattcaagccaaacactgaatttgctggtgcattgaccttggactttccagcctccagaaacatggaagat

SEQ ID NO: 196229 - DNA, 587 bp, Homo sapiens
tcaccttcacccatcttatcaaggcccccttgctctctggtttcccattatgttcaattaattggaaagaccagcaggagaactggagagtctgagtacttatgtccctggttctctctctgcaaggactctgttagttggtggttgcatttctctacctaaggaaacagcatttggggtgtccactcatcttcactgacagatctcactagattctggagaccactcccttcccttggaacctcagacataggcatggtggagacttcctacagttcctagccctgagtgcttaatcatagtttatgggtttctgctgtgatctgaatatgtgtcctccaaaattcatatattaaaatttaattgacaatgtgatcatcttaagaggtggggcctttcagaggtgattagctcatgagggcttcatttttgtgaaccagattaatgctcttatttttaaaaaacaagagcaggtcacacagagtttgtccatttttgcccttccaccgtccaccatattcaagccaaacamtgaatttgctggtgcattgaccttggactttccagcctccagaaacatggaagat

SEQ ID NO: 196230 - DNA, 595 bp, Homo sapiens
tatagctcaggctgctgctctggatggtgcaagccataagccttggtggcttccaatggtgttaagcctgctggttcacagagtgcaagagtggtggattcttggtaacctctgctagatttcaaaggatgtatgaaaaagcctggggtgtccaggcagattcctgctacagcatggagcccccacagagaaactctagtaggacagtgtggaggggaaatatgggattggaggcttcacacagagtccccactggggcactgcctagtagagctgtgaaaaggccatctctctccagatggtactctatgcctagaaaagttacaagaactctgcarcaacctatgagagcagctaccaggactgcaccatgcaaagccacaggggtggagttgtccaaggccttggtagcccaccccttggaccagtgtgccctggatgtaggatatggagtcaaaggagattattttggatttttaagatttaatgactaccctgttgggtttcatacttgcatgaggcctgtagcccatttattttgaccaatttctcccttttgaaatgggaatgtttactcaatgcctatacccccatt

SEQ ID NO: 196231 - DNA, 474 bp, Homo sapiens
gcaggttaccctctgtagcctgggcggttctcatccaatcagttgaaggccttaagagaaaagactgaggtcccccaaagaggaaggaattctgctcacaggctgcttcagacacaagactgcaacatcaatgcctgcaagaatttctagcctactttccagctttatacatctcagacttgccagcccacagagctatgtgagtcaattccttaaaatgaaactctctacatgtatctctggctccatatctatatatgctatgagtctatgtgttccgtttctctggaggaaccttaactaatacaccccatgaagaatgaagtttcatgtgggtttttggcagttacyctttgtcaagttaagacagtgtgatgggttaaattgtgcctgtccacaatatgttcattgaaaacctcagatgtaattaaagtaagaatctcatcatgagatcatcctggattcacataggat

SEQ ID NO: 196232 - DNA, 280 bp, Homo sapiens
aaatatgagaaaaagaaagaacaattcttcggagcatcccaagatgacagtgatgtttaggctagtccaacttcatgcatatttctgtttttctatgaaattatmttttgttttattcctactcttcttagttttagcgtcagtgtttgaataagtctgagtgaatttactatattgtgtgcaatttatcttttatttatgaacctattatcttagcatttgttgactcaaatacctcagatgaaataactactttattggcagattccaatcatgtgtt

SEQ ID NO: 196233 - DNA, 586 bp, Homo sapiens
tgctatctttaaaaatcattcctccggggagaaaggaaatatgtatcctaatattatttggtaatttagtagaagaataagagtagatactaagtttcggttattccggctgcagtatggggaatgtattaataagaaaagcttcaattctggaggtcaagagattattataataactcacataattaatgataggtgataaaatgttactggtgtctgttcagatggagaggaaaagatgtgtttgagattaaggcagaaaaatcaatattatttcaggatcaatgaaatacagtacaggggtggggggaggaaggaatctaagatgacttttaggatttttgtcacagttggctyggtgaatgaaaagaacatcactgaaggtacagaatgcaacaaaagggagagtttgtgaaggaagactgtaagttcagttttaaaaaagtgaataggaggagcctttggagtatcaaaatagaaaggtacaacaggtatttgtaaataaaatctgactttcaggagagatcaaaaccagagatacagggattttggaattatcagcatagctatgtttttaagtcatgtc

SEQ ID NO: 196234 - DNA, 484 bp, Homo sapiens
aaaattggttatttattccgtacctgctataatttcaacatacaatcagattaaatcttagcaaaaattgatgtggaatgtctagtcttaatctatttggatagatgaagaaagtaatattttcaaagactaggaaaattgctgaaattcacaatacagaaatacaaatagagtgtggatattgtttcaagtctagcactctttccaaaaattaaaacttaaaaaacaaacaaataacatgtcctcaccacagaaaataagtagttgaggtgatggatgtgttaattagcttgatttaatcatttcacattatacatatatatcatagctttgtattccataaatatatacaattataatatcaatttacaatmaaattaaaaacaaactgtccttcaagaatgaaaatcaagttaacaaacgttaaaacaataaccaacttccattcttaaattaattataactgaaatgtgaaaaagaaaaa

SEQ ID NO: 196235 - DNA, 569 bp, Homo sapiens
ttgaaaattgttaattaagaggagaatctgttgttagtttggcaaagatgttaattttcaatgtttgtgaggtttgggagaaaaagccatttgtatgctgttaatgaaagtatcagttgatcaaaaacattcctgagcatggtttagctatacttattaatacactctcgatctttgcatattttcagaccctgtaactctacagctagcaaataattttgattatgcttgtcagaaggatgttgacattaccattatktttaacagtgaaaagttgaaataatctaaatttaaaacaattgagattggttcagtaattaaaggtaatttgcttgtttattaaacagtccttaaaatgaatttttttaaatagtatgacccaatttctatggcagaattgtgggtagcttttcttttcttccctttgtctaattttccaaatttttacccctgaacataaatgatcttggtaacctgattatgtatttttgattacagcaagtttaaattaaaaattgtagctttcaaaaaaaatccaaaatttcatcataaatatcataaacatcaag

SEQ ID NO: 196236 - DNA, 596 bp, Homo sapiens
aagctttgaaaattaagttgttatttcgtgtgctagcagtgaaaatttcatttagattgacctccttttcatctcttcttcagttcctcaaagtggggttagcagttagctaggagaagtaatgacarggacctttcatattttcccggtgtccttgtgattgcaaattaatgttcaggcactccattcttgcttgaatagctttagtttcaaatgcacctttcatttttttttttttttatgaagacttgttactatggctctgaatttttgaatgtagctaaattacattgactctctgaaaagacctgactgaaaaaaaacacaataggattcttaagacagggactgctgtgctgcacacgaaggccagggtataaattggggacacagcactgaggtttttgcttttcttctttctagtatgctcagagataaagtggcttggtaagaagtgacaattgtagaggacgctatagcgtttcggtttgcaaaccccaaatgctccgattctacagtaaatttcttggagatgttcaaatgtgaaatagaaaatataattctggcagtgttttgatacatgataagtaatcaat

SEQ ID NO: 196237 - DNA, 591 bp, Homo sapiens
gcagtgaaaatttcatttagattgacctccttttcatctcttcttcagttcctcaaagtggggttagcagttagctaggagaagtaatgacaaggacctttcatattttcccggtgtccttgtgattgcaaattaatgttcaggcactccattcttgcttgaatagctttagtttcaaatgcacctttcatttttttttttttttatgaagacttgttactatggctctgaatttttgaatgtagctaaattacattgactctctgaaaagacctgactgaaaaaaaacacaataggattcttaagacagggactgctgtgctgcacacgaaggccagggtataaattggggacacagcactgaggtttttgcttttcttctttctagtatgctcagagataaagtggcttggtaagaagtgacaattgtagaggacgctatarcgtttcggtttgcaaaccccaaatgctccgattctacagtaaatttcttggagatgttcaaatgtgaaatagaaaatataattctggcagtgttttgatacatgataagtaatcaatattctagtttgtttctactaaagattattt

SEQ ID NO: 196238 - DNA, 296 bp, Homo sapiens
acttctgtgacaggtcttgaaatttttgaaagataatcgtgtgaatttataccacaacgatgggatcytgaaggctatttgttcttagatattatcaccttatgctgagaactctgtagaaatgtaaactttactggattgtttctcccaaagacttaacaagtataataatccacatgatagcaattaggaagctagtgtacctctttctcactccagaatctgtagaactggacatggtaccaccaaatgaaacaaaacagctgcttctttaacataaccaaagggggaaaact

SEQ ID NO: 196239 - DNA, 408 bp, Homo sapiens
cctttcttgagctcttcctttttctctacactctgatttttaagcctttactagctgacttacctcagagaggtcatgtctcggttgtcagggaagtattatagcctgtttcaatgcacacttccaagtactactttcctttttcttatgctttgctcctatttctctaaactacttctaactgccactttccacactctgtggccttttgtctacaaatattccagaaagccccggattaatctatccaaaatagstgcatggctaaaactccattcatatcaggttggctcctgtctcataaagtctagagaatggtcagaaccttatatatttcaggaaattagtttacaccagagcatactggaaaagaaactatacaaggacttcatgatggatatcaaactc

SEQ ID NO: 196240 - DNA, 456 bp, Homo sapiens
tccaaggagattaagaaggtgcattaggatgtgggacctgcatcctctacctgaacaactcaggctattgggtccctgggactttttttgtgacctcccaccaatttaacagtttgttcctgttgcttcataaaatgtacaattggaaaagctagtataaagcagtttagttgttaaaagaggggaaaacagagagacctggcttcaagattctattttttttctacctaatggaaataccagaaactgaaaatatgctggggctagaatcgtactagtttcaagaaactggtttcttgaatgctttcacaggaagccagggctcagtttcactttcaaccatgakgttcccaatacagtctaatccctgacatgtaggcaaatcaattcccaatggggacatagaacaaggttagaatctctaaggagaggggcagagagtttgaatgtattaac

SEQ ID NO: 196241 - DNA, 554 bp, Homo sapiens
ttaaatgaaatggcatcataatacatgtaacaacatgaatgaaccttgaaaacagtatgctaagtgaaataagccaaacataaaaggacaaataaattgtatgattccactatgtgaggtacctaggataggcaaattcatgaagacagaaagtagattggtggttacctgtggctagggggaagggagatggggagttactgtttaatgagtacagtgtttctgtctgggatagtgaaaacctttaatagatggatagtggtaatgagtgcacaggaatgcaagtaagcttgatgccactgatttgtccactttaaatggctaaatggtaaattttatgtcatgtatatttcaccacaataaaacaatagaaaaaaataatccattgaacacttaaagaacctgattgaaatttctgtcttttattcttctctataaattgtatgtggacaattttttaccaacaacaaaaaagctaaaaatagaaatragtagatcttagacaaacacatgtacttggaaccattttgtttgttttatttgctctattttat

SEQ ID NO: 196242 - DNA, 542 bp, Homo sapiens
attcatttctccaagtgtgatatatgttgcttacaataaacttcaaagaggtatgtgctgatggtttctaactgccatataaacaccacttcatataaacatcagcctggaactccaccaactcgtacagacctgatggatattcaccagggcaaactagcaaaggactatttttaagcctccacaactgaggataactttgttaatttttctacttatttagtagagtgcccatttaatgtttgtccttcaggcaggaatgtatgctcttcacggttttacatgtcagtttagatttctcaagaaaaaggtctataaatttaggggaaagaatgtttaccagtcatgtacactatgcctasgattatactcttgaattcattggtcccttaagtaaacgttggtgattgatttacaaatatagtaactgaaatcaatggaagatacatttgaaatataattctaatcacatatgtacatgagataattttacaaacgtgacctcatgcctgtcacatggattaagttcattaatgccaaaa

SEQ ID NO: 196243 - DNA, 626 bp, Homo sapiens
tcttcctaaaaaacacctttccttttgcataatttcagcacttgtagactgacttaacaagtgctggacctcaaactgttcattcctattatactgaattactctgttgccttttacatttgcatttgtaacattcttttgtgtatttgtttatttatattctaccttctgctgagaatgcatccaaacatcttgyaaaggcacatataatatagctgtgcttctgtggaggcttggttccaagaataggtgttccaaaagacaaatagtggaagcttcccatctcttaaggtctgggtccagaaactgacgcagcagcatcccatcgaattctattgtttgggccatcttcatttgccacactaaacttttaagtagaagggaagactgacctggattgatataccctcactctcctcctccatcatctcagcaaaacagaggggctacagttggctgctttacaatgatgggcccttcctccagccttggaccacagaaaccctttggactttatgttgtcacattttaaaattccttccctttgagttccttgtatttctttacaaaatccatctcctgctcacctaaaattgacggtctcagtctcaataagattaaattgt

SEQ ID NO: 196244 - DNA, 509 bp, Homo sapiens
tagttcaaattcaaatcttagggtcttagttcattcaggctgctataacaaaaatgccataaactgkgtagcttataaacaacagatatttcttacagttctggaggtccaagatccaggagtcagcagattttatgtctgttgaaggatcacttgctgcttcacagatggtggctttttgctatagcctcttgtgatggaagggaagaactccagtctttttagttccttatacaggcactaatctcattcaaaagggcactgcttttatgatccaatgatcgtagaaagttttttcttgtaatactaccatattgaggattaggttaaagcatatgcattttggggggataaaaatattcaaagtgtggcagggtcccaatcgtctctctaaatgttggccaactgagacttcacatgtagaagtgtttgcagggggtgatgggagacagcaacagatcatcaggcattagattgtcaaactgagtgtgcaatctagatcccacgca

SEQ ID NO: 196245 - DNA, 509 bp, Homo sapiens
tagttcaaattcaaatcttagggtcttagttcattcaggctgctataacaaaaatgccataaactgtgtagcttataaacaacagatatttcttacagttctggaggtccaagatccaggagtcagcagattttatgtctgttgaaggatcacttgctgcttcacagatggtggctttttgctatagcctcttgtgatggaagggaagaactccagtctttttagttccttatacaggcactaatctcattcaaaagggcactgcttttatgatccaatgatcgtagaaagttttttcttgtaatactaccatattgaggattaggttaaagcatatgcattttggggggataaaaatattcaaagtgtggcagggtcccaatcgtctctctaaatgttggccaactgagacttcacatgtagaagtgtttgcagggggtgatgggagacagcaacagatcatcaggcattagattgtcaaaytgagtgtgcaatctagatcccacgca

SEQ ID NO: 196246 - DNA, 529 bp, Homo sapiens
taatcatatctaaacaaacctaaggataccaccaaaaaactattagaactaatgtacaaattcaacaaagttgcagaattcaaaacaacrtatagttgcatttctatacattaacaaaattatctgaaaaataaattaagaaaacaatccaatttacatcaccatcagaaagaataaagtacttaaaaataacttaaccaaggaggaaaaagcctggtacattataaactataaagcactgataaaagaaattaaatcaaacacaattaaattaaaagatgttctatgtttatggattggaaaaattaatattgtgaaaatgttcatactacccaaagggatctgcagatttaacgtaatccctatcaaaataccagtggatttttttacagagatagaaaaaaatgtaaaatttttatggaaccacagaagaccacaaagagacaaagccatattgagcaataagaacaaagctggaggcatcacacttcctgagttcaaaacatattacaaagctatggtaattaaa

SEQ ID NO: 196247 - DNA, 529 bp, Homo sapiens
taatcatatctaaacaaacctaaggataccaccaaaaaactattagaactaatgtacaaattcaacaaagttgcagaattcaaaacaacatatagttgcatttctatacattaacaaaattatctgaaaaataaattaagaaaacaatccmatttacatcaccatcagaaagaataaagtacttaaaaataacttaaccaaggaggaaaaagcctggtacattataaactataaagcactgataaaagaaattaaatcaaacacaattaaattaaaagatgttctatgtttatggattggaaaaattaatattgtgaaaatgttcatactacccaaagggatctgcagatttaacgtaatccctatcaaaataccagtggatttttttacagagatagaaaaaaatgtaaaatttttatggaaccacagaagaccacaaagagacaaagccatattgagcaataagaacaaagctggaggcatcacacttcctgagttcaaaacatattacaaagctatggtaattaaa

SEQ ID NO: 196248 - DNA, 401 bp, Homo sapiens
tacaatatgtattcactatggatgaaactcaagataattattctgaataaaagaagccagattttaaaaaatacataccgtatgatttcatttattttaatcctaaagtaacaaattgatctatagtgatagaaaacagatcagagtttgtctggtaatagtgaggggtaggaataggcaagaaagaggtcactcaaaggggcacaaattttggggggtgattgatacattcattttcttaattgtaatagttttacaattatattagtatgtcaaaacatattaagttgcaaacttaagagatgtgcagtttattataygataattatggctcagtaaagctgcagaataaaaaggaatgacaatctcatgcctatgttataagtcaaaaataaattatg

SEQ ID NO: 196249 - DNA, 480 bp, Homo sapiens
tcctctctttcatcagagtcaacatgatattccttacttctgtctcactgtgcatgtctgcttgattttctgttattaaattaaaccccattgtcatattagccaaggtagactcaagcaaacagacttaattatatatatataaatatatacaaatatacatatataaatatatatacacatatataaatatatataatatatataaatatccataaatatctataaatatatataaayaaatatatatatttcaggcaggaaagatttaatacagggaattaggtgtttacaaaatatgtggagggactagaagaaaaaggtcactgaaaactaccaatattctaaaaattcaggaagtttcaagaatcccagaaagccagtgatgtttatctcagtttatctcagtttctttgaataataaagtgtgtgattaactgaatggaaaccactgataaaatattatgtctggcatttcca

SEQ ID NO: 196250 - DNA, 480 bp, Homo sapiens
tcctctctttcatcagagtcaacatgatattccttacttctgtctcactgtgcatgtctgcttgattttctgttattaaattaaaccccattgtcatattagccaaggtagactcaagcaaacagacttaattatatatatataaatatatacaaatatacatatataaatatatatacacatatataaatatatataatatatataaatatccataaatatctataaatatatataaataaatatatatatttcaggcaggaaagatttaatacagggaattaggtgtttacaaaatatgtggagggactagaagaaaaaggtcactgaaaactaccmatattctaaaaattcaggaagtttcaagaatcccagaaagccagtgatgtttatctcagtttatctcagtttctttgaataataaagtgtgtgattaactgaatggaaaccactgataaaatattatgtctggcatttcca

SEQ ID NO: 196251 - DNA, 538 bp, Homo sapiens
cttgcactttcatgttctggagatggcttcttcccttaaacctcatgagttaacctctggaaatgttacttcagccctaattcctcayacccttcagccttcacataatgaagacagttatggacttgctctggattaggctttggcttaggagaatgttgttgctggtttgatcttctatccagatgagtaaaactttctccatatcaacactaagtctgttttgctttctcattgagggttcactggagtagcactttaaattccctgaagaactttccctttgcattcataacttgactaactgcttggctcaagatgcctagcttttagctcacctgggcttttgaaatgcttcctcattcaacttagttatttctagcttttgatttaaagtgacagaagtgtggctcttcctttctcttgaacaattagatgttacagaatggttataaattggcttcatcttaatattgctgtgtcttggggaatagggaggctcaaggcgagagacagacagagagatgggggaaaatgg

SEQ ID NO: 196252 - DNA, 538 bp, Homo sapiens
cttgcactttcatgttctggagatggcttcttcccttaaacctcatgagttaacctctggaaatgttacttcagccctaattcctcatacccttcagccttcacataatgaagacagttatggacttgctctggattaggctttggcttargagaatgttgttgctggtttgatcttctatccagatgagtaaaactttctccatatcaacactaagtctgttttgctttctcattgagggttcactggagtagcactttaaattccctgaagaactttccctttgcattcataacttgactaactgcttggctcaagatgcctagcttttagctcacctgggcttttgaaatgcttcctcattcaacttagttatttctagcttttgatttaaagtgacagaagtgtggctcttcctttctcttgaacaattagatgttacagaatggttataaattggcttcatcttaatattgctgtgtcttggggaatagggaggctcaaggcgagagacagacagagagatgggggaaaatgg

SEQ ID NO: 196253 - DNA, 394 bp, Homo sapiens
gcggctaagtttcatgagatctgatgatatcgtaagggggaatttccctgcccaatctctctctttgcctgctgctatccacttaagatgtgacttgctcctgcctgctttctgccatgattgtgaggcctccccagccacgtggaactgtgattccaattaaacctctttcttttgtaaattgcctagtcttgggtatgtctattgcygcagcatgaaaacggactaatacagataatatagaaggagaacttagaaggcgtatctcctttttgaggcagtattaaaaagcagtaaatattagattacctaacttcttttcacaggaaatgcaatcttgtgtaaaatgaggatttaggagccctaattgggtggcattccatgggacaaacgt

SEQ ID NO: 196254 - DNA, 349 bp, Homo sapiens
aaaacagtgcaattcatcttggaatctctctctgtctctttctccttctccttttttcctcctcttctccttctgccctcctcctccttctcctcttcctcctcctggctggttgaattttcctcctggaaaattcagatgtcatgtgatacagccatgtggagagattcaggtgatgaaaatgtgaggtctgaaacagtaatttttgttcagtaagsttttatctattgtgtctatcctatctaatgatataattagtgcaaaaactaataaactattatacagaaggaaactgttttcaaatgcattttttagggattgtgacatgtctcctaattatgatgtctat

SEQ ID NO: 196255 - DNA, 541 bp, Homo sapiens
gtggttcagatgtgagaaattttaccaccaacaatttgaggaaaggaaaaccttattgatttgacagtgtttgaacagaatctttctctgcatatatttattgttatatctgaaacctttaaagcacttgactacttsatttttgaaactctgttcatcttgggcttaagagatctctttccatttgatttccattcatctctctatttgttatcaatctcctttattcatttttgtgcttatcccttaagtataggttttgttctgcaaactgttcaaatatggactccaattccttgaactgcaatttctgcagggggtttcttaaattagggtctgagatattcagtctatatatagtttaacaataactattcaatgctatctcagccttaatagtcattctttcttggtttctagctggcagtgtctcaattttgtaaaaagttgtagcactttgaaagacgatttcattccttttctaatggattgattgaagaatgtcatatatgaatataggaatcaatcttagtaattaaac

SEQ ID NO: 196256 - DNA, 543 bp, Homo sapiens
agggacctttgcagccattacacgcatctgtaaaactctatctctacatagtattaaaaagaaataattggtttgaagacacattaaagacagtaggctagagcctgaaattaaagcatgtcccttaaaaaaggatacatatgggaagagggcagagcatcttcctgtgattttaggagcctcagagttgtggtgatcacacagtttccaagtttaaatcatatcctttatacctgttaaaaattctgaatgaatttcattgtttttagaatttaatctaagtattttagcaatttacatgattccaatccctgtgccattccaggggtctcatctgtgacagttayctgctcacttcctgtgctctccctacactgttgcttagttccttggaaacaaaatttctttcctttttggccatatttgatctaatattttctgagtattctaccttctccaatctgtacatctttgcttctcataaataatgcccattcattgttcaagttttagcataaatgtcactgtttcagagaagtaggg

SEQ ID NO: 196257 - DNA, 530 bp, Homo sapiens
caaacgatgacagctatgcacaatcctattaaatggttttacttcgtttttgtaaataatggtatatgggagaagaaattattagacactgaataaactctaatgtttcttagtgaaaagtttgaattagggcaatacatctttttctcctgtgactgccccatgtctttcattgtcttatttaatttaaggccctcacccatcctctaagaccttgaatatgacctatcctcaaacatgttaatttscagccctgtgcatcactttggggatataacgaagaagaaaatactataatttctctaaagcgattcataatctcataaaactaattattttattctaaatatacttattgactcaaacagcaccctgaaaattataattggaatttatcagcagacgaaaggttggatttttcttactttccatattgaaaaatgagtccaataaggctagaggtgactttttccaaatttcacagtaagactgaagagcagggattctcctcaacctcttcacagtcagta

SEQ ID NO: 196258 - DNA, 582 bp, Homo sapiens
agatcctcttcttgtaggctgttcatcgatttatgcatgtatttctgaaactataatgtatgtctcagtcagaatgaagttctttagatccctacatgtttaggttagtattgaccctcagacccaggcagagatgggcctgaagataaggattagatttttccagccctgagagaatgggagccaggaagtacattgccaagacagctagtatatagattgatgtctttgatgtctcgctagtgccttcttccctgctccagaaaaatcatatacttttgggatgacatataattaacaataaaaatgctagtgagaaaagcacacatttttaatatttagataatgactatgttagtgattatcatactagatatgagttaatgattaattgggattattattgtaatagtagcrggagaacagttttacaaaagagattaattagaaataaattttcaagaagctggaatggataagacaaagaggacgaggcttaattatatagtgtaaagagcatcagatatgtcactagagatgtagatttgattggctaacagacacatgcatttattctgtaag

SEQ ID NO: 196259 - DNA, 518 bp, Homo sapiens
gtcactatattagtcagaagcaagagtagcatcaattggaagggctcgttgctgttgagcaaatctctgaagattttgcgggagacagatgtagccaactcttgaggaatatcttcaatataacacagaaccttcaatgggggtcagtgactgggaccccagatgtcagtggcacagcattaaaaatttataactctacttcagctaccctcaggtgctgtagaccaaagatggtaccacagtcgatacataaatggatggtaactgatgcacaggcctatacatgtagcttaggttgaagggttggcagtgggctcttgttgggtcagagacctgaacttttcctatatgcagtgtgagtgaaagtcaccccaaatcaacacattagtacctttctggaagcttaattttgccctttaccatgaaagaaaaaccacacygaccaatggaagtaatttgttcaccaggccatactcctagaagcagggctaggcccaaaaatgacctcatagacacag

SEQ ID NO: 196260 - DNA, 571 bp, Homo sapiens
gtatggtggctgttaaccaggtgagaaaaatagaacaatgaacaggatagaatttattggcatgaaggcacttacctaatacttgatattaatgatctgagatgagtttggtgagatagatggctcctccaggcctggactggaagatggcttacagtaaagcaaagtggaagtgccaggacatttcagcatgcttacaaaaaaggagtstctgttgaatttgatttttacatcaccttagaccaacacaccttctactcccctggcctacagaggtcttagcaatgggttgctatgtccttatggcttcaatccaggtttctactactgccacagccagccccacatgtagccacagacacagcatcacattattatgccacatttgcatcatggctaggctgtatccctgggggaatccaggccaatttgctaaaatagtgtatcttccatttgcctccaaacatgcaatggcctcacctaaacagatgcctcacaaaatggctttttttgtatatttacttcattacccctcaaagcattcaggctaataacgaaggttagacctgag

SEQ ID NO: 196261 - DNA, 571 bp, Homo sapiens
gtatggtggctgttaaccaggtgagaaaaatagaacaatgaacaggatagaatttattggcatgaaggcacttacctaatacttgatattaatgatctgagatgagtttggtgagatagatggctcctccaggcctggactggaagatggcttacagtaaagcaaagtggaagtgccaggacatttcagcatgcttacaaaaaaggagtctctgttgaatttgatttttacatcaccttagaccaacacaccttctactcccctggcctacagaggtcttagcaatgggttgctatgtccttatggcttcaatccaggtttctactactgccacagccagccccacatgtagccacagacacagcatcacattattatgccacatttgcatcatggctaggctgtatccctgggggaatccaggccaatttgctaaaatagkgtatcttccatttgcctccaaacatgcaatggcctcacctaaacagatgcctcacaaaatggctttttttgtatatttacttcattacccctcaaagcattcaggctaataacgaaggttagacctgag

SEQ ID NO: 196262 - DNA, 580 bp, Homo sapiens
ttaatcactaccacaagaacagaataggggaaaccatccccatgattcaattatctcccaccaggtccctcccacaacacatgggaattatgggagctacaattcaggataagatttgtrtagggacacagccaaaccatgtcagaggctaaagctcattttggcaaacacaagctgcacagcacaggaaagggaaggatggttctaagtccccttaagggtatggaatgaggaatggagactctggagatgaaggaatggcatggactacagccaatggaataatgccatctttagaatcttgactttgggattgcaggtcatctaagaaagcaacagtactgagtgttagttgtgtacagggtttgggagttacctagcctgggtataaatccaacctctgtcacttactagctgggtgatctttggacatagataatgtgatgagttcctaccctgtatctgcagcccagatccctctatacccccagacatgtatatcctgcctgtatatctcacagatagatcaaactgagcatgaccaagatggaatggatcattttcatcttttccccaaatc

SEQ ID NO: 196263 - DNA, 589 bp, Homo sapiens
taccacaagaacagaataggggaaaccatccccatgattcaattatctcccaccaggtccctcccacaacacatgggaattatgggagctacaattcaggataagatttgtatagggacacagccaaaccatgtcagaggctaaagctcattttggcaaacacaagctgcacagcacaggaaagggaaggatggttctaagtccccttaagggtatggaatgaggaatggagactctggagrtgaaggaatggcatggactacagccaatggaataatgccatctttagaatcttgactttgggattgcaggtcatctaagaaagcaacagtactgagtgttagttgtgtacagggtttgggagttacctagcctgggtataaatccaacctctgtcacttactagctgggtgatctttggacatagataatgtgatgagttcctaccctgtatctgcagcccagatccctctatacccccagacatgtatatcctgcctgtatatctcacagatagatcaaactgagcatgaccaagatggaatggatcattttcatcttttccccaaatctacagttcaggccactg

SEQ ID NO: 196264 - DNA, 444 bp, Homo sapiens
aagctcattttggcaaacacaagctgcacagcacaggaaagggaaggatggttctaagtccccttaagggtatggaatgaggaatggagactctggagatgaaggaatggcatggactacagccaatggaataatgccatctttagaatcttgactttgggattgcaggtcatctaagaaagcaacagtactgagtgttagttgtgtacagggtttgggagttacctagmctgggtataaatccaacctctgtcacttactagctgggtgatctttggacatagataatgtgatgagttcctaccctgtatctgcagcccagatccctctatacccccagacatgtatatcctgcctgtatatctcacagatagatcaaactgagcatgaccaagatggaatggatcattttcatcttttccccaaatctacagttcaggccac

SEQ ID NO: 196265 - DNA, 444 bp, Homo sapiens
aagctcattttggcaaacacaagctgcacagcacaggaaagggaaggatggttctaagtccccttaagggtatggaatgaggaatggagactctggagatgaaggaatggcatggactacagccaatggaataatgccatctttagaatcttgactttgggattgcaggtcatctaagaaagcaacagtactgagtgttagttgtgtacagggtttgggagttacctagcctgggtataaatccaacctctgtcacttactagctgggtgatctttggacatagataatgtgatgagttcctaccctgtatctgcagcccagatccctctatacccccagacaygtatatcctgcctgtatatctcacagatagatcaaactgagcatgaccaagatggaatggatcattttcatcttttccccaaatctacagttcaggccac

SEQ ID NO: 196266 - DNA, 507 bp, Homo sapiens
ctgttgaaagaaatcacagatgatacaaacagatgacaaaatattccatgctcatggattgaaagaatcaatatccttaaaatggccacactacccaaagcaatctacagatttattgctatttctatcaaactgctaatgtcatttttcatggaactagaaaaaactattccaaaattcatatagaacaaaaaaagagcctgaatagtcaaagcaattttaagcaaaaaaagaaaaccagaggcatcacattacctaactttgcactacactgtgagtctacagtaacygaaacagcatggtactgctacaaaaagagatatatagaccaatggaacagggaacccagaaataaagccacacatctacagccatctgattttcaacaaggttgacaaaaataagcaatggagaaaggactccctgttcaataaatggtgctgggatagctggctagccacatgtagaaaaatgaaactggacccctacctttcaccatatacaaaa

SEQ ID NO: 196267 - DNA, 593 bp, Homo sapiens
actaataggatatatatatcatatatacatatatatattttatatatataaaggggagttatatatatgtaaatgggagtttattaaatattaacccacatgatcacacggtcgcacaataggctgtctgcaagctgaggagaaaggagagctagcacaggtcccaaaactgaagaacgtggagtctgatatttgagggcaggaagcatccagcaccggagaaagatgtaggctagggggctaggccagtctaaccttttcacgttttttctgcctgctttatattctggccttgttgggagctgatcagatgggattaagggtgggtgtgcctttcccagcccactgactcaaatgttaacctcctttggtagcaccctcacagacacacccagaatcactactttgtatctttcaatacactcaagttracactcagtatgaaccatcacatagattgacctggcataggcccagttttaggttttaacgtatttattttctaaagttacacagctaattaaagacacaaatacaattgaaacacaggtatttccggtccaagactgtcctgctcccactgtatcatgcca

SEQ ID NO: 196268 - DNA, 593 bp, Homo sapiens
ctttgggactattattaagtaaaataagtatttcttgaacacaagcactgcaatactgtgacagttgatctgataactgagatagcctctaagtgactcatgggcaggcagagtatacagcttggttatgctggacaaaggaacaattcatgtctctgagcaggatggagagggacagtgtgagattttctccatgttactcaaaatagcatgcaatttaaaactcatgaattgtttatttctggaattttccatttaatattttctgactatctatctgtttggtaaccaatttctyatggtattcctcaagtttcccaacctttctcacatcacggaacatgcagaaaatgacaatattttaatggtacactgggtaagtaggtgaagccattaatagttgcctcccaaaagcctccagctggcagatcccacaaaccaaacctttgcctctgccctagtgctgaagagaaacatattgtggccacttgtaaaccattcatggcacatatatgagccacaagataccatttaggaagtatagcaacgtaggacttaaaaaataggtagttttttatttatagggaatattg

SEQ ID NO: 196269 - DNA, 391 bp, Homo sapiens
accaagacggtacctctgtaagtctccaagaaccatcacgttactgggcttgggtgcccccwaatgcagatatggctgtaataaaaccaaaacttggattacaacacccaagtcccttcaaatacgtgaaaagccttcccaagatggataagtacaaacaagcccagactgtgaagattataataaatgcttaattcttcaatgcccagacaccaatgaacattctcaagtatagagaccatccaaaaaagatggtctcaacaaataactaaatagggtacaagggaccaattctggagagacagagatatgtaatctttcacacagcgaattgaaaatagcagttttaaagaacctctatgaaattcaagataacaaagagaaggaattc

SEQ ID NO: 196270 - DNA, 429 bp, Homo sapiens
gatttcagcagtagtgaaagtgaagtcccagactttaccyatcaatgggtgggggctagtaatgtactgctatcttggtgagaactgcctggaaattagttggaaccaaatatgtggaaggaaaaaattattgattccaattgaaaggggctggagatgacaggactgacagctgatgcctagttccccactgccagggccaaatcgaatctggaagattggaagttatgtgaatcagcccaaggtggaattacaaactagagagaccagctgtgatgtttctggacattgccagagaagccagagatggtcccaatcaaaaagacaaaaccagtgaggggcatcttaaggtcattaaataaaaaatagcattgattgttagagccaaaagactttttaagctcatagtcataggttaaggcaggaatt

SEQ ID NO: 196271 - DNA, 351 bp, Homo sapiens
agggcaccaataactctagataaatcacttggcttgtgctgctgaaggtgattaatctctggcttgggtctgtcttcttatgtttacctatcctgtagttgcagagtctcgtgaggtctgacccacaggactataagtcttgagggcaggaattatactcaacaaacagttgagggccttccatgcctttggttccataccaagggctgggcatataatggtttggaaaataggcatgttcccatctttcatggracatagagttgagtggggagatgagcattagtcatataatcgaaggtaataatcagctgtaggaatactctaaaagtgtaatagtaaagaaaaccc

SEQ ID NO: 196272 - DNA, 391 bp, Homo sapiens
gctgaaggtgattaatctctggcttgggtctgtcttcttatgtttacctatcctgtagttgcagagtctcgtgaggtctgacccacaggactataagtcttgagggcaggaattatactcaacaaacagttgagggccttccatgcctttggttccataccaagggctgggcatataatggtttggaaaataggcatgttcccatctttcatggaacatagagttgagtggggagatgagcattagtcatataatcgaaggtaataatcagctgtaggaatactctaaaagtgtaatagtaaagaaaaccctactggaaagaaatgacattgamctaatatgtgaagtataaacagaagctaaggagctaaaaatgacacagtaaataatc

SEQ ID NO: 196273 - DNA, 566 bp, Homo sapiens
ataaaccacaaaagtagtcacctaattaataaatggcagagccaaaattcaaactcatctagtcatctttggagattgtgtcattaaggacactgccaagcaactctcaggaaataaaaccacggccttactagactaaagaattaacttcattttcatggctaggaagtagctaagattttcaactccaattgtcagactctaagttacctactctttctatcttttctgggagataatgagttctgaagragagagacagggatgaaatgacttgacacactaagatatccagcagtttgagtcaagaaatccatagttttgtctctgatctttaaggcactatttttctgaagaatatcaatttaacccatctttgtcattctgaggcacacactggaatcaataggtttgcttgttaaatagactagatatgccaattagtctgtttgtagtgctaaaccttgaacttgacttctgacagcactagaggcccatggaagggtgtttatcatgatatttccattgggcatctttattttacttcctcccccaggcaagccatg

SEQ ID NO: 196274 - DNA, 580 bp, Homo sapiens
tgttacttgggccagggtcatgrtcattcattatctctcagttcatcctcattacgttgggcaaacagtcatgctgcagggtatagattatgttattctgttactttcaggtagaattggggtctaggttctaattgtttctaagtttagattctgaatgagaatcagcagaggtagaccactgctgctgaggcctggggattgctggggaaaaggcaggaaacaggtacggacctgaccatggaagatttgtgtttcacggctcccatctgggtacccaaggaacctacatgtagctcgtgtgtggagagcctacattgcccactcaaagcaattgaggatggaacagtcttggggctggagctcattatttggaatgataaccacatctgcacagagaggacctgacaagatgttgtccttccatgtatatctgggaatcctctgtagggtctctctgtaaggacaggggcagtgttggctccttggcctctagttagcctcacaagtagtctagtaaaggctttgcaaacttgtcaccatctgtggacattctggccagctcttgttttcaccctac

SEQ ID NO: 196275 - DNA, 580 bp, Homo sapiens
tgttacttgggccagggtcatggtcattcattatctctcagttcatcctcattacgttgggcaaacagtcatgctgcagggtatagattatgttattctgttactttcaggtagaattggggtctaggttctaattgtttctaagtttagattctgaatgagaatcagcagaggtagaccactgctgctgaggcctggggattgctggggaaaaggcaggaaacaggtacggacctgaccatggargatttgtgtttcacggctcccatctgggtacccaaggaacctacatgtagctcgtgtgtggagagcctacattgcccactcaaagcaattgaggatggaacagtcttggggctggagctcattatttggaatgataaccacatctgcacagagaggacctgacaagatgttgtccttccatgtatatctgggaatcctctgtagggtctctctgtaaggacaggggcagtgttggctccttggcctctagttagcctcacaagtagtctagtaaaggctttgcaaacttgtcaccatctgtggacattctggccagctcttgttttcaccctac

SEQ ID NO: 196276 - DNA, 580 bp, Homo sapiens
tgttacttgggccagggtcatggtcattcattatctctcagttcatcctcattacgttgggcaaacagtcatgctgcagggtatagattatgttattctgttactttcaggtagaattggggtctaggttctaattgtttctaagtttagattctgaatgagaatcagcagaggtagaccactgctgctgaggcctggggattgctggggaaaaggcaggaaacaggtacggacctgaccatggaagatttrtgtttcacggctcccatctgggtacccaaggaacctacatgtagctcgtgtgtggagagcctacattgcccactcaaagcaattgaggatggaacagtcttggggctggagctcattatttggaatgataaccacatctgcacagagaggacctgacaagatgttgtccttccatgtatatctgggaatcctctgtagggtctctctgtaaggacaggggcagtgttggctccttggcctctagttagcctcacaagtagtctagtaaaggctttgcaaacttgtcaccatctgtggacattctggccagctcttgttttcaccctac

SEQ ID NO: 196277 - DNA, 580 bp, Homo sapiens
tgttacttgggccagggtcatggtcattcattatctctcagttcatcctcattacgttgggcaaacagtcatgctgcagggtatagattatgttattctgttactttcaggtagaattggggtctaggttctaattgtttctaagtttagattctgaatgagaatcagcagaggtagaccactgctgctgaggcctggggattgctggggaaaaggcaggaaacaggtacggacctgaccatggaagatttgtgtttcacggctcccatctgggtacccaaggaacctacatgtagctcgtgtgtggagagcctacattgcccactcaaagcaattgaggatggaacagtcttggggctggagctcattatttggaatgataaccacatctgcacagagaggacctgacaagatgttgtccttccatgtatatctgggaatcctctgtagggtctctctgtaaggacaggggcagtgttggctccttggcctctagttagcytcacaagtagtctagtaaaggctttgcaaacttgtcaccatctgtggacattctggccagctcttgttttcaccctac

SEQ ID NO: 196278 - DNA, 270 bp, Homo sapiens
aggacatgagatttgtggggtcagggacagaataatacggtttttctctatgccccttccaaaactcatgtgaaagtacactccctaatgttagagtcggggcctaggtggaaaaagctttaatcataaaggagtgggagtggatccttcacaaatggcaaagcaccaagcccttaatgccatcctcctgayagtgagtgagttctcatgagatctagtagtttaaaaggctgtggaacctctttcctctgtcttgttccaacttctgcc

SEQ ID NO: 196279 - DNA, 307 bp, Homo sapiens
tctagtagtttaaaaggctgtggaacctctttcctctgtcttgttccaacttctgccatatgaaacatgtcattgccgcttggatttccggtgtggttaggaggggcctgatcagtgtgggcctggtcagtggacctaggtcwgtgaggactatttagtgggatcgtggtcagcaggggtctgcttagagagggtctcattagtggggtctagtagtgggggttttggtgagtggggacctattggctgccagttgtttggtgtctggtcagtgcaaacctgggctgtggggcttgatcagtggaga

SEQ ID NO: 196280 - DNA, 266 bp, Homo sapiens
tctgagaggacaaaggtaaaggaagggccagagtggctgcagagatggtcacagtctatgggctgcacaggatgaaggaggccagggaacaggcagggtgggcagttggggttcagggagaggcaggtgcatgctgggaggtcagaccctgtgaaggctttgggggcgtcaggttgggtaggctccaggcactctcactcacataggawtccagaacactgctacaaggctctgagtgtttgtccctcacataggattccagaaca

SEQ ID NO: 196281 - DNA, 453 bp, Homo sapiens
gaattccagaacactgctgtgaggatctgaatgcttgaccctcacatgggattccagaacactgttgcgagggtctaaatgtctgtccctcacacaggtttcccgaacaatgttacgaggttctgaatgtttgtccctaacrtaggattccagagcactcctgctgtgctctgaatgcttctccctcacataggattccagaacactgccacgagggtctgaatgcttatccctcatataggattccagaacacttctgctgtggtctgaatgtttgctcctcacataggattccagaatactcctgccgtggtctgaatgtttgtccctcacataggattccagaacattcatgctggggtctcaatgtttcccttaacataggatttcagaacactgctcttggggtctgaatgtttgtcactcacataggattacagaacactgttgctg

SEQ ID NO: 196282 - DNA, 400 bp, Homo sapiens
ccagaacactgttgcgagggtctaaatgtctgtccctcacacaggtttcccgaacaatgttacgaggttctgaatgtttgtccctaacgtaggattccagagcactcctgctgtgctctgaatgcttctccctcacataggattccagaacactgcyacgagggtctgaatgcttatccctcatataggattccagaacacttctgctgtggtctgaatgtttgctcctcacataggattccagaatactcctgccgtggtctgaatgtttgtccctcacataggattccagaacattcatgctggggtctcaatgtttcccttaacataggatttcagaacactgctcttggggtctgaatgtttgtcactcacataggattacagaacactgttgctg

SEQ ID NO: 196283 - DNA, 400 bp, Homo sapiens
ccagaacactgttgcgagggtctaaatgtctgtccctcacacaggtttcccgaacaatgttacgaggttctgaatgtttgtccctaacgtaggattccagagcactcctgctgtgctctgaatgcttctccctcacataggattccagaacactgccacgagggtctgaatgcttatccctcatataggattccagaacacttctgctgtggtctgaatgtttgctcctcacataggattccagaatactcctgccgtggtctgaatgtttgtccctcacataggattccagaacattcatgctggggtctcartgtttcccttaacataggatttcagaacactgctcttggggtctgaatgtttgtcactcacataggattacagaacactgttgctg

SEQ ID NO: 196284 - DNA, 453 bp, Homo sapiens
gaattccagaacactgctgtgaggatctgaatgcttgaccctcacatgggattccagaacactgttgcgagggtctaaatgtctgtccctcacacaggtttcccgaacaatgttacgaggttctgaatgtttgtccctaacgtaggattccagagcactcctgctgtgctctgaatgcttctccctcacataggattccagaacactgccacgagggtctgaatgcttatccctcatataggattccagaacacttctgctgtggtctgaatgtttgctcctcacataggattccagaatactcctgccgtggtctgaatgtttgtccctcacataggattccagaacattcatgctggggtctcaatgtttcccttaacataggatttcagaacactgctcttggggtctgaatgtttgtcrctcacataggattacagaacactgttgctg

SEQ ID NO: 196285 - DNA, 524 bp, Homo sapiens
tatagctttatgaaatatattttttaagtgataaggcttgaaagttgaaattactctttgatccaagggcaccagaatgaatgttgggttagtaggcatgaaaacaatattcagctctttatacatctctgtaaaagcccttgagtaccaggggcattgtcagtgagcggtaatactttgaaaggaatcttatttmttgagcagtagttgtcgacagtgggcttaagatattcaataaaccatatttgtaaaccgatagtctgtcatccaggctttgttcccatttgtagagtacaggcagagctgtgttttatcataattcttcagggcccttggattttcagaatagtaaatcatcattggtttcaagttaacatcaccaactgcattaggccttaacaaaagattcagcatgtcctttgaagccttaaatccaggcatcaactcctctctagctgggaacatcctggatggcatctccttctaatagaaggctgttttgtctccattgcaaatctgtttag

SEQ ID NO: 196286 - DNA, 524 bp, Homo sapiens
tatagctttatgaaatatattttttaagtgataaggcttgaaagttgaaattactctttgatccaagggcaccagaatgaatgttgggttagtaggcatgaaaacaatattcagctctttatacatctctgtaaaagcccttgagtaccaggggcattgtcagtgagcggtaatactttgaaaggaatcttatttattgagcagtagttgtcgacagtgggcttaagatattcaataaaccatatttgtaaaccgatagtctgtcatccaggctttgttcccatttgtagagtacaggcagagctgtgttttatcataattcttcagggcccttggattttcagaatagtaaatcatcattggtttcaagttaacatcaccaactgcattaggccttaacaaaagattcagcatgtcctttgaagccttaaatccagrcatcaactcctctctagctgggaacatcctggatggcatctccttctaatagaaggctgttttgtctccattgcaaatctgtttag

SEQ ID NO: 196287 - DNA, 605 bp, Homo sapiens
ttggcatccaaacactttaccacatatggatgtttattatttagtagaatccaaaataattgcattttattaattaaacaaaacactaaaatrttcagttccatttttatgttaaaagctttgtgcttggccaggcacggtggctcacacttgtaatcccaaaatttggggaggccgaggtaggtgaatcacttgaggtcaggagtttgagaacagcctggccaacatgatgaaacctgtctccagtaaacatacaaaagttagcaaggggtgttggcaggcatgtgtaatctcagatactcaggaggctgaggcaggagaatcacttgaacccaggagacagaggttgcagtaagccaagatcataccactgcactatagcctgggtgatggagactccatctcaaaaaaaataaaaataaaaaaaataaaaatgtttgtgcttttcttacataagagtacatcttctgactataaaaatcctggaagaaaacctaggaaattctcctctagacatcatatttgtcaattaatttatggctaagtcctcaaaagcaattgcaagaataacaaaaattgacaagtgtgatctaatttagctaaat

SEQ ID NO: 196288 - DNA, 605 bp, Homo sapiens
ttggcatccaaacactttaccacatatggatgtttattatttagtagaatccaaaataattgcattttattaattaaacaaaacactaaaatgttcagttccatttttatgttaaaagctttgtgcttggccaggcacggtggctcacacttgtaatcccaaaatttggggaggccgaggyaggtgaatcacttgaggtcaggagtttgagaacagcctggccaacatgatgaaacctgtctccagtaaacatacaaaagttagcaaggggtgttggcaggcatgtgtaatctcagatactcaggaggctgaggcaggagaatcacttgaacccaggagacagaggttgcagtaagccaagatcataccactgcactatagcctgggtgatggagactccatctcaaaaaaaataaaaataaaaaaaataaaaatgtttgtgcttttcttacataagagtacatcttctgactataaaaatcctggaagaaaacctaggaaattctcctctagacatcatatttgtcaattaatttatggctaagtcctcaaaagcaattgcaagaataacaaaaattgacaagtgtgatctaatttagctaaat

SEQ ID NO: 196289 - DNA, 605 bp, Homo sapiens
ttggcatccaaacactttaccacatatggatgtttattatttagtagaatccaaaataattgcattttattaattaaacaaaacactaaaatgttcagttccatttttatgttaaaagctttgtgcttggccaggcacggtggctcacacttgtaatcccaaaatttggggaggccgaggtaggtgaatcacttgaggtcaggagtttgagaacagcctggccaacatgatgaaacctgtctccagtaaacatacaaaagttagcaaggggtgttggcaggcatgtgtaatctcagatactcaggaggctgaggcaggagaatcacttgaacccaggagacagaggttgcagtaagccaagatcataccactgcactatagcctgggtgatggagactccatctcaaaaaaaataaaaataaaaaaaataaaaatgtttgtgcttttcttacataagagtacatcttctgactrtaaaaatcctggaagaaaacctaggaaattctcctctagacatcatatttgtcaattaatttatggctaagtcctcaaaagcaattgcaagaataacaaaaattgacaagtgtgatctaatttagctaaat

SEQ ID NO: 196290 - DNA, 374 bp, Homo sapiens
aggggcaatgcatatgtagcacacctgggtcagaggtatcctccaggggaaggatcagacctgcttgaaagcatgtcgttggaattgggaggcttctagtagctataacataagcactgatgtttactsttccctgccctccactttgatcactctgggaaacgttttttttcttaaaaaatcaattgtattgaaacataatttacataaaataaatactattttaaagtgcacagtttgctgagttttgccagatgtaaccatccaggtgaataaaattgattaaactgatctttcaaataataaattaactttgcaatcttgctagaaatttaatttgttcacagtttattatccattctatgtactgctac

SEQ ID NO: 196291 - DNA, 580 bp, Homo sapiens
gtaagccaaagcatctcaaagtatatcatcagttatcaggcaataacatgtaatttctaaaacctaacttaaatgcagmttttaaagacattttaaatgtgtcagtttagtcacatttattgaataaagttagcaaatggatatctcttgaaaatgagggctccagggaattaaaaaatgtaaaattcccatttcctttctgtgttaacacagctaattatgatctttacttcacatgcaaaagtcaacagaacaactcagtatttcaccaaattataaacaagaattacgctagagaaatgaaaccctaaagagaaacggtcatataactaacctcagtcaagtagttctggcagttatttgaagtctgacggtttgaagtaggaattcttatgggcatttggggaatatattttctgttgagtcctatactagtaagattttcaacacaaggtgactctcgaccttgccttgtaggaagagtgctgagaaaatatttcacctgctctttctccctaaggagcttggtgatgatcattgctattttcttattcgatttttaaagataacaaagacaaat

SEQ ID NO: 196292 - DNA, 564 bp, Homo sapiens
caaagtatatcatcagttatcaggcaataacatgtaatttctaaaacctaacttaaatgcagcttttaaagacattttaaatgtgtcagtttagtcacatttattgaataaagttagcaaatggatatctcttgaaaatgagggctccagggaattaaaaaatgtaaaattcccatttcctttctgtgttaacacagctaattatgatctttacttcacatgcaaaagtcaacagaacaactcagtatttcaccaaattataaacaagaattacgctagagaaatgaaaccctaaagagaaacggtcatataactaacctcagtcaagtagttctggcagttatttgaagtctgacggtttgaagtaggaattcttatgggcatttggggaatatattttctgttgagtcctatactagtaagattttcaacacaaggtgactctcgaccttgccttgtaggaagagtgctgagaaaatatttcacctgctctttctccctaaggagcttggtgmtgatcattgctattttcttattcgatttttaaagataacaaagacaaat

SEQ ID NO: 196293 - DNA, 582 bp, Homo sapiens
atttaaagtgttgtcctgagagtaaaccaaattacccactaaatagtgttttcacaccgaagatgtgtaagagcatacctgttgtaaggaattataattttaaaatcattctaaagaagcacctttgtttctaaggtgatttacactgaacaagcagttcaaacaaagtagacagggaagagaaatkcctatcagtggtgtatggctcaacaggcaaaatttgctgccttctaaaatggctctacttgtaagattctgaagattccattagaaatacttgtatttaaagggcaataatgtgggaaaatgaatatgttgatttgcttgattataagaaccacttcactagaaataattatatcaaaacatcatgttgtactccttaatgtaggttaagaaaactaaaatgaataaaaataatctaggagtacttgtgtttagtaaaccagttttagatttcacccttgtacatttcacccattatctagaaccaattaaacatttggcactgaagaataattcagagcaacaactcctaggggagaactagattgtctggttggtgatcaaaaagaactaaag

SEQ ID NO: 196294 - DNA, 582 bp, Homo sapiens
atttaaagtgttgtcctgagagtaaaccaaattacccactaaatagtgttttcacaccgaagatgtgtaagagcatacctgttgtaaggaattataattttaaaatcattctaaagaagcacctttgtttctaaggtgatttacactgaacaagcagttcaaacaaagtagacagggaagagaaattsctatcagtggtgtatggctcaacaggcaaaatttgctgccttctaaaatggctctacttgtaagattctgaagattccattagaaatacttgtatttaaagggcaataatgtgggaaaatgaatatgttgatttgcttgattataagaaccacttcactagaaataattatatcaaaacatcatgttgtactccttaatgtaggttaagaaaactaaaatgaataaaaataatctaggagtacttgtgtttagtaaaccagttttagatttcacccttgtacatttcacccattatctagaaccaattaaacatttggcactgaagaataattcagagcaacaactcctaggggagaactagattgtctggttggtgatcaaaaagaactaaag

SEQ ID NO: 196295 - DNA, 582 bp, Homo sapiens
atttaaagtgttgtcctgagagtaaaccaaattacccactaaatagtgttttcacaccgaagatgtgtaagagcatacctgttgtaaggaattataattttaaaatcattctaaagaagcacctttgtttctaaggtgatttacactgaacaagcagttcaaacaaagtagacagggaagagaaattcctatcagtggtgtatggctcaacaggcaaaatttgctgccttctaaaatggctctacttgtaagattctgaagattccattagaaatacttgtatttaaagggcaataatgtgggaaaatgaatatgttgatttgcttgattataagaaccacttcactagaaataattatatcaaaacatcatgttgtactccttaatgtagkttaagaaaactaaaatgaataaaaataatctaggagtacttgtgtttagtaaaccagttttagatttcacccttgtacatttcacccattatctagaaccaattaaacatttggcactgaagaataattcagagcaacaactcctaggggagaactagattgtctggttggtgatcaaaaagaactaaag

SEQ ID NO: 196296 - DNA, 582 bp, Homo sapiens
atttaaagtgttgtcctgagagtaaaccaaattacccactaaatagtgttttcacaccgaagatgtgtaagagcatacctgttgtaaggaattataattttaaaatcattctaaagaagcacctttgtttctaaggtgatttacactgaacaagcagttcaaacaaagtagacagggaagagaaattcctatcagtggtgtatggctcaacaggcaaaatttgctgccttctaaaatggctctacttgtaagattctgaagattccattagaaatacttgtatttaaagggcaataatgtgggaaaatgaatatgttgatttgcttgattataagaaccacttcactagaaataattatatcaaaacatcatgttgtactccttaatgtaggttaagaaaactaaaatgaatwaaaataatctaggagtacttgtgtttagtaaaccagttttagatttcacccttgtacatttcacccattatctagaaccaattaaacatttggcactgaagaataattcagagcaacaactcctaggggagaactagattgtctggttggtgatcaaaaagaactaaag

SEQ ID NO: 196297 - DNA, 589 bp, Homo sapiens
tcattactctgaaagattgattttctcataataataatggaaatttaaatatttaaaagaaaaaacagatgccatttttttctacaactctacaaagcagattgctacaagagaggcagaggaaacactatatatatatatatatatataaaatctccaaaatataatttgcagtgaaataaatgaaagcacattacaggtaaacttacctgatttaaacaagtaacmtgtaaatggatttcttttaatttttctactgcctgcattgccctttcatctagctctgatttataatcttgtagttcactaagttctacgatactgttttccatatgtgtcttgagatttaatatttcttcttccaacatcttttgattctcctcaagtttttcacattcttgttgtacttttttcatagataataactcctgttggataacttgattgtctttagccaaattgacacattttgaagatacagcttcctcctctgccataagatcatcaaaccgcataaataaaatagtatagcttgataatgaagtaggctgagaataatctaatacaaaaccaatagcaaattttaaaa

SEQ ID NO: 196298 - DNA, 589 bp, Homo sapiens
tcattactctgaaagattgattttctcataataataatggaaatttaaatatttaaaagaaaaaacagatgccatttttttctacaactctacaaagcagattgctacaagagaggcagaggaaacactatatatatatatatatatataaaatctccaaaatataatttgcagtgaaataaatgaaagcacattacaggtaaacttacctgatttaaacaagtaacatgtaaatggatttcttttaatttttctactgcctgcattgccctttcatctagctctgatttatawtcttgtagttcactaagttctacgatactgttttccatatgtgtcttgagatttaatatttcttcttccaacatcttttgattctcctcaagtttttcacattcttgttgtacttttttcatagataataactcctgttggataacttgattgtctttagccaaattgacacattttgaagatacagcttcctcctctgccataagatcatcaaaccgcataaataaaatagtatagcttgataatgaagtaggctgagaataatctaatacaaaaccaatagcaaattttaaaa

SEQ ID NO: 196299 - DNA, 589 bp, Homo sapiens
tcattactctgaaagattgattttctcataataataatggaaatttaaatatttaaaagaaaaaacagatgccatttttttctacaactctacaaagcagattgctacaagagaggcagaggaaacactatatatatatatatatatataaaatctccaaaatataatttgcagtgaaataaatgaaagcacattacaggtaaacttacctgatttaaacaagtaacatgtaaatggatttcttttaatttttctactgcctgcattgccctttcatctagctctgatttataatcttgtagttcactaagttctacgatactgttttccatatgtgtcttgagatttaatatttcttcttccaacatcttttgattctcctcaagtttttcacattcttgttgtacttttttcatagataataactcctgttggataacttgattgtctttagccaaattgacacattttgaagatacagcttcctcctctgccrtaagatcatcaaaccgcataaataaaatagtatagcttgataatgaagtaggctgagaataatctaatacaaaaccaatagcaaattttaaaa

SEQ ID NO: 196300 - DNA, 589 bp, Homo sapiens
tcattactctgaaagattgattttctcataataataatggaaatttaaatatttaaaagaaaaaacagatgccatttttttctacaactctacaaagcagattgctacaagagaggcagaggaaacactatatatatatatatatatataaaatctccaaaatataatttgcagtgaaataaatgaaagcacattacaggtaaacttacctgatttaaacaagtaacatgtaaatggatttcttttaatttttctactgcctgcattgccctttcatctagctctgatttataatcttgtagttcactaagttctacgatactgttttccatatgtgtcttgagatttaatatttcttcttccaacatcttttgattctcctcaagtttttcacattcttgttgtacttttttcatagataataactcctgttggataacttgattgtctttagccaaattgacacattttgaagatacagcttcctcctctgccataagatcatcaaacygcataaataaaatagtatagcttgataatgaagtaggctgagaataatctaatacaaaaccaatagcaaattttaaaa

SEQ ID NO: 196301 - DNA, 463 bp, Homo sapiens
caacattcctcagtctgccttctccgccaattaaaataccactttacatctagtcrtcactttgcctttgaagccgctgcctgatatcgacactttgtagatgtagtatgactattcttgtatgtttctatttattgatgaggatcttactcttttagtataaatagtaccatgatttccaaagttttgatagcatccgaaaaacagtaattcacctaacattaaccctagtaatcaacaccctattagccctgttactaataattattacattttggctcccacaacttaatatatatatgtagagagagagaaaaatatatatatatgtataaaataaatatatatagaaaaatctagcccttatgaatgcagatttgaccctctatcctctgcccactttcccttctccataaaattctttctagtagccatcacatttcccctatttgagttagaactc

SEQ ID NO: 196302 - DNA, 463 bp, Homo sapiens
caacattcctcagtctgccttctccgccaattaaaataccactttacatctagtcatcactttgcctttgaagccgctgcctgatatcracactttgtagatgtagtatgactattcttgtatgtttctatttattgatgaggatcttactcttttagtataaatagtaccatgatttccaaagttttgatagcatccgaaaaacagtaattcacctaacattaaccctagtaatcaacaccctattagccctgttactaataattattacattttggctcccacaacttaatatatatatgtagagagagagaaaaatatatatatatgtataaaataaatatatatagaaaaatctagcccttatgaatgcagatttgaccctctatcctctgcccactttcccttctccataaaattctttctagtagccatcacatttcccctatttgagttagaactc

SEQ ID NO: 196303 - DNA, 441 bp, Homo sapiens
tatccagatttggagaggatgatattactcccaaaatctcaggaggtgtagacctcttctgtgatactgtttcttatatccaggggaagactagatgatagtactcccaacagtgcagggtgttacacgccaccccccatgatattgtgctctaatatcaagttggggagaggrtgatattgctccaaatagtgtaaagggtgcacaccagcactgtgatattattcctagtatccagagaaggagagaatggtattatttttaatatcacagagggtgcacaccccccttgtgatactgctcctaacatccaaggggtagaggatgaaattactcccaatatcacagtgggtatacaccccccgtggtattgttcctaatatccagggggtataggatgatagtactataaatatcgcaaggggtgtacaccccttctga

SEQ ID NO: 196304 - DNA, 615 bp, Homo sapiens
attactttgctaagtcaaaacaaaaaaaccttggctccttttcccagtaagttcctcattttcatctgagaccttacaaggctggtcttcactgtccatccttctgtcagctttttactcacaactatttaataagtctctgcaatggtccaaactttccctcatcttcctgtcttcttccaagctctccaaactctctaacctctggccactacccaatttggaacctgcgtctacactgtcagctatctttgctgcagcctggcaatgtggtaaaagaagaaaagtccattatcaggcggaaacatcaagatggcctccaatatttgcactgaaaaaagctcagtgctaatagccaagagaatgggggaaattcctcgaagtcatttcataacttcacttcacagcattaattttctgtatctacataaagaaaagaggtctaattgactcacagttcttcrggctgtaaagaaagcatagtggtttctgcttgtagggggactcaggaagcctcccaattataccagaaggccaagcagcaatgaaatgtttcatatggcaggagtagaagcaagacagagagaggaaagaagtgcaatatccagttatacc

SEQ ID NO: 196305 - DNA, 614 bp, Homo sapiens
gcaaggtcgccctgcagccatrttctttgctatagcaaaacaaaagtaaccttggctcctgttcccagtaatttcctcattttcatctgagaccttgtaagcctggccttcactgtccatccttctgccagccttttaatcacaactattcaacaagtgcctactatggtccaaaatttctttcatcttcctgtcttctttcaagctctccaaactctccaacctctggcttttacccacttctgaacctgctttacattttcagctatctttattgcagcctggcaatgtagaagaaaaagaagtccattttcagggggaaacttcaaaaggcttcagatatttgcattaaaaagaagtccagtgctaatagccaagacgagggggaaatgtcattgcagatatttcatagctccacttcacagtactttattttctgtatgatcataatgaaaaggggtttaattggctcatggttctgcaggctgtaaagaaagcatagtggcttctgcttctgggaggactcaggaagactcccaatcataccagtaggaaaacagcaatgaaatgtttcatacggcaggagtaagagcaaggctgagagaggaaagagg

SEQ ID NO: 196306 - DNA, 626 bp, Homo sapiens
agatctcgagggcaaggtcgccctgcagccatgttctttgctatagcaaaacaaaagtaaccttggctcctgttcccagtaatttcctcattttcatctgagaccttgtaagcctggccttcactgtccatccttctgccagccttttaatcacaactattcaacaagtgcctactatggtccaaaatttctttcatcttcctgtcttctttcaagctctccaaactctccaacctctggctkttacccacttctgaacctgctttacattttcagctatctttattgcagcctggcaatgtagaagaaaaagaagtccattttcagggggaaacttcaaaaggcttcagatatttgcattaaaaagaagtccagtgctaatagccaagacgagggggaaatgtcattgcagatatttcatagctccacttcacagtactttattttctgtatgatcataatgaaaaggggtttaattggctcatggttctgcaggctgtaaagaaagcatagtggcttctgcttctgggaggactcaggaagactcccaatcataccagtaggaaaacagcaatgaaatgtttcatacggcaggagtaagagcaaggctgagagaggaaagaggt

SEQ ID NO: 196307 - DNA, 625 bp, Homo sapiens
agatctcgagggcaaggtcgccctgcagccatgttctttgctatagcaaaacaaaagtaaccttggctcctgttcccagtaatttcctcattttcatctgagaccttgtaagcctggccttcactgtccatccttctgccagccttttaatcacaactattcaacaagtgcctactatggtccaaaatttctttcatcttcctgtcttctttcaagctctccaaactctccaacctctggcttttacccacttctgaacctgctttacattttcagctatctttattgcagcctggcaatgtagaagaaaaagaagtccattttcagggggaaacttcaaaaggcttcagatatttgcattaaaaagaagtccagtgctaatagccaagacgakggggaaatgtcattgcagatatttcatagctccacttcacagtactttattttctgtatgatcataatgaaaaggggtttaattggctcatggttctgcaggctgtaaagaaagcatagtggcttctgcttctgggaggactcaggaagactcccaatcataccagtaggaaaacagcaatgaaatgtttcatacggcaggagtaagagcaaggctgagagaggaaagagg

SEQ ID NO: 196308 - DNA, 618 bp, Homo sapiens
gccatgttctttgctatagcaaaacaaaagtaaccttggctcctgttcccagtaatttcctcattttcatctgagaccttgtaagcctggccttcactgtccatccttctgccagccttttaatcacaactattcaacaagtgcctactatggtccaaaatttctttcatcttcctgtcttctttcaagctctccaaactctccaacctctggcttttacccacttctgaacctgctttacattttcagctatctttattgcagcctggcaatgtagaagaaaaagaagtccattttcagggggaaacttcaaaaggcttcagatatttgcattaaaaagaagtccagtgctaatagccaagacgagggggaaatgtcattgcagatatttcatagctccacttcacagtactttattttctgtatgatcataatgaaaaggggtttaattggctcatggttctgcaggctgtaaagaaagcatagtggcttctgcttctgggaggactcaggaagmctcccaatcataccagtaggaaaacagcaatgaaatgtttcatacggcaggagtaagagcaaggctgagagaggaaagaggtgccacaccgttatataacc

SEQ ID NO: 196309 - DNA, 478 bp, Homo sapiens
aacactgtccctataaaaaatttaaaaattagcaagatgtggtgtcatgtgcctgtggtcccagctactcaagaggctgaggtgggagaattgcttgagccaggaggtcaaggctgcagtgagccatgttttcacygctgcgctcagcctaggcaacagaggaagactctgtctcaattaaaaatatatgtgcaaaagtcagtgtgttttgatgtctttcttcaaatcacttagcagaattcctgctgttttcatttacattagatgcttgagacagttttcaagtgaaatattatttttaaagtccaaaatcccaaattgctttcaaggtgaataaaaggattttaaaagattgtaacaattttatttctgtgatgatcactgaatctaaattcttcattctctagacagggaatccatctaagaattaaatggaagggaaaaaatatatatttttagtctgtgattaggggaaata

SEQ ID NO: 196310 - DNA, 469 bp, Homo sapiens
cattggtaaatgagctttctccagattttgttgatttcctgagtttttccataattcctcagttccctggccattttctgatagaccatggtcttcctattgccctttcttattcctcaaagtttggcaaatttttcttcattttttgatacaaactggaaactgcctttggttttatctacttactgaatgcagatgccatcttgggattatactgagatttgtgaagttattcaaacagtcagagaagcttcccgccttgtcctccctgttgctggaaaacagcagactgcaccagctggctttcagttatgttccacaaagatcaatgaatggttccttcaaaatagaagtctgcagcattatttattaaagttctccaattataaatagattcctctgtaagcaacattccatagcagttggaatctcctctgacatgggkacaatcactgatgaaaaccaggta

SEQ ID NO: 196311 - DNA, 452 bp, Homo sapiens
tctttccatttatttgtgactttccaatatatttcattaatgttttatagttttcagtgtataggtctttcacctccttatttaagtgtattcctaagtattttattcttcctgatgttattgtagatggaattgttatcttaatttcttttttggatagttcgttgtcagggtatagaaatgctactgatactgtaggttggtttttgtatcctgcaactttactgaattcatttattagttttagcagtttttttggtggaatctttagggttttctacatataasatcatgttagcaaatgagacaatttaacttcttccttttctatttggatgccatttcattctttttcttgcctaattgctctggctaggccttctagtactatgttgaatagaagtggtgagaatggatatccttgtcttgttcctggtcttagaggaaaactt

SEQ ID NO: 196312 - DNA, 628 bp, Homo sapiens
ggcgagggctctttagttgcaaagaaatccacactggcttgagccaaaggaggaatggttggctcatgtaaccggcaaaccaaagcgtgctgacttgaggmatggctggatctaggtggttgaaatatgaggaatctgacattcattctccacctctcagtgctgtgttctgtgtttgtgtctgtatttgctacctaatgctttgcaacaaataaccacaaaattgagctgcctaaaacaacaataaacatgtattatctcacagtgtttgtgggtcaggagtttagaagtggtgtagtggtttgaggtttcttatgagactgtagtcaagatagtaaccaggcctgcagttatctaaagattttgctggagctgaggaatctgtttccaaaagggctcactcccatggctattggcaggaggccccagttcctttccatgtggatatcgccacacagctgcttgagtgacctcccaacatggccacagggttttcccagacagacagagagatccaagacatcagggtaaaggctgcaagtctttaatgaactagcctgaaagtcacactccgtcattcctgcaaccttctatggtaacacaggccagccttatccaaggtgggagg

SEQ ID NO: 196313 - DNA, 397 bp, Homo sapiens
ccttcctttggtctggtggttgggaaaggggttggagtggttctaacataatcttcacaacagaagcctgggtcccaccaagagaagatgccctgagacagacgctgtcctgagagtccatgaaggaatgacgctcctttccagtactaggcagacccagtaactcctacttccaagcatgtgactgggacagccccattttccaaggagctggtgtgatggtttttgacctgatagtggtgacttggttccagttgtttcctgaatgtttttacagaaataaccaatgtatttccrgtgcagtgttctatcttagctgacaaaacaagaggtgaggctcagcctggagtgattccattaaaccggatgggcacaagatacgggccaatctggttac

SEQ ID NO: 196314 - DNA, 522 bp, Homo sapiens
ctctcaccctgccaactcagtagagggtggggatcccatttgtccctgactcccactggttccataccactctragcacccaatcccagctatgcctccctcgctgcagccagtgtcttcacagtgacagctccagatggatcgccatcaccatcaacagtaattactcagtaaagtgtttgaccaactagaagaataaggcactcattcatcactaagtcactgttcttctcaacttgactgtgttgagtttagcttgctaataagccacccaagaagtaagtgagaaaggaggaagctgagtggaggacataaaataagaaaagagtcactattttctcttggattatttgacttttatcaacaaactgtaaatctggcaaatccacagagagtttttttcctttgtggcatgggtgttgatattttcatggagtcttaactctagggatttcaccaacattcagacctccacccctcaatatacttataactaagcaacaaagtctagctgtacactag

SEQ ID NO: 196315 - DNA, 522 bp, Homo sapiens
ctctcaccctgccaactcagtagagggtggggatcccatttgtccctgactcccactggttccataccactctgagcacccaatcccagctatgcctccctcgctgcagccagtgtcttcacagtgacagctccagatggatcgccatcaccatcaacagtaattactcagtaaagtgtttgaccaactagaagaataaggcactcattcatcactaagtcactgttcttctcaacttgactgtgttgagtttagcttgctaataagccacccaagaagtaagtgagaaaggaggaagctgagtggaggacataaaataagaaaagagtcactattttytcttggattatttgacttttatcaacaaactgtaaatctggcaaatccacagagagtttttttcctttgtggcatgggtgttgatattttcatggagtcttaactctagggatttcaccaacattcagacctccacccctcaatatacttataactaagcaacaaagtctagctgtacactag

SEQ ID NO: 196316 - DNA, 362 bp, Homo sapiens
aaggctttgtgctcccgtcttaaggaaatggcagagacaataagtagggatggccagccagggagtgagaaggtcccagagacagaactttcagagctaacaccagaaagctttgggaaaaccacggcaagttgtgagcgytaagagtaaggaaattccaagaagggcagcatctccatgacctggaagacctagaacagtcttcagatgggtcaggatgggagctaaacacagccctaaagatgtacttacaccaatattaaattgcaacactcttgagagttattgtttcttgtgttgagcttttctgcacgatgagccttaggcatgcagcaagacagatgagccccaaatcacaccaa

SEQ ID NO: 196317 - DNA, 362 bp, Homo sapiens
aaggctttgtgctcccgtcttaaggaaatggcagagacaataagtagggatggccagccagggagtgagaaggtcccagagacagaactttcagagctaacaccagaaagctttgggaaaaccacggcaagttgtgagcgctaagagtaaggaaattccaagaagggcagcatctccatgacctggaagacctagaacagtcttcagatgggtcaggatgggagctaaacacagccctaaagatgtacttacaccaatattaaattgcaacactcttgagagttattgtttcttgtgttgagcytttctgcacgatgagccttaggcatgcagcaagacagatgagccccaaatcacaccaa

SEQ ID NO: 196318 - DNA, 528 bp, Homo sapiens
aaagctttgggaaaaccacggcaagttgtgagcgctaagagtaaggaaattccaagaagggcagcatctccatgacctggaagacctagaacagtcttcagatgggtcaggatgggagctaaacacagccctaaagatgtacttacaccaatattaaattgcaacactcttgagagttattgtttcttgtgttgagcttttctgcacgatgagccttaggcatgcagcaagacagatgagccccaaatcacaccaagttccaggtcatgggggcccagatgctggctggggcctccatggggaggaggcctgaggatgagacatgcctctcctactctattccagccctgagaagtggggatgaggcaaaggggagcscaatggctgctgaattccattctctttccttcctccatgggaaaaggtagtcttgcccaaagttgtacagactcacaagcaggagttaccagagaatatctctcaagatcttatttcactccaagtttctggaaacaagggctaaatacc

SEQ ID NO: 196319 - DNA, 587 bp, Homo sapiens
acacagaaggtaagagcaatagaatcacaaaaggtatacaaaaggataagsagtactggtaatgttctattccttaagttgagtagtgggcacacagagagtatgtttcttgctttatgtgtgtgtgtgtctgtgtgtgttctttatatatagcacatatgtgaatgtatgtaggtagatcatatatacatgtttacatatgaactttttcaagccaaaatgctttaatgctttgaatgcttaataaattatcctctttggaaagcatcctaaatgtaattataatgccaataataattagcgataacgaaaacacagttctgtggagactgtgcaaaatttcttttatttttctccttgccacatgatgggaggacacaacagaaggacaacaaacctcccagaaagtctagaatgttctgaaggtcttcatagagtgttctgccattagctaatagccagttacaagtctcttttacaattctagagaaacacttcccacaaagaattctgggctgttttcttgtttgtttgtttgtttgtttgttgtttatttgtttttgaagtgcaattccatgtgaaactgt

SEQ ID NO: 196320 - DNA, 587 bp, Homo sapiens
acacagaaggtaagagcaatagaatcacaaaaggtatacaaaaggataagcagtactggtaatgttctattccttaagttgagtagtgggcacacagagagtatgtttcttgctttatgtgtgtgtgtgtctgtgtgtgttctttatatatagcacatrtgtgaatgtatgtaggtagatcatatatacatgtttacatatgaactttttcaagccaaaatgctttaatgctttgaatgcttaataaattatcctctttggaaagcatcctaaatgtaattataatgccaataataattagcgataacgaaaacacagttctgtggagactgtgcaaaatttcttttatttttctccttgccacatgatgggaggacacaacagaaggacaacaaacctcccagaaagtctagaatgttctgaaggtcttcatagagtgttctgccattagctaatagccagttacaagtctcttttacaattctagagaaacacttcccacaaagaattctgggctgttttcttgtttgtttgtttgtttgtttgttgtttatttgtttttgaagtgcaattccatgtgaaactgt

SEQ ID NO: 196321 - DNA, 587 bp, Homo sapiens
acacagaaggtaagagcaatagaatcacaaaaggtatacaaaaggataagcagtactggtaatgttctattccttaagttgagtagtgggcacacagagagtatgtttcttgctttatgtgtgtgtgtgtctgtgtgtgttctttatatatagcacatatgtgaatgtatgtaggtagatcatatatacatgtttacatatgaactttttcaagccaaaatgctttaatgctttgaatgcttaataaattatcctctttggaaagcatcctaaatgtaattataatgccaataataattagcgataacgaaaacacagttctgtggagactgtgcaaaatttcttttatttttctccttgccacatgatgggaggacacaacagaaggacaacaaacctcccagaaagtctagaatgttctgaaggtcttcatasagtgttctgccattagctaatagccagttacaagtctcttttacaattctagagaaacacttcccacaaagaattctgggctgttttcttgtttgtttgtttgtttgtttgttgtttatttgtttttgaagtgcaattccatgtgaaactgt

SEQ ID NO: 196322 - DNA, 578 bp, Homo sapiens
attttttatctttaggatcttcctgaagcttccataggtttatagcacaactgaaatattttacaacttaaaataatagaataatatgaagctagaacycaatgggacctagatatcatgtagtatcttcttcatttcacagagagttatgtttcagagggtgtatgcccaaggctcatagaaagccaatcctcctgtgacatctgtcaccaaaatagactcaaatagctacacaaatgctgcattctcaattatttatctgtgtgcaggcttaccttggtgaatgctttattgaagaacaagatttggacttccattttgggtagtggaggactagattatttggatcaactctcagaacacacaaaaaaggaaagactatgtttataagcaacaaagagctaacgacacaatgaagacagacatcttggaataacagaaatgtgggtctacttttgctccaggagcatgtgctagctggaagacacatctgagtctgagctgagtttttaatgcctacacggtacccatggaagacaacttagagcctgagtcatgccatggtagaaacccagatg

SEQ ID NO: 196323 - DNA, 578 bp, Homo sapiens
attttttatctttaggatcttcctgaagcttccataggtttatagcacaactgaaatattttacaacttaaaataatagaataatatgaagctagaactcaatgggacctagatatcatgtagtatcttcttcatttcacagagagttatgtttcagagggtgtatgcccaaggctcatagaaagccaatcctcctgtgacatctgtcaccaaaatagactcaaatagctacacaaatgctgcattctcaattatttatctgtgtgcaggcttaccttggtgaatgctttattgaagaacaagatttggacttccattttgggtagtggaggactagattatttggatcaacyctcagaacacacaaaaaaggaaagactatgtttataagcaacaaagagctaacgacacaatgaagacagacatcttggaataacagaaatgtgggtctacttttgctccaggagcatgtgctagctggaagacacatctgagtctgagctgagtttttaatgcctacacggtacccatggaagacaacttagagcctgagtcatgccatggtagaaacccagatg

SEQ ID NO: 196324 - DNA, 587 bp, Homo sapiens
ttttttagatcctttgagattttatacgtagacaatcatgtgatctacaaataggtgaatttctttctttctgatcagtatggattctctttacttttcttttcttattagacactatgatagtaagaatttccagtatgatgttgaatagcaatggtgagagtgaacattctcacctaaatctcaattttagtggaaagccatttagcattttaacattaagttgatgctaactatagcattttgtagacaggaaattctttatcaagttgaggaaaccaccctctattccttactgataatttttgtcattaatatgtgctgaattttgtmaagtgcgtgttgaattttgtcaagtgcgtgttgaattttgtcaaaagattttttctcctaaattggtgtgatcatgtgattttttttcttctttagcttgtgaatacagtggattacactgattgatttttaaaagtagtaaaccagtctggcatccctagaataagaatttacttgtggtatatcattttctttatatattgctgaactctattgggaaatattttaataatgatgtttcagtttataagata

SEQ ID NO: 196325 - DNA, 650 bp, Homo sapiens
ccttggttaatgatgcttggttgccatcatggaaatggccagattaacgcctatggggtttattaaacgtttagcaacattgcatggatacattaaaatggagaaaatggagaatgccctttcttttctctttctytctctctctctctctctatctctatctctctgtgtgtgtgtgtgttttaagaaccaaaaggcaaattacaatttttttttaactttattttggttcaggggtacacatgcagtttccttacatgggtaaacccgtgtcatgggggtttgttgtacagattatttcatcacccaggtacctagtatccagtagttattttttttttgatgctctcccttctcccaacctacgccctcaagtacgtcccagtgtctgttgttcccctctttgtgtccacgtgttctcatcatttagctcccgcttgtaagtgaaaacatgcggtatttggctttctgtttctgcattagtttgctaaggatgatggcctccagctctatccacgttcctgcaaaggacatgatctcagagaacgccttttcaatgttagcctcattcttaattcaacaactcagtatgtgcctttgaaaatctgaaatttgtttaactttcctttaaaagaagaccatcaagaatg

SEQ ID NO: 196326 - DNA, 325 bp, Homo sapiens
cacatcacagtctcgtctaatttttctcttgtctaagtgtccttcagcatacttttytgtatctcctttattcttattaccaattcatattcagttgaaaagagtaaccctttaaacatgtaaacttattcttccagcctcaggtttaaattgttctaatggtttcccattgctcttaggattaagagggcatttccctgaagtcacctgaaagccctctccgcctttgccttcatcgtgttctcactctctgcacactccctggtgtggccaactctcaccatgctcctgcttaccaaaggtccttggcacagactttctttga

SEQ ID NO: 196327 - DNA, 497 bp, Homo sapiens
aatgacaagttaatggatgcagcacaccaayatggcacatgtatacatatgtaacaaacctgcacgttgtgcacatgtaccctaaaacttaaagtataataataatgataataataaaaagaaagtagaatgatggttaccaaggttggtagggttctgcgggaatatggagttattgtttaatggacatagagtttcagtttggaataatgaaaaagttctggagaaggtgagagacaatgatggaacaataatgtgaatgtatttagcgccaatgaagtgtacacttaaaagtggttaaaatggtaaattgtatgttatgcatattttgtcacaataaaaatgtgtgtttaaaaaaaaagaaatggaggataaattactacacaaaaataaagatcaaagaaattctcaatcatgtactgagaaagttcctataagagagagaacactgtgagccattcatggctagaaagctttcccagaagaggtgggatatg

SEQ ID NO: 196328 - DNA, 497 bp, Homo sapiens
aatgacaagttaatggatgcagcacaccaacatggcacatgtatacatatgtaacaaacctgcacgttgtgcacatgtaccctaaaacttaaagtataataataatgataataataaaaagaaagtagaatgatggttaccaaggttggtagggttctgcgggaatatggagttattgtttaatggacatagagtttcagtttggaataatgaaaaagttctggagaaggtgagagacaatgatggaacaataatgtgaatgtatttagcrccaatgaagtgtacacttaaaagtggttaaaatggtaaattgtatgttatgcatattttgtcacaataaaaatgtgtgtttaaaaaaaaagaaatggaggataaattactacacaaaaataaagatcaaagaaattctcaatcatgtactgagaaagttcctataagagagagaacactgtgagccattcatggctagaaagctttcccagaagaggtgggatatg

SEQ ID NO: 196329 - DNA, 546 bp, Homo sapiens
actattttgctatttgttttctacatgtgtatgcctttttttgctcctctatttctccattgctgccttttttctgaaataaaaattttccagtgtgcaattttaattcccttgtcatttattttactgatttttggttgttagtttcttagttattgcctggtgttataattaacatcttcacttatagcaacctagtttggattaataccaatctaattacaatagtatataacaattttgctcttatacggctttgatttttyactgtctttctgctgttattttcatataaattatatttttatacagtgtgtgcccctctatacagatttactgctttataaaatttttctttttgattttttaaaatgcaattttcttttaaatcagatagtagaaaacagttacaaacaaaatatacagatatttatgaggtaaatgcatatatttatttatgtaataacctttactagtgctctttctttcttcattagatttgagttactccaaggactctagtattttttatagcacaggcttcta

SEQ ID NO: 196330 - DNA, 433 bp, Homo sapiens
ttctttcttcatctttgtcaacactttgattataatatgtcttgatgtgggtctctttgaatttatcctgcttgggtttcattaaacttcttggatatgtagattatttttaaatcaattttgagctttggctttttttttttttccaaatagtatttttgcaccttttgctttctctcctttttcttgtactccyattacactgaagttggtacactttatctgggaatattaagatatcaccagataaacacaaactaggagtctgttcatttttccttttttttttctttctgttcttcatattgaataatctccattgacattccttcaggtttgttgattctttcatcgccatggtcacatttactgctgagccatgctagtaaatgtttcatttcagttgttatattctcaattccagaatttctgt

SEQ ID NO: 196331 - DNA, 433 bp, Homo sapiens
ttctttcttcatctttgtcaacactttgattataatatgtcttgatgtgggtctctttgaatttatcctgcttgggtttcattaaacttcttggatatgtagattatttttaaatcaattttgagctttggctttttttttttttccaaatagtatttttgcaccttttgctttctctcctttttcttgtactcccattacactgaagttggtacactttatctgggaatattaagatatyaccagataaacacaaactaggagtctgttcatttttccttttttttttctttctgttcttcatattgaataatctccattgacattccttcaggtttgttgattctttcatcgccatggtcacatttactgctgagccatgctagtaaatgtttcatttcagttgttatattctcaattccagaatttctgt

SEQ ID NO: 196332 - DNA, 433 bp, Homo sapiens
ttctttcttcatctttgtcaacactttgattataatatgtcttgatgtgggtctctttgaatttatcctgcttgggtttcattaaacttcttggatatgtagattatttttaaatcaattttgagctttggctttttttttttttccaaatagtatttttgcaccttttgctttctctcctttttcttgtactcccattacactgaagttggtacactttatctgggaatattaagatatcacsagataaacacaaactaggagtctgttcatttttccttttttttttctttctgttcttcatattgaataatctccattgacattccttcaggtttgttgattctttcatcgccatggtcacatttactgctgagccatgctagtaaatgtttcatttcagttgttatattctcaattccagaatttctgt

SEQ ID NO: 196333 - DNA, 625 bp, Homo sapiens
aatcttcgtggaattaaacctttgctctcactcttagcctgttttgacagcatgacctaactacatgcagaaggtggcagacaaagcagatggtggtgcargcagttgggctgctggcaggtggaaactgggagcaactaagtccgtggcaaagatttttcaaactgaatcttgattcagtgtctagcatgccatggggaaggagtgaaaacacaccctgatgaaaacccatccagagtcagcacatttgagaagttccactgtgaggtaaggaccaggagacagcactgacctcaaggagtcacatgagcaggtgcgattaggtttcctaggctatgccctcctgaattttccaggcctgggcagcttccacacacctgtatgagctgtataccatctagcctttctgttacctacacttcttatcaacactttttggtgtgagagtttgtcctttattgtaaatgtattggtgagacctaaaaggttggagtttggtttaaaacttgtaagtcatggattttacaaatgaactaagcaaatggattaaccattccttaaccgcgacaaaaataaagaaagaaagaaagaatacatcatagtcctggaatagtatcaaaggtaa

SEQ ID NO: 196334 - DNA, 472 bp, Homo sapiens
tttgtggttgattatggcccttgtgggcatgttacttatcatagaatgtaggcactatcaaatatgtggttttgttcactgacttatccaaaacacctggtagagtgcctagcagagtaggtactctgtaattttttaaaattaataatagattggtctcaatctggctgcccacctgccatcccagccttagacttcaacttgacaccaataggtttgcagctataatgagtgatgaaacacactccagacaaatgctgttaacactcctgtgttattaggtgctgtgatggcaaaggtgctcacttatttgactgaaagtcatggtcaagggaactcctggacttgagtgcagagagagcatgaaagctctactcctgataggaatttyaatgaactcttccatttcggtttctattggctacattttattaaagctctttatttctgggtactttacattacagatatt

SEQ ID NO: 196335 - DNA, 459 bp, Homo sapiens
ccttccaaatctgcatcctattaattatatactagttcttctatcatagaaatataggctattaaatcaagtgctctcctggataatagaagtgargtgttattatcaaactcttgtcagtaacagattcctttctcacttctgccatcttcctggactccctaccatttctctgtatgtaagtatacttacaagcatgtgacatgcagagaatataaagataaatagataatacccccacctcgagtagattagagccccgtgaggggaagaagacatgtaagttaataattaagcaacaacctgatagccgttctaaaggagttaagagctcagaaggggagaaattgactctaccttaggaattcgggaaaagtgtcacaataaaggtaagagccaaactgggcataagaaaataagagggagtatgcctggcaggggagggagactgcattccca

SEQ ID NO: 196336 - DNA, 598 bp, Homo sapiens
tgagtatgggctagtctggttttatttgtagtttgttggtacttcagtgggtccataacttagaacatgaaatatgtattaatttcttaggcatgtaacaattatttctccagagcacaaaaacacaaggatttatgcaccaaaagtgtttgtagtcagacctgactccctgctggccacaatcatataagaatgtacaaatgtggaacacttctgaatttattcatttcttagctttcttctaattactaatttcacttaatgaactgtgccagaagatcataactaccctgaccaacagtttttaataagacaaacaataagccatgaagagagaagggccaaattacttatcgaagaaggatttacatgaaatgagggctgaattgtttaactggaagggccacatctacaggtctccttacatgagaccataatgaaaaccaacagatgtgagagcacaggatacagtcctgagcagcccttcagccacacctgcatatttagctacaacttctgaagacaagaagcactggtggacttaatggcttcttattaccaaagcraacaattaaatctggccctctgagaacaaggg

SEQ ID NO: 196337 - DNA, 606 bp, Homo sapiens
ctcttgtcacaaggtactagtttaaaagaaacaaaaacgctatttacagttaaagtgatgtatatttgaatccatattacagcaagattgggtagacatttactaatcttattttccttttctccaaaaagaaaggaaaaataaaactcccagtgttttctgcagttgagttaattacaggtacctgggttctggccagtgatatatagaaggaagcaatttaccattttcatgcctatttcataaaattcaatgcatggtcatccataaaggcaacaatggagactatgcaatgaaaatggcagagcaacttcaactgcatcagacagggaagtaaatcttaatttactaagccactgagagtcccaagcttgtttatcactgcaccacaacttagcccaacctgactaatactggcagtggatactgtatcatgaaacttttaagatgtggcagagcaycaggcatcaaagaagctaattcacaggctggaaatacggtgatctaagttgcacaatgagaagcaggttgtaaaactattatcaatgataacttaatagacaagactacagcccactgcatcagaggctctagaggaagaaaatg

SEQ ID NO: 196338 - DNA, 554 bp, Homo sapiens
ggcagttaacatgccacttcaaggatgagaatgtttcttgggaaatccaacagtgacaggaaagcttgagtacactctttaatagcatgcaaatgatggggctggaaattcccagaaccgttttccactgtcctgcactctctctatttttggtattgctattcaatagctctcatgtcctaggaaaatcatatcactgctgagaaactctttctttaaaggcatctataacttccatgctctcatcatcttctttcatttgttttgggacagaactttagaaagttaaattgaaaatttaaaaactaaatataaaagcagcagccactgggtgtcactgatttaccacttgaatgtacctcatcccacatatctatagcaggaaaaaacctggcctttttattggactatttcaaagcactttatgttcttgagtgctatagataagcagaagaatttaaaatgtttaaaacatgaatcttctgacactgagaagctcaaggaccattactrtatgctctgttacagctatttataactgtaagtaataatat

SEQ ID NO: 196339 - DNA, 426 bp, Homo sapiens
atttataggtttgcagtccaggactttaccaagtatagttctacagtaaatcatagctgaattgttttccaatgaagttcaaattttgaaattaaagagaaattacaagtgttgttagatttagcttctggaaaataaatgtttcaaccatacctgttgtataatgtcattgacctctgtcaattaattgggagaaaatggtttgcctgtctgcttggttgtttaggrgactaaaggtctaactatacaacacaccttggtgtatgaggagaaaatgtgagctctgtattctgactttgttggctgagtggatgtagagttaatgtttggttgacatttattgagcatctatttagccaggcactgtaatagggtctggggaggctataaaggtaagtgagagaatttcttcagatgactacattg

SEQ ID NO: 196340 - DNA, 406 bp, Homo sapiens
taggttcagaattttgaatcatcaggtacagtggaggaaaagaatgacaagtggggcaraaaacagggagctaatcaaaactctgtgtataatctgatctgcacagtctgtgtatattgaacaattaattgttcaatctgcttttcaaacacacagaatgttcaaaaccagaaatctttgcttaagcaagtaatgagaggcttttttcactggagctctgttgaaaaggcctgctgagaattaatctattttgtttgagtttcctacaagggcaatatattcacatagtacttgttcaattaaaaaccaggtatagatggtacacagtagtggcatttgattactgtcaccatccttacctaaaaagatgagaaaatattctaaaagtgtcttggtcctcaagaaa

SEQ ID NO: 196341 - DNA, 463 bp, Homo sapiens
tcatacccaaattcagaaaaacactagcagttctgtcttaaatgtactgttctaagtggggtcccactctttaatccttgcctcttacataccctccaacatctggccaaygagcctggactgcacaggcaccgtgatgaagaaaagcaggtggggactaacagaatgatggggctgttgcagagcaacctcaacatggctccagcttccctcccttggtcatcttccctttccaactgaggtgatccttgttaggcctgaggtcttaagaggaaacaattagaacaagaaacttcccttcacttcaaggaactctgataaaatgggcccaaaggagccctcaaagcatgagcctttcccatactagtaattctggaaattccttctaagagaaaaggaggcattgtctccacaaagccaggtcaaaatggccagcacattcttccttttatgaatctctgct

SEQ ID NO: 196342 - DNA, 609 bp, Homo sapiens
tatacttaccattccaattttattacaaaggacacaaatcaggaccagctagatgaagagacacatagggcaaggtctgggggtgggtcctgaatgtggagcttcagactcttctctccatggaatcaggttgtgtcaccatcttcacacactgatgtgttcatcaaccaggaagctcaactgagctttggtgtccagagtttttattggggttcattacataggcatgattgattacattattgatcatgtgattgaactcaccctctagccccttaccttgcctagaggccaggctgatatcacctggctcaaaaccccaatcttctaatcccatggttggtgtttctagcccccatcctgagtcacctggttagcaaaaactcaggtgtggttgagagacccaccatgaataacaaagacactcccawccttggaaaattccaagaatttagaggtgatctctcaggaaccagggacaaagactagccccaacagaattgctccccaagtaattataagttgaagaaaacagaggctgtaactgtcccctgcaccattcagagcaaccccttgcccaaggaaatggtgaatctgcctggaagagga

SEQ ID NO: 196343 - DNA, 606 bp, Homo sapiens
tagaaacttccctgaccacatcccttgcctccaaggaccttcctcttcccactctgtgctactgccactccttggacgtgcacttaacgcatttccacacagaatcgtaacagatggccgtccctctgtctcccttctcccactggacgctgatttctttgaggaacaggacaggattctacttttcatctgggtgctccataaaatgtctgctggatgaataaagaatgaataggagactgcatgtgtgcattcaggaaggaagacgtgtgcctctgtatattcccctgcctggggaactcttacrcattctgcaagacaagagtaatgttgcctcctctgggaagccccccgggactttcccaggctgatagaggccaagcctccctggaattgagtgcactaagacaaatgacactctaacatcacaagcctcaccctgacactcctttcttttcttgctttttgtttgtctctcttggacaatagactcattactgaattgctgtctgttttattctctgctatgaagaaaactttccctatcacttcgaatgctgcttgagcagtagcagacactcaatattaatatttgctgaatgaatg

SEQ ID NO: 196344 - DNA, 633 bp, Homo sapiens
gttctatgagcagctctcgtctgaagggaactaattgattccaattttcattttaccggatctcataattctttatcatgacttcctttacgacttagagggctttggcgctgaactgctgtgtaacaggagggctgtgtgatccacacgataatcatttattcaccagcaggacaaatgtgccttgttgtcattaagaggatgcacgattcttacccctgtagcccttcttttcccatctgagacaggtgtgtcaatctccragctgcgggaaaagtcatcttcccctctgacaaggaagggaacgggaggcctccaaggaatttcagagacgaatctggaatctcagcctcctctcctcagacattccaagacaaatggaaggtttctgggaaaatcgtgctttgaggtggatccctggtggcaggtggcttgagacaaaattcatttaaggagaagggacatagctacatctctacacgggcaggagttcacctccctaaagctggctgggcaaagttccagaaagccaggttattcggcaggttttgaaagacaggtcattgctgttctgtcctctctgcaaaatccacaaaaagtcagctcctccctgcagctgacttcacagcttcc

SEQ ID NO: 196345 - DNA, 633 bp, Homo sapiens
gttctatgagcagctctcgtctgaagggaactaattgattccaattttcattttaccggatctcataattctttatcatgacttcctttacgacttagagggctttggcgctgaactgctgtgtaacaggagggctgtgtgatccacacgataatcatttattcaccagcaggacaaatgtgccttgttgtcattaagaggatgcacgattcttacccctgtagcccttcttttcccatctgagacaggtgtgtcaatctccgagctgcgggaaaagtcatcttcccctctgacaaggaagggaacgggaggcctccaaggaatttcagagacgaatctggaatctcagcctcctctcctcagacrttccaagacaaatggaaggtttctgggaaaatcgtgctttgaggtggatccctggtggcaggtggcttgagacaaaattcatttaaggagaagggacatagctacatctctacacgggcaggagttcacctccctaaagctggctgggcaaagttccagaaagccaggttattcggcaggttttgaaagacaggtcattgctgttctgtcctctctgcaaaatccacaaaaagtcagctcctccctgcagctgacttcacagcttcc

SEQ ID NO: 196346 - DNA, 378 bp, Homo sapiens
catgcacacacggacatgcacagacacacgcacgtgcacaggtgcacacacgcacacaccaccccttcttcccctaagtcttctctaggagtttttggtcctagctttgctctgccatcttgaagacacgtcccacagggtatggcttccgtcacgcccaaattcctgtcctgagccttgatctgcccaccctcaggcccacctccgggagaggagatgcatgctcaggatactctccaggagcagctaggaggcggcattctagratcaacaccactcatttctgcaggtgcaggggaatcatcatcctgctagcaagcaaaggcacctgtagtctgctgggcgctgttcagaccccaggaaatgagaaataagaag

SEQ ID NO: 196347 - DNA, 603 bp, Homo sapiens
gcatcctgttaagcaccttactccccattttaatcctggctattctattaccacacccattttacaggtgagcaaactgakgatcagtgaggttaagaagcttgcacaagagcactcagctggcaaatgttggtgcctgcatttgaaccttaccttgccccactcccaagccctttttcaaggattgcgttttcgaaactcccaccccatgagtttatccaaaggggggtccatggagcaataattccatggaatattctagagaaaagtgactctggttgaaaggaaaaaaaaaaaaaaaacagcttgtgagaagcactgcacctagctcttgaagaaccgcattgcacattatggtaaaggctttgaaaagcctgcttagctttgcttatttctgtattttccaaacttatttgagcaaagaaaaaaaaaagacatcatgttctgtgaaacccactttgggaaccacactgcctgccaggaagaataggaagacctgccttgctcactccacaaaattgctggtgtgattaaacacgacagcagatatgactatgctttgaaaaaagtctaaagcatgatcctggtataaggtattgttat

SEQ ID NO: 196348 - DNA, 597 bp, Homo sapiens
ttatgaagagcgaaagaacaaaacttccacagtgtagaagtggacccaagcaggttcctgctgtgggcttgggtggccggtttttattcccttatttggccccgcccacrtcctgctgattggtccattttacagagggctgattagtccattttacagagtgctgatttgtccatttttacagagtgctgattggtgcgtttacaaacctttagctagacacagaatgctgattggtgtgtttttacagagagctgattagtgcatttccaaacctttacatagacccagtgctgattggtgcatttttacagagtgctgattggtgcatttacaaacctttagctagacacagagtgctgattggtgtgtttaaaatcctttagctagacagaaaagttctccaagtccccacccaacccagaagcccagccagcttcacctctcatcagaactctcatttagttctggaaatttttctgttgccactgtttaattttgtctctaccaaaagatgattgaaaatcgtatccctcctcagaaagattgaggcaaaggattgatttagtcttaagctttttcaaattcttcacccca

SEQ ID NO: 196349 - DNA, 597 bp, Homo sapiens
ttatgaagagcgaaagaacaaaacttccacagtgtagaagtggacccaagcaggttcctgctgtgggcttgggtggccggtttttattcccttatttggccccgcccacatcctgctgattggtccattttacagagggctgattagtccattttacagagtgctgatttgtccatttttacagagtgctgattggtgcgtttacaaacctttagctagacacagaatgctgattggtgtgtttttacagagagctgattagtgcatttccaaacctttacatagacccagtgctgattggtgcatttttacagagtgctgattggtgcatttacaaacctttagctagacacagagtgctgattggtgtgtttaaaatcctttagctagacagaaaagttctccaagtccccacccaacccagaagcccagccagcttcacctctcatcagaactctcatttagttctggaaatttttctgttgccactgtttaattttgtctctaccaaaaratgattgaaaatcgtatccctcctcagaaagattgaggcaaaggattgatttagtcttaagctttttcaaattcttcacccca

SEQ ID NO: 196350 - DNA, 513 bp, Homo sapiens
agctggctaatactctctgcctgaggctgagaattccataatttgaagccttgctgagttggaaaagccgactgtaagttgaatgagaagtccatattgctgagttggaaaagttaactactgtagttcatcaactctaacacaatttttaactgaaaratatacctcaaattcatacatttctcttcatttctatttgcatgattctaatctagtttttcatcatttttggttgaatataatgaccctttctgtttttccctcttgcctgcttctagttcattttctacatagcagccaaaaatcttctttaaaaatacattatgttgtatcagttcactgcttggtggcttttcatttcatgtaagatatgatcgaagcatcttactgtggtgtacaaggtgctgcaccatctggtccccgtgcaacagctgccacactctgcctctctcagcacctcttagaccatgagctttctttcatttttttgaacatgccaagctcctgctatgg

SEQ ID NO: 196351 - DNA, 513 bp, Homo sapiens
agctggctaatactctctgcctgaggctgagaattccataatttgaagccttgctgagttggaaaagccgactgtaagttgaatgagaagtccatattgctgagttggaaaagttaactactgtagttcatcaactctaacacaatttttaactgaaagatatacctcaaattcatacatttctcttcatttctatttgcatgattctaatctagtttttcatcatttttggttgaatataatgaccctttctgtttttccctcttgcctgcttctagttcattttctacatagcagccaaaaatcttctttaaaaatacattatgttgtatcagttcactgcttggtggcttttcatttcatgtaagatatgatcgaarcatcttactgtggtgtacaaggtgctgcaccatctggtccccgtgcaacagctgccacactctgcctctctcagcacctcttagaccatgagctttctttcatttttttgaacatgccaagctcctgctatgg

SEQ ID NO: 196352 - DNA, 570 bp, Homo sapiens
acatatatattgagtgccagacaatattttaaatgttttacaggcatcttatttaattcttacatttttgcagatgaagggaaggagtcacaaagaggctaagtaattttattggggtcatacttctaagattaaattgccctaaatgtgatacttaatacaatttgttataattcagtctcatgttttttgcataattattgacaatagcccaaatatggaatcaacctaaatgcttatcagcaaatgaatagtttttttaaatgtggtatacagatacaatagaatactatttatctttwaaaaaaagaaagagatcccattatttgtgacaacacggatgaacctgaaggacattaagtaaaataagccaggcacagaaagacaaatatcacatgatctgttatatgtgaaatctaaaaactttgaactcagaagtaaagagtggaatggtggttaccaggggcaaggttgggggtaattgttggggagttgttggtcaaaggatgcaaaatttcagttgaggtaggaagaataaattcatgagatcttttttacaacatggcaact

SEQ ID NO: 196353 - DNA, 470 bp, Homo sapiens
ccattcaaggtgacactaaaatttaccatcacaaagaggcagagaaaagaggagggcaaatgtgaaaytgtgaagtaatgagcatgattggagctcagagcatgaacaatcaggaaatacaagacattcaggagagttaggctaccttcaagaacacagatgcagggaagaggaagaaaccagcaactatgagcctatacaatgtgccagtaacagtgacatcagcctttaaatatattcgatggtttactcttcaactcactgatgagatctgtattgtttacttcatatcacaaatgtgaaaactcaggtgcacagaagctaaatgaaatattagagaacaaaaaacaatgggctgggcacagtggctcacacctgtaattctaggactttgggaggccaatgtaggtggatcacttgagcccaagagttcaagactagcctgggcaacatggagaaaccccatctct

SEQ ID NO: 196354 - DNA, 441 bp, Homo sapiens
ttctatgcagggaatagaatttactggagctgacaataaatgaggtttgtataagctttgagtcaatgcaaataatctgattgtcagactcacataaaccagagatttttcagagtatcaaacattaccaataatttcaagaatatgggcattcaagaggctaagacaaaactgggagatttctgggactctgaggactatgccccaggtcttccttctgcactggacacgtagtctytggctcagagtagacaaggtctgtgagtaagatacataggttattgaatcatacagtgggaagcagttattaattatttacaaaacattctatgaagtgtctttaaaaagttcttgggaaatgtgtattatgaaaaatctatgcatcaattgctaaaaattgtttgcaccataataaattagtattaactttttatgacatgt

SEQ ID NO: 196355 - DNA, 467 bp, Homo sapiens
agcctgtttctgtagcttcttcctgatatccggaggccacctttgtgataaacttgtcctttaggattagctgtccctcgactgaatcaggagctagagaggtgtgctttaccaargcccctcttagcctttccggaaggcagtgggattctcatctaatccctgatctatcatggcgatcttggaggaattgagaggcttagtcctagttcttcacaagccctccagtatgtacacctgaatgtgtttccccctccattctcccatttcatccttagggtcccatttagggtcctccagtggtgctgctatttttccaatcatataagtctcattcccttccttggccctatataagatacaaagctcatcccccaaattctctactacttgcagggtggcctgctttccagtggtggtcagggattgattcaaaagtaacatgacatctttccaggagagctcaa

SEQ ID NO: 196356 - DNA, 574 bp, Homo sapiens
ctgttttaagggcaatgggtagcccctagggacatgtgcatttgcaaaacatctctgcttagcttgggccaccgtaacaaagtaccacgaacacataacaaaccatggtctaggtrgtgcataaaaaacaccaatttatttctcagaattcaggaggctgagatctgggatgagggtgccagcatggtctggttctggtgagggccctcttctgggctgcagactgctgatttcctgctgtatcctcacatggcagaaagagagctagctgactctccagcctcttcttataaggatgctaatcccacttataagtgctctaccttgaagacctaataacctcccaaaggcccaacctccaaatatcacatcagggattagagtttcactatacggattggggcagggggacaaacagtccattgcaatctttccagctgctgtgtggagtggggtgtgaggggagaaactgatcatggtgagatgctggtgtggggtctcaagtcagggcagggaggatgcggggagcagatagatttgaggtacatttggaggcaaagccatggagttttgg

SEQ ID NO: 196357 - DNA, 630 bp, Homo sapiens
tgcctgtacatatgtaaaagttatgtctcctaatttctgattcagggctttttctactatacttcgctaaactctggatgtttttcctctttaagagtcccctataaagatcagctaacaccctgggagaaattaatgtaaccatttgaaaggaaatagaccatagattaagaacataggagracatattaatatttctaaattttctgcaataaaccagtactaataaaaaaaagaacataggaggaaaaaaatgacaaaattaggagaaaaagggaacattaaaaagtgaataagtaagagagatggtcaataaaacctttgcttatttcggattatcatgtaggggtgatctcaggaatgtagtttgtcaatgcataaggaaaaacagggacttatactcaagacattcacatgttttatttctgcacatctcgatactaaagtctaagaaatatacagaatgaataaaatataattaattaatgtcaaaaactgtgaagggtctgagatttcaccaaacacgcaactagcatgagtgctaaaagaagacacaagattatttgttagagatgaaagacagtttattacttacagcaggtgccagggtttcaatattttttgcattgg

SEQ ID NO: 196358 - DNA, 630 bp, Homo sapiens
tgcctgtacatatgtaaaagttatgtctcctaatttctgattcagggctttttctactatacttcgctaaactctggatgtttttcctctttaagagtcccctataaagatcagctaacaccctgggagaaattaatgtaaccatttgaaaggaaatagaccatagattaagaacataggaggacatattaatatttctaaattttctgcaataaaccagtactaataaaaaaaagaacataggaggaaaaaaatgacaaaattaggagaaaaagggaacattaaaaagtgaataagtaagagagatggtcaataaaacctttgcttatttcggattatcatgtaggggtgatctcaggaatgtagtttgtcaatgcataaggaaaaacagggacttatactcaagacattcacatgttttatttctgcacatctcratactaaagtctaagaaatatacagaatgaataaaatataattaattaatgtcaaaaactgtgaagggtctgagatttcaccaaacacgcaactagcatgagtgctaaaagaagacacaagattatttgttagagatgaaagacagtttattacttacagcaggtgccagggtttcaatattttttgcattgg

SEQ ID NO: 196359 - DNA, 630 bp, Homo sapiens
tgcctgtacatatgtaaaagttatgtctcctaatttctgattcagggctttttctactatacttcgctaaactctggatgtttttcctctttaagagtcccctataaagatcagctaacaccctgggagaaattaatgtaaccatttgaaaggaaatagaccatagattaagaacataggaggacatattaatatttctaaattttctgcaataaaccagtactaataaaaaaaagaacataggaggaaaaaaatgacaaaattaggagaaaaagggaacattaaaaagtgaataagtaagagagatggtcaataaaacctttgcttatttcggattatcatgtaggggtgatctcaggaatgtagtttgtcaatgcataaggaaaaacagggacttatactcaagacattcacatgttttatttctgcacatctcgatactaaagtctaagaaatatacagaaygaataaaatataattaattaatgtcaaaaactgtgaagggtctgagatttcaccaaacacgcaactagcatgagtgctaaaagaagacacaagattatttgttagagatgaaagacagtttattacttacagcaggtgccagggtttcaatattttttgcattgg

SEQ ID NO: 196360 - DNA, 540 bp, Homo sapiens
agtctattactgtgcttcaggcaaagataacagtccaagtctaagctggacaaagatgcagcggtagggaaggaaagaagtgtttagattgcagagatgtttagaggatacaatcaacaggatatgaaaagaaaagtaagaggrtgccaaaaatgactccaagatttctgcctggtggaaacattaaagagtggcagggcatggtggctcacgcctgtaatcccaggagttcaaaaccagcctggccaacatggcgaaaccctgaatctaccaaaaatacaaaagttagcttggccgcagtggtgcacacctgtaatctcagctactttggaggctaaggcaagagaatcgcttgagcctgggaggaggaggttgcagtgagcctagatcgcaccactgcattctggtctgggtgacagagtgagaccctatctcaaaaaaaaaaaattaaaaaattaaaaaccattaaagagtgtatatcaagatgtcagttggataagcagagaggggctcagataggaaacctgggctggaattata

SEQ ID NO: 196361 - DNA, 555 bp, Homo sapiens
ggcaggaataagtaggtgcacaaggaagtgtcgaagtctattactgtgcttcaggcaaagataacagtccaagtctaagctggacaaagatgcagcggtagggaaggaaagaagtgtttagattgcagagatgtttagaggatacaatcaacaggatatgaaaagaaaagtaagagggtgccaaaaatgactccaagatttctgcctggtggaaacattaaagagtggcagggcatggtggctcacgcctgtaatcccaggagttcaaaaccagcctggccaacatggcgaaaccctgaatctaccaaaaatacaaaagttagcttggccgcastggtgcacacctgtaatctcagctactttggaggctaaggcaagagaatcgcttgagcctgggaggaggaggttgcagtgagcctagatcgcaccactgcattctggtctgggtgacagagtgagaccctatctcaaaaaaaaaaaattaaaaaattaaaaaccattaaagagtgtatatcaagatgtcagttggataagcagagaggggctcagatagga

SEQ ID NO: 196362 - DNA, 540 bp, Homo sapiens
agtctattactgtgcttcaggcaaagataacagtccaagtctaagctggacaaagatgcagcggtagggaaggaaagaagtgtttagattgcagagatgtttagaggatacaatcaacaggatatgaaaagaaaagtaagagggtgccaaaaatgactccaagatttctgcctggtggaaacattaaagagtggcagggcatggtggctcacgcctgtaatcccaggagttcaaaaccagcctggccaacatggcgaaaccctgaatctaccaaaaatacaaaagttagcttggccgcagtggtgcacacctgtaatctcagctactttggrggctaaggcaagagaatcgcttgagcctgggaggaggaggttgcagtgagcctagatcgcaccactgcattctggtctgggtgacagagtgagaccctatctcaaaaaaaaaaaattaaaaaattaaaaaccattaaagagtgtatatcaagatgtcagttggataagcagagaggggctcagataggaaacctgggctggaattata

SEQ ID NO: 196363 - DNA, 540 bp, Homo sapiens
agtctattactgtgcttcaggcaaagataacagtccaagtctaagctggacaaagatgcagcggtagggaaggaaagaagtgtttagattgcagagatgtttagaggatacaatcaacaggatatgaaaagaaaagtaagagggtgccaaaaatgactccaagatttctgcctggtggaaacattaaagagtggcagggcatggtggctcacgcctgtaatcccaggagttcaaaaccagcctggccaacatggcgaaaccctgaatctaccaaaaatacaaaagttagcttggccgcagtggtgcacacctgtaatctcagctactttggaggctaaggcaagagaatcgcttgagcctgggaggaggaggttgcagtgagcctagatcgcaccactgcattctggtctgggtgacagagtgagaccctatctcaaaaaaaaaaaattaaaaaattaaaaaccattaaagagtgtatatcaagatgtcagttgsataagcagagaggggctcagataggaaacctgggctggaattata

SEQ ID NO: 196364 - DNA, 449 bp, Homo sapiens
ggaattctgtttccaagagaattaaatacatgtgtacacaaaaacttkcacatgaatgcttctagcctcattatctatgatagccaaaaagggagaaataagcaaaatgtcgatcaatgaatgaatggatcaatcaaatgtggctctgtaaaacggaacaatacaaaggaatgaagcattgatgcatgctacaacatggataaacctccagaacattatgctaagtgaaacaagtcagtcacaaaagaatacaggctgtacgattccatttgtatgaaatgatcagaatggacaaatccatagacacacaaagtagattagtggttgccaagtgttaggaggaatgaggaatagagaacaactgttactggggtctctctcccgcgtgataaaagtgttctggatttaaatggtggtggcagttgtgaatatgctagaaaccactgaac

SEQ ID NO: 196365 - DNA, 624 bp, Homo sapiens
caacatgcatgttaccaacaggagccgaacaaggagacattcttccttcttgtttcaactctcatattgaaaacaagtgtgctttttatggtctatttcgtggctttttttgcatttttgtgctttttgttagtagctttatgtttatgatggcccccaagcctggtgtggaagaacccactagtgttccaaagcacaaggctgtgatgcagctgacatggaaaatatgtgagtaaggtaagctttgttcaggcaggagtcacagtgctgttggtcgtgagttcaatgtwaatgaatcaacaatatatattaatttaagcatctttaagcaggaactcacaaaaacaaggttagtattgatgggttgatgaaaatgttgtgacccaaggctcacaggaaccaaaccttctatttcccctaggagcaatgattctgtgtttgctaattcagtgttcgtggtgattttatacaacataactactacaagtaagaagaatcaactgtccatatttctaagtgtcattttcctaaaagactgctccataattttttaataattccagaaataagtaattgagcaacgagtgctctctgcagtacagactattctccagccctagcttc

SEQ ID NO: 196366 - DNA, 596 bp, Homo sapiens
ttcttcttgatcttagaggaaaagttttcagtttttcaccattgatgtatgaggtacaactaacagtatgatgttagctatgggctttatatatacagcctttattatgttgaggtaatttccttctcttcctactttgctgagtgtttttatcatgaaaaggtgttaattttcttaaatgcttttcctgcgtatattgagataattgtgtgattcttatactttgttctgttaatgtgctatatcacattgatggatttctgtatgttcaaccattcttgaatcccagaaatgaatccacttagtcatggtgtatgattctgctaatgtgctgttgaatttatttggctactgttttgttaaggatgtttgcacctatattcatcagggacwttagcccataattttattttcttatagtttctatttctgtgtaactctggtcgtatataataagtttgaaaatgttccttcttttcaattttttttgaagagtttacagattggcatcaattctttaaatgtttggtagaattcagcagcgacgtcatctggtcctgggcttttctctgttgggaagtttttgattactattt

SEQ ID NO: 196367 - DNA, 596 bp, Homo sapiens
ttcttcttgatcttagaggaaaagttttcagtttttcaccattgatgtatgaggtacaactaacagtatgatgttagctatgggctttatatatacagcctttattatgttgaggtaatttccttctcttcctactttgctgagtgtttttatcatgaaaaggtgttaattttcttaaatgcttttcctgcgtatattgagataattgtgtgattcttatactttgttctgttaatgtgctatatcacattgatggatttctgtatgttcaaccattcttgaatcccagaaatgaatccacttagtcatggtgtatgattctgctaatgtgctgttgaatttatttggctactgttttgttaaggatgtttgcacctatattcatcagggacattagcccataattttattttcttatagtttctatttctgtgtaactctggtcgtatataatragtttgaaaatgttccttcttttcaattttttttgaagagtttacagattggcatcaattctttaaatgtttggtagaattcagcagcgacgtcatctggtcctgggcttttctctgttgggaagtttttgattactattt

SEQ ID NO: 196368 - DNA, 311 bp, Homo sapiens
ggtttgggggtccttttcagttggggacttgccactgagttgcatatctgggcagtgctttgtgaggattgtggttgggggctggcggaggtgtgatgctggatcacaggtacctggactcagagttaaggggatgatgagtggagacgggctgaagacaagcacaggcttcacaagctgagatcctcctctgtcagcaagtctcggtrtgcctgttgtgacacatgtcttttgatgaaaggttctaaatgtctcagatgacagtattttaggagtgttcttttgctttttggcaaatacaacataggaaa

SEQ ID NO: 196369 - DNA, 407 bp, Homo sapiens
gtcccctaatttggactgtccaggtatctaagaggataaaaaggtgactggggatggagggaggaaatcttaacgttataaaattctgatgattwccagtttctggacctctgttgattgaataataggctaatcctctggtgacccattcaatagctaaaagacagcccaggaggctttatctgtgatggccttttaaaaattgcttcaatcacaagtcattataaagcccgtaatgctcactggatatccctgactggatagaattggccttatttaaagaagcaaagacaaagaaaccttttcttttttgatttgtgagccctgggttgctcaaatgcttctcttcaaagattatttttcccatttcatgcccatcattttattttctgatacctgcttagaaa

SEQ ID NO: 196370 - DNA, 407 bp, Homo sapiens
gtcccctaatttggactgtccaggtatctaagaggataaaaaggtgactggggatggagggaggaaatcttaacgttataaaattctgatgattaccagtttctggacctctgttgattgaataataggctaatcctctggtgacccattcaatagctaaaagacagcccaggaggctttatctgtgatgsccttttaaaaattgcttcaatcacaagtcattataaagcccgtaatgctcactggatatccctgactggatagaattggccttatttaaagaagcaaagacaaagaaaccttttcttttttgatttgtgagccctgggttgctcaaatgcttctcttcaaagattatttttcccatttcatgcccatcattttattttctgatacctgcttagaaa

SEQ ID NO: 196371 - DNA, 335 bp, Homo sapiens
acccctgtttccaactttacacatcattcatgatttcctgaacacagtcttgggcaggcaggaagtctgtggcagagacccttggagctctgttccttttgggccyggacagaggcctgggcagcacaccgtagatgctggaggcctaggtgtttggcgctgcagagcccaccagaaggagcaacacagtgccggcggtggtagcccagtggtggcaacgtgctgtgagccatgttcagccagggctctgcaaggcctctagaccagaaaaaaaacatcaggagagaagagctactgggcaaagatgagacccagccctgattgtcatttaagaa

SEQ ID NO: 196372 - DNA, 421 bp, Homo sapiens
catggttaatgaaaagtaaaatttcaatattgatagtttttgaaagtttctttccagttcacaacttgttattagtaatgtcatatttttaggattgttttcaaatttgggaaaacatctattgaatttctttcctatatragctgtaagatttcaaaacattttgagcttttctattcagtaattgaatctaagtacatttttgaattgataatactcattaaccaggttttgtcaatatcttattgtgttggcacattttgagctttatattagcttcattaatataaatatttttgtaaagttagccatgtgtgtatttaattaattcatttcattaattggattgtcaaatgtattgaattatcaagtttataacatttattttaaatttatctcaacgaattactgctgtcagtat

SEQ ID NO: 196373 - DNA, 629 bp, Homo sapiens
acaaatccttcacataaatgttttgctgaaaaccattcaatggattcttaccccacygttagtaggaaccaatgtcttatagagccctacccatccagaccagttacctctctgacctcacctcctactgctctctcctttcagtttgctcagctctttgctcttccttaaaatctcttggattctctgccttgcggacattgtacatgttattctcttgcttaaaatgctattctgccagctccctcacctccttcaggtccttactgaaacattattttctccgtgaggacttccttgatcattctatttaaaactgttctcccaacactgcctactcttattttcctctatttcttgtcatcaaaagtactatatatcactagggtctatgtaggtgttcaataaaaattggttgattgaatgaatgtccaaaagtcagaggcttttgctcttgtttttgtttttgatttaaatacaacttaagtcagaatccttctgaaatatcattgttcattccagggaaacgtgttttgtcaagtattagctcattcattttctcaaccaacaaatcaacaagctttggagtttactgcatgcctaacactctactcagtaggtatacattg

SEQ ID NO: 196374 - DNA, 629 bp, Homo sapiens
acaaatccttcacataaatgttttgctgaaaaccattcaatggattcttaccccaccgttagtaggaaccaatgtcttatagagccctacccatccagaccagttacctctctgacctcacctcctactgctctctcctttcagtttgctcagctctttgctcttccttaaaatctcttggattctctgccttgcggacattgtacatgttattctcttgcttaaaatgctattctgccagctccctcacctccttcaggtccttactgaaacattattttctccgtgaggacttccttgatcattctatttaaaactgttctcccaacactgcctactcttattttcctctatttcttgtcatcaaaagtactatatatcactagggtctatgtaggtgttcaataaaaattggttgattgaatgaatgtccaaaagtcagaggcttttgctcttgtttttgtttttgatttaaatacaacttaagtcagaatccttctgaaatatcattgttcattccagggaaaygtgttttgtcaagtattagctcattcattttctcaaccaacaaatcaacaagctttggagtttactgcatgcctaacactctactcagtaggtatacattg

SEQ ID NO: 196375 - DNA, 462 bp, Homo sapiens
gtttatataaaatgaggatatattatacagattggaccttatacaattgtgggagctggttaaatgtttatgtacagctattgtttctgtgtttcaggctggaatctgaaatcagaaaggcaggcaatgaggaaagaaagatggacatgaactgggggcagcaaaactggaacctgcaaagacaggttaaaacctacaccagtttctcactgtccccaagcctccatagagtggcattggtgggagaaataggtacttttcctcatgtagctgaagtgtgtctagcccaggaatcagtgaagcagaagacattggcccagcagaatctggaggagctacagacccagctgctgtctcatcctaaccaggcaagccagcagaacagyaacagcaggtaccaagcaccaatgccttgtgtgctgcaccaaccttgtgagtgtaaagtgaatacggctcctactt

SEQ ID NO: 196376 - DNA, 567 bp, Homo sapiens
taatgatcctaatttgatcactacacatgtatcatggtatacatgtattacgtatatgcccaaaatatgtacaactacaatgtatcaatttaagaaacccaaaagtttgaattctggctcatttagtttccacaaactggttcttttaatgtgttaaaaaaacaaaacaaacaaacaaaaagaatagaggctccaagagcctcagcacagagaggaagagctcttcaratggtgaaagagctgtctgggaaggctccaggaaaatcataactccttggtctcccagtggctgaaattcaagacagttctccagtttccttgatccctgcactgtttctctctctctctctctctctctctctctctctctctctcacacacacacacacatatgcacacacacacacacatttgtttaccttgttaactgatctaaatgccttctaaaggatccttattcaagaatgaggagtaaatggttcaaagaccttctctattctttaaggtctgaattctaggaaagttaataattttatcttgttcttccaacagcctctttatctgttc

SEQ ID NO: 196377 - DNA, 413 bp, Homo sapiens
gaagcttcctgttttataaaataaaacctatcctagttaataccaaccacaggccaccaacctcaacaccaacacatttttaaatctcattgactaaactaaaggtttaaaggaggaaacttctatgtctgtaaaatggtttatayattttttctttattttgatttatggcttggataaagatggagtcctacatttaattttttttctataacttgaaagaatttctcctttgttttccagtatggagttatttggaagtttgggatattgagaatctttttatcccctcttctggagttacttcaggtcttctttttatctccatgattctgaaaattgttgaccatgcacttgtcaaagaaaaattgcaccagacaatttaaacagccaaggaagactttattaagaac

SEQ ID NO: 196378 - DNA, 521 bp, Homo sapiens
attttcatgttgaatataggatattaagttttcattaaaatccacagaactttacagcacaaagaataaaccttaatgtatacttttttagtattaggaagttgggatattccggaatggaataaagaatgtgacaagacaatgtaaatgtgtttttaaaaatcacaaccttttcacttaggtcagcacctttttccatgacccccttcagttcacaaccttactgaaggcagtcaaggaaaaaggtcctgacctaagtaactttggaaatgagtctgtaagactaaaggcaaaaggaattatatataagcagtatattctatttgataaagttgttttcaagaagggtctggtttaacagttctaaaaccacaatgcaaatacagttggtcatttttacctgtgggttctgcattcayaagttgaactaactgcagatcaaaaatatttgaataagactatacctgtattgaacatgtatagactttttctcataattattccctaaatgatacagtata

SEQ ID NO: 196379 - DNA, 584 bp, Homo sapiens
aatgaaaaacgttaaaggaagatatgttttggctctsagtaggaaagtttaccaccactcgcagcactactcgccttctgtggtcataaacaatagagcaaagactaagtgatgcttggccaggagcactgtggagaggacacttgcttgggaagtaacgttaggtgacgcctggtatctcttctagtagtcagattctgaacaaccaagcatgattggacttcttctgagtttctctcttctcttaggtgaggttatgtggccaacaagcaaaattgagtagcttgtgaatagttataacaggaaaaagtaaacttgggtgaagacgtgccgctcttgtaggtggccttgtcctctgttgtttttgacaaagacaggctgaggtaaaattagctagcagcagtcaggatttgagaaaatttcggcagcatctgaaggaagactcaagtagagcccttagtgcagccaataacttgatcaatgtctaaactgaagatgactctttaattcatgaagctcctggtctgtttgataaaacctgcccagaaacagactcttatattctaggaaaaataaggacattc

SEQ ID NO: 196380 - DNA, 584 bp, Homo sapiens
aatgaaaaacgttaaaggaagatatgttttggctctcagtaggaaagtttaccaccactcgcagcactactcgccttctgtggtcataaacaatagagcaaagactaagtgatgcttggccaggagcactgtggagaggacacttgcttgggaagtaacgttaggtgacgcctggtatctcttctagtagtcagattctgaacaaccaagcatgattggacttcttctgagtttctctcttctcttaggtgaggttatgtggccaacaagcaaaatygagtagcttgtgaatagttataacaggaaaaagtaaacttgggtgaagacgtgccgctcttgtaggtggccttgtcctctgttgtttttgacaaagacaggctgaggtaaaattagctagcagcagtcaggatttgagaaaatttcggcagcatctgaaggaagactcaagtagagcccttagtgcagccaataacttgatcaatgtctaaactgaagatgactctttaattcatgaagctcctggtctgtttgataaaacctgcccagaaacagactcttatattctaggaaaaataaggacattc

SEQ ID NO: 196381 - DNA, 584 bp, Homo sapiens
aatgaaaaacgttaaaggaagatatgttttggctctcagtaggaaagtttaccaccactcgcagcactactcgccttctgtggtcataaacaatagagcaaagactaagtgatgcttggccaggagcactgtggagaggacacttgcttgggaagtaacgttaggtgacgcctggtatctcttctagtagtcagattctgaacaaccaagcatgattggacttcttctgagtttctctcttctcttaggtgaggttatgtggccaacaagcaaaattgagtagcttgtgaatagttataacaggaaaaagtaaacttgggtgaagacgtgccgctcttgtaggtggccttgtcctctgttgtttttgacaaagacaggctgaggtaaaattagctagcagcagtsaggatttgagaaaatttcggcagcatctgaaggaagactcaagtagagcccttagtgcagccaataacttgatcaatgtctaaactgaagatgactctttaattcatgaagctcctggtctgtttgataaaacctgcccagaaacagactcttatattctaggaaaaataaggacattc

SEQ ID NO: 196382 - DNA, 448 bp, Homo sapiens
tcaagaaaatatcttaggaatgctgcagccaggaaagggagtagcrggcagcaggacaaagagctatagtaccaaagggtcacttacgaaggttgcaaaccggaagacataggattaataagagattgagaattaactgggagaatttagaacactctttttcttttacacataaccaccataccaatggacgtataataacaatgagttatagatgaagagcttcaccacactgactctttctataaaagagtacttaggaagcttaaagtcaaggaggagacaaaaacaaggaaattagaagaatttgaaggctctgtcatctacaggtatggcaaacattaaatgcagcccaactcctagacatataaacataaattctcacactaaaggcctattcccccaaatttgtattacccaatacaaaatgtccagcgttcaacaaaaa

SEQ ID NO: 196383 - DNA, 448 bp, Homo sapiens
tcaagaaaatatcttaggaatgctgcagccaggaaagggagtagcgggcagcaggacaaagagctatagtaccaaagggtcacttacgaaggttgcaaaccggaagacataggattaataagagattgagaattaactgggagaatttagaacactctttttcttttacacataaccaccataccaatggacgtataataacaatgagttatagatgaagagcttcaccacactgactctttctataaaagagtacttaggaagcttaaagtcaaggaggagacaaaaacaaggaaattagaagaatttgaaggytctgtcatctacaggtatggcaaacattaaatgcagcccaactcctagacatataaacataaattctcacactaaaggcctattcccccaaatttgtattacccaatacaaaatgtccagcgttcaacaaaaa

SEQ ID NO: 196384 - DNA, 538 bp, Homo sapiens
atcccatatgaacaatagctagctctttatttttacctccctattccagaatataaacttcaaaagaacaaggattgtgtctgttttactcactattgtttctgcgactagaatattgccgggcatataaaaggcactcagttgaaatttattgaatgaatgaatcatgcatgttctacactgttgtgatatatgtcattcaatagtattttttatgtcctatgaagataaagagatgttctaccattcattttattatgmaaatatgttctaggtgattgaaaagtccacaatcaagtttgtatacctcagaaatatgtgaagactagagagaatatggaacctactccaaaactcatgagttaactcattttatataacaatgtatcataaattattcaacaatattttcagcaaaatgcagtctgttcatcaagaaatattgaggacctcaaacattccaggtttcatgataagaattggtgacagactgcaggatgtggctgcaatggccctggcacatgtgggacttacaata

SEQ ID NO: 196385 - DNA, 615 bp, Homo sapiens
ttttttctgtggatagtggttcaatttggtgttcctgcagggaggatgaccggtggaggctattcagccatcttgttctacctcctatcctctccaccatattttgtaagcatataaagaatgaatagtaatggagaataatgattttttattcactaaaataataagtacactgacttgttccgttgtcatgagtttctaaataataatttagaaaattttaaattattaaaatgtttctagaaatacttattcaaagcaataataatcactccatgcagttgtgtataaaagtctacctagtgatgtcagtttgctaygtgaataaccatatttccttgtaaaataaaaacacctttctttgaagtcttataattttaagcatttattaatttgcttatttggtataaaacaggctcaaagaggaatagtctaaactaattctgtcttttcagagtcaaaagatattacctcgttagaggaagaaatatagtaaaatataaatagtctatcatgctcgcattaataccatttactatgccaagccttgtgctaattagtaaaaattccaagatatcaaataaaaaacttaaatatattaatttagtggaattg

SEQ ID NO: 196386 - DNA, 609 bp, Homo sapiens
actggtgaaatgcaaagatgagcaaagaccccagagtatccttcaatcccatagacaaatggaaatgtccatgagcaccaccaggaaatgaagaagatattggttgctatggcctaactatgaacactcccagctcacatatctaaaacagagcgttggcattttatatttttcaatttaaaggtccatgccaaaggtsaggtgtgctgagagtcctcaagggagttggtgaagatgaatctgaaggttgtgggtgaagagtaaaattcatttcatctaaatgcttggttatagagacttattctaccagggacataggcaaaagagtgggacaaatagtgcataatcaggcatctaaaaatataacaagaaaaaaaatgaagtaatatgttgaatataattcctaccgaaaggttgaaaaacaattttctcatatgctaaagacttgattgcaaatactttaaataatcatgagagggatagatgctactttaaagatgagataaaagagaaggaaaatatgaacacaatcataaatttgtcttgaagaatagaagttaccaagagcagttgagagtttaaaaggaaagacaggattaatggggtgac

SEQ ID NO: 196387 - DNA, 619 bp, Homo sapiens
aaggtaaaagcttgttgtcagcagtaatgattaactgtctgccttcactattttagctttgcctctttcacagattcaagtaagaaataaaataaggtttataaaaagtgaaatgtgtacaatcaatataaccaccacacacacaagaagtttccctttgcaaactactggttcaggctttaatttcttcaagatcaaggttaacaatacagaggtttatcaagttacagatgtctgtctgtttccataaattgcttcagtctctttaggaaaaaaatgaagtaagacatagacagactagataaacagtcttaaaagccatttctaagtcatgcaataatagaatgacttctttttcattatttcacttgaaaagaatttcttctgaagtaatgatgggattgttagacttaattcttttttgctgcagaataccaaatcttctatctaccagccatcaakatttgtatcctatttaatacaacttgcactattaagtctaaaggttcatgggcttctcagtcaaatggtatcaaaacctaatataagaaacagttttctagagtgaaagtcaagtagcaagcatataagaattgatttctacccaccacaaagcaat

SEQ ID NO: 196388 - DNA, 604 bp, Homo sapiens
tttgaaagtaccatgtttctcaggggccatcaataaaggtaccacatccatctttgtcgatttcttagaggagtcattagtgaaatgtcaccttctgaggtgatttctttgcaccttgagtatggaaagtttttactttttaaaccagcaacaataaaaacaacacctgataacattttgtgtactaaaagagtacaatagaaacattacatatttacaaaaaaactcatcatcaatattgttgttataattattataattgaaaaattacctcagctattctgccttccatttaaaaatatcactgaaatattatactacaataaacacaacctagagtaactgtgtcatttgccaaattactctttcaacctttcccacttaggaatgattttgtcattgctcatataaagtctgagatttgggaaatggagaggatattacagatcacrtcattcctcataaccctacacaactggaaagtaaggatcaagatccaatattaaaggacttggtctgaggaaaccttatctgcatttccaaatattttggtgattaaatcacactaccaccaagcatgatgttggagagactgtaacatgga

SEQ ID NO: 196389 - DNA, 648 bp, Homo sapiens
tttcttttcacttctttttctctaatcttgtcttctcactttatttaattaagttgatcttcaatctctgatatcctttcttccccttgatcgatttggctattgatacttgtgtatgcttcatgaagttctcgtgctgtgtttttcagtgccattaagtcatttatgttcttttctaaactggttagtctagttcttttttcaaggttcttagcttccttgcattaggttagaacatgcttctttagctaggaggagtttgttattaaccaccttctgaagcctacttctgtcaatttgtcaaactcattctctgtccagttttgttcccttgctggcaaggagttgtgatcctttggaggagaagaggggttctggctttttgaattttcagcctttttgcactggtttctccccatcttcatggatttatctacctttggtctttgatgttggtgatcttcagatgggggtctctgagtggatgtccttttgttgatgttgatactattcctttctrtttgttaatttgccttcaaacagtcaggcccctgtgctgcaggtctgctggagattgctggaggtccactccagatcctgttagcctgggtatcaccagtggaggctgcagaacatcaaagattgcta

SEQ ID NO: 196390 - DNA, 446 bp, Homo sapiens
ttaaattactggatgacaagagtcttgggttgattgctttctaaaaagttgctcattgggtgagtctaattatgcaagaaaccaactttacaagaaactggtatcaaagaaagctgggtgcactcgaaggaaagtgataccagctcaacagttgtttgatttatgttttagctgcctagtcactagcatataagctaataccaaggagacactgaagaaggaagatgaaaaatactaaaggaaaaaaaawtttaaatttatcataaatgtctaagataatgcagaattataaactagcaaagatgaataaaaatgttgggtagagaaaaataaaaactttaagattacagtgtgataatgaaaggtttcagttttctgaatcttgtgattcttacatggaagatgtctacttcatgcagtcagaaggtcttccttagaagctgtct

SEQ ID NO: 196391 - DNA, 595 bp, Homo sapiens
tttaataagattgtcagaccagagaaaagtactttcttaattttgggtattaaaaaattgttttaaaatagctgaaaagattacagagggaataaaaaaaagcagcaggtaatgaaaatgtaaactttacagtcctgagcaggtgttaaattcatttcttattagtgcttcaccctccctgcttcctattcagtggcaataatccaaccaggtgattttcggttgtgttgtctctaacatctggtgaattcccagtatgatcataacagagcgatcagctatgcttggtccaccatccaggagcagcaagtaatagcttctgatttcaccggaaaatttgtaactacattggattgctataaartttaaaatgcatcctttctttatattactatttttacttataatttacatttcaattaccttcacctagttctttcctagcattaaaaaagtctgcaattcatccatgattcccaccaagacatcaaaaatcctatgggcttatgtatcattccctgctgaatttcaagttgaagatacaaaccaagcaatacaatgctgtcagttgaggattgcatctgaatcaggtgca

SEQ ID NO: 196392 - DNA, 570 bp, Homo sapiens
ggagtagctagcattcctccattgcagacttcttcagcaagtaccaacctctacccaaaggaatctaagtcagttcgggcttaaggctgattgtaacaaacaccatgtttagaaaggaagtgatacataaaattctcatgcaagccattcactctcaatataaaataaaattaacttgctgcgagaaattatttaggtagcttttgaaagatatccatagtacaggtgagggaggaggactttgagtggcttttctttgcccatactgatgctattgtagcacatcaattcttcctgcatgatttggagatcaaagcatatgaaaagtgtaaaaagaatgcatttgattaaagatattaaaaatcatgttgtgtcttaaattcaatttcttrtgtgctatttctcagagaacattatatcgtttgcctttaatttcagccgaaaacctgatgcaaaatataacccacaattactgtgtatctatttatccaaagacagatacggaactgtttctgctctgaggtttctcattgtgctttgatttgtatccctctttaacacatcatgaaa

SEQ ID NO: 196393 - DNA, 423 bp, Homo sapiens
aaggctaatttgttacttttacaagggctgtctcgtccctttgtgtctggtaagagctaccatctttgtttcaaaactaaactgtaaactaaattcctcctatagttagttcagcttatgcctaggaatgaacaasggcagtttgcaggttaaggcaagatggagtctgttaggtcagatctttttcactgtcataattttctcgttataatttttgcaaaggtggtttcagtaaaattagcatctaggcatctagagtaggtatataaacattgacagtgcctaaccctgccagggtctttttgtcacctataatattaagagaatatgatggagtctatttgcttgaactttcactgcaagatgactgaattctgggtgttatgtgaaaattcctcaaaattcatcatgcttagatttata

SEQ ID NO: 196394 - DNA, 573 bp, Homo sapiens
gcatatttagaaattcaatctgtaagtaatctgactagcaatcttatagcattgactcatcttattctctgcattccacaacaaaagtaagtatccactctctcacatcatctagacttagtctagtcttcaggcttttttgcattttattttaattgttttctaaagaatgcctctcccatctaggacagaacacaagtagcacattgtttttctctaatagcaacgaagaagattctaaagcaaacactttygcttgtattattaattattgaccattagctaataccaacacttaaagatagttcataggaaggtctttaaggggaagccattgctagttctctgttctttgctgtcactttccattattcaaagcaggtagccaaacaacaaagaccagttgtgtgctatcataccaccccatgagcacaagcccagtgctaaaagagtttgataccaaaagtaccttttgacttagtataaatttattcactaatctctgtaaaggctcacatctatgaaatagtggtactgctgattgatacgtgtaggaagacatgttattggcaa

SEQ ID NO: 196395 - DNA, 608 bp, Homo sapiens
atatagcatatataatatatatatatatcagctaattatagctgatatatatatatatatcagctataattaagattacggactttaagataggaaggttatatggatgaccaaacaagyccaatgtcatatcataaacccttaaaagcagagaactttctctggcagaaaaggagatgtcagaaagatccaaagaatccgaggaactcagctcatccttgctaaagggggcaccaaaggagcatggggaggaaggtgggcagcctgtcaaagcaaagcaaggaagtggtaagctcagccctagaatgtaagaaactgaacttagccaacaatccaaatgatctggtaaggagattcttcctctaagccatgaacaatgaactaagccctgatgacaccgtgattttagtactgtgagccccgaagctgaggaaccagctcagccacaccatgcccaggcttctgacccacagaaatgaaggtataattaatgggtattgttttaagcataaattttgggtaatttgttgtggccacaatggaaaactaacatggtaagtatatataacttatctccacattgtcttttatctcgctttatgaatcaa

SEQ ID NO: 196396 - DNA, 435 bp, Homo sapiens
ataaagacataccgaagactgggcaatttacaaaagaggtttattggacttacagttccacatggctggggaggtctcacaatcatggcagaaggcaaggaccaagttacatcttacatggatggcagcaagcaaaaacagagcttgtgcagggcaactcccatttttaaaaccgtcagatcccatgagacctattcactgtcatgagagcagtacaggaaagacccacccccataattcattygtctctcaataggtccctcccacaatacatgggaattatgggagctacatacgtgatttgggtggggacacagagctaaaccatctcagatgctaaataaagaacatggaaaggtagctaaatagatgttgactcttgttattcataactaatcggcaatatataaataacttccaagttatatttctaca

SEQ ID NO: 196397 - DNA, 543 bp, Homo sapiens
aggtttacctaacttctcagaaaattaaaaataggaaatgatcatttaaatgcctcactttgctttatttttaaatttgtctatattttaactcatttctaatagtccagtgagatcttttaaaatatactttaaaatatattttgataattaacagatattaaatgttcagatagtattttttaaaattataattacaagaaaattgtcacaaagtcttctcaaaactaaaatttcacctgttgagcattccctaaataatttttagattacgaagtgattacaactgacttgatacttaagcaaaactctagtaagtatgtctactccctgaatgttttcatgcratagattcctttctcatgagtcatacattttgggcatcctactgaaagataagttacaaaaactttttaagtggttaatttgtcattttaatgtatgtattttaaataggttgaaaccaagaaaaaaaaatgttaaaatataagatattgggtatgcacccttatttatttattcactgtgagtatgctgtgtaag

SEQ ID NO: 196398 - DNA, 543 bp, Homo sapiens
aggtttacctaacttctcagaaaattaaaaataggaaatgatcatttaaatgcctcactttgctttatttttaaatttgtctatattttaactcatttctaatagtccagtgagatcttttaaaatatactttaaaatatattttgataattaacagatattaaatgttcagatagtattttttaaaattataattacaagaaaattgtcacaaagtcttctcaaaactaaaatttcacctgttgagcattccctaaataatttttagattacgaagtgattacaactgacttgatacttaagcaaaactctagtaagtatgtctactccctgaatgttttcatgcgatagattcctttctcatgagtcatacattttgggcatcctactgaaagataagttacaaaaactttttaagtggttaatttgtcattttaatgtatgtattttaaataggttgaaaccaagaaaaaaaamtgttaaaatataagatattgggtatgcacccttatttatttattcactgtgagtatgctgtgtaag

SEQ ID NO: 196399 - DNA, 553 bp, Homo sapiens
tatatattcaagagtaagattgctggatcatatagtagttccatttttaattttttgaggaacctccttactgttttccatagtggctgcacatttacagtcctaacaacagtgtagaagaggttccatttctccacagaattgccaacacatgttatttctccttcttctttttcttcttcttctgatgctgctgcctcttcttattctttggcctcccaaagtgctgggattacaggtgtgagctgctacacctggtgtgcagttttttaacagcataattagataagcaggcattgtcagagggcagtatctagagaagttatatccttcttctctttctccttctccttctccttttccttcttcttcttcccaycctaacaagtgtgaggtgatatttatgaatttgatttgcatttccctgatatttagtgatattgaccatccaatcatacacctggtcaccatttgcatgtctttgttatagaaaccagttgtacgacatgatacaggtaaatttctaataacggagttcaatgtaaagatagtt

SEQ ID NO: 196400 - DNA, 553 bp, Homo sapiens
tatatattcaagagtaagattgctggatcatatagtagttccatttttaattttttgaggaacctccttactgttttccatagtggctgcacatttacagtcctaacaacagtgtagaagaggttccatttctccacagaattgccaacacatgttatttctccttcttctttttcttcttcttctgatgctgctgcctcttcttattctttggcctcccaaagtgctgggattacaggtgtgagctgctacacctggtgtgcagttttttaacagcataattagataagcaggcattgtcagagggcagtatctagagaagttatatccttcttctctttctccttctccttctccttttccttcttcttcttcccatcctaacaagtgtgaggtgatatttatgaatttgatttgcatttccctgatatttagtgatattgaccatccaatcatacacctggtcaccatttgcatgtctttgttatagaaaccagttgtamgacatgatacaggtaaatttctaataacggagttcaatgtaaagatagtt

SEQ ID NO: 196401 - DNA, 467 bp, Homo sapiens
tctctttacctctcccttttgctgaatatgctgtttttcctgtatcctatgtaattctatttgatttactcatttcagtttgtggagaatattctccaaaggcttcctgagaatggatataaaaaagacaaatatttagagwccttgtatgttgcatttatatgtactttactttctaacatggctgatcattcagctaattttagattgtaggttgaaaaacttcccacacaacctccacaacgatgtataagatacagctcttttagctatcagggtgctgttaggaatcctgttgtcattcaatctctggactcgtctgtaaccattttcccctctcctggaagtttttagggtctcctttttgtcactggtcttctgaaatttcacaataatgtaacttactttgagcttgtttttaatagttcgagcttgcttttaattcattatgttcagaattcctccag

SEQ ID NO: 196402 - DNA, 467 bp, Homo sapiens
tctctttacctctcccttttgctgaatatgctgtttttcctgtatcctatgtaattctatttgatttactcatttcagtttgtggagaatattctccaaaggcttcctgagaatggatataaaaaagacaaatatttagagaccttgtatgttgcrtttatatgtactttactttctaacatggctgatcattcagctaattttagattgtaggttgaaaaacttcccacacaacctccacaacgatgtataagatacagctcttttagctatcagggtgctgttaggaatcctgttgtcattcaatctctggactcgtctgtaaccattttcccctctcctggaagtttttagggtctcctttttgtcactggtcttctgaaatttcacaataatgtaacttactttgagcttgtttttaatagttcgagcttgcttttaattcattatgttcagaattcctccag

SEQ ID NO: 196403 - DNA, 604 bp, Homo sapiens
gggcctctcagcagaacccctacaaaccagaagaaattgggggtcaatatacatcattcttaaagaaaagaaattctagccaattttatatctggccaaactaagctttattagcgaagcagaaataagaatattttcagacaagcaaatgcttaggaaatttgttaccataagaaacccatctcacatgcaatgatactcataggcycaaaatacagggatggagaaaaacctaccaagccaatagaaaaataagcagagtttgcattcctaatttcacacaaaacagactttatgccaacaaagaaaaaaaaagacaaagaaatgcattatatagtggtaagtggttcaattcaacaagaagacctaactgattcacaaagcaagtccttagaaacctgcaaagagacttagactcccacacaataatagtgggggacttcaaccacccaactgactgtattagacagatcattaagacagaaaattaacaaagatattcaggacatgaactaaacattggatcaaatggatctgataaacatctacagaattcttcacacaaaaacgacagaatatacattattctcatcagcacatggca

SEQ ID NO: 196404 - DNA, 603 bp, Homo sapiens
gagggttctggtttctccacatttttacattttccagtttttcaattctagccatcctagtgattgtgaatgtggtatcttgttgtgattttgatttgaaaaatacattttaaacaatatattgatatatatggagagaaaaaagttataaaatgtatcttatcaagctcaaatttcttttattgcacataaaatttgactacaggtaaattagacatgagtctatggaggaaatagttttgtttaaaaatatggcaaatttagaaaagaatgtggtgattggaaccaaattcaatcctatgcataaactatatatgcatttttctctggtggttacctactgttgcaatcctattcataaactgtgtatacattattctctggtgattacctactattgaagtaaaattctcttgtgaattcctaatgagaaatctaatttataaagataaaaatatgtgagaaaacatttgaattcccaaaatttgatgccaagtacttttccttcttttcagcatactaatgaartgatcagatagaatttttaaagtacatttctgctttttcctgttgtgttttaccaataaattctaatattcgaaa

SEQ ID NO: 196405 - DNA, 632 bp, Homo sapiens
gtatcataggattttatatttatgatgttatatattcatcacaggcaactcatgatttaagtactgtttatcagaagtaacctcatcgtaartagaagagcatctgtacttggaagatgaagggtacagtgtgctttagagctggcttaattcagtctatccagctcaatttttttctgatcctccaaggtctgctttttttttatttgtttgtttaattttcttttggtgtgttttggcttcatcttcaggctgatactaagatgactgtcagacttaaacaacttacattcacatgtctccatttaagtattgttagaaaaataagacactaggaaggtcgaataatttgactacatcacaatttggaagtgttatgacacattctcttattcttgcccaactctagaggccaggctcttaagcagtatgcaacactatattactcatagtaattgaaggaagataagatacagaacataacaaatgagagataattcttggaccttgttgattattataaatccctttcagtggggagttcttgcaagagttctttgaaaggagggggcgacctgtatcatttgaagagtagagtttgtaagatttgactgttgcctaaggtgaaaggt

SEQ ID NO: 196406 - DNA, 628 bp, Homo sapiens
ctgtcttaagtattaaaaatgtgacttcagtttcccccttgaataccatcacagctgaccttttgaaacagagctgaagtttctctctgctttaaattgctcattctcatgaagaacaatgatgaattaatgcatttattttaatcttggttggcctttcttaagagcaagcacattccaaaataactctctcgttctttaaatcctagttacattgtttcattttactactcaaaatgaattcattattataattttcctgctaattcttaaaggaaaagatcactggtatttgatgcaagttatttatatgaaataaaaatactattgaacagacaaataaaaatcaaaatggtataacacagttttttctttatcccatttgttttgtttgttattagaaattttsgtgcatagcgtttttgaacatttttgtccaattttcctttgactttcgaatttttagtcggggaacagtgcgggaaacaatctggttttgatggaatcccaaatttttgtgagtgtgtgtgtgttctaaataaactcaactaggtcatatgactcatgtgctttccatggtctcattgactttattttctgtctagaaactatttaataaatcttattt

SEQ ID NO: 196407 - DNA, 508 bp, Homo sapiens
ttggatattaccccaattgcagtggaaattcactgatgttattcagtagacggctggcatgaccaatttaaatattttaaaagtttctcttgtttctctttagagwgtatatcagtggaattcaaaaaataaatgtggaaacctatttacagggtgattgcagataacagtcaatggtagcttgagctggtaggttcaagttggtttggagagaagttgataaattcaatggatgttatagagtgacttaaatactaagtaatttaaataccattggaagaaagggtggatcagtggcatagctgaattatctgaattcaaaattgagatttattgcctgatgattctcataatatttatgggaagaaaagataaaatgcttgaaatagatgctatagtttggaattacggtgtactatgttcattttctccaaacctcatgttgcaatttgatccccagtgttggaggtggggcttaatgggaggtctttgggtcatgggggcagat

SEQ ID NO: 196408 - DNA, 508 bp, Homo sapiens
ttggatattaccccaattgcagtggaaattcactgatgttattcagtagacggctggcatgaccaatttaaatattttaaaagtttctcttgtttctctttagagagtatatcagtggaattcaaaaaataaatgtggaaacctatttamagggtgattgcagataacagtcaatggtagcttgagctggtaggttcaagttggtttggagagaagttgataaattcaatggatgttatagagtgacttaaatactaagtaatttaaataccattggaagaaagggtggatcagtggcatagctgaattatctgaattcaaaattgagatttattgcctgatgattctcataatatttatgggaagaaaagataaaatgcttgaaatagatgctatagtttggaattacggtgtactatgttcattttctccaaacctcatgttgcaatttgatccccagtgttggaggtggggcttaatgggaggtctttgggtcatgggggcagat

SEQ ID NO: 196409 - DNA, 520 bp, Homo sapiens
aacccttgtcctcctggagcttattttcaataaagggcagatagacaataaacaaataaataaataatgtcagatttagaaaaaataagataaaagaataacaaatgataatggtggtaagtaactgttatatataaagtgatcagagtggtatctctgacaaaatgatgttttagcggagacctgaaggaagttagaacatgaatcatttggtatctaggaggaagagtgctctaagcagaacataatttaatagagaccactgttcttagcctaggggagagtaagagcaaagaggggaatatcagaagataaaatcagataatttgcctatgagaaatggaaaggtttgaattttytcagagatagggcacaggtatgactgtctcatttacactttaacaggaccactctgcttaatcagtggaaaatagactggaaagcaagggtggaagcagaaaaaccactttaggaggccattgcagtagctctgcaaagagatgatggtgctttgaattag

SEQ ID NO: 196410 - DNA, 497 bp, Homo sapiens
tttttatgccattgtttaccagctgttttccagtgtgtgacatttctttgcaactaagggagaaatgagatttttttctcttccatctattggtggaaaaaaatccccctttatcactttcttcttttacttcataaatgtaaacacacaagtagaagcaaacgcagatacacacactatacaatasatacacacacacacatacacacaaaactatcctctcttgtaacaactttactcttcaaggaaaaatacttcatattctcatgaagataaacatgccatggcattttaagaataatgagccaggatcaaatttgtaaaaatacacattgtattcatgactagtcatagttacctacaaactttgtccacccttaactgataatttattcacacatgttataattatttttaatcacctattatgtactaaatgctttcagatatataaataaattgacgttctattgaacaattgcctgtaattataacaa

SEQ ID NO: 196411 - DNA, 497 bp, Homo sapiens
tttttatgccattgtttaccagctgttttccagtgtgtgacatttctttgcaactaagggagaaatgagatttttttctcttccatctattggtggaaaaaaatccccctttatcactttcttcttttacttcataaatgtaaacacacaagtagaagcaaacgcagatacacacactatacaatagatacacacacacacatacacacaaaactatcytctcttgtaacaactttactcttcaaggaaaaatacttcatattctcatgaagataaacatgccatggcattttaagaataatgagccaggatcaaatttgtaaaaatacacattgtattcatgactagtcatagttacctacaaactttgtccacccttaactgataatttattcacacatgttataattatttttaatcacctattatgtactaaatgctttcagatatataaataaattgacgttctattgaacaattgcctgtaattataacaa

SEQ ID NO: 196412 - DNA, 472 bp, Homo sapiens
cctagaaatctaaatgtctccttttgctggaaatcatgtgttgacatttccttagcacatttttgggtaccacattgtttagcttcatcccaggttaacattccactctaagcacttaaggtgtgtaaagtccttgctctaatttctccttggtacactgtcctgtattccctcacttggtcttccctagtacaatcgttcctgttatctggctgttctacagaacttgccctgaattgtaaaaacaaattytgtgtgtgagatgatactgaccaaatttgcttcatatgaaaaaaaacagttcaagatgtttatgtaacatgggatttccacacactgatcttccccttattttataattcaattttaatgatagaaactagaagttgttgagaaaatccattgagtgactctttcccaattaaacaaaatagcccatcagatctgcatcttcaatggtcaaataaaacat

SEQ ID NO: 196413 - DNA, 472 bp, Homo sapiens
cctagaaatctaaatgtctccttttgctggaaatcatgtgttgacatttccttagcacatttttgggtaccacattgtttagcttcatcccaggttaacattccactctaagcacttaaggtgtgtaaagtccttgctctaatttctccttggtacactgtcctgtattccctcacttggtcttccctagtacaatcgttcctgttatctggctgttctacagaacttgccctgaattgtaaaaacaaattctgtgtgtgagatgatactgaccaaatttgcttcatatgaaaaaaaacagttcaagatgtttatgtaacatgggatttccacacactgatcttccccytattttataattcaattttaatgatagaaactagaagttgttgagaaaatccattgagtgactctttcccaattaaacaaaatagcccatcagatctgcatcttcaatggtcaaataaaacat

SEQ ID NO: 196414 - DNA, 472 bp, Homo sapiens
cctagaaatctaaatgtctccttttgctggaaatcatgtgttgacatttccttagcacatttttgggtaccacattgtttagcttcatcccaggttaacattccactctaagcacttaaggtgtgtaaagtccttgctctaatttctccttggtacactgtcctgtattccctcacttggtcttccctagtacaatcgttcctgttatctggctgttctacagaacttgccctgaattgtaaaaacaaattctgtgtgtgagatgatactgaccaaatttgcttcatatgaaaaaaaacagttcaagatgtttatgtaacatgggatttccacacactgatcttccccttattttataattmaattttaatgatagaaactagaagttgttgagaaaatccattgagtgactctttcccaattaaacaaaatagcccatcagatctgcatcttcaatggtcaaataaaacat

SEQ ID NO: 196415 - DNA, 472 bp, Homo sapiens
cctagaaatctaaatgtctccttttgctggaaatcatgtgttgacatttccttagcacatttttgggtaccacattgtttagcttcatcccaggttaacattccactctaagcacttaaggtgtgtaaagtccttgctctaatttctccttggtacactgtcctgtattccctcacttggtcttccctagtacaatcgttcctgttatctggctgttctacagaacttgccctgaattgtaaaaacaaattctgtgtgtgagatgatactgaccaaatttgcttcatatgaaaaaaaacagttcaagatgtttatgtaacatgggatttccacacactgatcttccccttattttataattcaattttaatgatakaaactagaagttgttgagaaaatccattgagtgactctttcccaattaaacaaaatagcccatcagatctgcatcttcaatggtcaaataaaacat

SEQ ID NO: 196416 - DNA, 348 bp, Homo sapiens
tatcctttgtgattactaccatatgtctatgccacacccattctttctgattgcaatcactagatgacatcttagttgattctttgtattttatgaagtctttgatattttctctctaccacataattccaagcattggagtggatgatttcagtrttgatgataatgaacccaaaaccttagttctttctgctccttgacatccaagatttaaatgaagatttctttctatccaacctcaatcaccaaccctgtggcttttgttattattataatcagaaacaccaaactccaatacattgctttctgtttacaggctgatatgatttggctctgtgttctcaccca

SEQ ID NO: 196417 - DNA, 507 bp, Homo sapiens
atgggacctcagcattgcaggataattattttactcatttttaatctttacttcttcagttccccataacactaacccttcacttttcctcatctctcarcagaggactttactttcctgctccctatttcaaagcaactggggcttttaagagtcagtttcgtcactcttcttctcaaatgtcctgatatcagaacgtttcctaatcccaaataaaaagatgttaggtagcactagcttttagctcagtaaccagtcacacttttgtgcttatttaagacatagatgccacattttctttgttttttaattctcatgttttagtctcttagcctaagagtgtttatcttaaagacattcagaaaaataactggaaaagccacatcctaaatctgagatttcctcactttaatcaattcagaagttttaatttttttaaatcaaaaatcttttaattgcatctctccaagcagtaaattttctggaaatataaacaaaactaaattt

SEQ ID NO: 196418 - DNA, 507 bp, Homo sapiens
atgggacctcagcattgcaggataattattttactcatttttaatctttacttcttcagttccccataacactaacccttcacttttcctcatctctcaacagaggactttactttcctgctccctatttcaaagcaactggggcttttaagagtcagtttygtcactcttcttctcaaatgtcctgatatcagaacgtttcctaatcccaaataaaaagatgttaggtagcactagcttttagctcagtaaccagtcacacttttgtgcttatttaagacatagatgccacattttctttgttttttaattctcatgttttagtctcttagcctaagagtgtttatcttaaagacattcagaaaaataactggaaaagccacatcctaaatctgagatttcctcactttaatcaattcagaagttttaatttttttaaatcaaaaatcttttaattgcatctctccaagcagtaaattttctggaaatataaacaaaactaaattt

SEQ ID NO: 196419 - DNA, 599 bp, Homo sapiens
aataatcataagcttagtagcattaaacagcacaaatttattacttaacagattctgagggtcaggaatctagtcatagagtagctgagacctctgctcagggcattagacagctgcaatcaagatgtgcatctcctatttggagataaggaataatccacttccaagctcactgaggctatcggcagaattcagtttcatgtgactataaaccaagtgccttggtttcttgctatctgtctactggaggctgcactcagttcctggaagctgctcacaattcatagaggccacccacgttttcttgtcacwtgacttttccaacatgttcacttagttcatcaagccagcaaagagagtttcttgagacagtctcttagcagtacagaatcttatatgccataatataataacagaagtggcatctcattaaattttccatattctattgtctaggagtaggtaataataccccactctcatgccaagagagggaattatacaaagctgtgtacacaaggaggccgggatcatgggcagccactctagaccgtcgtccacatcagctaatgtaatataatagtcacagccagacaaaa

SEQ ID NO: 196420 - DNA, 605 bp, Homo sapiens
ctgcctctaccttctttgttagctgtcagaccaataacaataattaaataccaggagaaggccgggcgcagtggctcaggcctgtaatcccagcactttgggaggccgaggagggcgggtcacgaggtcaggagattgagaccatcctgactaacacggtgaaaccccacctctactaatagaaaaaattaaccgtgtgtggtggcaggcgcctgtagtcctagctactcaggaggctgaggcaggacaacggcgtgaacccgggaggyggagcttgcaatgcgccgagatcgtgccactgcactccagcctgagcaacagagcaagactccacctaaacaaaacaaaacaaaaaaacagcagaaagtggctggaggtattctgggactgataagaagggaaatagcctatataccaacaataattgtaagaattaagtggcttgtagccgcaggacccaaggaagtatttctaggagtaaaattttagagtgcttgatcaagctgtttggaatatcagattggataagggttcatgattggggtattttcttaggacatggaatttaacagcccagcaaggatatcaggggatgggcctaactc

SEQ ID NO: 196421 - DNA, 367 bp, Homo sapiens
cctaaattctgtgtcttccagttttaatagtaaggcattttcaatgtgcacatttctgcattaccttccatagccttattattatcttagttgctttctacttgccaaagacattcactgtattttctcttttaaagttcagtacttgattcctttcttttctctatggaaaacagactacctatcatttattgagcaaacattctatttctagtagtgagctaaattacattatattcagtatatcatttaatccccacrgcaactctgagtttgctattattattttaactaattgacttagaagataaatggtaatggagtgaagtgtctgactgtttaagtaagtgtcagaaccaggatttgc

SEQ ID NO: 196422 - DNA, 577 bp, Homo sapiens
agatctttatctttttaaatccagcaacctctggagctagaaagaaaacacttcctctgtctcatatatctttcctggctcctctctccyggctcctctttgtttataaacacattcaagtgtttcccatccctcaaaaaactctgcttatataatctatttcctttgatagttaccatttaattcctttttccctgtatcatccaaacattttgaaaaggttgacaacaggcatttctgtcttttccttcactctccaatccatcataacttggttcttgttcttagcacacttctaaaatcgctcttcttcaaatcctcaataatttactaacttctaggtctaaaggacagctgtcatatttgagactttgaatcacagtatccaggatagcactcatattaacaagaacttacattcacttgcattttctgatatgctttgattatattatgcatcttatattcgttatttcattcaatccccggagtgattgcatgagagagttactattgtttttctcactttattgacaaggatgttgggaatcagagagattagtcaactacagagcca

SEQ ID NO: 196423 - DNA, 566 bp, Homo sapiens
tttttaaatccagcaacctctggagctagaaagaaaacacttcctctgtctcatatatctttcctggctcctctctcctggctcctctttgtttataaacacattcaagtgtttcccatccctcaaaaaactmtgcttatataatctatttcctttgatagttaccatttaattcctttttccctgtatcatccaaacattttgaaaaggttgacaacaggcatttctgtcttttccttcactctccaatccatcataacttggttcttgttcttagcacacttctaaaatcgctcttcttcaaatcctcaataatttactaacttctaggtctaaaggacagctgtcatatttgagactttgaatcacagtatccaggatagcactcatattaacaagaacttacattcacttgcattttctgatatgctttgattatattatgcatcttatattcgttatttcattcaatccccggagtgattgcatgagagagttactattgtttttctcactttattgacaaggatgttgggaatcagagagattagtcaactacagagcca

SEQ ID NO: 196424 - DNA, 553 bp, Homo sapiens
gaaaacacttcctctgtctcatatatctttcctggctcctctctcctggctcctctttgtttataaacacattcaagtgtttcccatccctcaaaaaactctgcttatataatctatttcctttgatagttaccatttaattcctttttccctgtatcatccaaacattttgaaaaggttgacaacaggcatttctgtcttttccttcactctccaatccatcataacttggttcttgttcttagcacacttctaaaatcgctcttcttcaaatcctcaataatttactaacttctaggtctaaaggacagctgtcatatttgagactttgaatcacagtatccaggatagcactcatattaacaagaacttacattcacttgcattttctgatatgctttgattatattatgcatcttatattcgttatttcattcaatccccrgagtgattgcatgagagagttactattgtttttctcactttattgacaaggatgttgggaatcagagagattagtcaactacagagccacactgttgggaagtggcaa

SEQ ID NO: 196425 - DNA, 553 bp, Homo sapiens
gaaaacacttcctctgtctcatatatctttcctggctcctctctcctggctcctctttgtttataaacacattcaagtgtttcccatccctcaaaaaactctgcttatataatctatttcctttgatagttaccatttaattcctttttccctgtatcatccaaacattttgaaaaggttgacaacaggcatttctgtcttttccttcactctccaatccatcataacttggttcttgttcttagcacacttctaaaatcgctcttcttcaaatcctcaataatttactaacttctaggtctaaaggacagctgtcatatttgagactttgaatcacagtatccaggatagcactcatattaacaagaacttacattcacttgcattttctgatatgctttgattatattatgcatcttatattcgttatttcattcaatccccggagtgattgcatgagagagttactattgtttttctcactttattgacaaggatgttgggaatcagagagattagtcaactacasagccacactgttgggaagtggcaa

SEQ ID NO: 196426 - DNA, 541 bp, Homo sapiens
tctctaaaaataaaaacaaacaaacaaacaaacaaaaaacccacggctctcagcaggccattagctaggtatccttgcccctgagtttctgacagagcaagtgtgcactggctgtaagcaccgctgagcccccattttcagttttggctgyggtcctcataacctaattatcagaggtaaaggttgatgtagcagataagacgccacaacactgcgtaacatgaaattcaggtaatttttcctcccacctctcttggaccctatcctaaatgtgttaaacgtcactatatctttccaactatattttgtttaaaagcgataaaccatgtgatttgagcctcttaatttgcggtgtgaggtttcctgtccatgacacctgggacagcctgcctaatcgtgtattttaaggttactattgcatcaagggaactgcctacatgacattgttgtaagtgggtttttgcacagatgtgcaagtgttcccacagaaatattcccccgcaccacttgtttgctggtagaactgaataccttcccacaa

SEQ ID NO: 196427 - DNA, 516 bp, Homo sapiens
caaaacacgtactaaaattacattgtgcattcacccttcaacataatgatgctaattctaggaatttactctgaatatatacttccaacaatataaaaaaaacatatgcacaaggttattccatgtagcactgcttataattgcaaagtataggagctacctaactaactaagcatagaggcctagttaaaagctccattcacacaatggagtaatatacagctataaaaaagaatgaggagatctctgttaactggataaggagtaatttccaggagataatattaagtgaataaagcaaagagcatatagtatgttactttttgtgtgctaaagcaggaaaaatagtttttacttaggaaagcatgcaaatattctacatattcaacaattaaaattaaatcrataagaaaaggaaggaggaaaaacataaaagcagaaagaaaagaataaacctaatcatatttcagtaaatatggtaaccatagtgaaagcaaatgaaggagggagggagga

SEQ ID NO: 196428 - DNA, 542 bp, Homo sapiens
attaatggcattcacagcaacctaactgagattggagactattgagtgaagtaactcaggaatggaaaaccaaacatcgtatgttctcactcataagacgcagctaagctgtgagcatacaaaggcataagaatgacacagtatactttggggactcagggagaaagggtgagaagcgggtgagggataaaagactacaaactaggtgcagtgtatactgctcragtgatgggtgcactgaaatctcacaaatcaccactaaagaacttactcatgtaaccaaaccccacgtgttccccaataacctatggaaataaaatttaaaaaaaattataaatgattattgatggtagtcacactgttgtgctatcaaatactaaacaacaacaacaacaaccacacacacacacacacacacacacacacacacacaaaaacatatatagcatgagagaaggcaagaaagaaccccatggacatgcattggaattgtaggtaccagtgtgaactgataatttctaaattatgtaaatgcatgtgat

SEQ ID NO: 196429 - DNA, 542 bp, Homo sapiens
attaatggcattcacagcaacctaactgagattggagactattgagtgaagtaactcaggaatggaaaaccaaacatcgtatgttctcactcataagacgcagctaagctgtgagcatacaaaggcataagaatgacacagtatactttggggactcagggagaaagggtgagaagcgggtgagggataaaagactacaaactaggtgcagtgtatactgctcgagtgatgggtgcactgaaatctcacaaatcaccactaaagaacttactcatgtaaccaaaccccacrtgttccccaataacctatggaaataaaatttaaaaaaaattataaatgattattgatggtagtcacactgttgtgctatcaaatactaaacaacaacaacaacaaccacacacacacacacacacacacacacacacacacaaaaacatatatagcatgagagaaggcaagaaagaaccccatggacatgcattggaattgtaggtaccagtgtgaactgataatttctaaattatgtaaatgcatgtgat

SEQ ID NO: 196430 - DNA, 542 bp, Homo sapiens
attaatggcattcacagcaacctaactgagattggagactattgagtgaagtaactcaggaatggaaaaccaaacatcgtatgttctcactcataagacgcagctaagctgtgagcatacaaaggcataagaatgacacagtatactttggggactcagggagaaagggtgagaagcgggtgagggataaaagactacaaactaggtgcagtgtatactgctcgagtgatgggtgcactgaaatctcacaaatcaccactaaagaacttactcatgtaaccaaaccccacgtgttccccaataacctatggaaataaaatttaaaaaaaattataaatgattattgatggtagtcacactgttgtgctatcaaatactaaacaacaacaacaacaaccacacacacacacacacacacacacacacacacacaaaaacatatatagcatgagagaaggcaagaaagaaccccatggrcatgcattggaattgtaggtaccagtgtgaactgataatttctaaattatgtaaatgcatgtgat

SEQ ID NO: 196431 - DNA, 499 bp, Homo sapiens
cagccataaacatgcatcagaaaacccagaataagaaacactctactgacaaaaaggagagagagtgtattttttttttaaatgacaaagaaaggctgtggaagtattttaggttaaaggagattacagagacctaccaactaaatgcaatacatgtccctagactggatcctatactagaggggaaaatgccataaggacattaataagtcacctgagaaaactgaaatacaaatgacagattagataaaatattgtattaaatttaaatttattggtactgatgactatactgtgattatgtacaagactatatctatatacactatatacttgagaaatacacactgaagtatttaaagctctatgatttatgcagcttaccataaaagttaagaaaaatattatatagatagaacaagtgataaagcaaatgggataaaatattaactacaggtgactctgggtcaaaggcwtgtgggtatttgttgtactgttt

SEQ ID NO: 196432 - DNA, 611 bp, Homo sapiens
taactggtgtaagatggtatctcattatggttttgatttgcctttatcttatgattactgatgttgagaactttttcatgtttattggccacttgtctgtcttcttttgagaagtgtctgttcatgtcttttgcttactttttaatggggttgtttgatttttgcttattcaattctgattttagctattttttttttttygctagctttgggtttagtttgttcttgttttctagttccttgagatagagaattttgaagaaagagtagagctaaagaaagaaaactttcactcttattatctggggtcaaaaatactgaccaaaataaatgtgttcctcactctatttcagccatgatttgtaggcattgaatacttactaggtcccaaacattgtgacaaactatatactgacattatctctgtgattctcatcatgacacattttatagatgagaaaaacactgctcagagttgttggaaaattttaccagtttcatacagctaataaatggaggaggcattatttgaaccacaaattatgcttttcccactatgtcattccaccttccaaaagaaaagtataattcttgaataaaagcaccccaca

SEQ ID NO: 196433 - DNA, 611 bp, Homo sapiens
taactggtgtaagatggtatctcattatggttttgatttgcctttatcttatgattactgatgttgagaactttttcatgtttattggccacttgtctgtcttcttttgagaagtgtctgttcatgtcttttgcttactttttaatggggttgtttgatttttgcttattcaattctgattttagctattttttttttttcgctagctttgggtttagtttgttcttgttttctagttccttgagatagagaattttgaagaaagagtagagctaaagaaagaaaactttcactcttattatctgrggtcaaaaatactgaccaaaataaatgtgttcctcactctatttcagccatgatttgtaggcattgaatacttactaggtcccaaacattgtgacaaactatatactgacattatctctgtgattctcatcatgacacattttatagatgagaaaaacactgctcagagttgttggaaaattttaccagtttcatacagctaataaatggaggaggcattatttgaaccacaaattatgcttttcccactatgtcattccaccttccaaaagaaaagtataattcttgaataaaagcaccccaca

SEQ ID NO: 196434 - DNA, 590 bp, Homo sapiens
gccctgctatcattctgcctgttctgttttgttctgttcctctgtgtcctctcttagcaaaagsacattgctgatcttaccttcaaatctttgtccttgctattgtggctgcttgtaatcactcctcttttctctattggaatcttgttgaaccaaagtttcgccttctccatgcaactgtctctcatcactgcccacacagctggctgctgcttctaaacgcctgtttgaattcctacctgcatcattctagtggcttttcatttagcgacgaaaggcagtatgtgattttcatgtgtggacaggaagctcttaaccactgttaagagcacaggattcagagttgggaagattggtgtttcaaattccaagctgccactacttacctactctaagcctcagttttctcatttataagttaaagataacagtgttgcatatttcatagagcttatctgaagcatggagagcattcagcacagtacctgctacatggtaaaagtttgatacatgtaaactactggaaacaggatatatatggtaatgagactgatttcatttaattaaagtggtagaaattagaatttatg

SEQ ID NO: 196435 - DNA, 489 bp, Homo sapiens
atagtgggagactacaacaccctcactgacagtattaaacagatcactgcagcagaaaactaacaaagatattcaggacatgaatttgacattggactaaatggtcctaacagatatctacagaaatctccaccctacaccaagagaatgtacattcttcttatctgcacatgccacatactctaaaactgaccacacaatcattcataaaagaatcctcaacacatttgaacaaaccaaaattatacaaaacacattctcagaccrcagcaaaataaaaatagaaatcaatactaagaaaattgctcaaaaccatactactgcatggaaattaaaccacttgctcctgaatgacttttgggtaaataataaaattaaggcaaaaattgagaatttatttgaagctgatggcaacaaagatacaacataccaaaatctctgggccacagctaaagcagttttggatggaagtttatagcgctaatgccc

SEQ ID NO: 196436 - DNA, 541 bp, Homo sapiens
aattcgatttttaaaaacccacaagatggatgtagctcaaatattttccaacataagcttccttttgaaagtaatttaaatgtttgtctgccctcccatcacatttatgtgtgatatgtttggtaattaagtacggaggaaagaaagggaatccctgtggtataaattccaggaacaactgtagattcatccagaggtcgcttataaatcagaacaaacccaaattcataagctagcctcaaacagaatcaactatcttataaaaatgagacaaaatgacaaaagcaattattttcacccctaatcatgtttataaaaaacaggatgctgtttttttagkcaggcaaataacttacccagggcattcttaactattgatgaatattacagcagaagaatgaactttggcatttgcaacttgcattgtgcaaagcatatcatctattcaattctcttgggtgtgtgtagctcactatttttgcctgcgcatgttttctcaggaaaaaaatgttataaagtcagaaccattcttaaacagaac

SEQ ID NO: 196437 - DNA, 485 bp, Homo sapiens
tttccaagggcaactcttgaatccaaggggacctctacaagccttgggccctgaagtagaccagcacagataccatagccccaatagaggccacagttgcagtgcctgggagcaataagattgctccacaccccctcaccaggcggtgctcagtaccaggttctggctcagcagtcccacttctgtgtaaactcagccagaaggtgcagcctcttgtcccaggaaacacctagatagcaaagtgggtgatcccaccctcacccaccactgrtagccaggcagtcaacacctgctagagcttctggcccagtggtcctgcttctgtgtgaactcagccagagggtgcaacctcttgttgtcctgggaagaacccagatggaagggtgagtggcccaaccccttcccatcactggtagccggcaggaaatgcctgctagggtttccagcccagcagtcttgtttctctggggcctcagcttatgtat

SEQ ID NO: 196438 - DNA, 513 bp, Homo sapiens
aaaaaaaaaaaaggccttctgcaaccatcactgctaaggttgcttcttctgctgtctccaaggtggggagggaacataaagcctgaggttgccccagagatgcagtgtgcagcctgagagtgccaagctgagatctgcagccagcactttcagagcactgagagggggcatggctgcaactgtgaggaaatacagaggagtcaggtggctgagcaagagcctacctactggccatttcacttaactgtcaccttctgggtcacaggcaaaaatttcartaaaaatattaatactttgctaatataccccctgtgaaacaaaggacaataatttaactacaaataaagacccttcacaaagccttggccctctgaaaacatccagaaaaggagtctactgattatactcaaattacacctcagtgaaaggaacaacaacctacacagatgagaaagaaccagtgcaagtaactctagcaactcaaaaagccagagtggttgttgttctccaagc

SEQ ID NO: 196439 - DNA, 403 bp, Homo sapiens
ttggtttaaggcttgctgtaggaccactatactggctgttacctctagttggcatgttctttccccagatttctgtagaaataattactttaccttctttaagatttaccttaatgtctctttcaaccaggtctatcctgactactgtatttaaaatcatctgtactctgaatctccattatcctttggtttttcttctttccatagtacacattaatttctaatatactatttaayttaacttttcactatctcattatttttctgtctgtactccttattatagaatgtaaacttcaaaggaaataaatccttgtttcaatgactggcctctctattatccaggaaaggtttaggacacagtacattctcaagtaacatttattgaatacatgtataggtg

SEQ ID NO: 196440 - DNA, 553 bp, Homo sapiens
taaaagaaaggagatttttgagtacaaaatagaaataagaaattagaggatttctggcaagatggccaaatagaaacggctccgttctgcagctcccagcaagattgacacagaagatgtgtgtttctgcatttccaactgaggtacctggttcatctcattgggactggttggacagtgggtgtagcccacagagggcaagctgaagcagggtggggtattgcctcacctaggaagcacaaaaggtcaggggatttcccyttcctagccaagggaagccctgagagactacaccaggaagaatggtacacttctgcccagattctgcgcttttcccagtcttcagaaccagcagaccaggagattccctttggtgcctggctcagtgggtcccatgcccatggagcccagcaagctaagatccattggtttgaaattcctgctgctagcacagcagtctgagagtgacctgggactctggagcttggtggggtaggggtgtctgccattgctgaggcttgagtaggcacttttatgctaacagtgtaaacaa

SEQ ID NO: 196441 - DNA, 697 bp, Homo sapiens
aaaattagtcccctatctcacaccatatacaaaaatcaactcaaaatgaattaaagacttaaacacaagacctgaaactgtataactactagaagaaaacataggggggtgggcacagtggctcatgcctgtaattccaacacctgtgaaagccaaggtrggcagaattcttaagctcaggcattcgagaccagcctgggcaacatggtgagaccccatctctaacaacaacaacaaaaaattaggtggacttggtggcacgtgtctgtggtcccagggacttgggaggctgaggtgggaggattgcttgagcctgggaggtaggggttatagtgagctgttatagtgaagttatagtgaggggtttatgcctccaatgtactccagcctgggtgacaaagtgagactccctctgaaaaaaaaaattaaaaagaaagaaaacataaggtaaaaagtccataatattggtctgaacaaagatgttttggctatgggcccaaaagcacaggcaacaaaagcaaaaatgggcaaatgagattacatgaaactaaaaagcttctgtatagcaaaggaaacaatcaacagaatgaagagataacctatagaatgagagaaaatatttgcaagtagtacattggataagaggttaatatccaagatagatagggaattcaaacaacccactagcaagaaaaca

SEQ ID NO: 196442 - DNA, 697 bp, Homo sapiens
aaaattagtcccctatctcacaccatatacaaaaatcaactcaaaatgaattaaagacttaaacacaagacctgaaactgtataactactagaagaaaacataggggggtgggcacagtggctcatgcctgtaattccaacacctgtgaaagccaaggtgggcagaattcttaagctcaggcattcgagaccagcctgggcaacatggtgagaccccatctctaacaacaacaacaaaaaattaggtggacttggtggcacgtgtctgtggtcccagggacttgggaggctgaggtgggaggattgcttgagcctgggaggtaggggttatagtgagctgttatagtgaagttatagtgaggggtttatgcctccaatgtactccagcctgggtgacaaagtgagaytccctctgaaaaaaaaaattaaaaagaaagaaaacataaggtaaaaagtccataatattggtctgaacaaagatgttttggctatgggcccaaaagcacaggcaacaaaagcaaaaatgggcaaatgagattacatgaaactaaaaagcttctgtatagcaaaggaaacaatcaacagaatgaagagataacctatagaatgagagaaaatatttgcaagtagtacattggataagaggttaatatccaagatagatagggaattcaaacaacccactagcaagaaaaca

SEQ ID NO: 196443 - DNA, 551 bp, Homo sapiens
aaagaattatatgctttgtataagtagggatttgtaaactggctggttttactttagagtgagtgtacattaatttatgagaccctaagcagtaaaaattggagtacatcactttggatgccacacccttagtaatttgccaacttctgtccatatattttattccattcatttagtaaatacagaaactgctcaagttcagatagttgaaaggactcttaagactacacagggtatactcaggtaaggctttaataaaaaagtaagggcaattctgtataacagaagagataaaatgcaggcaaagttgcatcacacttgaatattttctcagttgcacaggacatgcttcattttcacattacaaactatcaagatatgtacaagatatcttggtttcaggggaaccrtggcacaattaatgaatggtcatttatatctcactggtaggcattctggagatactcacagagctattctcatctaactgcaaattaacctgctttatgcagcacaaagaaccccctgaattttagtttaaaataaatacc

SEQ ID NO: 196444 - DNA, 597 bp, Homo sapiens
ttggcataaaaactgttacatgttcgtaaagacatgtaaatcaatttgctatataaaacgtttttgaattatgtgtgggattagagcactataaaaaataacaatctctaattccacttacaggttttttatgagtgtctaattttttctcctactttaaataaatgcaaactcaaattataactgatccattatggatgtgayttatgcaatagagataaagtaaaaattttatcaaccatattcaaaaaggccctgccattgcaacaaaaatatggcccagatgttgtcaacaaattgagtttgatatagaagctggaaaaaaacaaaacttacgggattcacatattaaacactaactgggagcaattatctgctgatatgtatgctgctcagagacttacagaagatttaaagtcattcatcaatagagaaaattggattagagagcaactctacaaaattgaagaattgggtctaaatgagaatgtgtcacattttcttacaaaaataatggcacaaaatcagagcatgcaacatttagaatcagaaattcaaagaagaaatcatagcaacctcttgtagcaatgcagcttg

SEQ ID NO: 196445 - DNA, 584 bp, Homo sapiens
tcaaaaccttgaaggcaccgagaaaattttttrtctcgtcaatgttacattttaaattcagttcatgtaataaagagttctagattgttttaaaaggtgatgcaggcaaaaattgccagttttgaaaaacatacaagacaagaaagcaggtcttagagaatcattaagatttattaaacgaagattttcataatgtatttttattataaacttaaactactactttagcctttgataaatacaggtgagaaatatcagttgagatgatagtgctatggtaaactctgaacaaaaaactaattagcatttcagcatattaactgattttgagtcaattagagattcctgaaggtaacacataagaaataattatagttaatgttctgaaaaataaatagaaatcctatatatattgacagaaaaaataaatataaagaagctacaaaattgaatccagagccaaatattgcttatgcattactcaaataaatcataggtacaattatatgttatatatttttatgacttacagttgaatgaaccaataatattttggtaaaatgttcaaaactccggaagaaaag

SEQ ID NO: 196446 - DNA, 584 bp, Homo sapiens
tcaaaaccttgaaggcaccgagaaaattttttgtctcgtcaatgttacattttaaattcagytcatgtaataaagagttctagattgttttaaaaggtgatgcaggcaaaaattgccagttttgaaaaacatacaagacaagaaagcaggtcttagagaatcattaagatttattaaacgaagattttcataatgtatttttattataaacttaaactactactttagcctttgataaatacaggtgagaaatatcagttgagatgatagtgctatggtaaactctgaacaaaaaactaattagcatttcagcatattaactgattttgagtcaattagagattcctgaaggtaacacataagaaataattatagttaatgttctgaaaaataaatagaaatcctatatatattgacagaaaaaataaatataaagaagctacaaaattgaatccagagccaaatattgcttatgcattactcaaataaatcataggtacaattatatgttatatatttttatgacttacagttgaatgaaccaataatattttggtaaaatgttcaaaactccggaagaaaag

SEQ ID NO: 196447 - DNA, 414 bp, Homo sapiens
cagtcatttatttttaaatggttgtgatttcaccttatttgtaactttgtattccactttttcagttaatattatgtgcattattgcatgtcattaaaaaacttcctaaatatgtttttcttaacccacagttattaaggacaggattttctgagcaattaggttttagagatttatgtatgaatgtcttttattcaaaagaattaatgcaaattggctgttcggtaactaccattctaactaacttgaatcgacataattgcagaaagaaatttaagagagaaatcttagtcggctctgaaccaygcaggatgtctctgatgaaatgtctaaaatcccttaatttcctctacttcatttacaacaattttactcttctctctcacctttaaacctcctttgtccttaccctac

SEQ ID NO: 196448 - DNA, 613 bp, Homo sapiens
ttcagttttgtaatagtcttattttagggattcctgccagttttttgtttttcaagggatgtctacagtctgctcttctaagggctttattcatcaagagggtgaacctgcagaaaatagtggaaccatttgacctcaacagtaaggtaccagatttttggatgcctatgcttgataagtgcgtgcttttgtttcaggaggtttttgrggccacacccttcctgttattaaaattttctacaacaggcttaattttaaggcaaattttcccttgagtatagtcttattgagaaatctctcatttatattaacttattaaaaagaccctattatatgactgattatttttcagccatacagtgtttgtgtgtaaatagacctatactcccatgaaatcacttagataagagcctgggtataaagagtgactggggacctataaaattaaatttgcatagtagaacctgagccaagaattctacttctttggggtatttatttttataaggttgggcccaacgttcttagtattagagtatcttagaaacttatagaagattcattcatttcagtgcaagagatttcaaaggttccactggcttttactcaagaa

SEQ ID NO: 196449 - DNA, 613 bp, Homo sapiens
ttcagttttgtaatagtcttattttagggattcctgccagttttttgtttttcaagggatgtctacagtctgctcttctaagggctttattcatcaagagggtgaacctgcagaaaatagtggaaccatttgacctcaacagtaaggtaccagatttttggatgcctatgcttgataagtgcgtgcttttgtttcaggaggtttttgaggccacacccttcctgttattaaaattttctrcaacaggcttaattttaaggcaaattttcccttgagtatagtcttattgagaaatctctcatttatattaacttattaaaaagaccctattatatgactgattatttttcagccatacagtgtttgtgtgtaaatagacctatactcccatgaaatcacttagataagagcctgggtataaagagtgactggggacctataaaattaaatttgcatagtagaacctgagccaagaattctacttctttggggtatttatttttataaggttgggcccaacgttcttagtattagagtatcttagaaacttatagaagattcattcatttcagtgcaagagatttcaaaggttccactggcttttactcaagaa

SEQ ID NO: 196450 - DNA, 567 bp, Homo sapiens
gcacagcaaaagaaactatgaacacagtaaagagacaatctacataatcagagaaaatatttgcaatctatgcatctgacaaaagtctaatatcaagaatctataagagacttaaacaaatatacaagagaaaaacaaccccatcaaaaagtgggcaaaggacttgaacagtttttaaaagaagacatacatgtgaccaacaaacacatgaaaaaaagctcaatatcactgatcaytagagaaatgcaaatcaaaaccacaatgaaatatcatctcacaccagtcacaatggctactattaaaaagtcaaaaaatgagagatgctggcgaggttgcagagaaaagagaacacttacacactgttggttggagtgtaaattacttcaaccactgttgaaagcagtatggtgattcctcaaagagctaaaagcaagattaccattcaacccagcaatctcatactgggtatatactcagaggaatataaataattctaccataaagacacatgcatacaaatattcattccagcactattcacaatagcaaaaacatggaatcaaccta

SEQ ID NO: 196451 - DNA, 591 bp, Homo sapiens
tatacagcatggctttgaatcaaatagtatgcagtacattgtaattattttccaggcaaatgtacatttcatagrgtatgttggaaaatgttagagttagtgatatggcagttgtgagtgtgaggttgacctaacacaatagttaaggccatccttacagagtatcatagtcatggatggatgaagatatgctgaaactggattcaagaattttggcatgcattaatttcaatattaattaaaaggaaaaagactcaatgcaagtttcttatttcatagaatgattatctaaagtataatgtttataagtatattagctctagaatttagacatttttcagttatttctatagcattggtggggtagggcttcctcatggcttattttaataggacttaaatatctttaaaaaaactcacttcgaagaaatagacatgaagcccacaaacgtgatcttagcgttgtatctcagaattgtaggagagggatggtgaaatgtactgtacaatatatatcattcaaatcagtgttaaaattattccaacaaactacaacctgaaccctcaggaaaggatatagtaaacatataa

SEQ ID NO: 196452 - DNA, 580 bp, Homo sapiens
tatttgtgaaccgcacatgtgagggatctaggttgtgccctccttttgagaatctaatacccaattatctgagatggaacagtttcaccccaaaaccatgtcccctcatccccatcagtccatggaaaactcagaccggtcccctggtgctaaaaagcttgggggctgctactctgaaccttctcatacactgaggagtctggctccaggaaaaaattctgtgtgtgagtttcaaagctttgcctggcacatttccttgggggcagctgccatccccaccacagacttggtgtgcagcctgtgtatggtagttttctggagagaagtacagtcaagaatccaggtaccctgggaaggccrtgctcatactcatatctgcatttgaaccaaagtgcctctactaagacttatttatggaggaggggtggggagggatccttggctgaggcatttttctccactttggctaagtacctttccacttctagcctttccccctctccttccctctggcccatgagttcctacagtggtagatgtcttttgttcaggtctccctgcataactctgttttttttgg

SEQ ID NO: 196453 - DNA, 580 bp, Homo sapiens
tatttgtgaaccgcacatgtgagggatctaggttgtgccctccttttgagaatctaatacccaattatctgagatggaacagtttcaccccaaaaccatgtcccctcatccccatcagtccatggaaaactcagaccggtcccctggtgctaaaaagcttgggggctgctactctgaaccttctcatacactgaggagtctggctccaggaaaaaattctgtgtgtgagtttcaaagctttgcctggcacatttccttgggggcagctgccatccccaccacagacttggtgtgcagcctgtgtatggtagttttctggagagaagtacagtcaagaatccaggtaccctgggaaggccgtgctcatactcatatctgcatttgaaccaaagtgcctctactaagacttatttawggaggaggggtggggagggatccttggctgaggcatttttctccactttggctaagtacctttccacttctagcctttccccctctccttccctctggcccatgagttcctacagtggtagatgtcttttgttcaggtctccctgcataactctgttttttttgg

SEQ ID NO: 196454 - DNA, 625 bp, Homo sapiens
gtgattcagccactcagacatggcaccttttgctaatttacacaggatgttttatatgactctgcccccaaatttggctcaggtaataaaattgctaattgatatttcactgtttaatcatacaaaataaattagggttttgtaatttctgcttacaatttgatataattttatcgagtaaaatcttataaacataattttaaaaggcaggttttcctttattaagcttttcttctttgtaacgtttacattctatgagcttattttcaagtgaaatattagcccctaatttcataactttttcctatgggtctttctaaactattccagctctaatcactggtaataacttagaattttacaagtaatttattccttttaatataaattataagctcaaatatatawctatttttaaaaacttacatagtctagccttgagagaagatagtattaatgatttgaggcttttaacaggagcaaggaagagggaagaaaggcttatgtgttaaccaaaaagaaatttgacgtctgtccctttttcacttcccaaagcccttaggcactagacccaaaattcacaaaatgtaaagctgcatgaaaacaaaggttttaatttgttagc

SEQ ID NO: 196455 - DNA, 630 bp, Homo sapiens
gtgttattggatttagagtcatttatataatactgaattatctcattttgagatccttacttaattacatgtgtaaagactcttttttccaagtgaggtcacattaaaggttccagaggttaggacagagacatgtgttgttagggaccaccattcaacccactataggtgggttccagaaataatagtcacactttaaaaagaaagaaacaaagacttataaaggttaaataacttgcctagggtcacacagaaagaaagtgacagcatcagtaaataggccaaatggcttgatactgctggaaatcaattaataattactacctgtaaaaggaaataatttagggtatcttcctctttatttaacctacataggcygactcatttatcatagacagggacctatttcaagtgatagtcagaaaacatttaacctcttgttatctctcacttctacctgctgctttcatggccttcctaactgggactgcccccagtttgcctcattcccttgttcttctgtgctgcagatgttatttcttcccgctaaacatccttcatttgccttacaaagccttcatcattcttcccttgctcttttctatctagccattcctccaatgaccaacc

SEQ ID NO: 196456 - DNA, 505 bp, Homo sapiens
ttttatttctaataaatgcatttaaatttcaattatctaaatataaaaagttcaaaatacaaaatawaaccatataggcaattgaacaatattgaacaatgagaacacatggacacaggaaggggaacatcacacaccagggcctgttgtggggtggggggagggggtagggatagcattaggagatatacctaatgctaaatgatgagttaatgggtgcagcacaccaacatggcacatgtatacatatgtaacaaacctgcacgttgtgcatatataccctaaaacttaaagtataataataaaattttaaaaaaagtataaatatagcatttttaaaaaaatgggcacagtataatataactgatttaaccaatatgaaagaaaatcttaaaggaagttacaaaaaaaggaaaggttactttcaaaagagcaacaattacattaatagcttctcaataaagcaaggaggccagaagacaatagaattatcttttttagatag

SEQ ID NO: 196457 - DNA, 505 bp, Homo sapiens
ttttatttctaataaatgcatttaaatttcaattatctaaatataaaaagttcaaaatacaaaatataaccatataggcaattgaacaatattgaacaatgagaacacatggacacaggaaggggaacatcacacaccagggcctgttgtggggtggggggagggggtagggatagcattaggagatatacctaatgctaaatgatgagttaatgggtgcagcacaccaacatggcacatgtatacatatgtaacaaacctgcacgttgtgcatatataccctaaaacttaaagtataataataaaattttaaaaaaagtataaatatagcattttwaaaaaaatgggcacagtataatataactgatttaaccaatatgaaagaaaatcttaaaggaagttacaaaaaaaggaaaggttactttcaaaagagcaacaattacattaatagcttctcaataaagcaaggaggccagaagacaatagaattatcttttttagatag

SEQ ID NO: 196458 - DNA, 415 bp, Homo sapiens
gtcttgtcccttattacacagcactgctattccttgtgtctatctcagtcatcaaatgcagcaccaaagtataaaggagatagtgccaaatggactgctaagtacagtatatgaagagaattattataattcctgattcattttcttattctaaaagtatcattgttatgacattatttatgatatwatacactagaatttcggtctttaaaaatctatctcctgtaaaaaaaaaaaaaaaagtcatcatgtttgacccttcaaggtaccacagtttagtctacccactggctctgaatgcattttttttagtttaaatttatttgaaataagttctgtctattgattctattatctaatattatgacctagaataaaatggggggatttaagtcaagaaagagaactaagactc

SEQ ID NO: 196459 - DNA, 570 bp, Homo sapiens
aataaatgattgttgctggtcttattatgccacctgccccaaattaacatcattgtttcccagcctcaaatgaggaatattaacaataagagaaaacaataatctgaattcaggagcaatctgttttctaaatatctgtggttaatttattcaatgaaatcaaagcatttctcataaatttattttctccaaaagcagaaatcattagtataattaccttttgaaatatgataaatttgatagacggtttgcattwccttatctataaagcaaactggtatgcaagataaacaaaaacttcatacctgattttctgactttccaaaacatcaagatagttctatttatctcaagattaggagtaggtgaaaaatcttaaaataatatattcagtttagtattaaaataaaatttccttttgttatattgatttatttatataataaataatactttacaggaaataaggaaacaaggagaaaacaaaatcaaatatattaggccataataattgattaaaactttaaaactctaaaaattccacaaagaatgagaatcattgctgaaaac

SEQ ID NO: 196460 - DNA, 606 bp, Homo sapiens
gacataggacttaaggacttgcctttcaccattactttcagggctacccctgagtaggtagtacatatagtggccattcacattcagttggtgctggcataccagaagttgcagggaaatattcatgaggcagtaggtatcaattgagatagaagctataaacctacatrtagcctaagaatctaagccacctgctcaggcagtttacttgtgttttctagacctgtgttttctagacttgggttttctaagacccaaatttatatatgccattttctaacttacagcagaatgttgctgcacacatccaattttataacgcagtagatcagataatgcccagtatatgatggatggttcagatcacatagtctattgggacttttgatcaggcattcagtatccatgagggtttagtatcatgccacaaattgattttcaaatgaaataaaattattggcaaaagaagggataacctcagatgaaaatccttgggatatacattctgatattcctattctggcttgcttaatgttccatatagtagaatttctctctgccacaggcactccttgtttccttaatttagccaacttgtaaggccca

SEQ ID NO: 196461 - DNA, 596 bp, Homo sapiens
ttttttgctgtttgttgtcattgttaatttcaataacaaaagctcatctaagaccacagttacaattagcrtcactacctgatgaactttgtgaaatctggtcattctttaggtgagctgaatatgagtgttgggtaattctttaaccatgcttctttcaaatcttttaagatgacataaaataaaacaacctcccaggattgtgcttaacttccttgcaaagaagggaacaattccaggtgcttccagttggcctttcctttaggctaacactacatgggccaggaaatcaatatgggggttctgccagttatcctatatgtctgtctattccctctatgcattctgggaatgggaaaacaaccacagagtgcattcacagtgccactggaccaactgttagaactggtcaactcatttcatcaccttcataagactttattatgactggatgatcataatggcattgaggattagcatcaattcaaaactagtatctattaagctctgaaaattctagatgtttcactttcacaaatgcatagtcactctggtaaatggctacagattcttctggggaaacgttggatgaagat

SEQ ID NO: 196462 - DNA, 609 bp, Homo sapiens
ttttataaacccaaaataataagcctctagcgaggactgtgggaatggaggaggaggtcaaggagagaaaaaccggggaaggtctggtatgacagttgcagacataaataactagtctgcttcttaattattaggtttttttcttttcttttttttttttttttttttttgaaatggagtcttgttctgttgccaggctggagtgcactggtgtggcctctgctcactgcaacmtctgcctcctgggttcaagcgattctcctgcctcagcctcccgagtagctgggattacaggcatgtgccaccacacccagctaatttttgtatttttagtaaagatggggtttcaccatgttggtcaggctggtctcgatctcctgaccttgtgatccacccgcctctgcctcccaaagtgtgggattacaggcatgagccaccgcgcccagccaggtttaattattgttttctactctttttttttttttttttttaagcttaaggtcctattttctttcttttacttgaagacgttaaataagagttgttgatttcttctggattaccaaaagtgtctgtaagtttatgctggggaccataacctggatggaa

SEQ ID NO: 196463 - DNA, 609 bp, Homo sapiens
ttttataaacccaaaataataagcctctagcgaggactgtgggaatggaggaggaggtcaaggagagaaaaaccggggaaggtctggtatgacagttgcagacataaataactagtctgcttcttaattattaggtttttttcttttcttttttttttttttttttttttgaaatggagtcttgttctgttgccaggctggagtgcactggtgtggcctctgctcactgcaacctctgcctcctgggttcaagcgattctcctgcctcagcctcccgagtagctgggattacaggcatgtgccaccacacccagctaatttttgtatttttagtaaagatggggtttcaccatgttggtcaggctggtctcratctcctgaccttgtgatccacccgcctctgcctcccaaagtgtgggattacaggcatgagccaccgcgcccagccaggtttaattattgttttctactctttttttttttttttttttaagcttaaggtcctattttctttcttttacttgaagacgttaaataagagttgttgatttcttctggattaccaaaagtgtctgtaagtttatgctggggaccataacctggatggaa

SEQ ID NO: 196464 - DNA, 561 bp, Homo sapiens
tgcccgtgtcattgacagccaagaggattacaattaaatgaaaagatttctgccccttttccccatctctgatcctagatccaattcactaaaggagaaagaagaagcagaagaggaaaaakgcagaagagtaaaagatttgattatgccttttccacactaagaccctcaggctgagtttaaatgatcattatgcagagagaaagatctgaacttaaaatggtcaacttatttaaattgtactggactgaactctggacttttttatactcaaaagcagccagaaagttcggggatgcctgagatgtaattaaaacaggaaaagagtttctgcagagcatgtttgagcatgtatgtatttttatttaagttagaagttagatttttttaaacggatgttagtatcatttgagaatatttaataaattacttacatatccaaatttccagtactagccataataatttaatgcaattaacacttctttgatggtagcatctaaatatgttttggtaaagaaggagaggaatttacactattaaaatctcaaaaagttagtg

SEQ ID NO: 196465 - DNA, 584 bp, Homo sapiens
tttggttccgaggcccctagcaggcctgccattccgctcccagctccttctgtctctgcacaccctccccctgcaaatcttacaagtcatctcttaccacaactgtccaggcccctggagyggcctcccactgcctttcagattaactccaggcctctaaacccagggccagggcccagaagacggcttccagccagcacatctgccttctcccgtcagatgcctctcccagctttccaagtccggactgctccctcctcattccctgcctgagccctctcctccttcagtcaaatgctggccctcacacaaggccccactcagacccgactctctgggaagcctttcccaccggagcagggagccacggtcctgggcctccagatgcctcatttgtcattcacacccaccttgctttcttctctgttctcaccctaccctgaagggacagacacctggtctcctgattaagacaggaaggcctacgggagcacgatttccacctggctacccatcagggtggagcacctagcatttcctaagcctaactgcttgagagttgaaggccagatgtgaaatccaga

SEQ ID NO: 196466 - DNA, 500 bp, Homo sapiens
ggtgaggtttcctttgtaggtgactgcctcttctctctagctgccattaatgtttttctttcatgtcaaccttggagaatctgatgactatgtgacttggatatggtcttcttgtatagtattttgcagttcttcacagttcctgaatttgaatgttggcctctctagtgagggtgggtaatttttcacaaacaatattctgaaatgttttccatgctgcttgctttctctccctctttcaaggatgtcaatgagtcatagatttggtctctttacataatcccatatctctagaaggttttgttcattcttgttcattgttttttctttgtatttgtctgattggttgattttggagaatcagtctttgagccatgaagagtcyttcctcagcttggtctattctgcattaatacttgcaactgtattctgaaattcttgaagtgcgtttttcagctgtatcagtgcttcttctttttaaaaatggccattttgtcttc

SEQ ID NO: 196467 - DNA, 546 bp, Homo sapiens
tgcatctagtcagccaccttagaaattattatttactttatgaaatatatatgtctttttttttcttataacttgcttttggccattttattacttctttgtacctttaattgagggacataaacaagtaagagttgaaaatccagtcaatctgacaatgttttgggaaaaaaacttaattcagatagagaataaaatgaacaattaagrtttcataattattcatttcacttaactttgctgttgctttcctcttttagaaagtcatgtacagaggagtttaagacgacagatgggaagcagctagtatacactgctctcatggagatgaaacaaagtggtgagtaaatactagttcctcaagtggattgtcaaggagatcccatgaagattcaccaaggaagcaacaggaccaacagagaacaagaggagcgaagccaggcagctgcccacccagaactgatggagagtgggggaagctccctcacgcagggaaaggtgagtgagtgagagtcctgaggggatctatacttctgtgatagacct

SEQ ID NO: 196468 - DNA, 546 bp, Homo sapiens
tgcatctagtcagccaccttagaaattattatttactttatgaaatatatatgtctttttttttcttataacttgcttttggccattttattacttctttgtacctttaattgagggacataaacaagtaagagttgaaaatccagtcaatctgacaatgttttgggaaaaaaacttaattcagatagagaataaaatgaacaattaagatttcataattattcatttcacttaactttgctgttgctttcctcttttagaaagtcatgtacagaggagtttaagaygacagatgggaagcagctagtatacactgctctcatggagatgaaacaaagtggtgagtaaatactagttcctcaagtggattgtcaaggagatcccatgaagattcaccaaggaagcaacaggaccaacagagaacaagaggagcgaagccaggcagctgcccacccagaactgatggagagtgggggaagctccctcacgcagggaaaggtgagtgagtgagagtcctgaggggatctatacttctgtgatagacct

SEQ ID NO: 196469 - DNA, 384 bp, Homo sapiens
ttaaaataaggagattatcccatgggctgtaagtgtccttgtaagagggcagctgagggaaatttgactatagaaaatgagaaagcaattcaaaaacagaagcagagattggagtgatacaaccataagctaaggaatactggcaacctccagaagacagaagaggcaaggaatagattctcctctgggccctcctaaagacattggtcctgctgacaccttgattttagccctgtaagactcatttggggctcctggccgccacagctaagaaaattaatttctattgctttaagccactaaatatataatttttacaacagtagtaggagactaatacagtcacttaatctattastgctcaaatttgctggtaagtgatgg

SEQ ID NO: 196470 - DNA, 528 bp, Homo sapiens
tttcaaagaacaagttttttgttcccttttgtttcctttactttttrtcagttgtattgatttattctatttatcttttcctcttttgattgatttgggtttaattagctttttttcctactgttttaagtttgaaacttagattattgatttgaggtttttctgctttttcaatataaacatttaatactataaatttccttctaagcactgctgagaaggacatagctgtagctgcatcccacaaattttgacatgttgtatcttcattttcaatcggttcaaaataatttccaatttcatttgaaacttcccctttgacccatgggttatttagaagtgtgccacttaacttccaggtatttggggattttccagaatttttgttattgattcctaatttaatacctatttgattagagaatacactttgtatgatttcaattatttttaattttttaggatttgtattatagtccaggatattatctatattcatgaatatccattttcaattgaaaaaaaaag

SEQ ID NO: 196471 - DNA, 563 bp, Homo sapiens
atgccattagtctctttgctaaagagtagcaaggaacacttttgctccagtttccaataaattcctcatctccgtctgacaccacttcatcctggactttattgtccatatcactatcagcatcaaaatgctgacagttaaagccattcaacaaatctctaggaagttccaaactttcccacatcttcctgtcttctgagccctccaagtctccaggaagttccaaacttttccacatgtttatgttttcttctgagccctccaaactgtttcaacctctctgcctgttatcctgttccaaagttgcttccacatttttgcgtatcttaatmgtaccctgctctcctggtgccaatttactgtattagtctgttatcatactgctgtgaagaaatacctaagactgggtaaattataaagaaaaaggaggtgtaattaaactcacagtttcacatagccagggagacctcacaatcatggtggaaagcaaaggagagcaaaggcacatcttacatggtggctggcaagagagagcatgtgcaggcggagctgccctttataaa

SEQ ID NO: 196472 - DNA, 563 bp, Homo sapiens
atgccattagtctctttgctaaagagtagcaaggaacacttttgctccagtttccaataaattcctcatctccgtctgacaccacttcatcctggactttattgtccatatcactatcagcatcaaaatgctgacagttaaagccattcaacaaatctctaggaagttccaaactttcccacatcttcctgtcttctgagccctccaagtctccaggaagttccaaacttttccacatgtttatgttttcttctgagccctccaaactgtttcaacctctctgcctgttatcctgttccaaagttgcttccacatttttgcgtatcttaatagtaccctgctctcctggtgccaatttactgtattagtctgttatcatactgctgtgaagaaatacctaagactgggtaaattataaagaaaaaggaggtgtaattaaactcacagtttcacatagccrgggagacctcacaatcatggtggaaagcaaaggagagcaaaggcacatcttacatggtggctggcaagagagagcatgtgcaggcggagctgccctttataaa

SEQ ID NO: 196473 - DNA, 576 bp, Homo sapiens
aatgccattagtctctttgctaaagagtagcaaggaacacttttgctccagtttccaataaattcctcatctccgtctgacaccacttcatcctggactttattgtccatatcactatcagcatcaaaatgctgacagttaaagccattcaacaaatctctaggaagttccaaactttcccacatcttcctgtcttctgagccctccaagtctccaggaagttccaaacttttccacatgtttatgttttcttctgagccctccaaactgtttcaacctctctgcctgttatcctgttccaaagttgcttccacatttttgcgtatcttaatagtaccctgctctcctggtgccaatttactgtattagtctgttatcatactgctgtgaagaaatacctaagactgggtaaattataaagaaaaaggaggtgtaattaaactcacagtttcacatagccagggagacctcacaatcatggtggaaagcaaaggagagcaaaggcacatcttayatggtggctggcaagagagagcatgtgcaggcggagctgccctttataaaaccatcagatct

SEQ ID NO: 196474 - DNA, 563 bp, Homo sapiens
atgccattagtctctttgctaaagagtagcaaggaacacttttgctccagtttccaataaattcctcatctccgtctgacaccacttcatcctggactttattgtccatatcactatcagcatcaaaatgctgacagttaaagccattcaacaaatctctaggaagttccaaactttcccacatcttcctgtcttctgagccctccaagtctccaggaagttccaaacttttccacatgtttatgttttcttctgagccctccaaactgtttcaacctctctgcctgttatcctgttccaaagttgcttccacatttttgcgtatcttaatagtaccctgctctcctggtgccaatttactgtattagtctgttatcatactgctgtgaagaaatacctaagactgggtaaattataaagaaaaaggaggtgtaattaaactcacagtttcacatagccagggagacctcacaatcatggtggaaagcaaaggagagcaaaggcacatcttacatggtggctggcaagagagagcatgtgcaggsggagctgccctttataaa

SEQ ID NO: 196475 - DNA, 591 bp, Homo sapiens
cctgaattgaggtggtgggtgccatactgcttgtacacttgttatgggacactgtctcatccagggaatcttagccctgtgttgttgcatcaccagatcatctggaaacatgctctggaacacactctgactttggcaatcacaggggaccagccagacgctagggagctgtgggattcctggagacctagcccttagcatgggctkccccaaggaaaaggggcagtgcagcccattaaagtgccctttgaaacaaaggaaacatgggtgtgtggtgatctctgaaaggggcaatgttgttctgcctagcaaaagggcagcaactagtggctgacaatggacatggagggggttcatctcttactccccttgtctacagctgtggacatagccaaggctttccccactgggaactaaagcaaacaaacttggagacagcctttcctatgctatttgtgttcagttacacctccctgaaagtgtgcctgctgccacctgagcttgcacaaagggagggcttatctccccttcctgcaaaagagtgcagaccagctgcagagctgtttggagctggggagagagtttcttccc

SEQ ID NO: 196476 - DNA, 531 bp, Homo sapiens
aaactatttattgtaaaaagaagagtaacaaatgtatctaaactgttcaagtaagatatatgttagacaaaaaagaatatttcccttatttgtaaactcatttgagttttaatagaagaaaatatatttttattaattaaaagtgcaacacatattaaaactactgtaaatataaagaaatataaagaaaaccctacagaagcacaagtgtacagcattctatagaatcacaaatataatacatagaatcctatttccaacagagaatattcttttgttttcaagtcattagattccatttataatgttttactatgcattattacatgacaacaactcaayacattctaaaatacaaggataatacacaggccacagtgtttaagataatataaaaaagtttaaactaataattaaattataaacatgaaattctttgccactaaaaagcactattttgaaatattcttaggtaaaaatacaaaccaaaattgcaactacatgctggaaatgttccataccttgatgtgt

SEQ ID NO: 196477 - DNA, 531 bp, Homo sapiens
aaactatttattgtaaaaagaagagtaacaaatgtatctaaactgttcaagtaagatatatgttagacaaaaaagaatatttcccttatttgtaaactcatttgagttttaatagaagaaaatatatttttattaattaaaagtgcaacacatattaaaactactgtaaatataaagaaatataaagaaaaccctacagaagcacaagtgtacagcattctatagaatcacaaatataatacatagaatcctatttccaacagagaatattcttttgttttcaagtcattagattccatttataatgttttactatgcattattacatgacaacaactcaacacattctaaaatacaaggataatacacaggccacagtgtttaagataatataaaaaagtttaaactaataattaaattataaacatgaaattctttgccactaaaaagcactattttgaaakattcttaggtaaaaatacaaaccaaaattgcaactacatgctggaaatgttccataccttgatgtgt

SEQ ID NO: 196478 - DNA, 494 bp, Homo sapiens
ccagggcagggtcactgtgcatccacgttctttgctacagcaaaacaaaagtaaccttggctcctgtttgcagtaagttcctcattttcatccgagagcttctgaatctgatccttactgtctattttcctgtgagccttctgatcacaagtatttaacaactctttacaaagatccaaactttccctcatctccctgtctttgaagtcctccaaactctcccgaactccatctgcyacccccttctgaacctgcttctacattatcagctatcttttccctgccctggcaatgtggtaaaggaagacaagcccattttcagggaaaaattcaaggaggcttcagatacttgaataaaaagaagcccattgctgattgccaagacattagggagaaggccttgaagacatttaacagttccactttgcagtaataattttctccatgatcataaagaaaagaggtttaatagggtaatgattctgcaggctgta

SEQ ID NO: 196479 - DNA, 615 bp, Homo sapiens
cgttctttgctacagcaaaacaaaagtaaccttggctcctgtttgcagtaagttcctcattttcatccgagagcttctgaatctgatccttactgtctattttcctgtgagccttctgatcacaagtatttaacaactctttacaaagatccaaactttccctcatctccctgtctttgaagtcctccaaactctcccgaactccatctgctacccccttctgaacctgcttctacattatcagctatcttttccmtgccctggcaatgtggtaaaggaagacaagcccattttcagggaaaaattcaaggaggcttcagatacttgaataaaaagaagcccattgctgattgccaagacattagggagaaggccttgaagacatttaacagttccactttgcagtaataattttctccatgatcataaagaaaagaggtttaatagggtaatgattctgcaggctgtaaggaagcatagtggcttctgcatctgacaggactcaggaagcctcccaatcataccagaatgtcaaggggcaaggagatgtctcatacgggaagagtaggagcaagacagagaaaggaaaaagttgtcatgccccattttacaagc

SEQ ID NO: 196480 - DNA, 650 bp, Homo sapiens
aagttgaattttggaatttagaagtttttgaaactcttttctttatatataccacaaataattatctgcccctaagaatgcctagaagactttttaggttattcctggttatagttggataatttatgaatattgcagacattacatctttctcctcagygctcttccttagaaatgcaagtgacttactggcttttattatgccagaaataattcatatggatcagtatgagaacttttattgataggccattatgtttttatttctgatttatattttgtctaaaataaaaaataattttaagtagccctttaagtggaagccaataaaaatggatttaaaaagtagagctgccctggagtcccgggattaccattataattgagaatagtatttcttactgagttttggttttttaaatatttgttcttaagttttttaaacctatttctcttacacagaacatactgagctttctaacagtaaagataaaaatctattctcttgtattagggaaaaaacccatggactatctaataataaggaaaataagtgcatttgaagccaatctctcttaattcaaagctcatttccatagtgacccatttggagcaggagtgcctgacattgacatctgggatcctgacac

SEQ ID NO: 196481 - DNA, 543 bp, Homo sapiens
acatttggttctggatacatgttgaacctagttgaatataaaaatcagtagataaaaagtgtgtttactatactgtataattccatttacatgaagcatccagaaaagagaaaggtataggtacaaaaagtagaataatgtttgygaagggctggggctggaagctggtagtgactgctaatgggcgtgagggatcttgcagtgatggaaatgctctaaagttggattgtagagatggctgcacagctcagaaaatgtactaaaaatcttttaactttatgttaaaacagatacattctatagtatgtaaattatatttcaacaaagctttttggtttaaaaaaaaaggaaaaatgtgttcactacatcagcttagaaacataacttgtttccatagaggtgagagatgatttactttgagagaagacattgtgtcacctatgacattttattaggcacagagtcatattttaaggtagatagtcctgtagtgctgaaataataattttaatgtctttatattgccacatgttaagaccatgg

SEQ ID NO: 196482 - DNA, 617 bp, Homo sapiens
cgtcctttgctacagcaaaacaaaagtaaccttggctcctgtttgcagtaagttcctcatttgcatctgagagcttctcaatctgatccttactgtctattttcctgtgagtcttctgatcacaagtatttaacaattctttacaaagatccaaactttccctcatctccctgtctttgaagtcctccaaactctcccgaactccatctgctacccccttctgaacctgcttctacattatcagctatctttgtcacaggctggcagtgtggtaaaggaacacaagcccattttctggggaaaaattcaaggaggcttcagatagttgaatgaaaagaagccgagtgctgattgccaagacattagggagaaggccttgaagacatttaacagttccaytttgccataataattttctccatgatcataaagaaaagaggtttaataggttaatgattctgcaggctgtaaggaagcatagtggcttctgcacctgacaggactcaggaagcctcccaatcacaccagaatgtcaaggagcaaggagatgtctcatatcggaagagaaggaacaagacagagaaaggaaaaagttgtcatgcccgattatacaagca

SEQ ID NO: 196483 - DNA, 494 bp, Homo sapiens
cttttaatcacaactatttaacaagtctctgcaatggtcaaaactttccctcatcttcctcttttcttccaagctctccaaactctctaacatctggccattatgtaattcagaacctgcttctacactgtcagctatcttttttgtagcctggcaatgtggtaaaagaagaaaagtccatcatcagggggaaacatcaagaaggcctccaatatttgcattgaaaaagctcagtgctaatagccaagagattgggggaaggcctagaagtcatttcatagcttcacttsgcagcattaattttctgtatgtacataaaaaaagaggttagttaactcacagttcttcaggctataaagaaagcatactggtttctgcttatagtaggactcaggaagcctcccaatcataccagaaagccaagcggcaatgaaatgtttcatatggcaggagtagaagcaagacagagagaggaaagaggtgcgacagcctgt

SEQ ID NO: 196484 - DNA, 494 bp, Homo sapiens
cttttaatcacaactatttaacaagtctctgcaatggtcaaaactttccctcatcttcctcttttcttccaagctctccaaactctctaacatctggccattatgtaattcagaacctgcttctacactgtcagctatcttttttgtagcctggcaatgtggtaaaagaagaaaagtccatcatcagggggaaacatcaagaaggcctccaatatttgcattgaaaaagctcagtgctaatagccaagagattgggggaaggcctagaagtcatttcatagcttcacttcgcagcattaattttctgtatgtacataaaaaaagaggttagttaactcacagttcttcaggctataaagaaagcatactggtttctgcttatagkaggactcaggaagcctcccaatcataccagaaagccaagcggcaatgaaatgtttcatatggcaggagtagaagcaagacagagagaggaaagaggtgcgacagcctgt

SEQ ID NO: 196485 - DNA, 571 bp, Homo sapiens
accaccaccatctgacctggtcttatgayctgttagcttccttcatcagatgtgagcaccaggatggcaggggcctcatctgtcctgttcctcctgtggcctgggtcctagcaccatgtctggtacagtgtagatgctcaagggaagtttactttgtagaactgtttatctgggagatattactgttggtctaacctgtaccatattgtaaacctccagccattttgcagactttgatcacagtgaaacgttccatgggaacttgggccatgagaaacatccttcctaaccacgtgactgcagaaacatccttatcacatcctcctgggcaaaggcccaacagcctgactgcagggacatccttgccatatcctgctgggcagcaagctctaccacccagatccctccctcccagtcccatgattaccccagcctgtgagtggcagttggttctggcactaagctggtttcctcctccccagggttttgctggcaataaagatgttgctgttgaagccaccaactgtccctctgtctttctttaaccctcgccttgccttccaaacctaac

SEQ ID NO: 196486 - DNA, 571 bp, Homo sapiens
accaccaccatctgacctggtcttatgatctgttagcttccttcatcagatgtgagcaccaggatggcaggggcctcatctgtcctgttcctcctgtggcctgggtcctagcaccatgtctggtacagtgtagatgctcaagggaagtttactttgtagaactgtttatctgggagatattactgttggtctaacctgtaccatwttgtaaacctccagccattttgcagactttgatcacagtgaaacgttccatgggaacttgggccatgagaaacatccttcctaaccacgtgactgcagaaacatccttatcacatcctcctgggcaaaggcccaacagcctgactgcagggacatccttgccatatcctgctgggcagcaagctctaccacccagatccctccctcccagtcccatgattaccccagcctgtgagtggcagttggttctggcactaagctggtttcctcctccccagggttttgctggcaataaagatgttgctgttgaagccaccaactgtccctctgtctttctttaaccctcgccttgccttccaaacctaac

SEQ ID NO: 196487 - DNA, 571 bp, Homo sapiens
accaccaccatctgacctggtcttatgatctgttagcttccttcatcagatgtgagcaccaggatggcaggggcctcatctgtcctgttcctcctgtggcctgggtcctagcaccatgtctggtacagtgtagatgctcaagggaagtttactttgtagaactgtttatctgggagatattactgttggtctaacctgtaccatattgtaaacctccagccattttgcagactttgatcacagtgaaacgttccatgggaacttgggccatgagaaacatccttcctaaccacgtgactgcagaaacatccttatcrcatcctcctgggcaaaggcccaacagcctgactgcagggacatccttgccatatcctgctgggcagcaagctctaccacccagatccctccctcccagtcccatgattaccccagcctgtgagtggcagttggttctggcactaagctggtttcctcctccccagggttttgctggcaataaagatgttgctgttgaagccaccaactgtccctctgtctttctttaaccctcgccttgccttccaaacctaac

SEQ ID NO: 196488 - DNA, 571 bp, Homo sapiens
accaccaccatctgacctggtcttatgatctgttagcttccttcatcagatgtgagcaccaggatggcaggggcctcatctgtcctgttcctcctgtggcctgggtcctagcaccatgtctggtacagtgtagatgctcaagggaagtttactttgtagaactgtttatctgggagatattactgttggtctaacctgtaccatattgtaaacctccagccattttgcagactttgatcacagtgaaacgttccatgggaacttgggccatgagaaacatccttcctaaccacgtgactgcagaaacatccttatcacrtcctcctgggcaaaggcccaacagcctgactgcagggacatccttgccatatcctgctgggcagcaagctctaccacccagatccctccctcccagtcccatgattaccccagcctgtgagtggcagttggttctggcactaagctggtttcctcctccccagggttttgctggcaataaagatgttgctgttgaagccaccaactgtccctctgtctttctttaaccctcgccttgccttccaaacctaac

SEQ ID NO: 196489 - DNA, 428 bp, Homo sapiens
gaccaattaaaacaaactgacaaaaaaaaaaagggtatcctggagcatacgaattctaaatctaaattgaatggawctcaaagaaggcttcacattgaaaataaaaccatgggtatgtaagtgaattgtaacaaagctactacatagcaacattaaggtggcagagcagaaagggggctaagacagctatctgtcattttataccattttttttaagaaaagaaaaactataaaattatgaatttgggttctaattgagagataagacaatgataactgcaacaactgttaacatttacagtgcttcagtcctgctatgtgctcattcatgcccaataagtgaagagctggaactgaaagctttcttatatttattcccattgtagtctccctccagagtgcggaatcatgtgtaacaagaggggtaa

SEQ ID NO: 196490 - DNA, 428 bp, Homo sapiens
gaccaattaaaacaaactgacaaaaaaaaaaagggtatcctggagcatacgaattctaaatctaaattgaatggaactcaaagaaggcttcacattgaaaataaaaccatgggtatgtaagtgaattgtaacaaagctactacatagcaacattaaggtggcagagcagaaagggggctaagacagctatctgtcattttataccattttttttaagaaaagaaaaactataaaattatgaatttgggttctaattgagagataagacaatgataaytgcaacaactgttaacatttacagtgcttcagtcctgctatgtgctcattcatgcccaataagtgaagagctggaactgaaagctttcttatatttattcccattgtagtctccctccagagtgcggaatcatgtgtaacaagaggggtaa

SEQ ID NO: 196491 - DNA, 554 bp, Homo sapiens
ggtttctggttacatggaaaagttatttggtggtgattttctgagattttggtgtatgcactactcgagtcatgtacactgtacccaatgtgtagtctttcatccctcatccccctaaccttccctccgagtccccagagtcccttatatcattcttatgtctttacaccctcatagcttagctcccacttataagtgagaacatacaatatttgtttttttattcctgagttacttcacttagaataatcatctctaactccatccagattgctgcaaatgscattatttcattcctttttagggctgagcagtattccatggtgtatctataacacattttctttgtccactcattggctgatagacatttaacctggttccacatttttgcaactgcaaattgtgctgctataaatgtgtgtacaaatgtctttttcatatgacttattttcctctaggtagatacccaggagtgggctaatacaaatttaaatagagataattataaaataaagtaatcaccaagtgaaaattactatttctagtagtaa

SEQ ID NO: 196492 - DNA, 554 bp, Homo sapiens
ggtttctggttacatggaaaagttatttggtggtgattttctgagattttggtgtatgcactactcgagtcatgtacactgtacccaatgtgtagtctttcatccctcatccccctaaccttccctccgagtccccagagtcccttatatcattcttatgtctttacaccctcatagcttagctcccacttataagtgagaacatacaatatttgtttttttattcctgagttacttcacttagaataatcatctctaactccatccagattgctgcaaatgccattatttcattcctttttagggctgagcagtattccatggtgtatctataacacattttctttgtccactcattggctgatagacatttaacctggttccacattttwgcaactgcaaattgtgctgctataaatgtgtgtacaaatgtctttttcatatgacttattttcctctaggtagatacccaggagtgggctaatacaaatttaaatagagataattataaaataaagtaatcaccaagtgaaaattactatttctagtagtaa

SEQ ID NO: 196493 - DNA, 493 bp, Homo sapiens
caaatgtgcacaataaaatgagatctgtattttcaccactcgcttagaaaattaagaatcctagataacattgtgtgatgaggatatgaggataacaacctttatgggcaatggatgggaaattcaatggttttaaacatttcagaaaataacatgacaggayccatttgaaagtatgcatactctacaacctgtctcaatgacggtcacatatacctgatatagtttgtatgtgtgtcccctccaaatctcatgctgaaatgtgatcccccatgttggaggtggggcccagtgagaggtattggatcatggggtggatcccttatgaatagtttagcacaggaatgtccaacttttggcttccctggaccacaatggaagaataattttcttgggccacacataaaatacactaaaaatagctgctgagctaaacacacacacacacacacacacacacacacacacacacacacacgaagtctcttatgtt

SEQ ID NO: 196494 - DNA, 493 bp, Homo sapiens
caaatgtgcacaataaaatgagatctgtattttcaccactcgcttagaaaattaagaatcctagataacattgtgtgatgaggatatgaggataacaacctttatgggcaatggatgggaaattcaatggttttaaacatttcagaaaataacatgacaggatccmtttgaaagtatgcatactctacaacctgtctcaatgacggtcacatatacctgatatagtttgtatgtgtgtcccctccaaatctcatgctgaaatgtgatcccccatgttggaggtggggcccagtgagaggtattggatcatggggtggatcccttatgaatagtttagcacaggaatgtccaacttttggcttccctggaccacaatggaagaataattttcttgggccacacataaaatacactaaaaatagctgctgagctaaacacacacacacacacacacacacacacacacacacacacacacgaagtctcttatgtt

SEQ ID NO: 196495 - DNA, 493 bp, Homo sapiens
caaatgtgcacaataaaatgagatctgtattttcaccactcgcttagaaaattaagaatcctagataacattgtgtgatgaggatatgaggataacaacctttatgggcaatggatgggaaattcaatggttttaaacatttcagaaaataacatgacaggatccatttgaaagtatgcatactctacaacctgtctcaatgacggtcacatatacctgatatagtttgtatgtgtgtcccctccaaatctcatgctgaaatgtgatcccccatgttggaggtggggcccagtgagaggtattggatcrtggggtggatcccttatgaatagtttagcacaggaatgtccaacttttggcttccctggaccacaatggaagaataattttcttgggccacacataaaatacactaaaaatagctgctgagctaaacacacacacacacacacacacacacacacacacacacacacacgaagtctcttatgtt

SEQ ID NO: 196496 - DNA, 493 bp, Homo sapiens
caaatgtgcacaataaaatgagatctgtattttcaccactcgcttagaaaattaagaatcctagataacattgtgtgatgaggatatgaggataacaacctttatgggcaatggatgggaaattcaatggttttaaacatttcagaaaataacatgacaggatccatttgaaagtatgcatactctacaacctgtctcaatgacggtcacatatacctgatatagtttgtatgtgtgtcccctccaaatctcatgctgaaatgtgatcccccatgttggaggtggggcccagtgagaggtattggatcatggggtggatcccttatgaatagtttagcacaggaatgtccaacttttggcttccctggaccacawtggaagaataattttcttgggccacacataaaatacactaaaaatagctgctgagctaaacacacacacacacacacacacacacacacacacacacacacacgaagtctcttatgtt

SEQ ID NO: 196497 - DNA, 532 bp, Homo sapiens
agatttacctaatatgatagcaaattaacaacctctaaaactcatactataaagagtgcataatttatatttctggttttcaatttcataatttaagtagtggtcatcatttaaatgtttctcaaattaaaaaaaaatcttttttctattttctttattgaatttttaagggtatatcaaaaacagtccttcccaaacaagggagctgttttytgaactttttttttttttttctgagatggagtcttcctctgtcacccaggctggagtgcagaggcaccatctcagctctttgcaacctctgcctcctggggtcaagcgattctcccgcctcagcctccagagtagctgggatcacaggcacctgccaccaggcctgactaatttttgtatttttagtagagacagggtttcgctatgttagccagcctggtcttgaacccctgggctcaagtgatccttctgcctcaccctcccaaagtgctgggattacaggcatgagccaccatgcataggcttcaactttgaattc

SEQ ID NO: 196498 - DNA, 532 bp, Homo sapiens
agatttacctaatatgatagcaaattaacaacctctaaaactcatactataaagagtgcataatttatatttctggttttcaatttcataatttaagtagtggtcatcatttaaatgtttctcaaattaaaaaaaaatcttttttctattttctttattgaatttttaagggtatatcaaaaacagtccttcccaaacaagggagctgttttctgaactttttttttttttttctgagatggagtcttcctctgtcacccaggctggagtgcagaggcaccatctcagctctttgcaacctctgcctcctggggtcaagcgattctcccgcctcagcctccagagtagctgggatcacaggcrcctgccaccaggcctgactaatttttgtatttttagtagagacagggtttcgctatgttagccagcctggtcttgaacccctgggctcaagtgatccttctgcctcaccctcccaaagtgctgggattacaggcatgagccaccatgcataggcttcaactttgaattc

SEQ ID NO: 196499 - DNA, 532 bp, Homo sapiens
agatttacctaatatgatagcaaattaacaacctctaaaactcatactataaagagtgcataatttatatttctggttttcaatttcataatttaagtagtggtcatcatttaaatgtttctcaaattaaaaaaaaatcttttttctattttctttattgaatttttaagggtatatcaaaaacagtccttcccaaacaagggagctgttttctgaactttttttttttttttctgagatggagtcttcctctgtcacccaggctggagtgcagaggcaccatctcagctctttgcaacctctgcctcctggggtcaagcgattctcccgcctcagcctccagagtagctgggatcacaggcacctgccaccaggcctgactaatttttgtatttttagtagagacagggttycgctatgttagccagcctggtcttgaacccctgggctcaagtgatccttctgcctcaccctcccaaagtgctgggattacaggcatgagccaccatgcataggcttcaactttgaattc

SEQ ID NO: 196500 - DNA, 532 bp, Homo sapiens
agatttacctaatatgatagcaaattaacaacctctaaaactcatactataaagagtgcataatttatatttctggttttcaatttcataatttaagtagtggtcatcatttaaatgtttctcaaattaaaaaaaaatcttttttctattttctttattgaatttttaagggtatatcaaaaacagtccttcccaaacaagggagctgttttctgaactttttttttttttttctgagatggagtcttcctctgtcacccaggctggagtgcagaggcaccatctcagctctttgcaacctctgcctcctggggtcaagcgattctcccgcctcagcctccagagtagctgggatcacaggcacctgccaccaggcctgactaatttttgtatttttagtagagacagggtttcgctaygttagccagcctggtcttgaacccctgggctcaagtgatccttctgcctcaccctcccaaagtgctgggattacaggcatgagccaccatgcataggcttcaactttgaattc

SEQ ID NO: 196501 - DNA, 456 bp, Homo sapiens
ctgggaagggtcactgtgtagccaattactttgctaaggcaaaacaaaaaaaccttggctcctsttcccagtaagttcctcattttcatctgagaccttacaaacctggccttcactgtccatccttctgtcagccttttaatcacaactatttaacaagtctctgcaacggtccaaactttccctcatcttcctgtcttcttccaagctctccaaactctcgaacctctggccattacccaatttggaatctgcttctacactgtcagctatctttgttgcagcctggcaatgtggtaaaagaagaaaagtccattatcagggggaaacatcaagatggcctccaatatctgcattgaaaaaagctcagtgctaatagccaagagattgggggaaaggcctagaattcatttcatagctttacttcacagcattaattttctgtatctacataaa

SEQ ID NO: 196502 - DNA, 599 bp, Homo sapiens
tactttgctaaggcaaaacaaaaaaaccttggctcctcttcccagtaagttcctcattttcatctgagaccttacaaacctggccttcactgtccatccttctgtcagccttttaatcacaactatttaacaagtctctgcaacggtccaaactttccctcatcttcctgtcttcttccaagctctccaaactctcgaacctctggccattacccaatttggaatctgcttctacactgtcagctatctttgttgcagcctggcaatgtggtaaaagaagaaaagtccattatcagggggaaacatcaagatggcctccaatatctgcattgaaraaagctcagtgctaatagccaagagattgggggaaaggcctagaattcatttcatagctttacttcacagcattaattttctgtatctacataaagaaaagaggtgtaattgactcacagttcttcaggctgtaaagaaagcatagtggtttttgcttataggaggactcaggaagcctcccaattataccagaaggccaagcagcagtgaaatgtttcatatggcaggagtagaagcaagacagagagaggaaagaggtgcga

SEQ ID NO: 196503 - DNA, 578 bp, Homo sapiens
atttttcctttgcagttctcagatatttaatttctcacttcaacatcttcaaaagaatgcatatacttgaaaagtagtaaggaaagaatattctgctaaaggttttattactagtcactctagtatatattataaaaaaggatactggagataattcagtaaagttacaagttcaaaattaccttttcaaatcacacagtcataattactccckaattagaaaaggtcatttacaatcaactaaaattttaaagttactatttattgacaagtgtataatttcactagaaataaattttcatctttatgaaatattgtgggtgtctctccaaatgatttacagagtaagatgtctctcacaaaaactatatctgcaaatgactgtcatccaaaactaggctaaagagtctaacatctgttaccccacactttttataattatttcttaatactttcaattcaccttcttattatatatattttatatatttattagcctattgttcattatgtgtaatatataattaatgcccttaataagtgtgtgtatgtttacacaagttatgttttcctgggaa

SEQ ID NO: 196504 - DNA, 578 bp, Homo sapiens
atttttcctttgcagttctcagatatttaatttctcacttcaacatcttcaaaagaatgcatatacttgaaaagtagtaaggaaagaatattctgctaaaggttttattactagtcactctagtatatattataaaaaaggatactggagataattcagtaaagttacaagttcaaaattaccttttcaaatcacacagtcataattactccctaattagaaaaggtcatttacaatcaactaaaattttaaagttactatttattgacaagtrtataatttcactagaaataaattttcatctttatgaaatattgtgggtgtctctccaaatgatttacagagtaagatgtctctcacaaaaactatatctgcaaatgactgtcatccaaaactaggctaaagagtctaacatctgttaccccacactttttataattatttcttaatactttcaattcaccttcttattatatatattttatatatttattagcctattgttcattatgtgtaatatataattaatgcccttaataagtgtgtgtatgtttacacaagttatgttttcctgggaa

SEQ ID NO: 196505 - DNA, 178 bp, Homo sapiens
caatgtacagaactcaattttctactaaagagtcaaaggctaaatttttgrctaagaaattatgcttcttacatgataaaaatcatacatgccaaaacttaccatactttattaaacaacataatgtaaggtctgattcaacagaaatattggagagtggtgattttttaaaatatgt

SEQ ID NO: 196506 - DNA, 432 bp, Homo sapiens
aacacaatgtacagaactcaattttctactaaagagtcaaaggctaaatttttggcyaagaaattatgcttcttacatgataaaaatcatacatgccaaaacttaccatactttattaaacaacataatgtaaggtctgattcaacagaaatattggagagtggtgattttttaaaatatgtggaagtatatatttgttttcaaaatattggaaataaccatgatgggactataagttcaaacagtttgagctaagcagataaacttgcatgcatgaaaacacattaaacagactcatttggctgggaatatccattgcaactctcaaggctagacgtgtttttgtggcttgtcgcagtcattgcttccctcccattgtattaccattctatcattaaataaatgtaattcatctctaaatgaatacagaaa

SEQ ID NO: 196507 - DNA, 432 bp, Homo sapiens
aacacaatgtacagaactcaattttctactaaagagtcaaaggctaaatttttggctaagaaattatgcttcttacatgataaaaatcatacatgccaaaacttaccatactttattaaacaacataatgtaaggtctgattcaacagaaatattggagagtggtgatttttwaaaatatgtggaagtatatatttgttttcaaaatattggaaataaccatgatgggactataagttcaaacagtttgagctaagcagataaacttgcatgcatgaaaacacattaaacagactcatttggctgggaatatccattgcaactctcaaggctagacgtgtttttgtggcttgtcgcagtcattgcttccctcccattgtattaccattctatcattaaataaatgtaattcatctctaaatgaatacagaaa

SEQ ID NO: 196508 - DNA, 451 bp, Homo sapiens
tgtcttttctgtcagaatgcatgttctaaaattagctttaatcaagtataaacaaagaaatattagaaaataattaaaatttaactgtgaaacttaatctgygtgttgccactcttaaattatgggattgtaactaaaaagtgaaaaataatttgccttggcttaacatacgacagaaacataaaccggcaagctgaactctcagtgtttgtttggactaaacttaatgcattatgtgtaaagtctaccagaaatgaattcaaagatgataggtagtattataaaagcttcctctcttacaaagactttacctcagcatgccagaaagagtgagcccctacagtgcatgtatatttctgaagattaactagagactaggcaaacactaaattattaagagccaaactgaacaccaataagaaagagaagcaaaattttaaattctaattca

SEQ ID NO: 196509 - DNA, 451 bp, Homo sapiens
tgtcttttctgtcagaatgcatgttctaaaattagctttaatcaagtataaacaaagaaatattagaaaataattaaaatttaactgtgaaacttaatctgtgtgttgccactcttmaattatgggattgtaactaaaaagtgaaaaataatttgccttggcttaacatacgacagaaacataaaccggcaagctgaactctcagtgtttgtttggactaaacttaatgcattatgtgtaaagtctaccagaaatgaattcaaagatgataggtagtattataaaagcttcctctcttacaaagactttacctcagcatgccagaaagagtgagcccctacagtgcatgtatatttctgaagattaactagagactaggcaaacactaaattattaagagccaaactgaacaccaataagaaagagaagcaaaattttaaattctaattca

SEQ ID NO: 196510 - DNA, 451 bp, Homo sapiens
tgtcttttctgtcagaatgcatgttctaaaattagctttaatcaagtataaacaaagaaatattagaaaataattaaaatttaactgtgaaacttaatctgtgtgttgccactcttaaattatgggattgtaactaaaaagtgaaaaataatttgccttggcttaacatasgacagaaacataaaccggcaagctgaactctcagtgtttgtttggactaaacttaatgcattatgtgtaaagtctaccagaaatgaattcaaagatgataggtagtattataaaagcttcctctcttacaaagactttacctcagcatgccagaaagagtgagcccctacagtgcatgtatatttctgaagattaactagagactaggcaaacactaaattattaagagccaaactgaacaccaataagaaagagaagcaaaattttaaattctaattca

SEQ ID NO: 196511 - DNA, 408 bp, Homo sapiens
gttataggacggtgtggcacstctttcctctctcagccttgctcctactcctgctgtatgaaacatttcattgctgttttcctactggtatgattgggaggcttcctgagtcctcccagaagcagaagccactatgctttctttacagcctgcagaaccatgagccaattaaaccccttttcattatgatcatacagaaaataaagtactgcgaagtggagctatgaaatatcttcaatgacatttccccatcgtcttggctattaacattggacttcttttaatgcaaatatctgaaggcttcttgaagtttccccctgaaaatggacttctttttcttctgcattgccaggctgcaacaaagatagctgaaaatgtaaagcaggttcagaagtgggtaacagccag

SEQ ID NO: 196512 - DNA, 408 bp, Homo sapiens
gttataggacggtgtggcacctctttcctctctcagccttgctsctactcctgctgtatgaaacatttcattgctgttttcctactggtatgattgggaggcttcctgagtcctcccagaagcagaagccactatgctttctttacagcctgcagaaccatgagccaattaaaccccttttcattatgatcatacagaaaataaagtactgcgaagtggagctatgaaatatcttcaatgacatttccccatcgtcttggctattaacattggacttcttttaatgcaaatatctgaaggcttcttgaagtttccccctgaaaatggacttctttttcttctgcattgccaggctgcaacaaagatagctgaaaatgtaaagcaggttcagaagtgggtaacagccag

SEQ ID NO: 196513 - DNA, 402 bp, Homo sapiens
ggacggtgtggcacctctttcctctctcagccttgctcctactcctgctgtatgaaayatttcattgctgttttcctactggtatgattgggaggcttcctgagtcctcccagaagcagaagccactatgctttctttacagcctgcagaaccatgagccaattaaaccccttttcattatgatcatacagaaaataaagtactgcgaagtggagctatgaaatatcttcaatgacatttccccatcgtcttggctattaacattggacttcttttaatgcaaatatctgaaggcttcttgaagtttccccctgaaaatggacttctttttcttctgcattgccaggctgcaacaaagatagctgaaaatgtaaagcaggttcagaagtgggtaacagccag

SEQ ID NO: 196514 - DNA, 384 bp, Homo sapiens
ttcctctctcagccttgctcctactcctgctgtatgaaacatttcattgcwgttttcctactggtatgattgggaggcttcctgagtcctcccagaagcagaagccactatgctttctttacagcctgcagaaccatgagccaattaaaccccttttcattatgatcatacagaaaataaagtactgcgaagtggagctatgaaatatcttcaatgacatttccccatcgtcttggctattaacattggacttcttttaatgcaaatatctgaaggcttcttgaagtttccccctgaaaatggacttctttttcttctgcattgccaggctgcaacaaagatagctgaaaatgtaaagcaggttcagaagtgggtaacagccag

SEQ ID NO: 196515 - DNA, 402 bp, Homo sapiens
ggacggtgtggcacctctttcctctctcagccttgctcctactcctgctgtatgaaacatttcattgctgttttcctacyggtatgattgggaggcttcctgagtcctcccagaagcagaagccactatgctttctttacagcctgcagaaccatgagccaattaaaccccttttcattatgatcatacagaaaataaagtactgcgaagtggagctatgaaatatcttcaatgacatttccccatcgtcttggctattaacattggacttcttttaatgcaaatatctgaaggcttcttgaagtttccccctgaaaatggacttctttttcttctgcattgccaggctgcaacaaagatagctgaaaatgtaaagcaggttcagaagtgggtaacagccag

SEQ ID NO: 196516 - DNA, 390 bp, Homo sapiens
aggacggtgtggcacctctttcctctctcagccttgctcctactcctgctgtatgaaacatttcattgctgttttcctactggtatgattgggaggcttcctgagtcctcccagaagcagaagycactatgctttctttacagcctgcagaaccatgagccaattaaaccccttttcattatgatcatacagaaaataaagtactgcgaagtggagctatgaaatatcttcaatgacatttccccatcgtcttggctattaacattggacttcttttaatgcaaatatctgaaggcttcttgaagtttccccctgaaaatggacttctttttcttctgcattgccaggctgcaacaaagatagctgaaaatgtaaagcaggttcagaagt

SEQ ID NO: 196517 - DNA, 407 bp, Homo sapiens
ttataggacggtgtggcacctctttcctctctcagccttgctcctactcctgctgtatgaaacatttcattgctgttttcctactggtatgattgggaggcttcctgagtcctcccagaagcagaagccactrtgctttctttacagcctgcagaaccatgagccaattaaaccccttttcattatgatcatacagaaaataaagtactgcgaagtggagctatgaaatatcttcaatgacatttccccatcgtcttggctattaacattggacttcttttaatgcaaatatctgaaggcttcttgaagtttccccctgaaaatggacttctttttcttctgcattgccaggctgcaacaaagatagctgaaaatgtaaagcaggttcagaagtgggtaacagccag

SEQ ID NO: 196518 - DNA, 372 bp, Homo sapiens
ccttgctcctactcctgctgtatgaaacatttcattgctgttttcctactggtatgattgggaggcttcctgagtcctcccagaagcagaagccactatgctttctttacagcctgcagaaccatgagccaattaaaccccttttcattatgatcatacagaaaataaagtactgcgaagtggagctatgaaatatcttcaatkacatttccccatcgtcttggctattaacattggacttcttttaatgcaaatatctgaaggcttcttgaagtttccccctgaaaatggacttctttttcttctgcattgccaggctgcaacaaagatagctgaaaatgtaaagcaggttcagaagtgggtaacagccag

SEQ ID NO: 196519 - DNA, 384 bp, Homo sapiens
ttcctctctcagccttgctcctactcctgctgtatgaaacatttcattgctgttttcctactggtatgattgggaggcttcctgagtcctcccagaagcagaagccactatgctttctttacagcctgcagaaccatgagccaattaaaccccttttcattatgatcatacagaaaataaagtactgcgaagtggagctatgaaatatcttcaatgacatttccccatcgtmttggctattaacattggacttcttttaatgcaaatatctgaaggcttcttgaagtttccccctgaaaatggacttctttttcttctgcattgccaggctgcaacaaagatagctgaaaatgtaaagcaggttcagaagtgggtaacagccag

SEQ ID NO: 196520 - DNA, 396 bp, Homo sapiens
ggttataggacggtgtggcacctctttcctctctcagccttgctcctactcctgctgtatgaaacatttcattgctgttttcctactggtatgattgggaggcttcctgagtcctcccagaagcagaagccactatgctttctttacagcctgcagaaccatgagccaattaaaccccttttcattatgatcatacagaaaataaagtactgcgaagtggagctatgaaatatcttcaatgacatttccccatcgtcttggctattarcattggacttcttttaatgcaaatatctgaaggcttcttgaagtttccccctgaaaatggacttctttttcttctgcattgccaggctgcaacaaagatagctgaaaatgtaaagcaggttcagaagt

SEQ ID NO: 196521 - DNA, 408 bp, Homo sapiens
gttataggacggtgtggcacctctttcctctctcagccttgctcctactcctgctgtatgaaacatttcattgctgttttcctactggtatgattgggaggcttcctgagtcctcccagaagcagaagccactatgctttctttacagcctgcagaaccatgagccaattaaaccccttttcattatgatcatacagaaaataaagtactgcgaagtggagctatgaaatatcttcaatgacatttccccatcgtcttggctattaacaytggacttcttttaatgcaaatatctgaaggcttcttgaagtttccccctgaaaatggacttctttttcttctgcattgccaggctgcaacaaagatagctgaaaatgtaaagcaggttcagaagtgggtaacagccag

SEQ ID NO: 196522 - DNA, 612 bp, Homo sapiens
acctctttcctctctcagtcttgcttctactcctgccatatgaaacatctccttgccccttggccttctggtatgattgggaggcttcctgatcctcccagaagcagaagccactatgcttcctttacagcctgctgaaccataagccaattaaacctcttttctttatgatcatacagaaaattagtgctgtgaagtggagccatgaaatgccttcaaggccctttcccctttttcttggcaaccagcactcagcttcttttcatggaaatatctgaagcctttgtgaattttccccctgaaaatggacttttctcttttaccacattgccaggctgtgataaagattgctgacaatgtagaaccaggttcagaagtgggtaaaggacagaggtaggaagasttgggaaagcttagaagacaacaagatgaggaaaatattggaccactatagagaactgttaaatacttgtgatcagaaggctgagaaaagggtaaacactgaagtccagacttagaagttctcagatgaaaatgaggaatttcctataaacaggggccaagattacatttgattggccttagcaaaggacgtggcagcacagggaccct

SEQ ID NO: 196523 - DNA, 586 bp, Homo sapiens
ctactcctgccatatgaaacatctccttgccccttggccttctggtatgattgggaggcttcctgatcctcccagaagcagaagccactatgcttcctttacagcctgctgaaccataagccaattaaacctcttttctttatgatcatacagaaaattagtgctgtgaagtggagccatgaaatgccttcaaggccctttcccctttttcttggcaaccagcactcagcttcttttcatggaaatatctgaagcctttgtgaattttccccctgaaaatggacttttctcttttaccacattgccaggctgtgataaagattgctgacaatgtagaaccaggttcagaagtgggtaaaggacagaggtaggaagacttgggaaagcttagaagacaacaagatgaggaaaatattggaccactatagagaaytgttaaatacttgtgatcagaaggctgagaaaagggtaaacactgaagtccagacttagaagttctcagatgaaaatgaggaatttcctataaacaggggccaagattacatttgattggccttagcaaaggacgtggcagcacagggaccct

SEQ ID NO: 196524 - DNA, 603 bp, Homo sapiens
gagatctccacggcgaggtcacygtgcagccacgttctttgctaaggaaacaaaagtaactttgacttctgttcccagtaagtgcttcattttcatctgagaccttctaagtcgggctttcactgaccattttcctgtgagccttctgatcacaagtgtttaacaattctttacaaagatccaaactttcattcatcttcttgtctttgaagccctccaaactctcccaacctctgtccgctactcccttctgaacctgcttctacattatcactatttttgccacagcctggcaatgtggtaaaggaagacaagtccattttcagggggaaaattcatgaagccttcacatacttgaatgaaaagaagctgagtgctgatttgcaagacattgacatttaatagttccactttgctccactaattttctctatgatcataaagaaaagaggtttaattggctcatgattctgcaggccataaggaaacataatggcttctgaatctggaaggactcaggaagcctcccaatcatatcagaatgtccaggggcaatgaggtgattcatgtggcaggcgtaggcacaagacagagagacgaaag

SEQ ID NO: 196525 - DNA, 603 bp, Homo sapiens
gagatctccacggcgaggtcactgtgcagccacgttctttgctaaggaaacaaaagtaactttgacttctgttcccagtaagtgcttcattttcatctgagaccttctaagtcgggctttcactgaccattttcctgtgagccttctgatcacaagtgtttaacaattctttacaaagatccaaactttcattcatcttcttgtctttgaagccctccaaactctcccaacctctgtccgctactcccttctgaacctgcttctacattatcactatytttgccacagcctggcaatgtggtaaaggaagacaagtccattttcagggggaaaattcatgaagccttcacatacttgaatgaaaagaagctgagtgctgatttgcaagacattgacatttaatagttccactttgctccactaattttctctatgatcataaagaaaagaggtttaattggctcatgattctgcaggccataaggaaacataatggcttctgaatctggaaggactcaggaagcctcccaatcatatcagaatgtccaggggcaatgaggtgattcatgtggcaggcgtaggcacaagacagagagacgaaag

SEQ ID NO: 196526 - DNA, 585 bp, Homo sapiens
aaggaaacaaaagtaactttgacttctgttcccagtaagtgcttcattttcatctgagaccttctaagtcgggctttcactgaccattttcctgtgagccttctgatcacaagtgtttaacaattctttacaaagatccaaactttcattcatcttcttgtctttgaagccctccaaactctcccaacctctgtccgctactcccttctgaacctgcttctacattatcactatttttgccacagcctggcaatgtggtaaaggaagacaagtccattttcagggggaaaattcatgaagccttcacatacttgaatgaaaagaagctgagtgctgatttgcaagacattgacatttaatagttccactttgctccactaattttctctatgatcataaagaaaagaggtttaattggctcatgattctgcaggccataaggaaacataatggcttctgaatctggraggactcaggaagcctcccaatcatatcagaatgtccaggggcaatgaggtgattcatgtggcaggcgtaggcacaagacagagagacgaaagggggccacaccctattatacaacca

SEQ ID NO: 196527 - DNA, 609 bp, Homo sapiens
gtcactgtgcagccacgttctttgctaaggaaacaaaagtaactttgacttctgttcccagtaagtgcttcattttcatctgagaccttctaagtcgggctttcactgaccattttcctgtgagccttctgatcacaagtgtttaacaattctttacaaagatccaaactttcattcatcttcttgtctttgaagccctccaaactctcccaacctctgtccgctactcccttctgaacctgcttctacattatcactatttttgccacagcctggcaatgtggtaaaggaagacaagtccattttcagggggaaaattcatgaagccttcacatacttgaatgaaaagaagctgagtgctgatttgcaagacattgacatttaatagttccactttgctccactaattttctctatgatcataaagaaaagaggtttaattggctcatgattctgcaggccataaggaaacataatggcttctgaatctggaaggactcaggaagcctcccaatcatatcagaatgtccaggggcaatgaggtgattcatgtggcaggcgtaggcacaagacagagagacraaagggggccacaccctattatacaac

SEQ ID NO: 196528 - DNA, 598 bp, Homo sapiens
gttaaacaccatcttgtttgagtaataaactgacagactatgtttgcagttggagtgaattctaattgaatgttattatatattatctcacactttaatttttcactcttgatttttatttttcagcatctatactcatataatgcggtgtctaagcacacattttttaaaatgtattatgttttctaccttctttacatattaatgacaaatattttgtttgtatttctagtatgtattgctttaactttttgctcccctcacccttttctctctgtctctctctcaggtaacattaagctcttcttaggaagcattcttttacatccaattactatcttaaaaaataacatactatactcttagtcttgctcctagttctgtttttttctgtatctatcttcatggaaacatactagcagaggggctagacaatgctggagrgattgatttgaggttattggccaatgatcagtttccagataaaaaatgcaaacatactatttaccaagctatgggaaacctgcaaaaaggaaaagagaagtcctctgatcactcagaaattagagtaatgtgtggagtttatcttttggggccg

SEQ ID NO: 196529 - DNA, 430 bp, Homo sapiens
tttttttttttttgagtgagagtctcacttctttgcccaggctggtgtccaatggcacaatcttggctcactgcaacctctgcctcccgggttcaagcaattctcctcgctcagcctcccaagtagctggggttacaggcaggtgccagcatgcctggctaatttttctatttttagtagcgaggggtttcaccatgttggccaggctgrtcttgaactcctgagctcaagtgatctgcctgcctcggcctcccaaagtgcttggattacagacatgagctaccatgcccagcctatattgtttattatatatcatatgatatatatatattgctgatacatataccatatatattattacagatataatctgttatatatatatcagttatatatacacattagatgaaaagttgtatgtatatataca

SEQ ID NO: 196530 - DNA, 430 bp, Homo sapiens
tttttttttttttgagtgagagtctcacttctttgcccaggctggtgtccaatggcacaatcttggctcactgcaacctctgcctcccgggttcaagcaattctcctcgctcagcctcccaagtagctggggttacaggcaggtgccagcatgcctggctaatttttctatttttagtagcgaggggtttcaccatgttggccaggctgatcttgaactcctgagctcaagtgatctgcctgcctcggcytcccaaagtgcttggattacagacatgagctaccatgcccagcctatattgtttattatatatcatatgatatatatatattgctgatacatataccatatatattattacagatataatctgttatatatatatcagttatatatacacattagatgaaaagttgtatgtatatataca

SEQ ID NO: 196531 - DNA, 430 bp, Homo sapiens
tttttttttttttgagtgagagtctcacttctttgcccaggctggtgtccaatggcacaatcttggctcactgcaacctctgcctcccgggttcaagcaattctcctcgctcagcctcccaagtagctggggttacaggcaggtgccagcatgcctggctaatttttctatttttagtagcgaggggtttcaccatgttggccaggctgatcttgaactcctgagctcaagtgatctgcctgcctcggcctcccaaagtgcttggattacagrcatgagctaccatgcccagcctatattgtttattatatatcatatgatatatatatattgctgatacatataccatatatattattacagatataatctgttatatatatatcagttatatatacacattagatgaaaagttgtatgtatatataca

SEQ ID NO: 196532 - DNA, 430 bp, Homo sapiens
tttttttttttttgagtgagagtctcacttctttgcccaggctggtgtccaatggcacaatcttggctcactgcaacctctgcctcccgggttcaagcaattctcctcgctcagcctcccaagtagctggggttacaggcaggtgccagcatgcctggctaatttttctatttttagtagcgaggggtttcaccatgttggccaggctgatcttgaactcctgagctcaagtgatctgcctgcctcggcctcccaaagtgcttggattacagacatgagctaccatscccagcctatattgtttattatatatcatatgatatatatatattgctgatacatataccatatatattattacagatataatctgttatatatatatcagttatatatacacattagatgaaaagttgtatgtatatataca

SEQ ID NO: 196533 - DNA, 320 bp, Homo sapiens
ctttgttgcagcctggcaatgcagaagaaaaagaagtccattttcagggggaaacttcaagaagccttcagatatttgcattaaaaagaagtccagtgctaatagccaagacgatggggaaatgtcattgaagatatttcatagctccatttcgcagtactttattttctktatgatcataatgaaaaggggtttaattggctcacggttctgcaggctgtaaataaagcatagtggcttctgcttctgggaggactcaggaagcctcccaatcataccagtaggaaaacagcaatgaaatgtttcattaagcaggagta

SEQ ID NO: 196534 - DNA, 320 bp, Homo sapiens
ctttgttgcagcctggcaatgcagaagaaaaagaagtccattttcagggggaaacttcaagaagccttcagatatttgcattaaaaagaagtccagtgctaatagccaagacgatggggaaatgtcattgaagatatttcatagctccatttcgcagtactttattttctttatgatcataatgaaaaggggtttaattggctcayggttctgcaggctgtaaataaagcatagtggcttctgcttctgggaggactcaggaagcctcccaatcataccagtaggaaaacagcaatgaaatgtttcattaagcaggagta

SEQ ID NO: 196535 - DNA, 320 bp, Homo sapiens
ctttgttgcagcctggcaatgcagaagaaaaagaagtccattttcagggggaaacttcaagaagccttcagatatttgcattaaaaagaagtccagtgctaatagccaagacgatggggaaatgtcattgaagatatttcatagctccatttcgcagtactttattttctttatgatcataatgaaaaggggtttaattggctcacggttctgcaggctgtaaakaaagcatagtggcttctgcttctgggaggactcaggaagcctcccaatcataccagtaggaaaacagcaatgaaatgtttcattaagcaggagta

SEQ ID NO: 196536 - DNA, 460 bp, Homo sapiens
tgaaacccttgctgttgaagggcgaactgtattacatattgatttgtgtcactaaggaagtaactatctttagaaccaggaactcagcaattcctttctggtaccataaataaatggcaataagaactgtaaaactgaaccagcatgcacccatacaaataagagattattttttgaggatagctactgagcacagaagacagaaaagcaattccttcatgagaagcacaagttatattacayattcttacacaagcaaaatggttttatctgtcatagtttgtacacatacacacatgcacatatacacatacatatgtgcgcacgcatgtgcacacagacaccaagttaaaagtcctgctgattcttaatgaccaaatccaactgttcgtggggagtggcagataacacttcctacagtttggatgcaattcttttgactttttgacttgttctgtaa

SEQ ID NO: 196537 - DNA, 317 bp, Homo sapiens
attgatttgtgtcactaaggaagtaactatctttagaaccaggaactcagcaattcctttctggtaccataaataaatggcaataagaactgtaaaactgaaccagcatgcacccatacaaataagagattattttttgaggatagctactgagcacagaagacagaaaagcaattccttcatgagaagcacaagttatattacacattcttacacaagcaaaatggttttatctgtcatagtttrtacacatacacacatgcacatatacacatacatatgtgcgcacgcatgtgcacacagacaccaagttaaaa

SEQ ID NO: 196538 - DNA, 460 bp, Homo sapiens
tgaaacccttgctgttgaagggcgaactgtattacatattgatttgtgtcactaaggaagtaactatctttagaaccaggaactcagcaattcctttctggtaccataaataaatggcaataagaactgtaaaactgaaccagcatgcacccatacaaataagagattattttttgaggatagctactgagcacagaagacagaaaagcaattccttcatgagaagcacaagttatattacacattcttacacaagcaaaatggttttatctgtcatagtttgtacacatacacacatgcacatatacacatacatatgtgcgcacgcatgtgcacacagacaccaagttaaaagtcctgctgattcttaatgaccaaatccaactgttcgyggggagtggcagataacacttcctacagtttggatgcaattcttttgactttttgacttgttctgtaa

SEQ ID NO: 196539 - DNA, 397 bp, Homo sapiens
gagttgcagaaaattgaccaccttttcattattttttctagaaacattcatattgtagaacatattgtcaatcacccagattctctattttttattcrgttaaaataggattgctgcttattccacattattttctgacattattgtgtcatttattccttttatggctttattcatgtggatagatatagaaatacaagaatctccaagtcaaatatcaagggaaaaaaagaaaagaaaaacagtttagggaaaattattctgtgaaatagccatctgattagttacatatatcacatcaacttaatacaaatcttacacaatgtatttgtgtcaaggtttcccaagaccaccccaggtttggtggttcactagaaggactcacaggactcagcaa

SEQ ID NO: 196540 - DNA, 397 bp, Homo sapiens
gagttgcagaaaattgaccaccttttcattattttttctagaaacattcatattgtagaacatattgtcaatcacccagattctctattttttattcggttaaaataggattgctgcttattccacattattttctgayattattgtgtcatttattccttttatggctttattcatgtggatagatatagaaatacaagaatctccaagtcaaatatcaagggaaaaaaagaaaagaaaaacagtttagggaaaattattctgtgaaatagccatctgattagttacatatatcacatcaacttaatacaaatcttacacaatgtatttgtgtcaaggtttcccaagaccaccccaggtttggtggttcactagaaggactcacaggactcagcaa

SEQ ID NO: 196541 - DNA, 397 bp, Homo sapiens
gagttgcagaaaattgaccaccttttcattattttttctagaaacattcatattgtagaacatattgtcaatcacccagattctctattttttattcggttaaaataggattgctgcttattccacattattttctgacattattgtgtcatttattccttttatggctttattcatgtggatagatatagaaatacaagaatctccaagtcaaatatcaagggaaaaaaagaaaagaaaaacagtttagggaaaattattctgtgaaatagccatctgattagttacatatatcayatcaacttaatacaaatcttacacaatgtatttgtgtcaaggtttcccaagaccaccccaggtttggtggttcactagaaggactcacaggactcagcaa

SEQ ID NO: 196542 - DNA, 417 bp, Homo sapiens
ctttctaaggatggcagtctcttgcctgctatatgaaatcttttctgcacaatgcttatagccccaatttaatttttrgtgttgttttaaaattttattttaataacacataatattataagataaggtaacttggtactaatttctgttgtatgatccatcttaagttgcaatgctggttactttttgacttttggtgactaacaggtatttgtatataagttaccatagcaatgttaggtaattataatctgtcctttttatctcattaagctttcagtaaaattgttaaattaaataagcataataatttgagttaaaattagaataaaaattgtattttattttaattacatgaataatctagttttcatattgtgctaaatccctgtttagaattatgaaataagataaaat

SEQ ID NO: 196543 - DNA, 417 bp, Homo sapiens
ctttctaaggatggcagtctcttgcctgctatatgaaatcttttctgcacaatgcttatagccccaatttaatttttagtgttgttttaaaattttattttaataacacataatattataagataaggtaacttggtactaatttctgttgtatgatccatcttaagttgcaatgctggttactttttgacttttggtgactaacaggtatttgtatataagttaccatagcaatgttaggtaattataatctgtcctttttatctcattaagctttcagtaaaattgttraattaaataagcataataatttgagttaaaattagaataaaaattgtattttattttaattacatgaataatctagttttcatattgtgctaaatccctgtttagaattatgaaataagataaaat

SEQ ID NO: 196544 - DNA, 417 bp, Homo sapiens
ctttctaaggatggcagtctcttgcctgctatatgaaatcttttctgcacaatgcttatagccccaatttaatttttagtgttgttttaaaattttattttaataacacataatattataagataaggtaacttggtactaatttctgttgtatgatccatcttaagttgcaatgctggttactttttgacttttggtgactaacaggtatttgtatataagttaccatagcaatgttaggtaattataatctgtcctttttatctcattaagctttcagtaaaattgttaaattaaataagcataataatttgagttaaaattagaataaaaattgtattttattttrattacatgaataatctagttttcatattgtgctaaatccctgtttagaattatgaaataagataaaat

SEQ ID NO: 196545 - DNA, 606 bp, Homo sapiens
ttatggttaaatattctcttcattagatgtggcttaccagtggattctagagaagaaaatagatgggagcaagtgtccaacacagcaacagctagaaagaaaaataaagaattatgtcctttacctaaaacacttcagttaactagtgtgagtttaaaaactaaagagttgtgaactttatcagagttaataagtatgagaaatatgtatgtacatttacaatacaaaattactatttaataatttacacatggcattaattctaattgtgtttaaacatcagagctttttcattcttcattcatgtaatcaacagccatgtgccaaggtactagaaccagcactggaattacaagatgaagatggtgtggtccacctctcaacagtcatatgctataacctaaaaaaacagacaggcaggtaatgtccatatagagtcatagataccaygacatgtatacagcagggcactgctggaaaacacagaagggacacctacccacttttatgtcaatatcatgggctttctgatggaggagataacataggttgatacctgaaagacaaggaaaagcttgccagatagagggaagaggcaaaggcaaa

SEQ ID NO: 196546 - DNA, 604 bp, Homo sapiens
accgtgcagtcacgttctttgctaagaaaacaaaagtaactttgacttctgttcccagtaagtgcttcattttcatctgagacattctaagttgggctttcactgaccattttcctgtgagccttctgatcacaagtgtttaacaattctttacaaagatccaaactttctttcattttcttgtctttgaagccctccaaactctcccgacctctgtccgctactcccttttgaacctgcttctacattatcactatctttgccacagcctggcaatgwggtaaaggaaaacaagtccattttcagggggaaaattcatgaagccttcacatacttgaatgaaaagaagctgagtgctgattgccaagacattgacatttaatggttccactttgcaccactagttttctctatgatcataaagaaaagaggtttaattggctcatggttctgcaggccataaggaaacataatggcttctgaatctgggaggactcaggaagcctcccaatcatatcagaatgtccaggggcaatgagatgattcatgtggcaggagtaggcacaagaccgagagaggagagaagaccacaccctattataca

SEQ ID NO: 196547 - DNA, 604 bp, Homo sapiens
accgtgcagtcacgttctttgctaagaaaacaaaagtaactttgacttctgttcccagtaagtgcttcattttcatctgagacattctaagttgggctttcactgaccattttcctgtgagccttctgatcacaagtgtttaacaattctttacaaagatccaaactttctttcattttcttgtctttgaagccctccaaactctcccgacctctgtccgctactcccttttgaacctgcttctacattatcactatctttgccacagcctggcaatgtggtaaaggaaaacaagtccattttcagggggaaaattcatgaagccttcacatacttgaatgaaaagaagctgagtgctgattgccaagacattgacatttaatggttccactttgcaccactagttttctctatgatcataaagaaaagaggtttaattggctcatggttctgcaggccataaggaaacataatggcttctgaatctgggaggactcaggaagcctcccaatcatatcagaatgtccaggggcaatgagatgattcatgtggcaggagtaggcacaagaccgakagaggagagaagaccacaccctattataca

SEQ ID NO: 196548 - DNA, 619 bp, Homo sapiens
ggcagggtcactgtacatccacgttctttgctacagcaaaacaaaagtaaccttggctcctgtttgcagtaagttcctcattttcatctgagagcttctcaatctgatccttactgtccattttcctgtgagtcttctgatcacaagtatttaacaactctttacaaagatccaaactttccctcatctccctgtctttgaagtcctccaaactctccygaactccatctgctacccccttctgaacctgcttctacattatcagctatttttgtcacaggctggcagtgtggtaatggaagacaagcccattttctggggaaaaattcaaggaggcttcagatacttgaataaaaagaagcccattgctgattgccaagacattagggagaaggccttgaagacatttaacagttccactttgcagtaattattttctccatgatcataaagaaaagaggtttaataggttaatgattctgcagactgtaaggaagcatagtggcttctgcatctgacaggactcaggaagcctcccaatcataccagaatgtcaaggggcaaggagatgtctcatatgggaagagtaggagcaagacagagaaaggaaacaggtgtc

SEQ ID NO: 196549 - DNA, 605 bp, Homo sapiens
cagcaaaacaaaagtaaccttggctcctgtttgcagtaagttcctcattttcatctgagagcttctcaatctgatccttactgtccattttcctgtgagtcttctgatcacaagtatttaacaactctttacaaagatccaaactttccctcatctccctgtctttgaagtcctccaaactctcctgaactccatctgctacccccttctgaacctgcttctacattatcagctatttttgtcacaggctggcagtgtggtaatggaagacaagcccattttctggggaaaaattcaaggaggcttcagatacttgaataaaaagaagccsattgctgattgccaagacattagggagaaggccttgaagacatttaacagttccactttgcagtaattattttctccatgatcataaagaaaagaggtttaataggttaatgattctgcagactgtaaggaagcatagtggcttctgcatctgacaggactcaggaagcctcccaatcataccagaatgtcaaggggcaaggagatgtctcatatgggaagagtaggagcaagacagagaaaggaaacaggtgtcatgccccattaaacaagca

SEQ ID NO: 196550 - DNA, 605 bp, Homo sapiens
cagcaaaacaaaagtaaccttggctcctgtttgcagtaagttcctcattttcatctgagagcttctcaatctgatccttactgtccattttcctgtgagtcttctgatcacaagtatttaacaactctttacaaagatccaaactttccctcatctccctgtctttgaagtcctccaaactctcctgaactccatctgctacccccttctgaacctgcttctacattatcagctatttttgtcacaggctggcagtgtggtaatggaagacaagcccattttctggggaaaaattcaaggaggcttcagatacttgaataaaaagaagcccaktgctgattgccaagacattagggagaaggccttgaagacatttaacagttccactttgcagtaattattttctccatgatcataaagaaaagaggtttaataggttaatgattctgcagactgtaaggaagcatagtggcttctgcatctgacaggactcaggaagcctcccaatcataccagaatgtcaaggggcaaggagatgtctcatatgggaagagtaggagcaagacagagaaaggaaacaggtgtcatgccccattaaacaagca

SEQ ID NO: 196551 - DNA, 605 bp, Homo sapiens
cagcaaaacaaaagtaaccttggctcctgtttgcagtaagttcctcattttcatctgagagcttctcaatctgatccttactgtccattttcctgtgagtcttctgatcacaagtatttaacaactctttacaaagatccaaactttccctcatctccctgtctttgaagtcctccaaactctcctgaactccatctgctacccccttctgaacctgcttctacattatcagctatttttgtcacaggctggcagtgtggtaatggaagacaagcccattttctggggaaaaattcaaggaggcttcagatacttgaataaaaagaagcccattgctgattgccaagacattagggagaaggccttgaagacatttaacagttccactttgcagtaatwattttctccatgatcataaagaaaagaggtttaataggttaatgattctgcagactgtaaggaagcatagtggcttctgcatctgacaggactcaggaagcctcccaatcataccagaatgtcaaggggcaaggagatgtctcatatgggaagagtaggagcaagacagagaaaggaaacaggtgtcatgccccattaaacaagca

SEQ ID NO: 196552 - DNA, 522 bp, Homo sapiens
tctagttgtataacaggatgttgcacctctttcctctctctgtcttgcttctactcctgccatatgaaacatktcattgccgcttggccttctggtatgactgggaggcttcctgagtcctcctacaagcagaaaccactatgctttctttacagcctgaagaactgtgagtcaactaaacctcttttctttatgtacatacagaaaattaatgctgcgaagtgaagctatgaaatgtcttctaggccttcccccaatctcttggctattagcactgagctttttcaatgcagatattggaggccttcttgatgattccccctgataatggaattttcttcttttaccacattgccaggctgcgaaaaagatagctgacagtgtagaagcaggttctgaattaggtaatggccagaggttatagagttcggagggcttggaagaagacaggaagatgagggaaactttggaccattgcagagacttgttaaatagttgtgattgaaaggctgacagaaggat

SEQ ID NO: 196553 - DNA, 360 bp, Homo sapiens
agctgggattacaggcatgcaccatcacacctggttaatttttgggccttttttttttttttttttttttttttaagagacagggtttcaycacgttggccaggctgatcttgaactcctgacctcaggtgatctacccacctcagcctccaaaagggctgggattacaggtgtgagccaccacacccagccaagtaaatattttaaataaactacaatgacaaaattatgatgataaagtcttaccatattggtattaagagtctctgcttctagaactggttatttgcagcaaaatacatgttattcaattagatgaagtgttttatataaactcttcatggacaactcataaaacac

SEQ ID NO: 196554 - DNA, 360 bp, Homo sapiens
agctgggattacaggcatgcaccatcacacctggttaatttttgggccttttttttttttttttttttttttttaagagacagggtttcatcaygttggccaggctgatcttgaactcctgacctcaggtgatctacccacctcagcctccaaaagggctgggattacaggtgtgagccaccacacccagccaagtaaatattttaaataaactacaatgacaaaattatgatgataaagtcttaccatattggtattaagagtctctgcttctagaactggttatttgcagcaaaatacatgttattcaattagatgaagtgttttatataaactcttcatggacaactcataaaacac

SEQ ID NO: 196555 - DNA, 360 bp, Homo sapiens
agctgggattacaggcatgcaccatcacacctggttaatttttgggccttttttttttttttttttttttttttaagagacagggtttcatcacgttggccaggctgatcttgaactcctgacctcaggtgatctacccacctcagcctccaaaagkgctgggattacaggtgtgagccaccacacccagccaagtaaatattttaaataaactacaatgacaaaattatgatgataaagtcttaccatattggtattaagagtctctgcttctagaactggttatttgcagcaaaatacatgttattcaattagatgaagtgttttatataaactcttcatggacaactcataaaacac

SEQ ID NO: 196556 - DNA, 360 bp, Homo sapiens
agctgggattacaggcatgcaccatcacacctggttaatttttgggccttttttttttttttttttttttttttaagagacagggtttcatcacgttggccaggctgatcttgaactcctgacctcaggtgatctacccacctcagcctccaaaagggctgggattacaggtgtgagccaccacacccagccaastaaatattttaaataaactacaatgacaaaattatgatgataaagtcttaccatattggtattaagagtctctgcttctagaactggttatttgcagcaaaatacatgttattcaattagatgaagtgttttatataaactcttcatggacaactcataaaacac

SEQ ID NO: 196557 - DNA, 379 bp, Homo sapiens
tggggtgggtagaacctggagtttcctatgaatgctgattcaaatcctcttttatatgcagttggcagttacatccacaggtgttacagatgccaaactattcaataataattttccaatagctaatttagaagtyacatacaatgctgattaacactccaacaagattttaatcttagaaagcagcaaaatgcttcgcaatttcatatgaataatgaagatgtcacataatcacagaacttacaaagcagctgtgcaggggtctgtcctaccagtgttataacatgggcagtgctaaaatgctgggctactgagtctactatagaataaagagatcactggaacagaatagaactctaaatgctatattataaagtaa

SEQ ID NO: 196558 - DNA, 427 bp, Homo sapiens
gaattcaagcaagcaagggaagggagaggaggagggcaggcgtgcatggtggggtgggtagaacctggagtttcctatgaatgctgattcaaatcctcttttatatgcagttggcagttacatccacaggtgttacagatgccaaactattcaataataattttccaatagctaatttagaagtcacatacaatgctgattaacactccaacaagattttaatcttagaaagcagcaaaatgcttcscaatttcatatgaataatgaagatgtcacataatcacagaacttacaaagcagctgtgcaggggtctgtcctaccagtgttataacatgggcagtgctaaaatgctgggctactgagtctactatagaataaagagatcactggaacagaatagaactctaaatgctatattataaagta

SEQ ID NO: 196559 - DNA, 400 bp, Homo sapiens
gtggggtgggtagaacctggagtttcctatgaatgctgattcaaatcctcttttatatgcagttggcagttacatccacaggtgttacagatgccaaactattcaataataattttccaatagctaatttagaagtcacatacaatgctgattaacactccaacaagattttaatcttagaaagcagcaaaatgcttcgcaatttcatatgaataatgaagatgtcacataatcacagaacttacaaagcagctgtgcaggggtctgtcctaccagtgttataacatgggcagtgcyaaaatgctgggctactgagtctactatagaataaagagatcactggaacagaatagaactctaaatgctatattataaagtaatcagtatcacaaaagaattc

SEQ ID NO: 196560 - DNA, 443 bp, Homo sapiens
agtaaatttttggtaccttgaattagacagtgttttcttaggacaccaaatgcacaagcaatcaaaaccaaaatagacaaattgaaattaaaaactttttatgtttcaaaggacaatatgaaaaagtgaaatgacagcccacaaagtgggagacaataattgcaaatcatatgtaygataagagcctattatctgggtaatatacaaatgaatgagaataaaacttatattggatttttcatcagcatcattgaatataagacagaagcatttaatttgatataagaacaaaagaaattgtgtatgttttcataaagagaaaaattcactctaaattaatcagtgaattgaatgcaatttcattaaaaataactgaagagtacttttacacaacttactaagctaattctaaaatccttatggagaaattaagggccccaaat

SEQ ID NO: 196561 - DNA, 596 bp, Homo sapiens
caattcagtcatgtgctgcataacaaagtcttgctcaatgacagactgcatatatggtggtggtgtcataagattataatggagctgaaaaattcctactgcctagtgatgttgtagctctcatagtatcatagcataacacattaccttttctgtatttacatatgtttagatacacaactactaccattgagttacagttgcctacagtattcagtacggtaaaatactgtacaggtttgcaccctaggaggaatatgccacagcattcaatctaggtatacagtaggctgtaccatctaggtttgtgtaagtacactctgatgtttggacaacaatgaaattagctaacaacacatttctcagaacatatccttgcaattaagcaataatatgaccataacaggatatatatatcctgttggttctgtttctctggagaatcttgactaatacagggtcgaattcttataaataaggagaaattttttgctgctgtaaaaattgcacaaaagtgaaagggtcatattaaatttggaaatagagatatgaaatatttaaygtagatattctaaagataagaaaaatgatgatca

SEQ ID NO: 196562 - DNA, 438 bp, Homo sapiens
agaatcaattgtaatgtaatcaataaaatgcaatgtgtattttattatgaattgtgcaccgcacagcatttatatgagtaacacttaaaataaacgtatgcgtgtatatttatgcataccttttctattctggagaattagttgtttacagatgtactgatacatccctgcccccaatccaggcagcatggagactgagtttctcaaggaattgtgtagaactaagtttctttcagtatgcctcattgctcttcacctaaggtctttacctgatgcaaaatcccattttactrctcaaaagatttgcctcatcagctctgcttttgcagcataagtggctgtcaccagatggcatttgggttgggcttgacccagggcaattagatgtagaggaagatcagaaatttctgggtcacaatcatatataaaaaatgaacc

SEQ ID NO: 196563 - DNA, 341 bp, Homo sapiens
cataccctgctgtagatccttaaaagtgaagtgctgtgtactgaatgaatagaataaaatatgccacatagaagagttctggttctagatggcagattgagcatacttcgccttccctaatccctgaatcctactaaaagaatagtaaaataagytttttaacttatataatcaaaatagcaaagagaacaacagaaggtaaaagaaagtgtgaagatgcagttccagcaaatatttcaacatatttctgtaaatgaaaagcagatagaagaatgctgacaaattcaataaattggagggaatcatagtctgaatatagctgcaaggcaccaaagggaaaa

SEQ ID NO: 196564 - DNA, 355 bp, Homo sapiens
tatgtggtttgcaaatattttattccaccctgtagcttgccttttcattctcttaagtgtttttcacagagacaaggtttcaatttttgctgttcmatttatcagtttttccttttatgaatcagtgtatcaagtcaaggaaatctttgcttaactgtgattccttaagatattttcctaggttttttctaaagttatcataagtgttacattttacatttatgggcataatttatattcattttgggttaattttggataaggtgtaaaacaggttgaggggtgtgtgtgtgtgtgtgcacacacgcacgtgtgggtacttttggtctatggatgtccagttgttgcagcacca

SEQ ID NO: 196565 - DNA, 355 bp, Homo sapiens
tatgtggtttgcaaatattttattccaccctgtagcttgccttttcattctcttaagtgtttttcacagagacaaggtttcaatttttgctgttccatttatcagtttttccttttatgaatcagtgtatcaagtcaaggaaatctttgcttaactgtgattccttaagatattttcctaggttttttctaaagttatcataagtgttacattttacatttatgggcataatttatattcattttgggttaattttggataaggtgtaaaacaggttgaggggtgtgtgtgtgtgtgtgcacacaygcacgtgtgggtacttttggtctatggatgtccagttgttgcagcacca

SEQ ID NO: 196566 - DNA, 589 bp, Homo sapiens
tggtgtgaggagggagaagataaaagtgttattagccacatcatggactattgctgtaaataccaaagggcatcatatacttaagctgaagaactcttagagacataaacaatgaaccaaatctaaggcagacgtaagagcttcctgaaagggttttactgtacattttgtttcgtttgctacatttgatacctacacactcaatagggaggaaaaacaggtttcagaataagccaactgtttcagacttgaaggcctgtgggggcagttggtaatataaaagtaatatgctgcagggtaagataaagactactgaggcctacagctgaattggagagaaataccatgacttaaagacattcaaagccaattaaaaagaaaataaatgtgggtggcaaaccaaacatctggaacgtgcatttgccttttgagctgtcaatctaaatctttggaattaacctttgcctgggaaataaggaattagaacttaaaataagtctaaatagaataatatmaaaaggcaatgattccagaaagtctttttttccactccccaagtcatgccatagcatctctgaattttcttcct

SEQ ID NO: 196567 - DNA, 429 bp, Homo sapiens
tatttcttaaccataagcattctaaatcaacttgctttttcatccataaaagggcatgagctccttaaacacagggcttttgcttttcttgtcagtctcactagtctaggaagtgctgttctatattcagcagctcgtgggtgctgaataaatattgattaaacaaaccgagtaatgaatcatgtgtgctgcaagtgtgggtgcttggtaacgtggaaacatacaagtgagctggattctccaatctgcagggcagaaactggatgaaagacatttagaggtgggggtgggaagcttggagckgcccctctccttccatccctcaatgccttgggattggggtggtcattctatgaccacttcacattgactccgtggagattgactccacacaccccagaggagcctcacccactgctgaagggagag

SEQ ID NO: 196568 - DNA, 429 bp, Homo sapiens
tcacccctagaactgtggttttcatatgggtgatcagtgatcaccctcccggagacgtttagcaatgtttggagatgttcttggtcatcacaactggggagggattgccactggcattaaatggatagaagccaggaatttgctaaccatcctacacggtacaggatagccccccacagaaaagaattctcagaccccaaatgacaatagcgctgaggttgagaaaccctgctccgaaaaaggcaagcaaagccagatccaccatgtgaaatgaacattcttctaaaataagctacccaggaatattgccgcarccatttaacatacaaagtgggcccttcactttacatgaaagtcactgaagtgctctaacaatcagctctgatattcaactgtcagtagtttatagaactgtaaagttctatacat

SEQ ID NO: 196569 - DNA, 596 bp, Homo sapiens
taagcctcagtttcctcatctgttcaatgaatgaatattaatgagcatctaatattcacgtaaagtgctgggtccagtaccaaacacatggtaagaattcaacaaattctaattattactggaaaagagaaaatctaaggacttttaaacactgcttgttttctccccacttccccagtaagtagtttttgttgtagttgttgttgttgttgttgtttttaaayctccttactcttcttttcccggagacacatagtcttccctgagtgatgggggaatgggtgttgcatatgtctcctctgtgctttgaagttagctcccatggtaatgtgacacaagttctaaatccccttccctgttgtttttcatgagtaaacaaatttgaaataatataataatacctcacttaccctaaggtcactacttttgcaacatcaactattctgatcacagtcaattcctgaaaagggacagaaacaacttctccagaaccagaaaaggatgtcacgtgattccctctatgaagctaatgggagtggcttagtgaagaggtctttatatcctcatggttaacaccgttaccttatgcaggattc
